United States Patent Application Publication US 2019/0348154 A1 - sequence listing, part 70

SEQ ID NO: 263168 - DNA, 792 bp, Klebsiella pneumoniae
atgggccttatgaacgcatttgattcgcaaaccgaagattcttcacctgcaattggtcgcaacttgcgtagccgcccgctggcgcgtaaaaaactctccgaaatggtggaagaagagctggaacagatgatccgccgtcgtgaatttggcgaaggtgaacaattaccgtctgaacgcgaactgatggcgttctttaacgtcgggcgtccttcggtgcgcgaagcgctggcagcgttaaaacgcaaaggtctggtgcagataaacaacggcgaacgtgcccgcgtctcacgtccttctgcggacaccatcatcggcgagctttccggcatggcgaaagatttcctttctcatcctggcgggattgcccatttcgaacaattacgtctgttctttgaatccagcctggtgcgctatgcggctgaacacgccaccgatgagcaaatcgatttgctggcaaaagcactggaaatcaacagtcagtcgctggataacaacgcggcattcattcgctcagacgttgatttccaccgcgttctggcggagatccccggtaacccaatcttcatggcgatccacgttgccctgctcgactggctgatcgccgcacgtccaaccgtggctgatcaggctctgcacgagcataacaacgttagctatcaacagcatattgcgatcgttgacgcgatccggcgtcatgatcctgacgaagccgatcgtgcgttgcaatcgcatctcaacagcgtctctgctacctggcacgccttcggtcagaccaccaacaaaaagaaataa

SEQ ID NO: 263169 - DNA, 621 bp, Klebsiella pneumoniae; identical to SEQ ID NO: 35827

SEQ ID NO: 263170 - DNA, 1179 bp, Klebsiella pneumoniae; identical to SEQ ID NO: 35826

SEQ ID NO: 263171 - DNA, 216 bp, Klebsiella pneumoniae; identical to SEQ ID NO: 9461

SEQ ID NO: 263172 - DNA, 1371 bp, Klebsiella pneumoniae; identical to SEQ ID NO: 35823

SEQ ID NO: 263173 - DNA, 1467 bp, Klebsiella pneumoniae; identical to SEQ ID NO: 35822

SEQ ID NO: 263174 - DNA, 1578 bp, Klebsiella pneumoniae; identical to SEQ ID NO: 35821

SEQ ID NO: 263175 - DNA, 540 bp, Klebsiella pneumoniae; identical to SEQ ID NO: 35820

SEQ ID NO: 263176 - DNA, 516 bp, Klebsiella pneumoniae; identical to SEQ ID NO: 29567

SEQ ID NO: 263177 - DNA, 174 bp, Klebsiella pneumoniae; identical to SEQ ID NO: 28672

SEQ ID NO: 263178 - DNA, 549 bp, Klebsiella pneumoniae
atgaaaattaaaactctggcaatcgttgttctgtcggctctgtccctcagttccacagcggctctggccgctgccacgacggttaatggtgggaccgttcactttaaaggggaagttgttaacgccgcttgcgcagttgatgcaggctctgttgatcaaaccgttcagttaggacaggttcgtaccgcatcgctggcgcaggaaggagcaaccagttctgctgtcggttttaacattcagctgaatgattgcgataccaatgttgcatctaaagcagctgttgcctttttaggtacggcgattgatgcggctcataccaacgttctggctctgcagagttcggctgcgggtagcgcaacaaatgttggtgtgcagattctggacagaacaggtgttgcgctgacgctggacggtgcgacatttagttcagaaacaaccctgaataacggtactaacaccattccgttccaggcgcgttattttgcaaccggtgctgcaaccccgggtgctgctaatgcggatgcgaccttcaaggttcagtatcaataa

SEQ ID NO: 263179 - DNA, 498 bp, Klebsiella pneumoniae
atgtttgctctggccggaaataaatggaataccacgctgcccggcggaaatatgcaatttcagggcgtcattattgcggaagcttgccggattgaagccggtgataaacaaatgacggtcaatatggggcaaatcagcagtaaccggtttcatgcggtaggggaagatagctcaccggtgccttttgttattcatttacgggaatgtagcacggtggtgagtgaacgtgtgggtgtggcgtttcacggtgtcgcggatggtaaaaatccggatgtgctttccgtgggagaggggccagggatagccaccaatattggcgtagcgttgtttgatgatgaaggaaacctcgtaccgattaatcgtcctccagtaaactggaaacggctttactcaggctctacttcgctacatttcatcgccaaatatcgtgctaccgggcgtcgggttactggcggcatcgccaatgcccaggcctggttctctttaacctatcagtaa

SEQ ID NO: 263180 - DNA, 726 bp, Klebsiella pneumoniae; identical to SEQ ID NO: 1988

SEQ ID NO: 263181 - DNA, 2637 bp, Klebsiella pneumoniae
atgtcatatctgaatttaagactttaccagcgaaacacacagtgcttgcatattcgtaagcatcgtttggctggtttttttgtccgactctttgttgcctgtgcttttgccgcacaggcacctttgtcatctgccgaactctattttaacccgcgttttttagcggatgatccccaggctgtggctgatttatcgcgttttgaaaatgggcaagaattaccgccagggacgtatcgtgttgatatctatttgaataatggttatatggcaacgcgtgatgtcacatttaatacgggcgacagcgaacaagggattgttccctgcctgacacgcgcgcaacttgccagtatggggctgaatacggcttctgtctccggtatgaatctgctggcggatgatgcctgcgtgccattaacctcaatgatccatgacgctactgcgcaactggatgtgggtcagcagcgactcaacctgacgatccctcaggcatttatgagtaatcgcgcgcgtggttatattcctcctgagttatgggatcccggtattaatgccggattgctcaattataatttcagcggaaatagtgtacagaatcgaattgggggtaacagccattatgcatatttaaacctacagagtgggttaaatattggtgcgtggcgtttacgcgacaataccacctggagttataacagtagcgacagttcatcaggtagcaaaaataaatggcagcatatcaatacctggcttgagcgagacataattccgttacgttcccggctgacgctgggtgatggttatactcagggcgatattttcgatggtattaactttcgcggcgcacaattggcctcagatgacaatatgttacccgatagccaaagaggatttgccccggtgatccacggtattgctcgtggtactgcacaggtcactattaaacaaaatgggtatgacatttataatagtacggtgccaccggggccttttaccatcaacgatatctatgccgcaggtaatagtggtgacttgcaggtaacgattaaagaggctgacggcagtacgcagatttttaccgtaccctattcgtcagtcccgcttttgcagcgtgaagggcatacacgttattccattacggcaggagaataccgtagtggaaatgcacaacaggaaaaaccccgctttttccagagtacattactccacggccttccggctggctggacaatatatggtggaacgcaactggcggatcgttatcgtgcgtttaatttcggtatcgggaaaaatatgggggcactgggcgctctgtctgtggatatgacgcaggctaattccacacttcccgatgacagtcagcatgacggacaatcggtgcgttttctttataacaaatcgctcaatgagtcaggtacgaatattcagttagtgggttaccgttattcgaccagtgggtattttaatttcgctgatacaacatacagtcgaatgaatggctacaacatcgaaacacaggatggagttattcaggttaagccgaaattcaccgactattacaatctcgcttataacaaacgcgggaaattacaactcaccgttactcagcaactcgggcgcacatcaacactgtatttgagtggtagccatcaaacttattggggaacgagtaatgtcgatgagcaattccaggctggattaaatactgcgttcgaagatattaactggacgctcagctatagcctgacgaaaaacgcctggcaaaaaggacgggatcagatgttagctcttaacgtcaatatacctttcagccattggctgcgttctgacagtaaatctcagtggcgacatgccagtgccagctacagcatgtcacacgatctcaacggtcggatgaccaatctggccggtgtatacggtacgttgctggaagacaacaacctcagctatagcgtgcaaaccggttatgccgggggaggcgatggaaatagcggaagtacaggctacgccacgctgaattatcgcggtggttacggcaatgccaatatcggttacagccatagcgatgatattaagcagctctattacggagtcagcggtggggtactggctcatgccaatggcgtaacgctggggcagccgttaaacgatacggtggtgcttgttaaagcgcctggcgcaaaagatgcaaaagtcgaaaaccagacaggagtgcgtaccgactggcggggttatgccgtgctgccttatgccactgaatatcgggaaaacagagtggcgctggataccaataccctggctgataacgtcgatttagataatgcggtcgctaacgttgttcccacccgtggggcgatcgtgcgagcagagtttaaagcgcgcgttgggataaaactgctcatgacgctaacccacaataataagccgctgccgtttggggcgatggtgacatcagagagtagccagagtagcggcattgttgcggataatggtcaggtttacctcagcggaatgcctttagcgggaaaagtgcaggtgaaatggggagaagaggaaaatgctcactgtgtcgccaattatcaactgccaccagagagtcagcagcagttattaacccagctatcagctgaatgtcgttaa

SEQ ID NO: 263182 - DNA, 531 bp, Klebsiella pneumoniae; identical to SEQ ID NO: 1990

SEQ ID NO: 263183 - DNA, 504 bp, Klebsiella pneumoniae; identical to SEQ ID NO: 1991

SEQ ID NO: 263184 - DNA, 903 bp, Klebsiella pneumoniae; identical to SEQ ID NO: 1992

SEQ ID NO: 263185 - DNA, 1461 bp, Klebsiella pneumoniae
atgactactattgttgacagcaatctgccggttgcccgcccgtcatgggatcattctcgtctggaatcacgcattgtgcatctcggttgcggggcgtttcaccgcgcgcaccaggcgctgtatacccatcatctgctggaaagtaccgacagcgactggggtatctgcgaagttaacctgatgccaggcaacgaccgcgtgctgatcgaaaacctgaaaaaacagcaactgctgtacaccgtggcggaaaaaggcgcggaaagcaccgagctgaaaattatcggttcgatgaaagaagcgctgcatccggaaatcgacggttgcgaaggtattctcaacgcgatggcgcgtccgcagacggcgattgtctctctgacggtcacggaaaaaggctactgcgctgatgcggcaagcggtcagctggatctcaataacccgctgatcaagcacgatctcgaaaacccgactgcgccgaagtctgcgattggttacatcgtagaagccctgcgtctgcgtcgtgaaaaagggctgaaagcgtttacggtgatgtcctgcgacaacgtgcgtgaaaacggtcatgtggcgaaggttgccgttcttgggctggctcaggcgcgtgacccgcaactggcggcatggattgaagaaaacgtcaccttcccgtgcaccatggttgaccgcatcgttccggcggcgacgccagaaaccttacaggaaattgctgaccagctgggtgtttacgacccgtgcgccattgcctgcgaaccgttccgtcagtgggtaattgaagataacttcgttaatggtcgtccggactgggataaagtcggcgcgcagtttgttgcggatgttgtaccgttcgaaatgatgaagctgcgtatgctgaacggtagccactctttcctggcgtacctcggttacctcggcggctatgaaactattgccgacaccatgactaacccggcttatcgcaaagcggcctttgccctgatgatgcaggaacaagcgccaacgctgtcgatgccggaaggtacggacctgaacgcctatgcgacgctgctgatcgagcgtttcagcaacccgtctctgcgtcaccgcacctggcagattgcgatggacggcagccagaagttaccgcagcgtctgctggaccctgtgcgtctgcacctgcaaaacggcggcagctggcgtcacctggcgctgggcgtggcgggctggatgcgctacacccagggcgtggatgagcagggtaatgccattgacgtggttgacccgatgctggcggagttccagaagatcaacgcgcagtatcagggtgcagaccgcgtgaaagcactgctgggcctgagcggtatctttgccgatgatctgccgcagaacgccgactttgttggcgcggtgacggcggcatatcagcagctgtgtgagcgcggtgcgcgcgagtgtgtggctgcgctgtaa

SEQ ID NO: 263186 - DNA, 726 bp, Klebsiella pneumoniae
atgatccgcgatctgatcataaagacgccgtacaatcctggcgaacggctgccgccggagcgtgaaatcgcagaaatgctcgatgtgacgcggactgtggtgcgtgaggcgttgatcatgctggagatcaaagggctggtggaagtgcgtcggggtgcaggtatctatgttcttgatagctcaggcagccacaacgcagacagtccggatgccaacgtctgcaacgatgccggtccttttgagctgttacaggcgcggcagttactggaaagtaacatcgccgagtttgccgccctgcaggctacccgcgaagatatcgtcaaaatgcgccaggcattgcaactggaagagcgtgaactggcttccagcgcgccgggcagcagcgaaagcggtgacatgcagttccatctcgccattgccgaagcaacgcataacagcatgctggtggagttattccgtcagtcctggcagtggcgggaaaacaatccaatgtggatccagttgcacagccatctggatgacagcctgtatcgcaaagagtggttgggcgatcacaaacagatcctcgccgcgttaatcaaaaaagatgcccgagcggcgaagctggcaatgtggcagcatctggagaatgtgaagcagcgcttgctggagttctctaatgttgatgacatctatttcgatggctatctgtttgattcatggccgctggataaagtcgacgcctga

SEQ ID NO: 263187 - DNA, 621 bp, Klebsiella pneumoniae
atgaccacatttaccaataaagaactgattaaagaaatcaaagaacgaatcagcagcctagaggttcgagacgatattgagcgccgtgcttatgaaattgctctggcatcgctggaagaggagccggtggcatggctgcattcagacaatggcttaggtattccggcaataaccaggagcaaaaacattgctgacagttggttatcaaagggctggtatgttcagtcgctatatatagccaagccagtactggtggtgccagatgctcgtccgtctttaaataatggcatagtcggttttgatgaaggctggaacgcctgccgcgccaccatgcctcatggtgccaaacctgtaagccagacttacaagttgaacaagctgtcgggcaactctccggtaactccggatggttggataagctgtagtgagcgaatgccgaacgataaacagtatgtttggtgttggggtaagtcttacggctggactgagtgcgataccttcgaagggtattacgattgttcgagaaacaaatggtgggcagttactgacaatggggaagaaccggcatcgaaagtaacccactggatgccgctaccggagtcgccgcaggaggtgaagtaa

SEQ ID NO: 263188 - DNA, 648 bp, Klebsiella pneumoniae; identical to SEQ ID NO: 18150

SEQ ID NO: 263189 - DNA, 261 bp, Klebsiella pneumoniae; identical to SEQ ID NO: 18149

SEQ ID NO: 263190 - DNA, 558 bp, Klebsiella pneumoniae
gtgggtaatcatcactggaaagtggaaaaacagcctgagtggtacgtgaaagctgtcagaaaaactatcgcggcgttgccggggggttacgctgaagctgctgagtggctggatgtaacagagaacgcattatttaaccgccttcgtgccgatggcgatcagattttcccgctgggatgggcaatgattttacaacgtgctggtggcactcacttcattgccgacgctgtggcgcagtctgcaaatggcgtctttgtgtctcttcctgacgtcgaggatgtggacaatgccgatattaaccagcgtttactggaagtcattgaacagatcggcagttattcaaaacagattcgttcggcaatcgaagacggtgtagtggaaccgcatgagaagacagcaattaacgacgagctgtacctctcaatttcgaagctgcaggagcatgcagcacttgtctacaaaattttttgcgtttcagaaagtaatgacgcccgcgagtgtgcagctccgggcgtcgtggcgtcgattgcttctggttgtggagaaactaacgcatga

SEQ ID NO: 263191 - DNA, 339 bp, Klebsiella pneumoniae
atgaacagtttaacaacacactaccgtcgctcgcaactgattgcgcttcctgtaccgggtggaaaagcgaaggtggagtattgctatgcagtaaatgtaccaggtgacagggaaattgtaacccacagctttgctgagtgggctgtgggggatttcaaccggcagaaggagacagtcctttgcgacaagttaaccgctggttcaaagatcactacggagtgcccgtcagagtcattcgttgggagccggaaacacaacgggttatctacctccgtgaaggctatgagcatgagtgcttcagcccgctcgaacagtttcgtcgtaaattcagggaaatag

SEQ ID NO: 263192 - DNA, 588 bp, Klebsiella pneumoniae
  misc_feature (532)..(541): n is a, c, g, or t
atgagcactaaattaaccggctatgtatgggatggttgcgctgcgtcaggcatgaaattatccagcgtggcaattatggcccgcctggctgatttcagtaatgacgaaggtgtgtgctggccatcaattgaaactattgcccgtcagattggcgcggggatgagtaccgtcagaacggctatcgcacggctggaagcagaaggctggttaacgcgtaaggcgcgtcgccagggtaaccgcaatgcgtcgaatgtttatcagcttaacgttgcgaagcttcaggcagcggcattttctcaactgtcagattctgacccgtcaaaatctgacgcatcaaaatctgacgcatcaaaatctgacacgtcaaaatttgatgcgtcgaaatttgatgcgtcgaaatctggcaaaaaagcgggttttcacccgtcagaatctggcggggatccgtcagtaaaatcaaaacatgatccgtcagataaaaaaccttctcgtccggacgcttcgcaaccggacacgcagacggctgaacaannnnnnnnnnaacccttctcgtccggacgcttcgcaaccggacacgcagacggctga

SEQ ID NO: 263193 - DNA, 798 bp, Klebsiella pneumoniae
atgaataatctgatggtcattgatggtattgaagttcgtcgtgatgcttatgggcgttacagcctgaacgatctgcacagggctgccggttctctggataagcataagcctgcattctggctccgcaatgagcaaactgaacgtttaataagcgagttgcagatttgcaactcggtcaatatagagccagttaacgttattcgtggcggaaataaccaggggacgtatgtctgcaaagaactggtgtatgcctatgcaatgtggatcagcccggcattccatctgaaggtgatccgtactttcgatatggtaaccagcgcaccggaaaaattatccgggcaggctgctgacaagatgcaggctggtgtgattctgctggactttatgcgccgggagttaaacctgtctaactcttcagtgcttggtgcctgtcagaaactccaggaggctgttggcttaccgaatctggcaccgcgctatgccattgatgctcctgctgacgcgcctgatggctcaagtcgccctacgctgtcgctgagtgcactgctgaaacagtatggtatccgcctgacggctaatcaggcatatcaccagatggcgaagctggggatcgttgaacaacgcgaacgatacagccgtaccgcgattaacaacatcaaaaaattctggtcgctgacagcgaaaggctgcatgttcggcaagaacatcaccagtcccgtaaatccgcgcgagacgcagccgcatttcttcgaatcccgattccctgagctgttaaagctgctcgataccgttcattga

SEQ ID NO: 263194 - DNA, 360 bp, Klebsiella pneumoniae
atgcgtgatatgtatgaagttttggaccgctggggggcatgggctgctgcagaaaacagtggtgtggactggcaaccggtagctgctggcttcaagcggcttttacctcatggcagaaagtcccggattcagtgcgatgatgatgagggcatcataatagacggttgtgtcgctaggttgcgtaaatacaagccggcagagtatgagctgataattgctcactttgttgttggcatttcgctccgtacaattgcaaagaagcggaaatgttcagacggaacagttcgaaaagatatgcaaacagctatggggtttattgatgggtgcttgtcattttttttatttaatacaatgagttaa

SEQ ID NO: 263195 - DNA, 1041 bp, Klebsiella pneumoniae
gtgaacattcaagcagtagacattttttgtggcgcagggggcttaacttttgggctaaaaaaagccgggattgaagtttctcatggcattgatattgatgagtcctgccgtttcgctattgagagcaataatcccttaacgaagttcattaaccagtcagttactgaactgcaatccagcgatgtgtctgctatgttcaaggaaggaaatattagattacttgcaggctgtgccccttgccaaccgttttccaagtatcgtaatccaaatagcagaaaagatgatacaaagtggcgtcttttatctgagtttcagaggattgtaagtgatgtcatgccagagcttgtgactatggaaaatgttcctcaacttagaaatcataaggtttttgaagagtttgttagtgtattaaagactcttgggtatcatctgtggtacgacgttgtaaaatgttccgagtatggcttgcctcaaaatagacgtagattaattctaattgggtccatattggggccaatcagccttgatcaaaaaaaagtaagccgtaaagttacagtaaaggatgctattggtcagttgccaaaaataggtgcaggggagaaactcgaaagtgatccattgcatcgttcgcctaaattaagggatattaaccttaaacgaatcttgcactctttaccaggtggtacgtgggatgattggcctgaagaaattagagcggattgccataaaaagcattcaggtgctacctataaaagtgtttatggacggatggtttgggacgatactagtcctacaataactacccaatgttatggatatggtaatgggcgattcggacatcctgagcaaaatagagcaataactttgcgtgaagctgctattttacaatcttttcctatggattataaatttattggaaaaaatacgcctttttcattccaaaagttaggaacgatgattggtaatgctgttccccctataattggccaagtaatagggagaacgtttgttaggcatgttgaggggataaatatccgttag

SEQ ID NO: 263196 - DNA, 690 bp, Klebsiella pneumoniae
atgagtctaattgatttacgagatgaatatgaagaaagagcaagagacattatggaactgctttctcttgcatcatctatagagattcatactcagcagttagatccgcaagcgcatcaagatgaaatagaatctaatatcctaagggtaaatattttaaaatcatccgttcatatgatgctatataatcaagttgaaaatactgccagaggttgcatcgagtcaatttatgatcatttacaagataatgaggtgaattacgcatcactcagggagaagcttcaagtaaatatattgcatagaattgtttcagataatgaaacagggcaatccctttataaaaagataggcactgacatttccaaaagaataatttcagcctcattgaatattcgtaaagaattcaatggtaatgtttgcaagcctgtattacacaaaataacgcaggcttacggaataactatcgcaaactcacctgaatgtagaaatggtattgacttagacttgcttaaggatatcagaaacgaactcgcgcatggaagtactagcttctctaaaaaggggcaaattgaccccttagaagaagttaagtctagagcagagagagttgatctatatcttcgtttattaataaactcaactgaagattatattatctctaacggatatttatcccctcaacatgcctaa

SEQ ID NO: 263197 - DNA, 762 bp, Klebsiella pneumoniae
atggtttcatcattcacatctgccccacgcagcggtttttactattttgcgcaaggctggaagctcgtctcgcaacctgggattcggcgtttcgttattttaccgctgctggtcaatattttgttgatggggggcgcattctggtggctctttacgcaactcgatgtctggatcccgactctcatgagttatgttccggactggttacaatggctgagctatcttttgtggcctctggcagtcatctccgtgctgttagtgtttggctatttcttctcaacgattgctaactggattgccgctccgtttaacggtttattggctgaacaactggaagcacgattgactggcgctacaccgccagataccgggattttcggtatcatgaaagatgtgccgcgaatcatgaaacgcgaatggcaaaaatttgcctggtatctgccgcgcgcaattgtattgctaattctttacttcatccctggtattgggcaaaccgtcgcgccggtactgtggttcctgtttagcgcctggatgttagccatccagtattgcgattaccccttcgataaccacaaagtgccgtttaaagagatgcgcaccgccctgcgcacacgcaaaatcaccaatatgcagtttggtgctttaaccagcctgtttacgatgatccctctgcttaatctgttcatcatgcccgttgccgtttgtggtgcgacggcgatgtgggtcgattgctatcgcgataaacacgcgatgtggcggtaa

SEQ ID NO: 263198 - DNA, 999 bp, Klebsiella pneumoniae
atgatgcaggatttgcgtctgatattaatcattgttggcgcgatcgccataatcgctttactggtacatggtttctggaccagccgtaaagaacgatcttctatgttccgcgatcggccattaaaacgaatgaagtcaaaacgtgacgacgattcttatgacgaggatgtcgaagatgatgagggcgttggtgaggttcgtgttcaccgcgtgaatcatgccccggctaacgcccaggagcatgaggctgctcgtccgtcgccgcaacaccagtaccaaccgccttatgcgtctgcgcagccgcgtcaaccggtccagcagccgcctgaagcgcaggtaccgccgcaacatgctccgcgtccagcgcagccggtgcagcaacccgtgcagcagcctgcctatcagccgcagcctgaacaaccgttgcagcagccagtttcgccacaggtcgcatcagcgccgcagccagtgcattcagcaccgcaaccggcacaacaggctttccagcctgcagagcctgtagcggcaccacagcctgagcctgtagcggaaccggctccagttatggataaaccgaagcgcaaagaagcggtgattatcatgaacgtcgcggcgcatcacggtagcgagctaaacggtgaactgcttcttaacagcattcaacaagcgggcttcatttttggcgatatgaatatttaccatcgtcatcttagcccggatggcagcggcccggcgttatttagcctggcgaatatggtgaaaccgggaacctttgatcctgaaatgaaggatttcactactccgggtgtcactatctttatgcaggtaccgtcttacggtgacgagctgcagaacttcaagctgatgctgcaatctgcgcagcatattgccgatgaagtgggcggtgtagtgcttgacgatcagcgccgtatgatgactccgcagaaattgcgcgagtaccaggacatcatccgcgaagtcaaagacgccaacgcctga

SEQ ID NO: 263199 - DNA, 2016 bp, Klebsiella pneumoniae
atggaatcaatcgaacaacaactgacagaactgcgaacgacgcttcgccatcatgaatatctttatcatgtgatggatgcgccggaaattcccgacgctgaatacgacaggctgatgcgcgaactgcgcgagctggaaaccaaacatccagaactgattacgcctgattcgcctacccaacgtgtaggtgctgcgccgctggcggctttcagccagatccgccatgaagtgccaatgctgtcgctggataacgtttttgatgaagaaagctttcttgctttcaacaaacgtgtgcaggaccgtctgaaaagcaacgagaaagtcacctggtgctgtgagctgaagctggatggtcttgccgtcagtattctgtatgaaaatggcgttttagtcagtgccgcgacgcgtggcgatggcactaccggggaagatattacgtctaatgtgcgtactattcgcgccattccgctgaagctacacggagagaatatcccggcgcgtctggaagtgcgtggtgaagtgttcctgccgcaggcggggttcgaaaagattaacgaagatgcgcgacgcacgggcgggaaagtgtttgctaacccacgtaatgcggctgctggttcactgcgtcagcttgatccgcgtattacagcgaagcgaccgctcacttttttctgctatggcgtcggtattctggaaggtggcgagctgccgaatactcatcttggccgtttactgcaatttaaaaagtggggtttgccggtcagcgaccgggtaacactttgtgaatcggcggaagaagtgctggcgttctatcacaaagtggaagaagaccgcccgacgctgggctttgatatcgacggcgtggtgattaaggtcaactcactgacacagcaggagcagcttggctttgtcgcgcgtgccccgcgctgggcggtagcgtttaaattcccggcgcaggaacagatgacctttgtgcgtgacgtcgagtttcaggttgggcgtactggcgcgattacgcctgttgcgcgtctggaacctgtccatgttgcaggcgtgctggtgagtaacgcaaccttacacaatgcggatgaaatcgaacgtcttggtttacgcattggcgataaagtggtgattcgccgcgctggcgacgtgatcccgcaggtggttaacgtcgtgctttctgaacgcccggaagatacccgtgaggttgtattcccgacgcattgtccggtatgtggttctgacgttgagcgtgtggaaggtgaagcggttgcccgctgtaccggtggcctgatttgcggtgcgcagcgtaaagagtcgctgaaacactttgtttcccgccgtgcgatggacgttgacggtatgggcgacaaaatcatcgatcagctggttgaaaaagaatatgtccacactccggcggatctgttcaaactcaccgcaggcaaacttaccggactggagcgtatggggccaaaatcggcacaaaacgtggttaatgcgctggaaaaagcgaaagaaaccacctttgctcgcttcctctatgcacttggcatccgtgaagtcggcgaggccaccgcagcaggtctggcggcatatttcggcacgctggaagcgctggaagccgcttcgattgaagagctgcaaaaggtgcctgatgttggcattgtcgttgcatcccacgttcacaacttctttgccgaagaaagcaaccgcaatgtcatcagcgagctgttggcggaaggcgttcactggcctgcgccggtggtgattaacgcggaagagattgacagcccgtttgctggtaaaaccgtggtgcttacgggcagcttaagccagatgtcacgtgatgacgctaaagctcgactggtcgaactgggcgcgaaagtcgcgggcagcgtgtcgaagaaaaccgatctggtgatagctggagaagcggcaggttctaaactggcgaaagcgcaggaactgggcatagaagttatcgacgaagcggaaatgctgcgtttgctgggtagctga

SEQ ID NO: 263200 - DNA, 219 bp, Klebsiella pneumoniae
atggaaaaagagcagctgattgaaatagccaatacgataatgccgtttggcaaatacaaagggcgtcgcttaatcgacctgccggaggagtatcttctgtggtttgcccgcaaagatgagttcccagcagggaagctcggtgagctaatgcaaatcacgctgctgattaaaactgaggggctgacgcaactggtccagcccctgaagcgtcctctttaa

SEQ ID NO: 263201 - DNA, 999 bp, Klebsiella pneumoniae
atgaaactttttcgtatcctcgatcctttcaccttaaccctgatcacggtggtgttgctggcctctttctttccggccagaggcgatttcgtccccttctttgaaaatctgaccaccgcagctattgccctgctgttctttatgcacggcgcgaagttgtcgcgtgaagcgattattgctggcggtggtcactggcgactgcatttgtgggtaatgtgcagcacctttgtactgtttccgattctgggcgtgctgtttgcctggtggaaaccggtaaatgtcgacccgatgctctactccggttttctctacttgtgcattctccccgctactgtgcagtctgcaatcgcctttacttcaatggcgggcggtaacgtcgcggcagcggtttgttctgcgtcagcatccagcctgttggggattttcctttcaccattgctggttggtctggtgatgaatgttcacggtgcgggaggcagccttgagcaggtcggtaaaattatgctgcaactgctgctgccgtttgtgttggggcatctttcccggccgtggattggtgactgggtgtcgcgcaataaaaaatggattgcgaaaactgaccagacgtccattctgttggtggtttatacagcgtttagcgaagccgtcgttaatggtatctggcataaagttggctggggatcattgctgtttatcgtggtggtcagctgcgttcttctggctatcgtgattgtagttaacgtctttatggcacgccgactgggcttcaataaggcagatgaaattactatcgtcttttgtggttcgaaaaagagtctggcaaatggcatcccgatggcaaacattcttttccccacatcggtgatcggtatgatggtgctgcctctgatgattttccatcagatccaattgatggtctgtgcggtgctggcgcgtcgatacaaacaccagaccgaacagttacaggcgcagcaggaaagccgcgccaataaagcttaa

SEQ ID NO: 263202 - DNA, 927 bp, Klebsiella pneumoniae
atgaattattctttaaagcaattaaaggttttcgtcacagtagcgcaggagaaaagttttagtcgtgcaggagagcgtatcggcctgagtcagtcggcagtaagtcacagtgtgaaggagctggaaaatcatactggtgttcgcctgctggacagaaccacgcgtgaagtggtgcttacagatgcagggcagcagttggctttgcgtcttgagcgactgctggatgaacttaacagcacgttgcgcgataccgggcgtatggggcaacaactgagcggaaaagttcgggtcgctgccagccagaccatttccgcgcatcttattccgcaatgcattgctgaaagccatcgccgctatccagatattcagtttatcctgcacgatcgtccgcagcagtgggtgatggaaagtattcgccagggagatgtcgattttggcatcgtcatcgatccaggcccagtgggcgatctgcaatgtgaagcgattctttccgagcctttcttcttgctttgccatcgcgatagcgctttggccgcggaagattatgtaccctggcaggcattacagggagcgaaattggtgttgcaggattacgcgtcaggcagccgaccgctgattgacgcagctctggcgcgcaacggtattcaggcgaatattgtgcaggagattggtcatccggcgacgctgttcccgatggtagccgcaggcatcggcatcagtattcttcccgctctggcgctaccattgcctgaaggtagcccgctggtggtaaagcgcattacgccggtggtggaacgccagttgatgctggtgcgcaggaagaaccgttcactttccaccgccgcacaagcgttatgggacgtggtacgaggccagggccgtgcgctaatggctgggcgggaaggggatccgctgtatcagatatag

SEQ ID NO: 263203 - DNA, 765 bp, Klebsiella pneumoniae
atgaaaaaacatctttttactctgacactctcttctgtattggcgataccagcagtaacccatgcagaatttaaaggcggttttgctgatataggtattcattatcttgactggactagcagaaccactgagaaatcgtcgaccaaatcacacaaagatgattttggatatctggaactggaaggcggcgctaactttagttggggagaaatgtacgggttcttcgactgggaaaacttttataatgatcgtcatgataaaccgggtagcgagcagcgttatacatttaaaaataccaaccgtatttacctgggtgacaccggatttaatctctacttgcatgcgtatggcacctacggttctgcgaatcgtgtgaatttccatgacgatatgttcctttacgggatcggctacaatttcaccggcagcggttggtggttcaaaccgttctttgcaaaacgctatacagaccaaacctattataccggcgataacggttatgtcgccggttgggttgcaggttacagctttatgctgggcagtgagaaattcaccctcaccaactggaacgagtacgagtttgatcgtgatgccacctacgcggcaggtaatggcggcaaagaaggtctgaacggtgccgtcgcactttggtggaatgcaacttcatacatcaccacagggattcagtatcgttatgcggatgacaaactgggcgaagatttttaccaggatgcgataatctactccatcaaatttaatttctga

SEQ ID NO: 263204 - DNA, 834 bp, Klebsiella pneumoniae
atgtctcaggctcggttttctcataacccactgtattgcgtagatattatcaagacttataaacctgatttcacgccacgagtggcctttattttaggttccgggctgggcgcgctggccgatcagattgagaacgcggtcgcaatttcctacgaaaagctgccgggcttcccggtaagtacggtacatggtcatgcgggggagttagtgctgggccatctccagggcgtaccggtggtatgtatgaaaggtcgcggacatttctacgaaggtcgtggaatgaccattatgactgacgcaattcgtacctttaagttgctgggctgcgagctactgttctgcaccaatgcggcaggctcgctgcgtccggaagtgggggcaggcagcctggtcgcattgaaagatcatatcaacaccatgccaggtacgccgatggtgggacttaacgatgatcgttttggagagcgtttcttctcactggcaaatgcctatgatgcggattaccgggcgctgttgcaaaaagtggcgaaagaagagggattccccctgacggaaggtgtgtttgtttcgtatccggggccgaatttcgaaacggcggctgaaattcgcatgatgcaaattattggcggggatgtcgttggaatgtccgttgtgcctgaagttatttcagcacgccattgtgacctgaaggtagtggccgtttctgcgattaccaatatggcagaaggcctgagtgacgtgaagctctcgcatacccaaacgctggcagcagcggagctttctaagcagaactttatcaacctaatttgcgggtttctgcgcaaaattgcctga

SEQ ID NO: 263205 - DNA, 1257 bp, Klebsiella pneumoniae
atgagcatcgctttgcgcttaaaggtaatgtcctttttgcaatattttatctgggggagctggctggttaccctcggttcttacatgattaataccctccattttaccggcgctaatgtcggcatggtttacagctccaaaggtattgccgcgattattatgcctggcattatggggatcatcgcggacaaatggctgcgcgctgaacgagcatatatgctgtgccatctggtgtgcgcgggcgtacttttttatgcggcgtcggtgagtgatccggatacgatgttttgggtgatgttaatcaatgcgatggcatttatgccgactatcgcattatcgaacagtgtctcttactcttgcctggcccaggcagggcttgatccggtgacggctttcccacccattcgcgtttttggtacggtgggattcattgtcgcgatgtgggcggtaagcttactgcatttggaattgagcagcctgcagctgtatgttgcgtccggtgcgtcattgttgctgtcggcttatgcgctgactttgcctaagattccggttgcggagaaaaaatcggccacgtcgcttgccagcaagctgggtctggatgccttcgtgctgtttaaaaatccacgcatggccatctttttcctctttgccatgatgctgggtgcggtactgcaaattaccaacgtttttggtaatccgttcctgcatgatttcgcccgtaacccggagtttgctgatagcttcgtggtgaaatatccctccattttactgtcagtttcacagatggctgaagtcggtttcattttgacgattccgttctttttgaagcgttttggcatcaaaaccgtcatgatgatgagtatggtggcctggacgctgcgctttggtttcttcgcttatggagatccgtcaccaaccgggtttattttgctgctgctgtcgatgattgtttatggctgtgcattcgatttcttcaatatttctggttcggtatttgtcgaacaggaagttgattccagcattcgtgccagcgcgcaggggctctttatgaccatggtaaatggtgtcggcgcatgggttggctcgattctgagtggcatggcagttgattacttttcggtggatggcgtaaaagactggcaaactatctggctggtgtttgcaggatatgctctttttctcgcagtgatatttttctttgggtttaaatataatcatgaccctgaaaagataacgcatcgttcagttacacattaa

SEQ ID NO: 263206 - DNA, 885 bp, Klebsiella pneumoniae
atggaacgcgtatatagaacagatcttaagttgctccgttattttcttgccgtagcggaagagttgcattttggtcgcgcagcagcgcgtttaaatatgtctcagcctccgctcagtattcatattaaagagctggaaaatcaacttggcacgcagctttttattcgccattcgcgcagcgtcgtactgacacacgcgggcaaaatcttgatggaagaatcgcgtcgattgctggtgaatgcaaataatgtattggctcgggttgaacaaataggtcggggagaagcagggcggattgaactcggggttgtgggaacggcaatgtggggacggatgcgcccggttatgcggcgattcctcagggaaaatcctaacgttgacgttctttttcgcgaaaagatgcccgcgatgcaaatggccctgctggaacggcgtgaactcgatgccggaatctggagaatggcgacagaaccaccggctggttttaccagcttacggttgcatgaatcggcgtttctggtggcgatgcctgaagagcatcatctctcatcattttccaccgttccgctggaagcgctaggtgacgagtattttgttacaatgccgcccgtgtacactgactgggattttttgcagcgagtttgccagcaggtgggattttcaccggttgttattcgcgaagttaatgaaccgcaaacggtactcgccatggtcagtatgggtattggtatcacattgatagcggacagctacgcgcagatgaactggcccggtgtcatattccgtccgctcaaagaacgcatcccggcagacttatatattgtttatgaaacgcagcaggtgacgcccgcgctggttaaactgctggcggcgttggcgcagtag

SEQ ID NO: 263207 - DNA, 807 bp, Klebsiella pneumoniae
atgactttacttaacgtctgcgacctttcacatcactatgcgcacggtggatttagcggaaaacatcagcatcaggcggtactgaataacgtttccctgaccctgaaaagcggtgaaaccgtcgccctgctgggacgcagcggctgcggaaaaagcaccctcgcgcggctgctggtaggcttagagtctccctcacaagggaatattagctggcgcggcgaatcgctggcgaaacttaatcgcgcccaacgtaaagccttccgccgtgatattcagatggtgtttcaggactccatcagtgccgtgaatccgcgcaaaaccgtgcgcgagatcctgcgtgaaccgatgcgccacctgctatcgctgaaaaaagccgaacaactggcgcgcgccagcgaaatgctgaaggcggtcgatctcgatgacagcgtgctcgacaagctcccaccgcagttaagcggcggccagctccagcgcgtctgcctggcacgcgcgttggcggtcgaaccgaaactgctgattctggatgaagccgtttctaaccttgatctcgtgttacaggcgggcgtcattcgcctgctgaaaaagctacaacaacagtttggcactgcctgcctgttcatcactcatgacttacgcctggtggaacgcttttgccagcgagtgatggtgatggacaacgggcaaatcgtcgaaacccaggtggtgggagataaattaaccttttcctctgacgccggacgtgtgctacaaaacgcggtattacccgcataccccgtgcgccgtcgcgccacagaaaaggtttaa

SEQ ID NO: 263208 - DNA, 765 bp, Klebsiella pneumoniae
atgccgcaacagattgaactgcgcgatatcgcgctacaggccgcgcagccgctggtgcacggcgtatcgttaacccttaaacgcgggcgtgtgctggcgttagtcggcggtagcggcagcgggaaatcactgacctgcgccgcgacgctgggcattctgcccgcaggcgttcgccagacggcgggggaaattttagccgatggcaaaccggtttctccctgtgccctgcgcggcatcaaaattgccaccatcatgcagaacccgcgcagcgcctttaatccgctacacaccatgcacacccacgcgcgtgaaacctgcctggcgctggggaaacccgccgatgacgctacgcttaccgctgccatagaagcggtggggttggaaaacgccgcgcgcgtgttgaagctgtacccgttcgagatgagcggcggcatgttgcagcgcatgatgattgcgatggcggtgttgtgtgaatcgccgtttatcatcgccgatgaaccgaccaccgacctcgacgtggtagcacaggcgcgcatcctcgatctgctggaaagcattatgcaaaaacaagcaccgggaatgctgctggtcacccatgatatgggcgttgtggcgcgtctggcggatgacgtggcggtgatgtcacacggtaaaattgtcgaacagggcgatgtagaaacgctgtttaacgcccccaaacatacggtgacgcgcagcctggtttccgctcatctcgccctctacggtatggagctggcatcatga

SEQ ID NO: 263209 - DNA, 834 bp, Klebsiella pneumoniae
gtgaactttttcctctcttcccgctggtcggtacgcctggcgctgatcattatcgccctgctggcgctgattgcgctcaccagccagtggtggctgccgtatgacccccaggcgattgatctgccgtcgcgcctgctttcaccggatgcgcagcactggctgggtaccgatcatttagggcgcgatattttctcgcggctgatggcggcgacccgcgtgtcgctcggctcggtaatggcctgcctgctgctggtgctgacattagggctagttattggcggcagcgccgggctgattggcgggcgcgttgatcaggccaccatgcgcgtcgcggatatgtttatgaccttcccgacgtcgattctgtcgttctttatggtcggcgtactcggcaccgggttgaccaacgtgattatcgccatcgccctgtcgcactgggcgtggtatgcgcgcatggtgcgcagcctggtgatttcgctacgccagcgcgagtttgtgctggcgtcacggctttccggcgcgggccatgtgcgggtgtttgtcgatcatctggcaggcgcggtgatcccctcgctgctggtgctggcgacgctggatattggtcatatgatgctccacgtcgcggggatgtccttcctcggcctcggcgtgaccgcgccgaccgccgaatggggcgtgatgattaacgacgcgcgtcagtatatctggacccagccgctgcaaatgttctggccggggctggcgctgtttatcagcgtgatggcctttaacctggtgggtgacgcactgcgcgatcatctggatcctcatctggtgacggagcacgcacactga

SEQ ID NO: 263210 - DNA, 1575 bp, Klebsiella pneumoniae
atgctctccacactccgccgcactctatttgcgctgctggcttgtgcgtcttttatcgtccatgccgctgcaccagatgaaatcaccaccgcctggccggtgaatgtcgggccactaaacccgcacctttacacgcctaaccagatgttcgcccagagcatggtttatgaaccattggtgaaatatcaggcagacggttcggtgatcccgtggctggcaaaaagctggactcattctgaagatggtaaaacctggaccttcaccctgcgtgatgacgtgaaattctccaacggcgaaccgtttgatgcagaggcggcggcagaaaacttccgcgcagtgctcgataaccgtcaacgtcacgcctggctggagctggcaaaccagattgttgatgtcaaagcactcagtaaaacagagctgcaaatcaccctgaaaagcgcctactatcctttcctgcaagaactggccctgccacgccctttccgttttatcgccccctcgcagtttaaaaaccatgaaaccatgaacggaattaaagcgccgattggcaccgggccgtgggttttgcaggaatcgaaactgaatcagtacgatgtcttcgtccgtaacgaaaactactggggcgaaaagccggcgattaagaagatcacttttaacgtgatcccggacccgactacccgcgcggtggcgtttgaaactggcgatattgacctgctgtacggaaacgaagggttattaccgctcgataccttcgcccgctttagccagaacccggcttaccacacccaactgtcacagccgatcgaaaccgtgatgctggcgctcaataccgccaaagcccccaccaacgagctggcagtacgtgaagctcttaattacgcggtaaacaaaaaatcgctgattgataacgcgttgtatggcacccagcaggtcgccgacaccctgtttgctccttctgtgccctatgccaacctcggcctgaaaccgcgccagtacgatccgcagaaagcgaaagcgttgctggaaaaagccggttggacgttgcctgcgggcaaagacatccgcgagaaaaatggtcagccgctgcgcattgaactgtcgttcatcggcaccgatgcgttaagcaaatcgatggcggaaatcattcaggctgatatgcgccagattggcgcagatgtctcactgattggcgaagaagagagcagtatctatgctcgtcagcgcgacggtcgttttggcatgattttccatcgcacctggggcgcgccatacgatccacacgccttcctgagttcaatgcgcgtaccgtcgcacgctgatttccaggcacagcaaggattagccgacaagccgctgattgataaagagatcggcgaagtgctggcaacccatgacgaaacgcaacgtcaggcgctgtatcgcgacattctgacccgtctgcatgacgaggcggtttatctgcctatcagttacatctcaatgatggtggtatcaaaaccggagctgggtaacatcccctacgcgccgatcgccaccgaaattccgttcgaacagattaaaccggtgaaaccttaa

SEQ ID NO: 263211 - DNA, 588 bp, Klebsiella pneumoniae
atgtatcggatagttctggggaaagtttcgaccttaagcgcagctcctctgccaccgggtttacgcgagcaagcaccgcaaggtccacgacgtgaacgctggctggcggggcgtgcattgctttcgcacacgctttccccgctaccggagatcatctatggcgaacaaggcaaacctgcattcgcgccggaaacgccgctatggttcaacttaagccatagcggtgacgatatcgccctgctgttgagcgatgaaggcgaagtcggctgcgatatcgaagtaattcgcccgcgcgccaactggcgctggctggcgaacgccgtgttcagcctcggggaacacgctgagatggacgccgtgcatcccgatcagcaactggaaatgttctggcgcatctggacgcgcaaagaagccatcgttaaacaacgtggcggcagcgcctggcaaatcgtcagcgtagacagcacctatcactcatcactgtcggtcagccattgccagcttgataatttaagcctggcgatctgcacccctaccccctttacgctctccgccgacagtgtgcaatggatcgattcagttaactga

SEQ ID NO: 263212 - DNA, 1050 bp, Klebsiella pneumoniae
atggaaacccctcaacccgataaaacgggcatgcacattctgctcaagctggcctcgctggtagtgatcctcgcgggcattcacgcagcggcagatatcattgtgcagctattactggcgctgttttttgccatcgttctcaacccgctcgtcacctggtttattcgtcggggggtacaacgccccgttgccattacgattgtggtggtggtgatgctgatcgcactaaccgcgctggtcggcgtactggcggcatcgtttaacgaatttatatctatgctgccgaagtttaataaggagctgacgcgcaaactttttaaattgcaggagatgttgccttttcttaatttgcatatatcgccggagcgaatactgcagcggatggactcggaaaaagtggttaccttcaccacggcgctaatgaccgggctttccggggcaatggcgagcgtgcttttgctggtgatgaccgtagttttcatgctgtttgaagtgcgccacgtcccttacaaaatgcgttttgcgctaaataacccacagattcacatcgcgggattacaccgcgcacttaaaggcgtttcgcattatctggcgttaaagacgttactcagtttatggacaggtgtcatcgtctggctggggctggcgctaatgggcgtacagtttgcgctgatgtgggcagtactggcgtttttgctcaactacgtgcccaatatcggcgcggtaatttccgccgtaccgccaatgattcaggtgctgctgtttaatggtatttacgaatgtattctggtcggcgcattgtttttagttgtccatatggtcatcggcaatattttagagccacggatgatgggccatcgcctggggatgtccaccatggtggtatttctttcattgttaatttggggatggctgctcggcccggtagggatgctactttcggtgccattaaccagcgtgtgtaaaatctggatggaaaccaccaaaggcggtagcaaactggcgattttactgggaccaggcagaccgaaaagtcggttaccgggatga

SEQ ID NO: 263213 - DNA, 1251 bp, Klebsiella pneumoniae
atgaaacactgttgtaaaaatgtggtgatcctcatgcccgaacccgtagccgaacccgcgctaaacggattgcgcctgaatttgcgcattgtctccattgtcatgtttaacttcgccagctacctcaccatcgggttgccgctcgctgtattaccgggctatgtccatgatgtgatgggctttagcgctttctgggcaggattggttatcagcctgcaatatttcgccaccttgctgagccgccctcatgccggacgttatgccgatttgctgggacccaaaaagattgtcgtcttcggtttatgcggctgctttttgagcggtctgggatatctgacggcaggattaaccgccagtctgcccgtcatcagcctgttattactttgcctggggcgcgtgatccttgggattgggcaaagttttgccggaacgggatcgaccctatggggcgttggcgtggttggttcgctgcatatcgggcgggtgatttcgtggaacggcattgtcacttatggggcgatggcgatgggtgcgccgttaggtgtcgtgttttatcactggggcggcttgcaggcgttagcgttaatcattatgggcgtggcgctggtggccattttgttggcgatcccgcgtccgacggtaaaagccagtaaaggcaaaccgctgccgtttcgcgcggtgcttgggcgcgtctggctgtacggcatggcgctggcgttggcttccgccggatttggcgtcatcgccacctttatcacgctgttttatgacgctaaaggttgggacggtgcggctttcgcgctgacgctgtttagctgtgcgtttgtcggtacgcgtttgttattccctaacggcattaaccgtatcggcggcttaaacgtagcgatgatttgctttagcgttgagataatcggcctgctactggttggcgtggcgactatgccgtggatggcgaaaatcggcgtcttactcgcgggggcagggttttcgctggtgttcccggcattgggcgtagtggcggtaaaagcggttccgcagcaaaatcagggggcggcgctggcaacttacaccgtatttatggatttatcgcttggcgtgaccggaccactggctgggctggtgatgagttgggcgggcgtcccggtgatttatctggcggcggcgggactggtcgcaatcgcgttattactgacgtggcgattaaaaaaacggcctccggaacacgtccctgaggccgcctcatcatcttaa

SEQ ID NO: 263214 - DNA, 558 bp, Klebsiella pneumoniae
atgcgcaatctggttaaatatgtcggaattggcctgctggttatggggcttgcggcctgtgatgataaagacactaacgctacggcgcagggttcggtcgcggaaagtaacgctaccgggaatcccgtcaacctgcttgatggcaagttaagtttctcgctgccagcggatatgaccgaccagagcggtaagctgggaacgcaggccaataacatgcatgtctggtccgacgccaccgggcagaaagcagtcatcgtcatcatgggcgatgatccgaaagaagatctggcggtgctggcgaagcgtctggaagatcagcaacgtagccgcgatccgcagctgcaagtggtaaccaataaagccattgagctgaaaggtcacaaaatgcagcagttagacagcattatctccgcgaaaggccagacggcgtactcttccgttattctgggtaacgtgggtaatcaactgctgaccatgcaaattactctgccagctgacgatcagcaaaaagcgcagaccaccgcagaaaacatcattaatacgctggttattcagtaa

SEQ ID NO: 263215 - DNA, 666 bp, Klebsiella pneumoniae
atgaacgttttctcgcaaactcaacgctataaggcgttgttctggttatcgttatttcatctgctggtgatcacctccagtaactatctggttcagcttcccgtctccatttttggtttccataccacctggggcgcatttagctttccgtttattttccttgctaccgacctgactgtgcgtatttttggcgcaccgctggcccgtcgtatcatctttgcggtgatgatcccggcgttgctgatctcctacgtcatctcatcgctgttttatatggggtcatggcaaggattcggcgcgctcgcccacttcaacctgtttgtcgcccgtatcgccaccgccagtttcatggcctacgcgctgggacagatcctcgacgtgcacgtttttaaccgcctgcgtcagagtcgccgctggtggctggcaccgacagcgtccacactgttcggtaacgtcagcgacacgctggccttcttcttcattgccttctggcgtagcccggatgcctttatggctgaacactggatggaaatcgcactggtcgattactgtttcaaagtgttaatcagtatcgttttcttcctgccaatgtatggcgtattactcaatatgctgttgaaaagactggcagataaatccgaaatcaacgctttgcaggcgagttaa

SEQ ID NO: 263216 - DNA, 246 bp, Klebsiella pneumoniae
atgaccgatctcttttcctgccctgaccacacactcgacgcacttggcctgcgctgcccggaaccagtcatgatggtgcgcaaaaccgtgcgcaatatgcagccaggtgaaacgttgctgattattgctgacgatccggcgacgacccgcgatattcctgggttttgtacctttatggaacacgaactggttgcgaaagagacggatggactgccttatcgttatttgattcgcaaaggcggttga

SEQ ID NO: 263217 - DNA, 1791 bp, Klebsiella pneumoniae
atgatggcaatcagctggggtctggagcagtttaatcatccgttcgggcaactggcgtttatcgcgaccacgctggttgggctgtacccgattgctcgtcaggcattacggctgatcaaatccggcagttacttcgccattgaaacgttaatgagcgtagctgctattggtgcgctgtttattggcgcaacggctgaagctgcgatggtgttgctgctgtttttgattggtgaacgactggaaggctgggccgccagccgcgcgcgtcagggcgttagcgcgttgatggcgctgaaaccagaaaccgccacgcgcctgcgtaacggtgagcgggaagaggtggcgattaacagcctgcgccctggcgatgtgattgaagttgcggcgggcgggcgtttgcctgccgacggtaaactgctctcaccgtttgccagttttgatgaaagcgccctgaccggagaatccattccggtggagcgcgcgacgggcgataaagttcctgcaggagccaccagcgtagaccgtctggtaacgctggaagtgctgtcagaaccgggtgccagcgccattgaccggattctgaaactgatcgaagaagccgaagagcgtcgcgcccccattgagaggtttatcgaccgtttcagccgtatttacacgccagcgattatggccatcgccctgctggtaacgctggtgccgccgctgctgtttgccgccagctggcaagagtggatttataaagggctgacgctgctgctgattggttgcccgtgtgcgttagttatctcaacgcctgcggcgataacctccgggctggcagcagcagcgcgtcgtggggcgttgattaaaggcggtgcggcgctggaacaactaggtcgtgttacccaggtggcgtttgataaaaccggtacgctgaccgtcggtaaaccgcgcgttaccgcgattcatccggcaacgggtattagtgaatctgaactgctgacactggcagcggcggtcgagcaaggcgcgacgcatccactggcgcaagccatcgtacgcgaagcacaggttgctgaactcgccattcccgccgccgaatcacagcgggcgctggttgggtctggcattgaagcgcaggttaacggtgagcgcgtgttgatatgcgctgccggaaaacatccggctgttgcatttgctggtttaattaacgaactggaaagcgccgggcaaacggtagtgctggtagtacgtaacaatgacgtgctgggtatcattgcattgcaggatactctgcgcgccgatgctgcaactgccatcagtgaactgaacgcgctgggcgtcaaaggggtgatcctcaccggcgataatccacgcgcagcggcggcaattgccggggaactggggctggaatttaaagcgggcctgttgccggaagataaagtcaaagcggtgaccgagctgaatcaacatgcgccgctggcgatggtcggtgatggtattaacgacgcgccagcgatgaaagctgccgccatcgggattgcaatgggcagtggcacagacgtggcgctggaaaccgccgatgcagcattaacccataaccacctgcgcggcctggtgcaaatgattgaactggcacgcgccactcacgccaatatccgccagaacatcactattgcgctggggctgaaagggatcttcctcgtcaccacactgttagggatgaccggcctgtggctggcggtgctggcagatacgggtgcgacggtgctggtgacagcgaatgcgttaagattgttgcgcaggagataa

SEQ ID NO: 263218 - DNA, 759 bp, Klebsiella pneumoniae
atgagccaaattttactgcaacctgctaacgcgatgattacgctggaaaacgtcaataaatggtatgggcaattccatgttttgaaaaatataaatttaaccgtgcaaccgggagaacggatcgttctgtgtggcccttctggttccggtaaatcgacaaccattcgttgtattaatcatctggaagaacatcaacagggacggatcgtggtggatggcatcgaacttaatgaagatatccgcaatattgagcgcgtcaggcaggaagtgggaatggtctttcagcatttcaatctcttccctcatctgaccgttctacagaactgtaccctggcaccgatttgggtacgcaagatgcctaagaaagaggctgaagatctggcgttgcattaccttgagcgggtgagaattgccgaacatgcccagaagtttcccggacagatttctggtggtcagcagcaacgcgttgccatagcacgttcactttgtatgaaaccaaagatcatgctatttgatgaacctacgtcagcgctcgatccggagatggtgaaagaagtgctggatacgatgattgggctggcgcagtcgggtatgacaatgttgtgtgtaacacatgagatggggtttgcacgaaccgtcgctgacagggtgatttttatggatcgtggggaaatagtggagcaagctgcacctgatgaattttttgcgcatcctaaatcagagcgtacgagggcatttttatcgcaggtaatccattaa

SEQ ID NO: 263219 - DNA, 1104 bp, Klebsiella pneumoniae
atgacaaaagtattgctgtctcatcccccgcgcccggcgagccataactcaagccgcgcgatggtgtgggtgcgaaaaaatctgttctccagctggagcaatagcctgctgactattggctgcatatggttgatgtgggaactgattccaccgttgctgaactgggcatttttgcaggctaactgggttggctcaacgcgtaccgactgcacaaaagccggtgcctgttgggtcttcatccacgaacgatttggtcagtttatgtatgggctttacccacacgaccaacgctggcgaattaacctcgcattactgattgggcttgtgtcgatcgcaccaatgttctggaaaatactcccgcatcgcggtcgctatattgcggtatgggcggtgatttacccactgattgtctggtggctgatgtatggcgggtttcttggtcttgagcgggttgaaacccggcaatggggcgggctgacgctaactttaattattgcatcagttgggattgcgggggcgctgccgtgggggatcttactggcgttaggtcgccgctcccatatgccgattgtgcgtatcttatcggtcatttttatcgagttctggcgcggtgtaccgctgattaccgttctgtttatgtcttcggtcatgctgccgttgtttatggcagaaggcaccagtatcgacaaattgatccgcgcgctggttggcgtgatcctgtttcagtcagcatatgttgcggaagtcgtgcgaggcggattacaggcgctgcctaaagggcaatatgaagcggcagagtcgctggcgttgggttactggaaaacccaggggctggttattctgccacaggcgttgaagctggtgattcctgggctggtaaataccatcatcgcactcttcaaagataccagcctggtgatcatcatcgggttgttcgatcttttcagtagcgttcagcaggcaaccgttgatcccgcctggttgggtatgtcgacggaagggtatgttttcgccgcactgatctactggatcttctgtttcagcatgtcacgttatagccaacatctggaaaaacgttttaacaccgggcgtacaccgcattga

SEQ ID NO: 263220 - DNA, 1182 bp, Klebsiella pneumoniae
atgtctcatcgccgctcaaccgttaaaggctcactctcctttgccaaccctacggttcgtgcttggttattccagatccttgccgttgttgctgttgtcggcattgttggttggttatttcacaacactgtaacgaatctcaataatcgtggcattacttcaggttttgcctttctggatcgcggcgctggcttcggtattgtccagcatttgatcgattaccagcagggcgacacctacggacgcgtttttattgtcggcttactcaatacgctactggtttctgcattgtgtattgtgttcgcttctgttttgggcttctttatcggtctggcgagactttcggataactggctgctacgaaagctttccacaatttatattgagatcttccgtaatattccgccgctgctgcaaatcttcttctggtactttgccgtgttgcgcaatttgcccggaccacgccaggctgtgagcgcgtttgatctggcctttttgagcaatcgtgggctttatattccgtcaccgcagctgggagacggatttattgcgtttatcgtgactgttgttattgctatagccatttctgttggactattccgttttaataaaacgtaccagataaagaccggacaattgcgccgaacctggccggtcgccgttatgttgatcataggtttgcctttactggcgcaatggctttttggcgcagcactacactgggatgttccagccctacgaggctttaacttccgtggcgggatggttttaattcctgaactggcagccttaacgctggcgctttcggtttatacctctgcatttatcgccgagattatccgcgctgggatccaggcagtgccttatggtcaacatgaagcggctcggtcactgggattacccaatccggttacgctacgccaggtcattattccccaggcactgcgagtgattattccgccgttaaccagccagtatctcaacatcgtcaaaaactcctctcttgccgccgcgattggctatccggatatggtttcgctgtttgctggcaccgtgctgaaccagacggggcaagccatcgagacgatagccatgaccatgtcggtctatctgattatcagcctgactatctcgctgctgatgaatatctataaccgccgcatcgcgatcgttgaacgctaa

SEQ ID NO: 263221 - DNA, 1026 bp, Klebsiella pneumoniae
atgaaaaagatgatgatagccacactggctgccgccagcgtgctgcttgccgttgcaaatcaggcgcatgctggcgcgacgcttgatgccgttcagaaaaaaggttttgtgcaatgcgggatcagtgatggattacctgggttctcttatgccgatgctgacggtaagttttcaggtattgatgtagatgtttgtcgtggtgttgcggcagctgtatttggtgacgacacgaaagtgaaatataccccgctcactgcaaaagaacgcttcacggctttacagtcaggggaggtggatttgctctcccgtaatacgacctggacttcatctcgcgatgccgggatgggaatggcatttactggcgtcacttattacgacggcattggcttcctgactcacgataaagcgggattaaaaagcgcgaaagaactggatggcgctaccgtctgtattcaggcggggactgataccgaactcaacgttgccgattacttcaaggcaaacaatatgaagtacacaccggtgactttcgatcgctctgacgaatcagcgaaggcactggaatctggtcgctgcgatacgctggcctcggatcaatcacaactgtatgccctgcgcatcaaattaagcaacccagctgaatggattgtcttaccggaagttatctcaaaagaaccgcttggtccggtagttcgtcgtggcgatgatgaatggttctcgattgtacgctggacgcttttcgccatgctgaatgctgaagagatgggcatcaattcccagaacgtcgatgaaaaagaggctaatccagcaacgcctgatatggcacatctgttgggtaaagaaggcgattacggcaaggatctgaagttggataataaatgggcctataacatcatcaaacaggtgggtaactactcggaaatttttgagcgtaacgtaggttcagaaagcccgctgaaaattaaacgtgggcaaaataatctctggaataacggcggtattcagtacgcgccgcccgtgcgttaa

SEQ ID NO: 263222 - DNA, 222 bp, Klebsiella pneumoniae
atgaaaagattaattcctgtggcattgctcaccgcattgctggcgggctgtgctcacgattcgccctgcgttccggtttatgacgatcagggtcgactggttcacactaatacctgtatgaaaggcacgactcaggataactgggaaacggctggggctattgctggcggggcagcagctgttgctggcctgacgatggggatcatcgctctgtcgaaataa

SEQ ID NO: 263223 - DNA, 291 bp, Klebsiella pneumoniae
atgacaaattatgtgaattgtaaaaatagtgaagggagcgggaactatagaaagtttttaaagagtgagaagaagaatatcttattaatttttatgggtttcactgaaaataataaaggcacccgaaagtgcctttatgtttctgatttatcctttaaagcaacggcggatcaccacaaagaacaccggcacgaagaagattgccagcaacgttgcagaaaccatcccgcccattaccccgatacccactgcgttctgcgcgccactgccggcaccgttactgatagctag

SEQ ID NO: 263224 - DNA, 3105 bp, Klebsiella pneumoniae
atggcaaacttttttattcgacgaccgatatttgcatgggtgctggccattattctgatgatggcgggtgtactggcgatcctacaattgcccgtcgcccaatacccaaccattgcgccgcctgcagtttctgtttcggcaaactatccgggcgctgatgcgcagaccgtgcaggatacggtgacgcaggttatcgaacagaatatgaatggtatcgataacctgatgtatatgtcctccaccagcgattctgccggtagcgtgacaattacccttaccttccagtccgggaccgatccagatatcgcgcaagtgcaggtgcagaacaaactccagctcgccacgccgttgctgccgcaggaagtacagcagcaggggatcagtgttgaaaagtccagtagcagctatttgatggtggcgggctttgtctctgataacccagacaccacacaggacgatatctcggactatgtggcctctaacgttaaagatacgcttagccgtctgaatggcgtcggtgacgtacagcttttcggcgcacagtatgcgatgcgtatctggttggacgccgatctgctaaacaaatataaactgacgcctgttgatgtgattaaccagttgaaggtacagaacgatcagatcgctgccggacagttgggcggaacgccagcgttaccagggcaacagttgaacgcctcgattattgctcagacgcggttaaaaaatccggaagaattcggcaaagtgaccttgcgcgtaaacagtgacggctcggtggtacgcctgaaagatgtcgcacgggttgaacttggcggtgaaaactataacgttatcgctcgcatcaacggtaaaccggcggcgggcctggggattaagctggcaaccggcgcgaatgctctcgataccgcgaaagccattaaggcaaaactggcggaattacagccattcttcccgcagggaatgaaggttctctacccttatgacaccacgccattcgtccagctttctattcacgaagtggtaaaaacgctgttcgaagctattatgctggtgttcctggtgatgtatctgttcttgcagaatatgcgagcaacgctgatccccaccattgcggtacccgtggtgttgttagggacgtttgccatcctcgccgcttttggttactccatcaacacactaacgatgttcgggatggtgcttgccatcgggctgctcgtcgatgatgcgatagtggtggtggagaacgtcgagcgcgtgatgatggaggataagctcccgccaaaagaagcgacggaaaaatcaatgtcgcaaatccagggcgcactggtgggtatcgcaatggtgctgtcagcggtatttattccgatggcattcttcggcggttctactggggcaatttatcgccagttctctatcaccatcgtttcggcaatggcgctttctgttctggtggcattgattcttaccccagcgttatgtgcaacactgctcaaacccgtctctgctgagcatcacgaaaataagggcggtttcttcggctggtttaataccaccttcgatcatagcgttaaccactacaccaacagcgtcggcaaaatcctcggttccacaggacgatatttactgatctatgcactaattgttgctggaatggtggtgttgtttttacgtcttccgtcttccttcttacctgaagaggatcagggtgtctttctgactatgattcagttacccgctggcgcgacgcaagagcgaacgcaaaaagtgttggatcaagtgacggattactatctgaagaacgagaaagcgaacgtagaaagtgtctttacggttaacggctttagcttcagcggccaggcacaaaacgccggtatggctttcgtcagtctgaaaccgtgggaagagcgtagtggtgacgaaaacagtgcggaagcggtaatccatcgtgccaaaatggaattgggcaagatccgcgacggttttgtcattccattcaatatgccagccattgttgaactgggcacggcaacgggtttcgactttgagttaattgatcaggctgggctgggtcatgatgccctgacccaggcccgtaaccagttgcttggcatggcggcgcaacatcctgccagcttagtcagcgtgcgtcctaatggtctggaagacaccgcgcagtttaaactggaagttgaccaggaaaaggcgcaggcattaggtgtttcactttctgacatcaatcagaccatttcaacggcgttaggtgggacttacgttaacgacttcattgaccgtggtcgcgtgaaaaaggtgtatgttcaggcggatgccaaattccgtatgctgccagaagatgtcgataaactttatgtccgcagcgccaacggcgaaatggtgccattctcggcctttaccactgcacattgggtgtatggctctccgcgactggagcgctacaacggtctgccgtcaatggagattcagggggaagccgcgccaggaaccagttccggcgatgccatggcgttgatggaaaaccttgcatcacaattaccagctggcattggttatgactggacgggtatgtcatatcaggaacgcttatcgggaaaccaggctcccgctctggtagcaatttcctttgtggttgttttcctgtgccttgctgcactctatgaaagctggtcaattcctgtctcggttatgttggtcgtgccgttagggattgtcggcgtgctactggcggcgacactctttaatcaaaaaaatgacgtctactttatggtgggcttgctaacgacaattggcttgtcggctaaaaacgctattttgattgttgagttcgctaaagatctcatggagaaagagggtaaaggtgttgttgaagcgacactgatggcagtacgtatgcgcctgcgtcctatcctgatgacctctctcgcctttattctcggcgtattaccgctagctatcagtaacggtgccggcagtggcgcgcagaacgcagtgggtatcggggtaatgggcgggatggtttctgcaacgttgctggcaatcttcttcgtgccggtgttctttgtggtgatccgccgttgctttaaaggataa

SEQ ID NO: 263225 - DNA, 1158 bp, Klebsiella pneumoniae
atgacgaaacatgccaggtttttcctcctgccctcctttattctgatctccgcggctttaatcgccggttgtaacgataagggagaagagaaagctcacgtcggtgaaccgcaggttaccgttcatattgtgaaaacggccccgttagaagttaagactgaattaccaggccgcaccaatgcttaccgtatagccgaagttcgcccacaggttagcgggatcgtactgagtcgcaatttcactgaaggcagcgatgtgcaagcaggccagtctctgtaccagatcgatcccgcgacctatcaggcaagttatgacagcgcgaaaggcgaactggcgaaaagtgaagccgccgccgccatcgcgcatttgacggtaaaacgttacgttccgctcgtgggtacgaaatacatcagccagcaggagtacgaccaggccattgctgatgctcgccaggccgatgccgccgtgattgccgcaaaagccacagtcgaaagcgctcacatcaatcttgcttataccaaagtgactgcgccaattagcggacgtatcggcaaatcgactgtgaccgaaggcgctcttgtcactaatgggcaaacgactgaactggcgactgtccagcagctcgatcctatctacgttgatgtgacccaatccagcaacgattttatgaggctgaagcaatccgtagagcaaggaaatttgcataaggaaaacgccaccagcaacgtagagttggtcatggagaacggtcaaacctatcccctgaaaggtacgctgcaattctccgatgttaccgttgatgaaagcaccggctccataaccctacgtgctgtcttccctaacccgcaacatacgcttttacctggtatgtttgtgcgcgcacggattgatgaaggcgtccaatctgatgccattcttatcccgcaacaaggcgttagccgcacaccgcgtggtgatgcaaccgtgctgattgttaacgataaaagtcaggttgaagcgcgccctgtcgttgccagccaggcgattggcgataaatggttgattagcgaagggctgaaatctggcgatcaagtcattgtcagcggcctgcaaaaagcgcgtccgagagagcaggttaaagccactaccgatacccccgcagattctgcatcgaagtaa

SEQ ID NO: 263226 - DNA, 663 bp, Klebsiella pneumoniae
atggcaaaaagaaccaaagctgaagccctgaagacccggcaagaactgattgaaactgccatcgcccagtttgcgcagcatggcgtaagcaagacgacgctcaacgacattgccgacgccgctaacgttacgcgtggcgctatctactggcacttcgaaaacaagactcaactgtttaatgagatgtggttgcaacagccttcattgtgggagttaatccaggaacacttgacggctggattagagcatgacccgtttcaacaattgcgtgaaaaattgattgtcggcttgcaatatattgccaaaattccccgccagcaggcgttgctgaaaatcttatatcacaaatgtgaatttaatgatgagatgctggccgagggagtgatacgcgaaaagatgggctttaatccgcagaatctccgcgaagtattgcaggcgtgtcagcaacaaggttgtgtagcaaataacctcgatttagatgttgtgatgattattattgatggtgccttcagcggaattgttcaaaactggttaatgaatatggcgggttatgatctttataaacaagcacccgcactggtcgataacgtattaagaatgttcatgccagatgaaaacataacgaaattaattcatcaaacgaatgaattaagtgtcatataa

SEQ ID NO: 263227 - DNA, 180 bp, Klebsiella pneumoniae
atgattcgcaagtattggtggctcgtcgttttcgctgtcttcgtttttctgtttgatactttactgatgcagtggattgaactgctcgcaacagaaacagacaaatgccgcaatatgaactcagttaatccactaaaactggttaactgtgacgaactgaattttcaggacagaatgtga

SEQ ID NO: 263228 - DNA, 885 bp, Klebsiella pneumoniae
atgagaacaggatgtgaaccgacccgatttggtaatgaagcaaagaccatcatccagggtgatgcattaaccgaacttaaaaagctccccgccgaaagtgtcgatctgatctttgccgacccaccgtataacatcggtaaaaattttgatggtctgatcgaagcctggaaagaagatctgtttatcgactggctgtttgaagtgattgcagagtgccatcgcgttctgaaaaagcagggcagcatgtacatcatgaatagcacggaaaacatgccctttatcgatctccagtgccgcaagctttttaccatcaaaagtcgcatcgtctggtcatatgacagttctggagtgcaggcgaaaaaacactacggctccatgtacgaacccatcctgatgatggtgaaagacgcaaagaactacacattcaacggtgatgctattctggtagaagccaaaaccggatcgcagcgcgcgttgatcgattatcgcaaaaaccctccacagccttacaatcatcaaaaagtaccgggtaacgtctgggattttccgcgcgtgcgttatttgatggatgaatatgaaaaccacccgacgcaaaaaccggaagccttactgaaacgcattattctcgcctcttccaacccaggcgatatcgttctcgacccgtttgctggtagctttactaccggtgccgtagccgtcgccagtgggcgaaaattcattggtattgagatcaacagcgagtacatcaaaatggggcttcgacggctggatgtcgcgtcgcattactctgcggaagaactggcgaaagtgaaaaaaagaaagaccggcaacctgtcaaaacgaagcaggttaagcgaagttgaccccgatctcattgcaaagtaa

SEQ ID NO: 263229 - DNA, 1101 bp, Klebsiella pneumoniae; identical to SEQ ID NO: 9524

SEQ ID NO: 263230 - DNA, 2430 bp, Klebsiella pneumoniae; identical to SEQ ID NO: 9523

SEQ ID NO: 263231 - DNA, 972 bp, Klebsiella pneumoniae
atgatcgactttggtaacttttattctctgattgccaaaaatcatctttcacactggctggaaacgctgcccgcgcagattgctaactggcagcgcgagcagcagcacgggctgtttaagcagtggtccaacgcggtggaatttctgcctgaaattaaaccgtatcgtctggatttattgcatagcgtgacggcagaaagcgaagagccactgagcgccgggcaaattaaacgtattgaaacgctgatgcgcaacctgatgccgtggcgcaaagggccgttctcactgtatggcgtcaacatcgataccgaatggcgttccgactggaaatgggatcgcgttctgccccatctttctgatttaaccgggcgcaccattcttgatgtcggctgtggcagcggttatcacatgtggcgcatgattggcgcaggcgcgcacctcgcggtgggaatcgaccctacgcaactgtttctgtgccagtttgaagcggtgcgtaaactactgggtaacgatcagcgcgcacatttgttaccgttaggcattgaacagcttccggcactgaaagcctttgataccgtcttttcgatgggcgtgctttatcatcgtcgttcaccgctggagcatctctggcagttgaaagatcaactggtcaatgaaggtgaactggtgcttgaaacgctggttattgatggtgatgagaacacggtgctggtgccgggcgatcgttacgcgcaaatgcgtaatgtctatttcatcccttccgcgctggcgctgaaaaactggctgaagaagtgtggttttgttgatattcgcattgcggatgtgagcgttaccactacagaagagcagcgacgcactgaatggatggttaccgagtctctgtccgatttcctcgacccacatgatccgagtaagacagttgaaggttatccggcacctaaacgcgcggtgctgattgcgcgcaagccgtaa

SEQ ID NO: 263232 - DNA, 744 bp, Klebsiella pneumoniae
atgtctcaccgcgacacgctattttctgcccctatcgccagactgggcgactggacctttgatgaacgggtagctgaagtcttcccggatatgatccagcgttccgttcccggctattccaatattatttccatgattggtatgttagccgagcgcttcgttcaacctggtacgcaggtttacgatctgggttgttctctgggcgcggcgacgctctcggtgcgtcgcaacattcatcatgataattgcaaaattattgccatcgacaactctccggcgatgattgaacgctgccgtcgtcatattgacgcctataaagcccctacgccagtagacgttattgaaggtgatattcgcgatatcgccattgaaaacgcatcgatggtggtgctgaattttaccctgcaattcctggaaccttccgagcgtcaggcgttactggataaaatttatcaagggctgaacccgggcggtgcgctggtgctttcggaaaaattcagtttcgaagatgccaaagttggtgaattgctgtttaacatgcaccacgactttaaacgtgccaacggttacagcgaactggagatcagccagaagcgcagcatgctggaaaacgtgatgctaaccgattctgtggaaacccataaagcacgcctgcatcaagctggttttgagcatagcgagctgtggttccagtgctttaactttggttccctggtggcattaaaagcagaggacgctgcatga

SEQ ID NO: 263233 - DNA, 396 bp, Klebsiella pneumoniae; identical to SEQ ID NO: 9522

SEQ ID NO: 263234 - DNA, 819 bp, Klebsiella pneumoniae; identical to SEQ ID NO: 9521

SEQ ID NO: 263235 - DNA, 567 bp, Klebsiella pneumoniae
atgcttgaacttaatgctaaaaccaccgcgctggtggtgattgatttacaagaaggcatcttaccttttgccggaggtccacatactgccgatgaggtggttaatcgcgccgggaagctggcggtgaaatttcgcgccagcggtcagcccgtgtttctggtgcgcgttggctggtctgccgattacgccgaagcattaaaacagccggttgatgccccttcccccgctaaagtgttgcccgaaaactggtggcaacatcctgctgcattaggtgcaactgacagtgatatcgaaatcatcaaacgtcagtggggggcgttttacggtacagatctggagttgcaattacgccgccggggtatcgatacaatagtattatgtgggatctcgaccaatatcggtgttgaatccaccgcccgcaatgcctgggaactcggttttaatctggtgattgccgaagacgcctgcagcgccgccagcgccgagcagcacaataacagcatcaaccatatctacccacgcatcgcccgtgtgcgcagtgtggaagagatcctcaacgcattatga

SEQ ID NO: 263236 - DNA, 1773 bp, Klebsiella pneumoniae
atgcgtacagaatattgtggacagctccgtttgtcccacgtggggcagcaggtgactctgtgtggttgggtcaaccgtcgtcgtgatcttggtagcctgatcttcatcgatatgcgcgaccgcgaaggtatcgtgcaggtatttttcgatccggatcgtgcggacgcgttaaagctggcctctgaactgcgtaatgagttctgcattcaggtcacgggcaccgtacgtgcgcgtgacgaaaaaaatattaaccgcgatatggcgactggcgaaatcgaagtactggcgtcctcgctgactatcatcaaccgtgcagatgttctgccgcttgactctaaccacgtcaacaccgaagaagcgcgtctgaaataccgctacctcgacctgcgtcgcccggaaatggctcagcgcctgaaaacccgcgctaaaatcaccagcctggtgcgccgttttatggatgaccacggcttcctcgacatcgaaactccgatgctgaccaaagccacgccggaaggcgcgcgtgactacctggtgccttctcgtgtgcacaaaggtaaattctacgcactgccgcaatccccacagttgttcaaacagctgctgatgatgtccggctttgaccgttactatcagatcgttaaatgcttccgtgacgaagacctgcgcgctgatcgtcagcctgaatttactcagatcgatgtggaaacttctttcatgaccgcgccgcaagtgcgtgaagtgatggaagcgctggtgcgtcatctgtggctggaagtgaagggcgtggatctgggcgatttcccggtaatgacctttgcggaagcagaacgccgttatggttctgataaaccggatctgcgtaacccgatggaactgactgacgttgccgatctgctgaaatctgttgaatttgcagtatttgcaggtccggcgaacaatccgaaagggcgcgttgccgctctgcgtgttccgggtggcgcatcgctgacccgtaagcagatcgacgaatacggtaacttcgttaaaatctacggcgcgaaaggtctggcttacatcaaagttaacgaacgcgcgaaaggtctggaaggtatcaacagcccggtagcgaagttccttaatgcagaaatcatcgaagccatcctggatcgtactgccgcgcaagatggcgatatgattttcttcggtgccgacaacaagaaaattgttgccgacgcgatgggcgcactgcgcctgaaagtgggtaaagaccttggtctgaccgacgaaagcaaatgggcaccgctgtgggttatcgatttcccgatgtttgaagacgacggtgaaggcggcctgacggcaatgcaccatccgttcacctcaccgaaagacatgactgctgcagaactgaaagctgcaccagaaaatgcggtggcgaacgcttacgatatggtcatcaatggttacgaagtgggcggtggttctgtgcgtatccataatggtgatatgcagcagacggtgtttggtattctgggtatcaacgaagaggaacagcgcgagaaattcggcttcctgctcgacgccctgaaatacggtactccgccgcacgcaggtctggcattcggtcttgaccgtctgacgatgctgctgaccggcaccgacaatatccgtgacgttatcgccttcccgaaaaccacggcggcggcgtgtctgatgactgaagcaccgagctttgctaacccgactgcactggctgagctgagcattcaggttgtgaagaaggcagagaataactga

SEQ ID NO: 263237 - DNA, 510 bp, Klebsiella pneumoniae
atgagcatagataactatgtgaatgggatgagcgaaggcagtcaacgaagaggcagcgtgaaggataaagtgtataagcgtcccgtttcgatcttagtggtcatctatgcgcaagatacgaaacgggtgctgatgttgcagcggcgtgacgatcccgatttctggcagtcggtaaccggcagcgtggaagagggtgaaaccgcgccgcaagctgccatgcgcgaagtaaaggaagaggtcaccatcgatgttgtcgctgaacaactgaccttaattgactgtcagcgcacggtagaatttgaaattttttcacatttacgtcatcgctatgcgccgggcgtgacgcgtaatacggaatcatggttctgtcttgcgctcccgcacgaacgccaggtcgtcttcactgaacatctggcctacaagtggcttgatgcgcctgctgcggcggcgctcactaagtcctggagcaaccggcaggcgattgaacagtttgtaattaacgctgcctga

SEQ ID NO: 263238 - DNA, 741 bp, Klebsiella pneumoniae
atggcaggtcatagtaaatgggccaacaccagacatcgtaaagctgcgcaggatgctaagcgcggtaaaatcttcactaaaatcattcgtgagctggtaaccgcggctaagctgggcggtggtgacccggacgctaacccgcgtctgcgtgcagcaattgataaagcattgtctaacaacatgacccgtgacactctgaaccgcgcaattgcacgtggtgtgggcggtgatgatgatgcaaacatggaaaccatcatctacgaaggttacggtcctggcggcacggcaatcatgattgaatgtctgtctgacaaccgcaaccgtaccgttgctgaagtgcgtcatgcattcagcaaatgtggtggtaacctcggtactgatggttccgtagcctatctgttcagcaaaaaaggcgtgatctccttcgagaaaggcgatgaagacaccatcatggaagcagctctggaagcgggtgctgaagacgttgtgacctatgatgacggcgcgattgacgtctacactgcatgggaagaaatgggtaaagtacgcgacgctctggaagcggcaggtctgaaagcagacagcgcggaagtttccatgatcccgtccaccaaagctgatatggatgctgaaaccgcaccgaaactgatgcgtctgatcgatatgctggaagattgcgacgacgtgcaggaagtctaccataacggtgaaatctccgatgaggttgcagcgactctctga

SEQ ID NO: 263239 - DNA, 522 bp, Klebsiella pneumoniae
atggctattattctcggcattgacccgggttcgcgcgtgaccggctatggcgtcatccgccaggtaggcaggcaactctcctacctgggtagcggatgcatacgcaccaaagtggatgatttaccgtctcgtctgaagctcatctatgcgggcgtgacggaaatcatcacccagttcgagcctgattatttcgccattgaacaagtctttatggcgaagaacgctgactcagccctgaaactgggtcaggcgcgcggcgtggcgattgtggcggcggtgaatcaggaattgccggtatttgaatatgcggcacgtcaggtaaagcaaacggtggtaggtattggtagtgctgaaaaaagccaggtgcagcatatggtccgcaccttgctgaaactgcccgctaatccacaggcggatgctgccgatgcattagctatcgcgattacccattgtcacgtcagtcagaatgcgatgcagatgagcgaatcgcggctgaacctggcgagagggcgactgcgttaa

SEQ ID NO: 263240 - DNA, 603 bp, Klebsiella pneumoniae
gtgaatattaattaccctgctgaatatgaaattggagatatcgtctttacatgtataggtgctgccttatttggtcaaatatcagctgcatcaaattgctggagtaatcacgtcgggatcattatcggtcataacggtgaagacttcctggttgcagaaagccgggttcccctttcaaccatcaccacgctatctcgttttattaaacgttcgtctaatcaacgctatgctataaagcgattagacgctgggctgacagaacaacaaaaacaacgaattgttgaacaggttccctcccggctacgcaaactttaccacaccggttttaaatacgaatcttcgcgccagttctgttcaaaatttgtttttgatatttataaagaggcgctatgtattccggtgggtgaaatagagacgtttggagaattgttaaatagcaatccgaatgcaaaactcactttctggaaattctggttcctgggttctattccgtgggagcgtaaaaccgtcacgccagccagtttgtggcatcatccgggtttggtgttgattcatgcggagggagtggaaacgcctcagccggaactgaccgaggcggtataa

SEQ ID NO: 263241 - DNA, 942 bp, Klebsiella pneumoniae
atgaagctgatacgcggcatacataatctcagccaggccccgcaagaagggtgtgtgctgactattggtaatttcgacggcgtgcatcgcggtcatcgcgcgctgttacagggcttgcaggaagaagggcgcaagcgcaacttaccggtgatggtgatgctttttgaacctcaaccactggaactgtttgcaaccgataaagccccggcacggctgacccggctgcgggaaaaactgcgttaccttgcagagtgtggcgttgattacgtgctgtgcgtacgtttcgacaggcgtttcgcggcgttaaccgcgcaaaatttcatcagtgatcttctggtgaagcatttgcgcgtaaaatttcttgccgtaggtgatgatttccgctttggcgctggtcgtgaaggcgatttcttgttattacagaaagctggcatggaatacggcttcgatatcaccagtacgcaaactttttgcgaaggtggggtgcgtatcagcagcaccgccgtgcgtcaggcccttgcggatgacaatctggctctggcagaaagtttactggggcacccgtttgccatctccgggcgtgtagtccacggtgatgaattagggcgcactataggtttcccgacggcgaatgtaccgctgcgccgtcaggtttccccggtgaaaggggtttatgcggtagaagtgctgggcctcggtgaaaagccgttacccggcgtggcaaacatcggaacacgcccaacggttgccggtattcgccagcagctggaagtgcatttgttagatgttgcaatggacctttacggtcgccatatacaagtagtgctgcgtaaaaaaatacgcaatgagcagcgatttgcgtcgctggacgaactgaaagcgcagattgcgcgtgatgaattaaccgcccgcgaattttttgggctaacaaaaccggcttaa

SEQ ID NO: 263242 - DNA, 915 bp, Klebsiella pneumoniae
atgcgtttacctatcttcctcgatactgaccccggcattgacgatgccgtcgccattgctgccgcgatttttgcccccgaactcgacctgcaactgatgaccaccgtcgcgggtaatgtctcggttgagaaaaccacccgcaacgccctgcaactgctgcatttctggaatgcggagattccgctcgctcagggagccgctgtgccgctggtacgcgcaccgcgtgatgcggcatctgtgcacggcgaatcgggaatggctggctacgactttgttgagcacaaccgaaagccacttgggataccagcgtttctggcgattcgtgatgccctgatgcgtgcgcctgagcctgttaccctggtggccatcggcccgttaaccaatattgcgctgttactttcacaatgcccggaatgtaaaccgtatattcgtcgtctggtgatcatgggcggttctgctggtcgcggcaactgcacaccaaacgccgagtttaatatcgctgccgatccagaagcggcagcctgtgtcttccgtagcggcatcgaaatcgtcatgtgcggtctggatgtcaccaatcaggcaatattaacccctgactatctcgctactttgccggagttgaatcgcaccggaaaaatgctccacgccctgtttagtcactaccgtagcggcagtatgcaaagtggactgcgaatgcacgatctctgcgccatcgcctggctggtgcgcccggacctgttcactctcaagccgtgttttgtggcagtggaaacgcagggcgaatttacctctggcacgacggtggttgatatcgacggttgcctgggcaaaccagccaatgtacaggtggcattggatctgaatgtaaaaggcttccagcagtgggtagctgaggtgctggctctggtgccgtaa

SEQ ID NO: 263243 - DNA, 822 bp, Klebsiella pneumoniae
atgcatgatgcaaacatccgcgttgccatcgcgggagccggggggcgtatgggccgccagttgattcaggcggcgctggcattagaaggcgtgcagctgggcgcggcgctggagcgcgaaggatcttctttactgggcagcgacgccggtgagctggctggagcagggaaaacaggcgttaccgtgcaaagcagcctcgatgcggtaaaagatgattttgatgtgtttatcgattttacccgtccggaaggtacgctgaatcatctcgctttttgtcgccagcatggcaaagggatggtgatcggcactacggggtttgacgaagccggtaaacaggcgattcgtgacgcagccgccgatattgcgattgtctttgccgccaattttagcgttggcgttaacgtcatgcttaaactgctggagaaagcagccaaagtgatgggggactacaccgatatcgaaattattgaagcacatcatagacataaagttgatgcgccgtcaggcaccgcactggcaatgggagaggcgatcgcccacgctcttgataaagatctgaaagattgcgcggtctacagtcgtgaaggccataccggtgaacgtgtgcctggcaccattggttttgccaccgtgcgtgcaggtgacatcgttggtgaacataccgcgatgtttgccgatattggcgagcgtctggagatcacccataaggcatccagccgcatgacatttgctaacggtgcggtaagatcggcgttgtggttgagtggtaaggaaagtggtctttttgatatgcgagatgtgcttgatctcaataatctgtaa

SEQ ID NO: 263244 - DNA, 1860 bp, Klebsiella pneumoniae
gtgtacgcaacagtagtcgaattcgataccctgaccgatacggttcgggccgccgccgaggaccatgattttttcacggtcagatgggttggattcgcactcttcttcataagtggagtacatataagcggtgtcggtagcgaactctgccgcacaggtatccacgcgcttgtaaaccgggtgcaggtcatactggtcacgcagcttacggatttctgcttcacgcacgcccgcgagttttgccagacgcgcgtcggcaaagcctttgcgtttcaactggcgcaggaagtcagcgttcaggccagtgatgcccacttccgccactttctcttccagacgcaccagctcttcaatctgtaccaggaaccagcggtcaatgttggtcaggttgaagacgccgtctacggacaggcccgcgcggaaagcatcggcgatataccaaatacgctctgcgccagcgtctttcagctcgcggcggattttagtcagcgcttccgggtcgtcgagactcactttcggatcgaagccggtcgcgcccacttccaggccgcgcagcgctttttgcagggattcctgctgcgtgcgaccaatcgccatcacttcgccaaccgatttcatctgagtggtcagacggtcgttcgccccggcgaatttctcgaagttgaagcgaggaattttggtgaccacgtagtcgatggacggctcgaaggaggccggagtacgcccgccggtgatgtcgttcatcagctcgtcgagggtgtaacccaccgccagtttcgccgccactttggcaatcgggaaaccagtggctttcgacgccagcgccgaagaacgcgacacgcgcgggttcatttcgataacaatcaggcgaccgtttttcgggttcaccgcaaactggacgttggaaccaccggtttcaacgccgatttcacgcagcaccgccatcgaggcgttacgcatgatttgatattctttgtcggtcagcgtttgggctggtgcgacagtgatggagtcaccggtgtggatgcccattgcatcgaagttttcgatagagcagacgatgatgcagttgtcgtttttatcacgcaccacttccatctcgtactctttccagccgatcagcgactcatcaatcagcagttctttggtcggagagagatccagaccgcgggcgcaaatttcttcaaactcttcgcggttataagcgataccgccaccgctaccacccatggtaaaggatgggcgaataatgcacgggaagcccacatcagcggcaaccgccagcgcttcttccatcgtgtgtgcgataccggaacgcgcggtttccagaccaattttcttcatcgctacgtcgaaacgacggcggtcttctgctttatcaatcgcatcggcagtggcaccaatcatggtgacgccgaactcttccaacacgccctgacgttccagctccagcgcacagttcagcgccgtctgaccgcccatcgttggcagcaccgcgtccgggcgctctttttcaataatcttgcgtaccacttcccagtgaatcggctcgatgtaggtcgcatcagccatttccgggtcggtcatgatggtcgccgggttggagttcaccagaatgacgcggtaaccctcttcacgcagggctttacacgcttgcgcgccagagtagtcaaactcacacgcctgaccgataacaatcgggcccgcacccagaatcaggatactttttatatctgtacgttttggcatggctcttttactcctgattacttagcggttttacggtactgctcaattaactcgataaagtggtcgaacaacggcgctgcgtcgtgtggcccagggctggcttcagggtga

SEQ ID NO: 263245 - DNA, 609 bp, Klebsiella pneumoniae
gtgcacgcccgcctgctcgatgtgctccatgatgccgccaatcagcaccatttcaccgtcgcagatggcatccacgtcaacttctactgcgtcatcaaggaaatgatccagcaacactggcgcatcgttagacacgctaaccgccgtctggaagtagcgacgcaggtcagcttcgtcatagacgatttccatcgcccgaccgccgagaacgtaagacggacgtaccaccagcgggtagccaatctctttcgctttctcaaccgccatttcgatggtggtaacggtggcgttcgccggttgtttcagtttcagacgctcaaccgcatgctggaagcgttcacggtcttccgcacggtcgatggcatccgggctggtaccgataaccggtacgccagcagcttccagcgcgcgcgccagtttcagcggggtctgaccgccgtactggacgataacgcctttcggcttctcaatacgcacaatttccagcacgtcttccagagttaccggctcgaagtagaggcggtcggaagtgtcgtaatcagtggagacggtttccgggttacagttaaccataatggtttcgtaaccgtcttcgcgcagcgccagtga

SEQ ID NO: 263246 - DNA, 804 bp, Klebsiella pneumoniae
atgttttctacaaacttaatacagagtgattatggtaatttaaatattaaaaaccttgccttcgactcttttaaagaaagactgcagtctaccatgacagcactcactttctttatatcaacgggtcaatgtgcctgcgatgaaatagcagaatcaaacttcaattatatgattgcctatatgtctaacattaactatgatgcctcaaagccaggagcgccagcacttagttttgatacatatctgcaggacaatgttaaatatagagtgataattaataatctttatggtagtgaaattaggataagaggtattaatgagaattttgttgggatggattttacctgtgaattccgaccagaaaaaatgaccaatttgatcaatataaaaaacaggttggttattcactatttaagaacgatatactatgaacaaaattatatacatcctgttgggagcatttttgctgcgattcaaaaaaatgagagtctcctaaagtttccttcggtaatatcaatgcttaatgtcaatcttctttttaatccactgaatcttccgggaatgggaagtggtgtgcttgaagagattatgagtatttcagatagttcacttagaaaacgtcttgggtatgaggttttaagcttctcgctacaagcacattcattgagtcaggaatgtatcgataagttagccatttttttcgctgacgatctgtttaaatatgagtcagtatgcatcgccgcgatggaacatttaaaaagtaaggcaacggcccctatacaaaacggaccgttgccagcataa

SEQ ID NO: 263247 - DNA, 1392 bp, Klebsiella pneumoniae
atgaactttccattaattgcgaacatcgtggtgttcgttgtactgctgtttgcgctggctcagacccgccataaacagtggagtctggcgaaaaaagtgctggtgggtctggtgatgggtgtggtttttggcctcgccctgcataccatttatggttctgacagccaggtacttaaagattctgtacagtggtttaacattgttggtaacggctatgttcaactgctgcaaatgatcgttatgccgttagtcttcgcctctattctgagcgcggttgcccgtctgcataacgcatctcagttaggcaaaatcagttttctgaccatcggtacgcttttgtttaccacgctgattgcggcgctggtcggtgtgctggtcaccaacctgtttggtttgacggctgaaggtctggttcagggtggtgcagaaactgcacgtctgaacgccattgaaagtaactatgttggtaaagtctctgacctgagcgttccgcagctggtcttgtcctttatcccgaaaaacccgtttgccgatctgaccggagccaatccgacgtcaattatcagcgtggtaatttttgccgcattcctcggcgtagctgcgctgaagctgctgaaggatgatgcgccgaaaggtgaacgcgtcttaaccgctatcgataccctgcaaagctgggtgatgaaactggttcgcctggtcatgcagctgaccccttacggcgttctggcgctgatgaccaaagtggttgcaggttctaacctgcaagacatcatcaaactgggaagtttcgttgtcgcgtcctacctcggtcttctgattatgtttgcagtgcatggccttctgctgggtattaatggcgtgagcccgctgaagtacttccgtaaggtatggccagttctgacgtttgcctttaccagccgttccagtgctgcgtctatcccactgaatgtggaagcacaaacgcgtcgtctgggtgttcctgaatccatcgccagtttcgccgcctctttcggtgcaaccattggtcagaacggctgtgccggtttgtatccggcaatgctggcggtgatggttgcgcctacggttggcattaacccgatggacccgatgtggattgcgacgctggtcggtattgttaccgttagttccgcaggcgttgccggtgtcggtggtggtgcaactttcgccgcactgattgtgctgcctgcgatgggcctgcctgtaacgctggtggcattgttaatctccgttgaaccgcttatcgacatggggcgtacggcgctaaacgttagtggctcgatgaccgctggcacgctgaccagccagtggctgaagcaaaccgataaagccattctggatagcgaagacgacgccgaactggcacaccgttaa

SEQ ID NO: 263248 - DNA, 591 bp, Klebsiella pneumoniae
atgacggcggaaggtcaccttctcttttctattgcttgtgcggtatttgccaaaaatgccgagctgacgcccgtgctggcacagggtgactggtggcatattgtcccttccgcaatcctgacgtgtttgttaccggacatcgatcacccaaagtcgtttcttgggcagcgattaaagtggatatcaaaaccgatcgcccgcgcttttgggcatcgtggttttacccacagtctgctggcggtatttgcgctgctggcaaccttttaccttaaggttcctgaaagctggttcattccggctgatgcgctacaaggaatggtgctgggttatttgagccacatacttgccgatatgctgacacccgccggtgttcccctgctctggccatgccgctggcgtttccgcttgcctatcctggttccccaaaagggcaaccaactggaacgttttatctgcatggcattatttgtctggtcggtatggatgccccattcattacccgaaaacagcgctgttcgttggtcatcgcaaatgatcaatactttgcagatccagtttcatcggcttattaagcatcaggttgaatactaa

SEQ ID NO: 263249 - DNA, 669 bp, Klebsiella pneumoniae
atgtcaaccccgcgtcagattcttgctgcaatttttgatatggatggattacttatcgactcagaacctttatgggatcgagctgaactggatgtgatggcaagcctgggggtggatatctcccgtcgtaacgagctgccggacaccttaggtttacgcatcgatatggtggtcgatctttggtacgcccggcaaccctggaatgggccaagccgtcaggaagtagtagaacgggttattgctcgtgccatttcactggttgaagagacgcgtccattattaccaggcgtgcgcgaagctgttgcgttatgcaaagaacaaggtttattagtgggactggcctccgcgtcaccactacatatgctggaaaaagtgttgaccatgtttgacttacgcgacagtttcgatgccctcgcctcggctgaaaaactgccttacagcaagccgcatccgcaagtatatctcgactgcgcagcaaaactgggcgttgacccactgacctgcgtggcgctggaagactcggtaaatggcatgatcgcttctaaagcagcccacatgcgttccatcgtcgttcctgcgccagaagcgcaaaatgatccacgttttgtattagcaaacgtcaaactctcatcgctgacagaactcaccgcaaaagaccttctcggttaa

SEQ ID NO: 263250 - DNA, 537 bp, Klebsiella pneumoniae
atgacgtatcaacaagctggacgcattgctgttttgaaaaggattttgggttgggtgatttttatacctgcattgatctctacactgatttctttgctgaaatttatgaatacccggcaggaaaaccaggaaggcattaatgcggtcatgctcgactttactcatgtcatgatcgatatgatgcaggcgaatacgccttttttgaatctgttctggtataactccccgacgcccaattttaatggtggcgtgaacgttatgttctgggtgattttcatcctgatttttgtcggactggcgttgcaggattccggtgcccggatgagtcgccaggcgcgcttcttgcgggaaggtgttgaagatcaactcattctggaaaaagccaaaggggaagaggggctaacgcgtgaacaaattgagtcacgtattgttgtgccgcaccatactattttcctgcagtttttctcgctgtatatcctgccggttatttgtattgctgcaggttatgtgttcttttctctgctggggtttatttaa

SEQ ID NO: 263251 - DNA, 861 bp, Klebsiella pneumoniae
atgtggcaggcaatcagtcgtcttttgagcgagcagttaggtgaaggcgaaatcgaactgcgtaatgaactgcctggcggagaagtccatgccgcatggcatttgcgctatgcaggacgtgactttttcgtcaaatgtgatgaaagggaactgcttcccggttttaccgccgaagccgaccaactggagttactgtcgcgtagtaaaaccgtcaccgtgcctaaggtttgggcagttggcgctgaccgtgactacagttttctggtgatggattatctcccacctcgcccgctggatgcgcatagcgcatttattcttggtcagcaaattgcgcgtttacatcaatggagcgaccaaccacaatttggcctcgattttgataactcgctctccacaactccgcagcccaacacctggcaacgtcgctggtcaacgttttttgctgaacaacggattggctggcagttggaactagcagcagagaaagggatcgctttcggcaatatcgacgccatcgtagagcatattcagcagcgtctggcctcgcatcaaccgcagccttctctgttgcatggcgatttatggtccggcaactgtgcgctgggtccggatggcccgtacattttcgacccggcctgctactggggtgaccgagagtgcgacctggcgatgttaccgctgcatactgaacagccgccacaaatctatgacggctatcagtcagtatccccgctacctgccgatttccttgaacgtcaaccggtttaccaactctacacgctgttaaatcgtgcaaggttatttggcggtcagcatttggttattgctcagcagtcactggatagattattagcagcataa

SEQ ID NO: 263252 - DNA, 291 bp, Klebsiella pneumoniae
atggccagtggcgatcttgtccgttatgtcataaccgtcatgttgcatgaggatacattgactgaaattaacgagttgaataattacctgactcgcgacggttttttgctcaccatgacggatgatgatggaaatatccatgagctggggactaacacttttggacttatcagtacccaaagtgaagaagaaattagagaactggtttcggggcttacccaaagtgcaaccggtaaagatcctgaaatcgccatcacgacctgggaggaatggaatagcaacagaaaataa

SEQ ID NO: 263253 - DNA, 930 bp, Klebsiella pneumoniae
atggtacgtatctatacgttgacacttgcgccctctctcgatagcgcaacaattaccccgcaaatttatcccgaaggaaagctgcgctgtaccgcaccggtattcgaacccggaggcggcggcatcaacgtcgcccgcgccattgcccatcttggaggcagtgccacagcgatcttcccggcgggtggtgcgaccggcgaacatctggtttcactgttggcagatgaaaatgtccccgtcgctactgtagaagccaaagactggacccggcagaatttacacgtacatgtggaagcaagcggtgagcagtatcgttttgtcatgccaggcgcggcattaagtgaagatgagtttcgccagcttgaagagcaagttctggaaattgaatccggtgctatcctggtcataagcggaagcctgccgccaggtgtgaagctggaaaaattaacccaactgatttccgctgcgcaaaaacaagggattcgctgcatcgtcgacagttctggcgaagcgttaagtgcagcactggcgattggtaatatcgagttggttaagcctaaccaaaaagaactcagtgcgctagtgaatcgcgaactcacccagccagacgatgtccgcaaagccgcgcaggaaatcgttaatagcggcaaggccaaacgagttgtcgtttccctgggtccacaaggggcgctgggcgttgatagtgaaaactgcattcaggttgtgccaccaccggtgaaaagccagagcaccgttggcgctggtgacagcatggtcggcgcgatgacactgaaactggcagaaaatgcctctcttgaagagatggtccgttttggcgtagctgcggggagtgcagccacactcaatcagggaacacgcctgtgctcccatgacgatacacaaaaaatttacgcttacctttcccgctaa

SEQ ID NO: 263254 - DNA, 759 bp, Klebsiella pneumoniae
atgaagcttttgaagacagttcctgccatcgttatgttggcggggggcatgtttgcgtcattgaatgcagctgccgatgattccgtttttactgtcatggacgatcctgccagcgctaaaaaacctttcgaaggtaatctgaacgcaggatatcttgcacaatcaggcaatacgaaaagctcctcacttacggctgacaccaccatgacctggtatggacaaaccactgcctggtcgctgtgggggaacgccagtaatacttcttctaatgatgagcgttcttcagaaaaatatgccgcgggcgggcgtagccgttttaatttaactgattatgactatttatttgggcaggcaagctggctgacagaccgttataacggctatcgagagcgcgatgtgttgaccgcgggttatggtcgtcagtttttgaatggcccggtacacagtttccgctttgaattcggtccaggtgtgcgttacgacaaatataccgacaatgccagtgaaacccagccgctgggctatgcctccggggcttatgcatggcagttgactgacaacgctaaatttacgcagggtgtttcggtcttcggcgcggaagacacaacgctgaactccgaaagcgcattaaatgttgctattaatgaacattttggactgaaggtggcttacaacgtaacatggaactctgaacctccagagtctgcaccggaacataccgatcgtcggacaaccttatcgctgggctacagcatgtaa

SEQ ID NO: 263255 - DNA, 1899 bp, Klebsiella pneumoniae; identical to SEQ ID NO: 9514

SEQ ID NO: 263256 - DNA, 1257 bp, Klebsiella pneumoniae
atgggatctgatgcgaaaaacttgatgagcgacgggaacgtgcaaattgttaagaccggcgaggtcattggcgtgacgcaacttactgaaggtgagttaattgttgaagctggcggaagagccgaaaataccgtggtcacgggggctggctggttgaaagtggcaaccggtgggatcgccaaatgcacacagtacggcaacaatggcacgctatcggtcagcgacggtgccattgccacagatattgttcagtccgagggaggcgcaattagtctctctacgctcgctacggttaatggccgccatcccgaaggtgaattcagcgttgataaaggttatgcctgcggtttgttgctggaaaatggcggtaacctgcgtgtactggaaggccatcgcgcggaaaaaattattctcgatcaagagggtggcctgttggtcaatgggacaacctcagcggtcgtggtagatgaaggtggtgaattgttggtgtatccaggtggggaagccagcaattgtgagattaatcagggcggcgtttttatgctggcggggaaagccaatgatacgttgcttgctggtggcaccatgaataatctcggtggtgaagactctgacactattgttgagaatggaggcatctatcgtctgggtacggatggtcttcagctctacagttccggtaagacgcaaaacctgtccgttaatgtgggggggcgggctgaagtgcatgccggtacgctggaaaatgcggtaatacaaggtgggacagtcatcctgttgtcacccaccagcgcggacgaaaattttgtcgtagaggaagatcgcgcaccggttgaactgaccggtaatgttgcattactggacggcgcttcaatgattattggctatggcgcagatctgcaacaatcaacgattactgtacagcagggcggtgtattgattctcgacggcagtacggtaaaaggtgacagtgtcactttcagtgttggtaacatcaatctaaatggcggaaaactgtggctaatcactggtgcggcaacgcatgtgcaactgaaagtgaaacgcctgcgcggagagggagcgatttgcctgcaaaccagtgcgaaagaaatttcacctgacttcatcaatgtgaaaggggaagttactggtgatatacacgttgagataacagatgccagtcggcaaactctgtgtaacgcactgaaactacagccagacgaagacgggattggcgcaacgctccagcctgcgtaa

SEQ ID NO: 263257 - DNA, 1374 bp, Klebsiella pneumoniae
gtgcagaagtatatcagtgaagcgcgtctgttattagcattagcaatcccggtgattctcgcgcaaatcgcccaaactgcgatgggttttgtcgataccgtgatggcgggcggctatagtgccaccgacatggcggcggtcgctatcggtacttctatctggcttccggcgatcctctttggtcacggactgctgctggcattaacgccggttatcgcgcaattaaatggttccggtcgacgtgagcgcattgcgcatcaggtgcgacaaggtttctggctggcgggttttgtttccgttctcattatgctggtgctgtggaatgcaggttacattatccgctccatggaaaacatcgatccggctctggcggacaaagccgtgggttatctgcgtgcgttgctatggggcgcgccgggctatcttttcttccaggttgcccgtaaccagtgtgaaggtctggcaaaaaccaagccgggtatggtgatgggctttatcggcctgctggtgaacattccggtgaactatatctttatttacggtcatttcggtatgcctgagctcggtggcgttggttgtggcgtggctactgctgcggtgtattgggtcatgttccttgccatggtttcttacattaaacgcgcccgctcgatgcgcgatattcgtaacgaaaaaggcactgcgaagcccgatcctgcggttatgaaacgactgattcaactcggtttgccaattgcgctggcgctgttctttgaagtaacgctgtttgccgtcgtggctctgttagtgtctccgctcggtattgttgatgtcgcaggacaccagattgccctgaactttagttcactgatgtttgtgcttccaatgtcgctggcggcagcggtaactatccgcgtaggttatcgtctgggtcagggctcaacgctggatgcgcaaaccgctgcgcggaccgggcttatggtgggtgtctgtatggcaaccctgacggccattttcacggtttcactgcgggagcaaatcgccctgttgtacaacgacaatcccgaggttgtaacgctggctgcgcatttgatgttgctggcggcggtatatcagatttctgactctatccaggtgattggcagtgggattttgcgtggttataaagatacgcgttccattttctatatcacctttacggcttactgggtgctgggcttgccaagcggctatattctggcactgaccgatctggtcgttgaacctatggggccagcaggcttctggataggctttattattggcctgacgtcggcagccattatgatgatgctgcgtatgcggttcctgcaacgtctgccgtcagccatcattctgcaacgagcagctcgctag

SEQ ID NO: 263258 - DNA, 642 bp, Klebsiella pneumoniae
atgtttacggggattgtacagggcaccgcaaaactggtgtcgattgacgagaaaccaaattttcgcacacatgtggtggagttacccgaccacatgctggacggcctggaaaccggtgcgtccgtggcgcataacggttgctgcctgaccgtgacggaaattaacggcaaccatgtcagttttgacctgatgaaagaaacgttacgcattaccaatcttggcgatttaaaagtgggggattgggtaaacgttgagcgtgcggcgaaattcagtgatgaaattggcggacacttaatgtcaggtcatattatgaccaccgcggaagtggcgaaaatattaacctcggaaaataatcgccagatctggtttaaagtccaggatagtcagttgatgaaatatattctgtacaaaggatttattggcatcgacggtattagcctgaccgtcggcgaagtcacgccaacgcgtttttgcgtccatttaattccggaaaccctggaacgcacgactcttgggaagaaaaaactcggcgcacgcgtcaacattgaaattgatccacaaactcaggcagtggtagataccgtagaacgtgtgctggcggcacgagaaaatgccatgaatcaaccaggtacagaagcctga

SEQ ID NO: 263259 - DNA, 1149 bp, Klebsiella pneumoniae
atgagttcatcgtgtatagaagaagtcagtgtaccggatgacaactggtaccgtatcgccaacgaattacttagccgtgccggtatagccattaacggttctgccccggcggatattcgtgtgaaaaaccccgatttttttaaacgcgttctgcaggaaggctctttggggttaggcgaaagttatatggatggctggtgggaatgtgaccgactggatatgttttttagcaaagtcttacgcgcaggtctcgagaaccaactcccccatcatttcaaagacacgctgcgtattgccggcgctcgtctcttcaatcttcagagtaaaaaacgtgcctggatagtcggcaaagagcattacgatttgggtaatgacttgttcagccgcatgcttgatcccttcatgcaatattcctgcgcttactggaaagatgccgataatctggaatctgcccagcaggcgaagctcaaaatgatttgtgaaaaattgcagttaaaaccagggatgcgcgtactggatattggctgcggctggggcggactggcgcactacatggcatctaattatgacgtaagcgtggttggcgtcaccatttctgccgaacagcaaaaaatggctcaggaacgctgtgaaggcctggatgtcaccattttgctgcaagattatcgtgacctgaacgaccagtttgatcgtattgtttctgtggggatgttcgagcacgtcggaccgaaaaattacgatacctattttgcggtggtggatcgtaatttgaaaccggaaggcatattcctgctccatactatcggttcgaaaaaaaccgatctgaatgttgatccctggattaataaatatatttttccgaacggttgcctgccctctgtacgccagattgctcagtccagcgaaccccactttgtgatggaagactggcataacttcggtgctgattacgatactacgttgatggcgtggtatgaacgattcctcgccgcatggccagaaattgcggataactacagtgaacgctttaaacggatgtttacctattatctgaatgcctgtgcgggtgctttccgcgcccgtgatattcagctctggcaggtggtgttctcacgcggtgttgaaaacggccttcgagtggctcgctaa

SEQ ID NO: 263260 - DNA, 1212 bp, Klebsiella pneumoniae
atgcaacctgggaaaagatttttagtctggctggcgggtttgagcgtactcggttttctggcaaccgatatgtatctgcctgctttcgccgccatacaggccgacctgcaaacgcctgcgtctgctgtcagtgccagccttagtctgttccttgccggttttgccgcagcccagcttctgtgggggccgctctccgaccgttatggtcgtaaaccggtattattaatcggcctgacaatttttgcgttaggtagtctggggatgctgtgggtagaaaacgccgctacgctgctggtattgcgttttgtacaggctgtgggtgtctgcgccgcggcggttatctggcaagcgttagtgacggattattatccttcacagaaagttaaccgtatttttgcgaccatcatgccgctggtgggtctatctccggcactggctcctctgttaggaagctggctgctggtccatttttcctggcaggcgattttcgccaccctgtttgccattaccgtggtgctgattctgcctattttctggctcaaacccacgacgaaggcccgtaacaatagtcaggatggtctgacctttaccgacctgctacgttctaaaacctatcgcggcaacgtgctgatatatgcggcctgttcagccagtttttttgcatggctgaccggctcaccgttcatccttagtgaaatgggctacagcccggcagttattggtttaagttatgtcccgcaaactatcgcgtttctgattggtggttatggctgtcgcgccgcactgcagaaatggcaaggcaagcagttattaccgtggttgctggtactgtttgctgtcagcgtcattgcgacctgggctgcgggcttcattagccatgtgtcgctagtcgaaatcctgatcccattctgtgtgatggcgattgccaatggcgcgatctacccgattgttgtcgcccaggcgctgcgtcccttcccacatgcaactggtcgcgccgcagcgttgcaaaacactctacaactgggtctgtgcttcctcgcaagtctggtagtttcctggcttatcagtatcagcacgccattgctcaccaccaccagcgtgatgttatcaacagtagtgctggttgctctgggttacatgatgcaacgttgtgaagaagttgactgccagaatcatggcaatgccgaagtcgctcatagcgaatcacactga

SEQ ID NO: 263261 - DNA, 276 bp, Klebsiella pneumoniae
gtgaaaattcgtattccgcgtacggcgaatgaaatgtatcacctgcgtgatgcagcacctatcgaacgtagtgagctgaaaaacggcgacctggtctttttccgtactcagggacgcggtacagccgatcatgtcggcgtgtatgtcggcaacggcaaatttattcagtcaccgcgtacgggtcaggaaattcaaatcacttctctcagtgaagactactggcagcgccactatgttggcgctcgccgggtaatgaccccaaaaacacttcgctaa

SEQ ID NO: 263262 - DNA, 291 bp, Klebsiella pneumoniae
atggaatataaagatccaatgcatgagctgttgagcagcctggaacagattgtttttaaagatgaaacgcagaaaattaccctgacgcacagaacaacatcctgtaccgaaattgagcagttacgaaaagggacaggattaaaaatcgatgatttcgcccgggttttgggcgtatcagtcgccatggtaaaggaatgggaatccagacgcgtgaagccttcaagtgccgaactaaaattgatgcgtttgattcaagccaacccggcattaagtaagcagttgatggaatag

SEQ ID NO: 263263 - DNA, 711 bp, Klebsiella pneumoniae
atggcgacaggaaagtcctgctctcgctggtttgcgcctcttgcggcgttattaatggtagttagcctgagtgggtgttttgataaagaaggcgatcagcgtaaagcgtttatcgacttcctgcagaatacagtgatgcgtagcggtgaacgtctaccaaccctgactgccgatcagaaaaaacagtttggtccttttgtctctgattacgcgattctgtatggttattctcagcaggtgaatcaggcgatggattccggtctgcgcccggtcgtagacagcgttaacgcaattcgcgtaccgcaggattacgttacgcaaagcggcccactgcgtgaaatgaacggttctctgggcgtactggcgcaacagctgcaaaatgcgaagttgcaggccgatgctgcgcactctgcgctaaaacagagcgatgacctgaaaccggtctttgatcaggcattcaccaaagtggtaacgacgccagctgatgcattgcaaccgttgattccggcggcacaaactttcacgcaacaactggtgatggttggagactacattgcccaacaaggtactcaggtgagctttgtcgcaaatggcatccagttcccgacgtcacagcaggcaagtgaatataacaaactgattgcgccattaccggcacagcatcaggcgtttaatcaggcctggactacagcagttactgcaacccaataa

SEQ ID NO: 263264 - DNA, 975 bp, Klebsiella pneumoniae
atgaagccgtccgttatcctctacaaagccttacctgatgatttactgcaacgcctgcaagagcatttcaccgttcaccaggtggcaaacctcagcccacaaaccgtcgaacaaaatgcagcaatttttgccgaagctgaaggtttactgggttcaaacgagaatgttgatgccgcattgctggaaaaaatgccgaaactgcgtgccacatcaacgatctctgtcggctatgacaattttgatgtcgatgcgcttaccgcccgaaaaattctgctgatgcacacgccaaccgtattaacagaaaccgtcgccgatacgctgatggcgctggtgttgtctaccgctcgtcgggttgtggaggtagcagaacgggtaaaagcaggcgaatggaccgcgagcataggcccggactggtacggcactgacgttcaccataaaacactgggcattgtcgggatgggacggatcggtatggcgctggcacaacgtgcgcactttggtttcaacatgcccatcctctataacgcgcgccgccaccataaagaagcagaagaacgcttcaacgcccgctactgcgatttggatacactgttacaagagtcagatttcgtttgcctgatcctgccgttaactgatgagacgtatcatctatttggcgcagaacaattcggcaaaatgaaatcctccgccattttcattaatgccggacgtggcccggtggttgatgaaaatgcactgattgctgcattgcagaaaggcgaaattcacgccgccgggctggatgtcttcgaacaagagccactttccgtagattcgccgttgctctcaatggcaaatgtcgtcgcagtaccgcatattggatctgccacccatgagacgcgttatggcatggccgcctgtgccgtggataatttgattgatgcgttacaaggaaaggttgagaagaactgtgtgaatccgcacgtcgcggactaa

SEQ ID NO: 263265 - DNA, 660 bp, Klebsiella pneumoniae
atgaagaaacgtgtttatcttattgccgccgtagtgagtggcgctctggcggtatctggctgcacaactaacccttacaccggcgaacgcgaagcaggtaaatctgctatcggcgcaggtctgggctctctcgttggcgcgggtattggtgcgctctcttcttcgaagaaagatcgcggtaaaggcgcgctgattggcgcagcagcgggtgcagctctgggcggcggcgtgggttattacatggatgtgcaggaagcgaagctgcgtgacaaaatgcgtggcactggtgttagcgtaacccgcagcggggataacattatcctcaatatgccgaacaatgtgaccttcgacagcagcagcgcgaccctgaaaccggcaggcgctaacaccctgaccggcgtggcaatggtgctgaaagagtatccgaaaacggcggttaacgtgattggttataccgacagcacgggtggtcacgacctgaacatgcgtctctcccagcagcgtgcggattccgttgccagcgcgttgatcacccagggcgtggacgccagccgcatccgtactcagggccttggcccggctaacccaatcgccagcaacagcactgcagaaggtaaggcgcaaaaccgccgtgtagaaattaccttaagcccgctgtaa

SEQ ID NO: 263266 - DNA, 2334 bp, Klebsiella pneumoniae
ttggccaactcatcctcacgatattccgttctgactgccgcccactgggggcccatgctggttgaaactgacggcgaaaccgtgcttagctcgcgtggcgcgttaaccacaggaatggaaaactccttgcagagcgcggttcgcgaccaggttcacagcaatacgcgggtacgatttccaatggtgcgcaaaggctttctcgcgtcaccggaaaaaccgcaaggcattcgcgggcaggatgaatttgttcgtgtgagttgggatgaggcgctggagcttattcaccaacaacataaacgcattcgtgaggcttatggtccggcatcgatttttgctggttcctacggctggcgttcaaacggcgtgctgcataaggcctcgacattattacaacgctatatggcgctggcaggcggttataccgggcatctgggggattattcgaccggtgcagcacaggcgatcatgccgtatgtcgtggggggcagcgaagtttatcaacagcaaaccagttggcccctggtgctggaacatagcgatgtcgtggtgctgtggagtgctaatccactcaatacgctgaaaattgcgtggaatgcatccgatgagcaggggctttcttacttttccgcactgcgtgacagcgggaaaaagctgatctgcattgatccaatgcgatcggaaaccgtcgatttctttggcgataaaatggagtgggtggcaccgcacatgggcaccgatgttgcgctgatgctggggatcgcccatacgctggtggaaaatggttggcacgacgaagcgtttctggcgcgttgcaccaccggttatgccgtcttcgcctcttatttgctgggcgagagtgacggaatagccaaaaccgccgaatgggcggcagggatttgtggagttaacgcagagaaaatccgcgagctggcggctcttttccaccaaaacacgaccatgctgatggctggctggggaatgcagcgtcaacagtttggtgagcaaaaacactggatgatcgtcacgctggcggcaatgttggggcaaatcggcacacccggcggcggttttggtctttcttatcattttgccaatggtggtaaccccacgcggcgttctgcggtgctctcttccatgcagggcagcttgcctggcggcaccgatgcggtagataaaatccctgttgcccgcattgttgaagcactggaaaaccctggtggcgcatatcaacacaacggtatgaaccgacatttcccggatattcgttttatctggtgggcgggcggtgccaactttactcatcatcaggataccaatcgcctgatccgtgcctggcaaaaaccggagctggtggtgatctctgaatgcttctggacggctgcggcgaaacacgcggatatcgttctgcctgcgaccacttcgtttgagcgtaatgatctcaccatgaccggcgattacagcaatcagcatctggtgccgatgaaacaagtggtgccgccacgttatgaagcgcgtaatgattttgatgtctttgccgagttgagtgaacgttgggagaagggcggctatgcgcggtttacggaaggaaaaagtgagctgcaatggctggaaacgttttataacgttgcccggcagcgcggggcaagccagcaggttgaattgtcgccatttgctgagttctggcaagccaaccagttaattgagatgccggaaaacccggacagtgagcggtttattcgcttcgccgattttcgccgcgatccgcaggcgcatccattaaaaaccgccagcggtaagattgaaatattctcgcagcgtattgccgattatggttaccaggattgccctgggcatccgatgtggctggagccggatgagtggcagggcaatgccgaaccagaacagttgcaggtactttctgctcatccggcacatcgtctgcacagccagctgaattacagttctctgcgcgaattgtacgcggtggcaaatcgtgagcctgtcaccattcatcctgacgatgcccaggcgcgcggcatacaagatggcgatattgttcggttgtggaacgcacgcgggcaaattcttgccggagcggtcattagcgagggaattaaacctggcgtgatttgtattcatgaaggggcatggccggatctggatttaaccgctgacggtatttgtaaaaacggcgcggtgaacgttctgaccaaagatctccccagctcgcggctggggaatggctgtgcgggtaatacggcactggcatggctggaaaaatacaacggtccggaactgacacttacagcgtttgaaccaccggccagctcataa

SEQ ID NO: 263267 - DNA, 441 bp, Klebsiella pneumoniae
atgattcgggaagcgcaacgttcagaactccccgcgatcctcgaactgtggctggaaagtacaacctgggggcatccctttataaaagcgaattactggcgtgattgcattccgctggtgcgggatgcctatcttgccaatgcgcaaaactgggtctgggaagaagacggtaagcttctcggttttgtcagcattatggaaggccgatttctggctgcaatgtttgtcgcaccgaaggccgtcagacgcggtattggtaaggcgctaatgcagtatgtgcagcagcgccatccccatctgatgctggaggtttatcaaaaaaatcaaccggcgatagatttttaccatgcgcagggttttcacattgtcgactgcgcatggcaggatgaaacccaactacccacctggattatgagctggccggtggttcaaacgctgtaa

SEQ ID NO: 263268 - DNA, 564 bp, Klebsiella pneumoniae
atggaacgttgcggctgggtgagtcaggacccgctttatattgcctaccatgataatgagtggggcgtgcctgaaactgacagtaaaaaactgttcgaaatgatctgccttgaagggcagcaggctggattatcgtggatcaccgtcctcaaaaaacgcgaaaactatcgcgccagctttcatcagttcgatccggtgaaggtggctgcaatgcaggaagaggatgtcgaaagactggtacaggacgccgggattatccgccatcgcgggaaaattcaggcaattattggtaatgcgcgggcgtacctgcaaatggaacagaacggcgaaccgtttgccgactttgtctggtcgtttgtcaatcatcaaccacaggtgacacaagccacaacgttgagcgaaatccctacatctacgcccgcctccgacgctctatctaaagccatgaaaaagcgtggttttaagtttgttggtaccacaatctgttactcctttatgcaggcatgtgggctggtgaatgatcatgtggttggctgctgttgctatccgggaaataaaccatga

SEQ ID NO: 263269 - DNA, 699 bp, Klebsiella pneumoniae
atgatcataaaaaaaagcggtggtcgctggcagctaagcctgctggcgagtgtggtaatcagtgccttttttctcaacacagcttacgcctggcaacaagaatatatcgttgatacgcaacccggacattccacagagcgttacacctgggatagtgatcatcaacctgattacaacgatattttgtcgcaacgtattcaaagtagccaaagggcgctgggactggaagtcaatctggcggaagaaactcctgtggatgtgaccagcagtatgagtatgggctggaattttcctttatatgagcaggttacaaccggcccggtcgcggcattacattacgatggcacaaccacctcgatgtataacgagtttggcgacagtactaccacgctggccgatccgttatggcatgccagcgtgagtaccttaggctggcgtgttgactcccggcttggcgatctccgaccctgggcgcaaatcagctataaccagcaatttggcgagaatatctggaaggcgcaatcaggcctgagccggatgacggcgacaaaccagaacggcaactggctggatgtcaccgtaggcgctgatatgttgctcaatcaaaatattgctgcctatgctgcgctatctcaggcagaaaataccactaacaatagcgactatctgtatacgatgggggttagtgccagattttaa

SEQ ID NO: 263270 - DNA, 1209 bp, Klebsiella pneumoniae
atgacaccttcaaattatcagcgtacccgctggttgacactcatcggtactatcattacccagtttgcgctggggtcggtttatacctggagcctgtttaacggcgcgctttctgccaagctggatgcgccggtaagccaggtcgctttctctttcggcttgttaagtctggggctggcaatttcatcttctgttgcggggaaattacaggaacgttttggcgttaaacgcgtcactatggcttccggcattttgctgggattaggcttcttcctgacagcgcattctgacaacctgatgatgctgtggttaagcgccggtgtgctggtcggtctggcggatggcgcgggttacctgctgacgctctctaactgcgtgaagtggttcccggagcgtaaaggtctgatctccgcgttcgctatcggttcttatggtctgggtagcctggggttcaaatttatcgacacgcagctgctcgaaacggtgggtctggaaaaaacatttgtgatttggggagcgattgcgctggtgatgattgttttcggcgcaacgttaatgaaagacgcaccaaaacaggaagtgaaaaccagcaatggtgtcgtggagaaagattacacgctggcagagtcgatgcgtaaaccgcagtactggatgttagcggtaatgttcctgactgcctgcatgagcggcctgtacgtgattggggtagcgaaagatatcgcccaaagtctggcacaccttgatgtggtttccgcagccaatgcagtcactgttatttccatcgccaacctttcaggtcgtctggttctggggatactgtctgacaaaatcgcccgaatccgtgttatcaccattggtcaggtgatttcgctggtgggtatggcggccctgctgtttgcaccattgaatgcagtgacgttctttgcagcgattgcctgcgtggcgtttaactttggcggcactatcacggtgttcccgtcactggtcagtgagttcttcggcctcaataacctggcgaaaaactacggtgtgatttatctcggtttcggtatcggcagcatttgtgggtcgattatcgcctcactgtttggcggcttctatgtgaccttctacgtgattttcgccctgctgattctgtcactggcgctctctacgacgattcgtcagccagagcagaaaatgttgcgtgaggcgcatggctccctttaa

SEQ ID NO: 263271 - DNA, 1692 bp, Klebsiella pneumoniae
atgagatacatcaaatcgattacacagcagaagctgagctttttgcttgcaatctatattggcctttttatgaatggcgcggttttttaccgccgcttcggcagctatgcgcacgattttaccgtctggaaaggcatttctgctgttgttgaactggccgccaccgtactggtgaccttctttttactgcgtcttctttcgctgtttggccgccgcagctggcgtattctggcatcgctggtggtgctcttttccgcaggtgccagctattacatgaccttccttaatgtagtcattggttatggcatcatcgcatccgtcatgaccaccgatatcgacctgtcaaaagaagttgttggtctgaactttattctctggttaatcgccgttagtgcattgcctcttatccttatctggaataaccgctgtcgctacaccttgctccgacaactgcgaaccccagggcagcgtattcgcagcctggcggtcgtcgtactggcgggtattatggtttgggcaccgattcgtttgctggatatccagcagaagaaagtggagagggcgaccggcgttgatttgccgagttatggcggtgtcgtagcgaactcttatctgccatcaaactggctttctgcgttggggctgtatgcctgggcgcgggtcgatgaatcttccgataacaattcattgcttaatccggcgaagaaattcacttatcaggcaccgcaaaacgttgatgacacttatgtcgtgtttatcatcggtgaaaccacgcgttgggaccatatgggcattttcggctatgagcgtaataccacgccgaagctggcccaggagaaaaatctggcggcgttccgtggctattcttgtgacacggcgaccaaactttctctgcgttgcatgtttgtacgagagggtggagcggaagataatccgcagcgcacattaaaagaacagaacattttcgcggtgctgaagcagttaggattcagttctgacctctacgctatgcagagcgaaatgtggttctacagcaacacgatggcagacaacattgcttatcgtgagcagattggtgcggagccacgtaaccgtggcaagccggtagatgatatgttgctggtagacgaaatgcagcaatcgctggggcgcaacccggatggcaagcatctgatcattttgcataccaaaggttcgcactttaactacacccagcgttacccgcgcagctttgcgcagtggaagccggaatgtattggtgttgatagcggctgtaccaaagcgcagatgatcaactcctatgacaactcggtgacctatgtggatcactttatctccagcgtgattgatcaggttcgcgataagaaagcgattgtgttctacgcagctgaccacggtgagtcaattaatgaacgcgagcacctgcacggcacaccgcgtgaactggcaccgccggagcagttccgtgtgccgatgatggtctggatgtcagataaatatctggaaaatccggtcaatgcacaggcatttgcgcagctgaaaaaagaagccgacatgaaagtgccacgccgtcatgtagaactgtacgacaccatcatgggttgtcttggctatacttcaccggatggtggaattaacgaaaacaacaactggtgccacatcccgcaggcaagagaggcggcggctaactaa

SEQ ID NO: 263272 - DNA, 1389 bp, Klebsiella pneumoniae
atggcactgcaaaatgagaaaactagtcgttatcttttgcgcgactggaaaccagaaaatccggccttctgggaaaataaaggaaaacatattgctcgaagaaacctctggatatcagtcagttgtctacttcttgccttctgtgtctggatgctatttagcgcagttactgttaatctcaataaaatcggttttaatttcactaccgatcaactctttttattaaccgcattaccctccgtttctggcgcattattgcgtgtcccctactcctttatggtgcctatatttggtggacgccgatggacggtttttagtactgcaatcctgattattccttgcgtctggctcggaattgccgtgcagaatccgaatactccttttgggatatttatcgttatcgctttgctatgcggttttgcaggtgcgaactttgcttcgagcatgggcaatatcagtttcttcttcccaaaagccaaacaagggagcgcacttgggattaatggcgggttaggaaacttaggtgtaagtgtgatgcagctggttgcaccgctggtcatttttgtacccgtatttgcctttctcggcgtcaatggcgtaccgcaggccgacggttcggtgatgtcgctggcgaatgccgcatggatttgggtgccattactggcgattgccacgatcgccgcctggtcagggatgaatgatatcgccagttcacgcgcgtcaattgccgaccagctgccagtgttacaacgcctgcatctctggctgctgagcctgctttaccttgccaccttcggttcgtttatcggtttttctgcgggttttgccatgctggcgaaaactcagttccctgatgtgaatattctgcgcctggcgttctttggcccatttattggtgccatcgcgcggtcggttggtggtgctatttccgataaattcggcggcgtgcgggtgacgttgatcaacttcatttttatggcgattttcagcgccctgctgttccttaccttaccgggcacaggctccggtaatttcatcgcattttacgccgtatttatggggttgtttctgaccgcaggtctgggaagtggttctactttccagatgatcgccgtcatctttcgccagataaccatttatcgggtgaagatgaaaggcggtagtgatgagcaagctcagaaagaagccgtcaccgaaacggcggcggctctgggctttatctcagccattggcgcagtgggcggctttttcattccgcaggcgtttggcatgtcgctcaatatgaccggctctccggtaggcgcgatgaaagtgtttttaatcttctacatcgtttgtgtgctgctgacctggctggtttatggtcggcggaagttcagccaaaaataa

SEQ ID NO: 263273 - DNA, 696 bp, Klebsiella pneumoniae
atgcagatcctcaaagtgatcggcctgctgatggagtatccagacgagctgttgtgggaatgtaaggaggacgcgctggcgttgatccgccgcgacgcaccgatgcttacggattttacccgcaacctgcttaacgcgccgctgctggataaacaggccgaatggtgcgaagtgtttgaccgtggacgtaccacatcgctgctgctgttcgaacatgttcatgccgagtcccgcgatcgcggccaggcaatggtggacctgctggcggagtatgaaaaggtcggcctgcagttggattgtcgagaactgcccgattatctaccgctgtatctggagtacttaagcgtactgccggacgatcaggcgaaagaaggcttgctcaacgttgcgccgatcctcgccctgcttggcggacgcttaaaacaacgcgaggcatcgtggtacgcgttatttgacaccctgttgcaactggcaggaagtacactttcaagtgacagtgtcacaaaacaggtgaacagtgaggagcgcgatgacacccgccaggcactggatgcggtgtgggaagaggaacaggtgaagtttattgaagataacgccacggcgtgtgacagctcgccgcttaatcaatatcagcgacgctttagccaggatgtcgcgccgcagtatgtcgacatcagtgcgggaggtgggaaatga

SEQ ID NO: 263274 - DNA, 894 bp, Klebsiella pneumoniae
atgaaaccgcaggtgtaccacgtcgatgcttttacctcacaaccgtttcgcggcaattctgccggtgttgttttccccgccgataatctcagtgaagcgcaaatgcagcttatcgcccgcgaattaggtcattcggaaactgcttttctgctgcacagcgacgacagcgatgtacgcatccgctactttacgccaacggttgaagtgccgatttgcggtcacgcgacagtagctgcgcactatgtacgtgcgaaggtgttaggtttaggaaattgcacgatctggcaaacgtcactggcaggaaaacatcgcgtgactatcgaaaagcacaacgatgattatcgtatttcgctggaacaaggtccgccgggctttgaaccgccgctggaaggtgaaacacgtgcggcgattatcaacgcgcttcatctcactgaagacgatattctgccaggcttgccaattcaggtggcaaccacaggacactcaaaagtgatgatcccactgaaaccggaagtggatatcgacgccctttcgcctgaccttaatgcgctgaccgctatcagcaaacagattggctgcaatggtttcttcccgttccagatccgcccaggcaaaaacgaaaccgacggtcgtatgttctcgcctgccattggtattgtggaagatccggtgaccggcaatgccaatggcccgatgggtgcatggttggtacatcacaacgtattgccccacgatggcaacgtgttgcatgttaaaggccatcaggggcgcgcattagggcgtgacggcgtgattgaagtgacggtgacaattcgcgataaccaaccggagaaagtcaccatttctggcacagcggtgattttgtttcatgccgaatgggcaattgaattctga

SEQ ID NO: 263275 - DNA, 846 bp, Klebsiella pneumoniae
atgacgcccattctgaatcactattttgcccgtattaactggttgggagctgctgcggtcaatatagatacgctgcgtgcattgcacctgaaacacaattgcaccattccgtttgaaaacctcgacgttttgctgccgagggaaatacagcttgatgatcaatcgctggaagagaaactggtgacagcccgtcgtggtggttactgttttgagcagaatggcgtgtttgagcgggtgttacgcgagctggggtttaacgttcgcagcttgttagggcgcgtagtgttatcaaatccgccagcattaccgccgcgcacccatcgtttgttgttggtggaagtggaaggggaaaaatggattgctgatgtcggtttcggtggacagacgctaaccgcgccgattcgattagttcccgagctcgtgcagaccacgccacacggagagtatcggttgttgcaggagggtgatgattgggtgttgcaatttaatcatcatcagcactggcagtcgatgtaccgttttgatctctgcgagcagcaacaaagcgattatgtaatgggcaatttctggtctgcgcactggccgcagtcgcattttcgccatcatttgctgatgtgccgccatttgccggacggcggcaagctgacactgaccaattttcattttacccattatgaaaatgggcacacggtggagcagcgaaatctaccagatgtggcgtcgttatatgccgtgatgcaggaacagtttggtctgggcgtggatgatgtgaaacatggctttactgtggatgagttagcgctggtgatggctgcgtttgatacgcacccggaggcgggaaaataa

SEQ ID NO: 263276 - DNA, 570 bp, Klebsiella pneumoniae
gtgagccgattcatccctgtcgaattacaccatgccagccgtctgttaaatcatggcccaactgtcttgatcaccagtttcgatgagcaatcccagcggcgtaacattatggcagccgcctggtcaatgccggtggagtttgaaccgccacgcgtggcgattgtggtagataaatcgacatggaccagggagttgattgaacgtaatggtaagtttggcatcgttatcccgggtgttgcagcaactaactggacgtgggcggtgggaagtgtgtcggggcgtgatgaagataagtttaattgctatggtattccggttgtgaaaggtccggtgcttggtttgccgctggtcgaggaaaaatgtctggcgtggatggagtgtcgcctgctacctgcaacttccgcgcaagaaaaatacgatacgctatttggcgaagtggtatctgcagcggcagacgcacgagtatttgtcgaaggccgctggcagtttgatgatgacaaactcaatacgttgcatcatttaggtgctggcacgtttgttaccagcggcaagcgtgttacggcaggttaa

SEQ ID NO: 263277 - DNA, 228 bp, Klebsiella pneumoniae
atgccgcacatagacattaaatgttttccgcgtgaactggacgaacaacaaaaagcagcacttgctgcagatattaccgacgttattattcgccatctgaacagtaaagatagctcgataagcatttctctacagcagattcaaccagaatcttggcaagctatctgggatgccgaaatcgcgccccaaatggaggctttgataaagaaacccggttacagcatgtaa

SEQ ID NO: 263278 - DNA, 126 bp, Klebsiella pneumoniae
atgatgaaacgccttatcgttcttgttttgcttgccagtgcgctgctcacgggctgtaataccgctcgcggttttggtgaagacattaaacatctcggtaattccatctcccgcgctgccagctaa

SEQ ID NO: 263279 - DNA, 318 bp, Klebsiella pneumoniae
atgtcctggattatcttagttattgctggtctgctggaagtggtatgggccgttggcctgaaatatacccacggctttagtcgtttgacgccaagtgttattactgtgacggcgatgattgtcagtatggcgctacttgcctgggcgatgaaatcgttaccagtagggacggcttatgccgtgtggacgggtattggcgcagtcggcgcggccatcaccggcattgtgctgctcggcgagtccgctaacccgatgcgcctggcgagtctggcgttaatcgtattggggattattggtctgaaactcagcactcattaa

SEQ ID NO: 263280 - DNA, 534 bp, Klebsiella pneumoniae
atgcgcctgctccctctcgttgccgcagcgacagctgcatttctggtggttgcctgtagttctcccacaccaccgcgtggcgtgaccgtggtaaataatttcgataccaaacgctatctgggtacatggtatgagattgcccgttttgatcaccgttttgaacgcgggctggagaaagtgaccgcgacgtatagcctgcgggatgacggcggcctgaatgtcattaataaaggctataacccggacagagagatgtggcagcagagtgaaggaaaagcctactttactggagatccgcgtcgcgcagccctgaaagtgtcgttctttgggccattctacggcggttataatgtcatcgcgctcgaccgggagtaccgccacgcgctggtttgcggcccggaccgcgactacctgtggatactctctcgcacgccaaccatttctgacgaagtgaaacaggagatgctggcaatcgcgacccgggaagggtttgatatcagtaagtttatttgggtacagcaacccggtagttaa

SEQ ID NO: 263281 - DNA, 1134 bp, Klebsiella pneumoniae
atgttcaaaatgacgctctgcgccttattaattaccgcctcttgctccacatttgctgcccctcaacaaatcaacgatattgtgcatcgcacaataaccccgcttatagagcaacaaaagatccccggtatggcggtggcggtaatttatcagggtaaaccttattactttacctggggctatgcggacatcgccaaaaagcagcccgtcacacagcaaacgttgtttgagttaggctcggtcagcaaaacatttacgggcgtacttggtggcgacgctattgcacgaggggaaatcaagttaagcgatcccgcgacaaaatactggcctgaacttaccgctaaacaatggaatgggatcacactattacatctcgcaacctacaccgctggcggcctgccattgcaggtgccggatgaggtgaaatcctcaagcgacttgctgcgcttctatcaaaactggcaacctgcatgggctccaggaacacaacgtctgtatgccaactccagtatcggtttgttcggcgcactggctgtgaagccgtctggtttgagttttgagcaggcgatgcaaactcgtgtcttccagccactcaaactcactcatacgtggattaatgtgccgtccgcagaagaaaagaattacgcctggggatatcgcgaaggtaaggcagtgcatgtttcgccaggggcgttagatgctgaagcttatggtgtgaagtcgaccattgaagatatggcccgctgggtgcaaagcaatttaaaaccccttgatatcactgagaaaacgcttcaacaagggatacaactggcacaatctcgctactggcaaaccggcgatatgtatcagggcctgggctgggaaatgctggactggccggtaaatcctgacatcatcattaacggcagtgacaataaaattgcactggcagcacgccccgtaaaagcgattacgcccccagctcctgcagtgcgcgcatcatgggtacataaaacgggggcgaccggcggatttggtagctatgttgcgtttattccagaaaaagagctgggtatcgtgatgctggctaacaaaaactatcccaatccagcgagagtcgccgccgcctggcagattctcaacgctctacagtaa

SEQ ID NO: 263282 - DNA, 396 bp, Klebsiella pneumoniae
atgacgactaaacgtaaaccgtatgtacggccaatgacgtccacctggtggaaaaaattgccgttttatcgcttttacatgctgcgcgaaggcacggcggttccggctgtgtggttcagcattgaactgattttcgggctgtttgccctgaaaaatggcccggaaagctgggcgggattcgtcgactttttacaaaacccggttattgtgatcattaacctgatcactctggcggcagctctgctgcacaccaaaacctggtttgaactggcaccgaaagcggccaatatcattgtaaaagacgaaaaaatgggaccagagccaattatcaaaagtctctgggcggtaactgtggttgccaccatcgtaatcctgtttgttgccctgtactggtaa

SEQ ID NO: 263283 - DNA, 978 bp, Klebsiella pneumoniae
atgagcgaaacggcatcctggcagccgagcgcatccattcctaacttattaaaacgcgcgacgattatggcggagatccgtcgtttctttgccgatcgtggagtgctggaggtggagacgccttgtatgagccaggcgacggtaaccgatattcatttggtcccgtttgagacacgtttcgtaggccccgggcattcgcaggggatgaatctctggttaatgaccagcccggaataccatatgaaacgcctgctggttgctggttgtgggccggtattccagctgtgccgcagcttccgtaatgaagagatggggcgttatcacaaccctgagttcactatgcttgagtggtatcgaccgcactatgatatgtaccggttgatgaacgaggtggacgatctcttacaacaggtgctggactgcccggcagcagaaagcctttcttatcaacaagctttcttgcgttatctggaaattgacccactctctgctgacaaaacgcaactgcgggaagtggcagcgaaactggatttgagcaacgttgccgataccgaagaagaccgcgacacgctgctacaactgctgtttacctttggcgtagagccaaatattggcaaagaaaaaccgacctttgtgtaccactttccggccagccaggcatcactggcgcaaatcagtaccgaagatcatcgggtcgctgaacgctttgaggtttattataaaggtattgagctggcgaatggtttccatgaattgacggatgcccgtgagcagcaacaacgctttgaacaagataaccgtaagcgcgcggcgcgcggtttgccgcagcaccccattgaccagaatctgattgaagccttgaaagtcggtatgcctgactgttccggcgtggcattaggcgttgatcgtctggtgatgttggcgctgggcgcggagacactggctgaagtcatcgcctttagcgttgaccgggcataa

SEQ ID NO: 263284 - DNA, 1503 bp, Klebsiella pneumoniae
atgcctcacacgataaaaaagatgagtctgataggactcatattgatgatctttacttccgtatttggatttgccaatagcccatcggcttattacttaatgggttatagtgcgattcccttttatatattttctgcattgttattctttattccattcgccttaatgatggctgaaatgggagctgcttatcgcaaagaagaaggtggtatctattcctggatgaataatagtgtcggaccacgttttgccttcattggtacatttatgtggttttcctcttatatcatctggatggtgagtacctccgcgaaagtttgggttccgttctcaacattcctctatggtagcgacatgacccagcactggcgtattaccggactggagcctacgcaggtggttggtctgctggcagtggcatggatgattctggtcaccgtcgttgcttcaaaggggattaataaaattgcccgcattactgcggtgggcggtattgcagtaatgtgtctgaatttagtattgctgttagtaagcattactattttgttattaaatggtgggcatttcgcgcaggatattaatttccttgcatcaccgaacccaggttatcagtccggtctggcaatgctatcgtttgtggtatttgctatttttgcctatggcggaattgaagcggttggtggtctggtcgataaaacggaaaatccagaaaagaactttgccaaaggtattgtttttgccgctattgttatttcaatcggttattcgctggcaatatttttatggggcgtcagcacaaactggcagcaggtattaagtaatggttccgttaacctcggcaatattacctatgtgctgatgaagagcctcggggtgacgctgggtaacgcactgcatttgtcaccagaagcgtcattgtcgctgggcgtatggtttgcgcgtattaccggactttcgatgttcctcgcttataccggtgcgttctttacgctttgctattcaccgctgaaagccatcatccaggggacgccgaaagcgttgtggccggaaccgatgacgcgcctgaatgcgatggggatgccgtctatcgccatgtggatgcagtgcgggttggttactgtcttcatcctgctggtttcgtttggtggcggtaccgcatcggcgttctttaacaagctgacgctgatggcgaacgtgtctatgacgcttccttacctgttcctcgcgctggctttcccattctttaaagcacgtcaggatctcgacagaccatttgtgattttcaaaacgcgtatgtcggcaatgattgcgacggtggttgtcgttctggtggtgacatttgcgaacgtcttcaccatcattcaacctgtggttgaagccggagactgggacagcacattgtggatgattggcggccctgtcttcttctcgctgttagcgatggcgatttaccagaactattgcagcagagtggcaaaaaatccgcagtgggtggtggaataa

SEQ ID NO: 263285 - DNA, 303 bp, Klebsiella pneumoniae
atgtttgtcttgtgctgcatctggttcattgtggcgttcctctggataaccattacctccgcgctggacaaagagtggatgattgatggacgcgggattaacaacgtctgtgatgttttgatgtatctcgaagatgacgatactcgcgatgtcggtgtgataatgacgttaccgctctttttcccttttctctggttcgctttgtggcgaaaaaaacgcggctggtttatgtacgccaccgcgctggctattttcggctactggctgtggcagttttttctgcgctatcagttttgtttgtga

SEQ ID NO: 263286 - DNA, 858 bp, Klebsiella pneumoniae
atggctaccaaactgcaggacgggaatacaccttgtctggcagctacaccttctgaaccacgtcccaccgtgctggtgtttgactccggcgtcggtgggttgtcggtctatgacgagatccggcatctcttaccggatctccattacatttatgctttcgataacgtcgctttcccgtatggcgaaaaaagcgaagcgtttattgttgagcgagtggtggcaattatcaccgcagtgcaaaaacgttatccccttgcgctggctgtggtcgcttgcaacactgccagtaccgtttcacttcctgcattacgcgaaaagttcgacttcccggttgttggtgtcgtgccggcgattaaacctgctgcacgtctgacggcaaatggcattgtcggattactggcaacccgcggaacagttaaacgttcttatactcatgagctgatcgcgcgtttcgctaatgaatgccagatagaaatgctgggctcggcagagatggttgagttggctgaagcgaagctgcatggcgaagatgtttctctggatgcgctaaaacgtatcttgcgtccgtggttaagaatgaaagagccgccagataccgttgtactggggtgtacccatttccctctactacaagaagaactgttacaggtgctgccagagggaacccggctggtggattctggcgcagcgattgctcgccgaacggcctggttgctagagcatgaagccccggatgcaaaatctgccgatgcgaatattgccttttgtatggcaatgacgccagaagctgaacaattattgcccgttttacagcgttacggcttcgaaacgctcgaaaaactggcagttttagactga

SEQ ID NO: 263287 - DNA, 1845 bp, Klebsiella pneumoniae
atgattaaaaaagcttcgctgctgacggcgtgttccgtcacagccttttctgcttgggcacaggataccagcccggatactctcgtcgttactgctaaccgttttgaacagccgcgcagcactgtgcttgcaccaaccaccgttgtgacccgtcaggatatcgaccgctggcagtcgacctcggtcaatgatgtgctgcgccgtcttccgggcgtcgatatcacccaaaacggcggttcaggtcagctctcatctatttttattcgcggtacaaatgccagtcatgtgttggtgttaattgatggcgtacgcctgaatctggcaggggtgagtggttctgccgaccttagccagttccctattgcgcttgtccagcgtgttgaatatatccgtgggccgcgctccgccgtttatggttccgatgcgataggtggggtggtgaatatcatcacgacgcgcgatgaacccggaacggaaatttcagcagggtggggaagcaatagttatcagaactatgatgtctccacgcagcaacaactgggggataagacacgggtaacgctgttgggcgattatgcccatactcatggttatgatgttgttgcctatgggaataccggaacgcaagcgcagacagataacgatggttttttaagtaaaacgctttatggcgcgctggagcataactttactgatgcctggagcggctttgtgcgcggctatggctatgataaccgtaccaattatgacgcgtattattctcccggctcaccgttgctcgatacccgtaaactctatagccaaagttgggacgccgggctgcgctataacggcgaaatgattaaatcacaactcattaccagctatagccatagcaaagattacaactacgatccccattatggtcgttatgattcgtccgcgacgctggatgagatgaagcagtacaccgtccagtgggcaaataacgttaccgttggccacggtaatattggtgcgggcgttgactggcagaaacagactacgacgccgggtactggttatgttgaggatgggtatgatcaacgtaacactggtatctatctgaccggattgcaacaagtcggcgattttacgtttgaaggcgcagcccgcagcgacgataactcacagtttggtcgtcatggaacctggcaaacgagtgccggttgggaattcatcgaaggctatcgttttatcgcttcttatggcacgtcgtacaaggcacctaatcttgggcaactgtatggtttctacggaaatccgaatctgaatcctgagaaaagcaaacagtgggaaggcgcgtttgaaggcttaaccgctggggtgaactggcgtatttccggatatcgtaacgatgtcagtgatttgatcgattatgatgatcacaccctgaaatattacaacgaagggaaagcgcggattaagggcgtcgaggcgaccgccaattttgataccggaccactgacgcatactgtgagttatgattatgtcgatgcgcgcaatgcgattactgacacgccgttgttacgccgtgctaaacagcaggtgaaataccagctcgactggcagttgtatgacttcgactggggtattacttatcagtatttaggcactcgctatgataaggattactcatcttatccttatcaaaccgttaaaatgggtggtgtgagcttgtgggatcttgcggttgcgtatccggtcacctctcacctgacagttcgtggtaaaatagccaacctgttcgacaaagattatgagacagtctatggctaccaaactgcaggacgggaatacaccttgtctggcagctacaccttctga

SEQ ID NO: 263288 - DNA, 360 bp, Klebsiella pneumoniae
atgaaacaagcaaatcaagatagaggtacgctgctgctggcgttagttgctggcttatcgattaatggtactttcgcagcgctgtttagctccattgtgccattttctgtattcccgattatttccctggtgctgacggtttattgcctgcatcaacgttatcttaatcgcaccatgccggtaggcttgccgggtctggctgctgcctgttttattcttggcgtactgctgtacagcacggtagttcgtgcggaatatccggatatcggctctaacttcttcccggcagtactgtccgtcattatggtgttctggattggcgcgaagatgcgtaaccgtaagcaggaagttgctgagtaa

SEQ ID NO: 263289 - DNA, 1401 bp, Klebsiella pneumoniae
atgccacattcctacgattacgatgccatagtgataggttccggccccggcggcgaaggcgctgcaatgggcctggttaagcaaggtgcgcgcgtcgcagttatcgagcgttatcaaaatgttggcggcggttgcacccactggggcaccatcccgtcgaaagctctccgtcacgccgtcagccgcattatagaattcaatcaaaacccactttacagcgaccattcgcgactgctccgctcttcttttgccgatatccttaaccatgccgataacgtgattaatcaacaaacgcgcatgcgtcagggattttacgaacgtaatcactgtgaaatattgcagggaaacgctcgctttgttgacgagcacacgctggcgctggattgcccggacggcagcgtcgagacactaaccgctgaaaaatttgttattgcttgcggctctcgtccatatcatccaacagatgttgatttcacccatccacgcatttacgacagcgactcaattcttagcatgcaccacgaaccgcgccatgtacttatctatggtgctggagtgatcggctgtgaatatgcgtcgatcttccgcggtatggatgtaaaagtggatctgatcaacacccgcgatcgcctgctggcatttctcgatcaagagatgtcagattctctctcctatcacttctggaacagtggcgtagtgattcgtcacaacgaagagtacgagaagatcgaaggctgtgacgacggtgtgatcatgcatctgaagtcgggaaaaaaactgaaagctgactgtctgctctatgccaacggtcgcacgggtaataccgattcgctggcgttacagaacattgggctggaaactgacagtcgcggacagctgaaggtcaacagcatgtatcagaccgcgcagccgcacgtttacgcggtgggcgacgtgattggctatccgagcctggcgtcggcggcctatgaccaggggcgcattgccgcgcaggcgctggtgaaaggtgaagccaccgcacatctgattgaagatatccctaccggcatttacaccatcccggaaatcagctctgtgggcaaaaccgaacagcagctgaccgcgatgaaagtgccatatgaagtgggccgcgcccagtttaaacatctggcacgtgcacaaatcgtcggcatgaacgtgggcacgctgaaaattttgttccatcgggaaacgaaagagattctgggcattcactgctttggcgagcgcgctgccgaaattattcatatcggtcaggcgattatggaacagaaaggtggcggcaacactattgagtacttcgtcaacaccacctttaactacccgacgatggcggaagcctatcgggtagctgcgttaaacggtttaaaccgcctgttttaa

SEQ ID NO: 263290 - DNA, 1215 bp, Klebsiella pneumoniae; identical to SEQ ID NO: 9665

SEQ ID NO: 263291 - DNA, 900 bp, Klebsiella pneumoniae
atgttttctgggctgttaatcattctggttcccctgattgtgggttacctcattcctcttcgccaaaaagctgcattaagagttattaatcagctattaagctggatggtttacctcattctcttttttatgggtatcagtctggcgtttctcgataacctcgccagtaacctgttggcgattctgcattattccgccgtcagcattaccattattttactctgcaatattattgcgttgttgtggctggagcgcggtctgccgtggcgcaaccaccaccagcaagaaaaactcccgtcgcgtattgcgatggcgctggagtcgctaaaactgtgcggcgtagtagtgattggttttgccattggcctgagtggactggctttcttacaacatgcgaccgaagccagtgaatacaccttaattctgctacttttcctcgtcggtattcagttgcgcaataatggcatgaccttaaagcagattgtccttaatcgccggggaatgattgtcgccgtggtggtggttgccagttcattaattggtggtttaattaacgcctttattcttgatcttcccatcaataccgcgctggcaatggcctctggtttcggctggtattctctttccggtattttattgactgaatcttttggtccggtaatcgggagcgcggcgttttttaatgatctggcccgtgagctgattgcaattatgttgatccctgggctgattcgccgcagccgctctaccgcactgggcttatgcggtgcgacgtcgatggatttcaccctgcccgttcttcaacgtactggcgggctggatatggtcccggcggcaattgttcacggttttattcttagcctgttagtgccgatcctcatcgcctttttctctgcgtaa

SEQ ID NO: 263292 - DNA, 1653 bp, Klebsiella pneumoniae
atgttttgtgtgcaatgtgaacaaactatccgtactccggcaggaaacggctgctcatacgcgcaggggatgtgtggtaaaacggcggaaacctctgaccttcaggatttactcatcgcggcgctgcaagggctttcggcctgggcggtaaaagcgcgtgaatacggcatcatcaaccacgatgtagacagctttgcgccacgcgcatttttctcaaccctgaccaacgttaacttcgattctccgcgtatagtcggctacgctcgtgaagcgattgccctgcgcgaggcgctgaaagcacaatgcctggctgtagatgccaacgcccgcgtcgataacccgatggctgacctgcaactggtgagcgatgatctcggcgagctgcaacgtcaggcagcagaatttacccctaacaaagataaagcggcgattggcgaaaacattctcggcctgcgtctgctgtgcctgtatggcctgaaaggtgcggcggcctatatggaacacgcgcatgttctcggtcaatacgacaacgatatttacgcccagtaccataaaatcatggcgtggctgggaacctggcctgccgatatgaacgcgcttcttgagtgttcaatggaaatcggccagatgaacttcaaagtgatgagcattctggacgcaggcgaaaccggtaaatacggtcacccgaccccaacccaggtcaacgtcaaagcgacggcaggtaaatgcattctgatttccggtcacgatctcaaagatctctacaacctgctggaacagaccgaaggcacgggcgttaatgtctacacccacggcgaaatgctgcctgcgcatggctacccggagctgcgtaaattcaagcatctggtcggtaactacggcagcggctggcagaatcagcaagtggagttcgctcgtttccctggccccatcgtgatgacctcgaactgcatcatcgacccaaccgtaggcgcttatgacgatcgtatctggacccgcagcatcgttggctggccgggtgtgcgtcatctggatggcgaagatttctctgcggtcatcgcccaggcgcaacaaatggcgggcttcccgtacagcgaaattccgcacctgatcaccgtgggctttggtcgccagacactgcttggcgcagcggatacgctgattgatctggtaagtcgtgaaaaactgcgtcatatcttcctgcttggcggctgtgacggcgcacgcggcgagcgtcactacttcaccgatttcgccaccagcgtgccggatgactgtctgatcctgactctcgcctgtggtaaatatcgctttaacaaactcgagtttggcgatatcgaaggtctgccgcgtctggtagatgctggtcagtgtaacgatgcttactcagcgattattctggcggtaacgctggcagagaaactgggctgcggagtcaacgatctgccgctgtcgctggtgctctcgtggtttgaacagaaagcgattgtcattctgctgacactgctttctctgggtgtgaaaaatatcgtcaccggcccgactgcacctggtttcctgacaccagacctgctggcggtgctgaacgagaaattcggcctgcgttctatcaccactgttgaagaagacatgaagcaactgttgagcgcgtaa

SEQ ID NO: 263293 - DNA, 969 bp, Klebsiella pneumoniae
atgacgatgccaacgaatcaatgcccgtggcggatgcaggttcatcacattaagcaagaaacgccggatgtgtggacgatttccctgatttgccacgattactacccatatcgcgccgggcaatatgcactggtcagcgtgcgtaactcagccgaaacgctgcgtgcttacaccatttcctccacgccaggcgtgagtgaatacatcaccctgactgtgcggcggattgatgacggtgtcggctcccagtggctgacgcgcgatgtaaaacgcggtgattatctctggctttcggacgcgatgggggaatttacctgcgacgataaagcagaagataaattcctgttgctggcggcaggctgcggcgtcacgccgattatgtcgatgcgtcgctggctggcgaagaaccgtccgcaggccgatgtgcaggtgatctacaacgtgcgttcgccgcaggatgttattttcgccgatgagtggcgtaactatccggtgacgctggtggcagaaaataacgttaccgaaggctttatcgctggtcgtctcactcgcgaactgctgactcgcgttcctgacttagcttcacgtaccgtgatgacctgcggcccggctccgtatatggattgggtagagcaggaagtgaaagcgctcggcgtgacgcgtttctttaaagagaaattcttcaccccagtagcggaagcggcgaccagcggtctgaaattcaccaaactgcaaccggcacgagaattttacgccccggttggcaccacgctactggaggcgctggaaagcaataacgttccggttgtcgctgcctgccgtgcgggtgtttgcggctgctgtaagacgaaagtggtttccggtgaatatacggtgagcagcacaatgacgctgaccgacgccgaaatcgctgaaggttacgtgctggcctgctcctgccatccgcagggagatttggttctcgcataa

SEQ ID NO: 263294 - DNA, 1719 bp, Klebsiella pneumoniae
atgaaacaaacggttgcagcttatatcgccaaaacactcgaatcggcaggcgtgaaacgcatctggggagtcacgggcgactctctgaacggtcttagcgacagtcttaatcgcatgggcaccatcgagtggatgtccacccgccatgaagaagtggcggcctttgccgctggtgctgaagcacaactttcaggagaactggcggtctgtgccggatcgtgcggccccggcaacctgcacttaatcaacggcctgttcgattgccaccgcaatcacgttccggtactggcgattgccgctcatattccctccagcgaaattggcagcggctatttccaggaaacccacccacaagagttattccgcgaatgtagtcactattgcgagctggtttccagcccggagcaaatcccacaagtgctggcgattgccatgcgcaaagcggtgctaaaccgtggcgtttccgttgtcgtgttaccgggcgacgtggcgttaaaacctgcgccagaaggggcaacctcgcactggtatcatgcgccacagccagtcgtgacgccggaagaagaagagttacgcaaactggcgcaactgctgcgttattccagcaatatcgctctgatgtgtggcagcggctgcgcgggggcgcataaagagttagttgagtttgccgggaaaattaaagcgcctattgttcatgccctgcgcggtaaagaacatgtcgaatacgataatccgtatgatgtcggaatgacgggattaattggcttctcgtcaggtttccataccatgatgaacgccgacacgttagtgctactcggtactcagttcccctaccgcgccttctacccgaccgatgccaaaatcattcagattgatatcaacccagccagcatcggcgctcacagcaaggtggatatggcactggtcggcgatatcaagtcaactctgcgtgcattgctgccattggtggaagaaaaagccgatcgcaagtttctggataaagcgctggaagattaccgcgacgcccgcaaagggctggacgatttagctaaaccgagcgagaaagccattcacccgcaatatctggcgcagcaaattagtcattttgccgccgatgacgccatctttacctgtgacgttggtacgccaacggtgtgggcggcacgttatctgaaaatgaacggcaagcgtcgtctcttaggttcgtttaaccacggttcgatggctaacgccatgccgcaggcgctgggtgctcaggcaaccgagccggaacgtcaggtggtcgccatgtgcggcgatggcggttttagcatgttgatgggcgatttcctctcagtagtgcagatgaaactgccggtgaaaattatcgtctttaataacagcgtgctgggctttgtggcgatggagatgaaagctggtggctatttgactgacggcaccgaactacatgacaccaactttgcccgcattgccgaagcgtgcggaattacgggtattcgcgtggaaaaagcctctgaagtcgatgaagccctgcaacgcgccttttccatcgacggtccggtgctggtggatgtggtggtcgccaaagaagaattagccattccaccgcagatcaaactcgaacaggccaaaggttttagcctgtatatgttgcgcgcaatcatcagcggacgcggtgatgaagtgatcgaactggcgaaaacaaactggctaaggtaa

SEQ ID NO: 263295 - DNA, 1002 bp, Klebsiella pneumoniae
atgattgatttacgcagtgataccgttacccgaccgagccgcgccatgctcgaagcgatgatggccgccccggttggggacgacgtttacggagacgaccctaccgttaatgctctgcaggactatgcagcagagctttccggtaaagaagccgccatttttctgcctaccggcactcaggccaacctggtcgctctgctcagtcactgtgaacgcggcgaagagtatattgtcggtcaggccgcgcataactatctgtttgaagccggtggcgcggcggtgctgggcagtattcaaccgcaacccatcgacgcggctgccgacggcacgctaccgctggataaagtggcgatgaaaatcaaacccgacgatatccatttcgcccgcaccaaattactcagtctggaaaacacccacaacggcaaagtgctgccgcgggaatacctgaaagaagcatgggaatttactcgcgagcgcaatctggcgctgcatgttgacggtgcgcgcatctttaatgccgtggtggcttacggctgcgaactgaaagagatcacgcaatattgtgattcgttcaccatttgcctgtcgaaaggacttgggacgccagtcggctcgttactggtcggtaatcgtgattacattaaacgtgccatccgctggcggaaaatgaccggtggcgggatgcgccagtccggcattctggctgccgccgggatgtatgccctgaaaaataacgtcgcgcgcttacaggaagaccacgacaacgccgcctggatggcggagcagttgcgtgaagcaggcgcggatgtgatgcgtcaggacaccaatatgctgtttgttcgcgtcggggaagaaaatgctgccgcgttaggcgaatacatgaaagcgagaaacgtgctgattaacgcctcgccgattgtccgcctggtgacgcatctcgacgtctcgcgcgagcaactggctgaagtcgccgcccactggcgcgcattcctggcgcgttaa

SEQ ID NO: 263296 - DNA, 1431 bp, Klebsiella pneumoniae
gtgccgcaacgcattttagttctcggtgccagtggctacattggtcagcatctggtgcgaacactcagccagcaggggcatcagatcctggcggcggcacgtcatgtcgacaggcttgcaaagctgcaactggcaaatgtcagttgccataaagtcgatctcagctggccggataaccttccggccctgttgcaggatatcgatacggtctattttctggtgcacagcatgggcgaaggcggcgattttatcgctcaggagcgccaggtggctctcaacgtccgcgatgcgctacgtgaagtcccagttaagcaattaatctttctcagttcgttgcaggccccgccacatgagcaatcggaccatctgcgtgcccgtcaggctacggcggatattcttcgtgaagcgggtgtcccggtgaccgaattgcgtgccggaataatcgttggtgcaggttcagcggcgttcgaagtcatgcgcgatatggtctacaacctgccagtcttaacgccgccacgctgggtacgttcacgcaccacgcccatcgcgctggaaaacttgctgcactatctggtggcgctgttagatcatccggcctgcgaacatcgcatcttcgaagccgccggaccagaagtgctcagttatcagcaacagtttgaacattttatggcggtgagcggtaagcgtcgctggttgatccccatccctctccccacccgctggatttcggtgtggtttctcaatgtgattacttccgtaccacccaccaccgccagggcgttgattcaggggctgaaacacgatctgctggcggatgacaccgagctacgtgcgctcatcccacaacggctgatcgctttcgatgacgcggtacgtcgcaccctgaaagaggaagaaaagctggtcaactccagcgactggggctacgacgctcaggcctttgcccgctggcgaccggagtacggttatttcgccaaacaggcggggtttaccgttaaaacgtccgccagccttgcggctttatggcaggtggtgaatcaaatcggcggtaaagagcgttatttctttggcaatattttgtggcaaacccgggcgttgatggaccgcgcgatcggtcataagctggcgaaaggccgcccggagcgtgaatatttgcagaccggcgatgcggtggatagctggaaagtgattgtcgttgaaccggaaaaacaacttacgctgttatttggcatgaaagcgccggggctgggacgactgtgttttaccctggaagataaaggcgactatcgtactatcgatgttcgcgcattctggcatccgcacggtatgccggggctgttttactggttattgatgatccccgcgcatctgtttatttttcgcggaatggcaaaacgaatcgccagactggcagaacaaagcacagattaa

SEQ ID NO: 263297 - DNA, 1014 bp, Klebsiella pneumoniae
atgaaggtactggttaccggcgccaccagcggcttaggtcgaaacgcggtagagtttttatgccagaaaggcatcagcgtgcgagcgaccggtcgcaacgaggcaatgggtaaattgctggaaaaaatgggcgcagagtttgttccggcggatctgaccgagctggtctcatcacaagctaaagtgatgctcgcgggcattgatacgctgtggcactgctccagctttacctcgccctgggggacacaacaggctttcgatctggctaacgttcgcgccactcgccgcctgggtgaatgggctgtcgcctggggtgtgcgtaactttattcatatctcttccccctccctgtacttcgattatcaccaccatcgcgatattaaagaagattttcgccctcaccgctttgccaacgagtttgcccgcagcaaagcagccagcgaagaagtgatcaatatgctttcgcaggcgaatccacaaacgcgctttactattctgcgcccacaaagtctgttcggaccgcacgataaagtctttatcccccgtctggcgcatatgatgcaccactacggcagcattctgttaccgcacggcggcagtgcgctggtcgatatgacctactatgaaaatgccgtgcacgccatgtggctggcaagccaggaagcctgcgataagctaccttccgggcgtgtgtacaacatcaccaacggcgagcatcgcacactgcgcagcatcgtgcagaagctgatcgacgagttgaatattgactgtcgtattcgttccgtcccctacccgatgctggatatgatcgcccgcagcatggagcgtttaggccgcaagtcagcaaaagagccgtcgctgacccactacggcgtctccaagttgaattttgactttacgctggatattacgcgtgcgcaggaagagttaggttatcaaccagtcctcaccctggatgaaggtatcgagaaaactgccgcctggctacgcgaccacggaaaactgccgcgctaa

SEQ ID NO: 263298 - DNA, 831 bp, Klebsiella pneumoniae
atgagaagagtcttctggctggtcgccgccgctctgttactggcagggtgtgccggcgaaaagggcattgtcgagaaagagggatatcagcttgatacccgacgccaggcgcaggcggcgtatccgcgcattaaagtgctggttatccactacaccgcagatgattttgatagctcgctggcgacactgaccgataagcaggtcagttcgcattatctggtgcctgctgtgccaccgcgatacaacggtaaaccgcgcatctggcaactggtgccggaacaggagctggcctggcatgcggggattagcgcctggcgcggggcaacgcgccttaacgacacctctattggcattgagctggaaaaccgtggctggcagaaatcatccggagtgaaatattttgccccgtttgaacaggcacagattcaggcgcttattccgctggcgaaagatattattgcccgttatcacatcaagccggaaaacgtagtggcgcatgcggatattgcgccgcagcgcaaagacgatccggggccgttattcccctggcaacaactggcgcagcaggggattggtgcctggccggatgcgcaacgggtgaacttttaccttgccgggcgcgcgccgcacacaccggtagataccgcatcattgctggagcttttggcgcgctacggttatgacgttaaacctgatatgacaccgcgcgagcagcggcgcgtgattatggcgttccagatgcatttccgcccgacgttatacaacggcgaagcggatgcagaaactcaggcgattgccgaagcgttgctggagaaatacgggcaggattag

SEQ ID NO: 263299 - DNA, 324 bp, Klebsiella pneumoniae
atgcaattttctacaaccccaactctggaaggccagaccatcgtcgaatattgcggtgtggtgaccggcgaagcgattttaggtgccaatattttccgtgatttctttgccggtatccgcgatatcgttggcggacgctccggggcttatgaaaaagaattgcgtaaagcgcgggagattgcctttgaggagctcggcgatcaggcccgggcgctgggggctgatgccgtagtcggtattgatatcgactacgaaacggtcgggcaaaatggcagtatgctgatggttagcgtcagcggtacggcggtgaaaacgcgtcgatga

SEQ ID NO: 263300 - DNA, 552 bp, Klebsiella pneumoniae; identical to SEQ ID NO: 15975

SEQ ID NO: 263301 - DNA, 168 bp, Klebsiella pneumoniae; identical to SEQ ID NO: 9878

SEQ ID NO: 263302 - DNA, 477 bp, Klebsiella pneumoniae; identical to SEQ ID NO: 9881

SEQ ID NO: 263303 - DNA, 246 bp, Klebsiella pneumoniae; identical to SEQ ID NO: 9882

SEQ ID NO: 263304 - DNA, 126 bp, Klebsiella pneumoniae; identical to SEQ ID NO: 9883

SEQ ID NO: 263305 - DNA, 459 bp, Klebsiella pneumoniae; identical to SEQ ID NO: 9884

SEQ ID NO: 263306 - DNA, 681 bp, Klebsiella pneumoniae
ttggtaacacgcaacacgttgaaaagtattttcgaagcggaaggctatgatgttttcgaagcgacagatggcgcggaaatgcatcagatcctctctgaatatgacatcaacctggtgatcatggatatcaatctgccgggtaagaacggtcttctgttagcgcgtgaactgcgcgagcaggcgaatgttgcgttgatgttcctgactggccgtgacaacgaagtcgataaaattctcggcctcgaaatcggtgcagatgactacatcaccaaaccgttcaacccgcgtgaactgactattcgtgcacgcaacctgctgtcccgtaccatgaatctgggtactgtcagcgaagaacgtcgtagcgttgaaagctacaagttcaatggttgggaactggacatcaacagccgttcgttgatcggccctgatggcgagcagtacaagctgccgcgcagcgagttccgcgccatgcttcacttctgtgaaaacccaggcaaaattcagtcccgtgctgaactgctgaagaaaatgaccggccgtgagctgaaaccgcacgaccgtactgtagacgtgacgatccgccgtattcgtaaacatttcgaatctacgccggatacgccggaaatcatcgccaccattcacggtgaaggttatcgcttctgcggtgatctggaagattaa

SEQ ID NO: 263307 - DNA, 1353 bp, Klebsiella pneumoniae; identical to SEQ ID NO: 15810

SEQ ID NO: 263308 - DNA, 1425 bp, Klebsiella pneumoniae
atgcgtatcggcatgcggttgctgctgggctattttttactggtggcggtggcagcctggttcgtactggccatttttgtcaaagaagttaaaccgggcgtgcgaagagcaacggaggggacattgatcgacaccgcaacgttgctggcggagctggcgcgtcccgatttgctctctggggacccaacgcatgggcaactggcgcaggcgtttaatcagctacagcatcgcccgtttcgcgccaatatcggtggcattaacaaagtgcgcaatgaatatcatgtctatatgaccgatgcgcagggcaaagtattgttcgattcggcaaataaagccgttggacaggattattcgcgctggaatgacgtctggctaacgttgcgtggtcagtatggtgcgcgcagcacgttgcaaaatcctgccgatcccgaaagttcggtgatgtatgttgccgcgccgattatggacggctcgcggcttattggcgttttgagcgtaggcaaaccgaacgcggcgatggctccggtcattaaacgcagcgagcggcgaattttatgggccagcgccattttgttggggattgcactggtgattggcgcaggcatggtttggtggatcaaccgctccattgcccggctcactcgctatgctgattccgtcactgacaataagcccgttcctcttcccgatctcggtagtagcgagctgcgtaaactcgcgcaggcgctggaaagtatgcgcgtgaagctggaagggaaaaactatattgagcagtatgtttacgcattaactcatgagctaaaaagcccactggcggcgattcgtggagcggcggaaattttacgcgaaggtccgccgccggaagtggtggctcgttttactgacaacattctgacgcaaaatgcgcgtatgcaggcattggtagaaacgttactacgccaggcaagactggagaatcgtcaggaagtcgttctgactgctgttgatgtggcggcattattccgccgcgtcagcgaagcgcgcaccgtgcagttggcagaaaaaaaaatcactctgcatgttacgcccaccgaggttaacgttgctgctgaaccggcgttactggagcaggcgctgggaaatttactggataacgccatcgattttacccccgagagcggttgcatcacgctaagcgccgaagtggatcaggaacacgtcacgcttaaggtgctggataccggtagtggtattcctgactacgcgctttcacgtatttttgaacgcttttactctttgcctcgtgcaaatggtcaaaaaagcagcggtctggggttggcgttcgtcagtgaggtcgcccgtttgtttaacggcgaagtcacgctgcgcaacgtgcaggaaggtggcgtgctggcttcgcttcgacttcaccgtcacttcacatag

SEQ ID NO: 263309 - DNA, 690 bp, Klebsiella pneumoniae
atgcaacgggaaacggtctggttagtggaagatgagcaagggatagccgacacgctggtctacatgttgcagcaggaaggttttgccgtcgaggtctttgagcgaggcttgccggtgctggataaagctcgccagcaggtacccgacgtcatgattctcgatgttggtctgccggatattagcggctttgaattgtgccgccagttactggcgctccatccggcgttacctgtactgttcctgacggcccgaagtgaagaggtcgatcgcctgcttgggctggaaattggcgctgacgactatgtggctaaaccgttttcaccccgcgaagtgtgcgccagggtgcgcaccttactgcgtcgggtgaagaagttctcgacgccgtctcccgtcatccgtattggacattttgaattgaatgaacccgcggcgcagatcagctggtttgacacgccattaacgctgacgcggtatgagtttttattgctgaagacgttactcaagtcgccaggccgcgtctggtcccgccagcaactgatggatagcgtgtgggaagatgcgcaggacacctacgatcgcaccgtcgatacccacattaaaacgttgcgtgccaagctgcgcgccatcaaccccgatctttcaccgattaatactcatcgcggcatgggatatagcctgaggggcctgtaa

SEQ ID NO: 263310 - DNA, 474 bp, Klebsiella pneumoniae
atgaaatacaagcatttgatcctgtctttaagcctgataatgctggggccattggctcatgcagaagagattggttcggtcgacaccgtatttaaaatgatcggcccggatcacaaaattgttgtggaagcctttgacgatcccgatgtgaaaaatgtcacctgttatgtgagccgggcgaaaaccggtggtattaaagggggattgggcctggcagaagatacctctgatgcggccatttcttgtcagcaagtcgggccgattgaactgtcggatcgtattaaaaacggcaaagctcagggcgaggtagtattcaaaaaacgcacgtccctggtctttaagtcgttacaggtcgtgcgcttttatgatgccaaacgcaacgcgctcgcttatctggcttactccgacaaagttgtagaaggttcgccgaaaaacgcgattagcgcggttcctgtcatgccgtggcggcaataa

SEQ ID NO: 263311 - DNA, 870 bp, Klebsiella pneumoniae
atggatcaggccggcattattcgcgaccttttaatctggctggaaggtcatctggatcagcccctgtcgctcgacaatgtagcggcgaaagcaggttattccaagtggcacttacagagaatgtttaaagatgtcactggccatgctattggcgcgtatattcgtgctcgtcgtttgtcgaaatcggcggtcgcactacgcctgactgcgcgtccgattctggacatcgcgctgcaataccgcttcgactctcaacagacatttacccgcgcattcaagaagcagtttgcccagactcctgcactttaccgccgttctcctgaatggagcgcctttggtattcgcccgccgctacgcctgggtgaattcactatgccagagcacaaatttgtcaccctggaagatacgccgctgattggtgttacccagagctactcctgttcgctggagcaaatctctgatttccgccatgaaatgcgttatcagttctggcacgattttctcggcaacgcgccgaccattccgccggtgctctacggcctgaatgaaacgcgtccgagtcaggataaagacgacgaacaagaagtattctataccaccgcgttagcccaggatcaggcagatggctatgtactgacggggcatccggtgatgctgcagggcggcgaatatgtgatgtttacctatgaaggtctgggaaccggcgtgcaggagtttatcctgacggtatacggaacgtgtatgccaatgctcaacctgacgcgccgtaaaggtcaggatattgagcgatactacccggcagaagatgccaaagcgggagatcgcccaattaatctgcgctgtgaactgctgattccgatccgtcgttaa

SEQ ID NO: 263312 - DNA, 648 bp, Klebsiella pneumoniae
atgttacaggtatacctagtccgccacggtgaaacgcagtggaacgccgagcgacgtattcagggccagtctgacagcccgctgaccgccaaaggtgagcaacaggcgatgcaggtggcaacccgtgccaaagagcttggcattacgcatatcatcagtagcgatttaggacgcacccggcgtacggcggaaatcatcgcccaggcctgcggctgtgacatcatctttgattctcgcctgcgtgaattaaacatgggtgtgctggaaaaaagacatatcgattctctgaccgaagaagaagagaactggcgtcggcagctggtcaatggcaccgttgacgggcgtattcctgaaggcgagtcaatgcaggagctcagcgatcgcgtcaatgcggcactggaatcttgccgggacttaccgcagggaagccgaccgctgctggtgagccacggtattgcactgggatgcctggtgagtacgattctcggattaccagcatgggcagagcgtcgcttacgtctgcgtaactgttctatttcgcgcgtggattatcaggaaagcctgtggctggcgtctggttgggtcgttgaaaccgcaggggacatctcgcatctggacgcccctgcattagatgagctgcagcgttaa

SEQ ID NO: 263313 - DNA, 516 bp, Klebsiella pneumoniae
atgcaccaagttgtctgtgcgaccaccaatcccgctaaaattcaggccattctgcaggcatttcacgagatcttcggcgaaggatcctgccatattgcatccgttgccgtcgagagcggtgtaccggaacagccctttggcagtgaggaaacgcgcgctggcgcacgaaatcgggtagcaaatgcccgccgtttacatccagaggctgatttttgggtggcgattgaagctggcattgatggcgacagcaccttcagttgggtggtgattgaaaacgccagccagcgcggcgaggcgcgttcggctactttgccgttacctgcggtgattctggaaaaagtgcgtgaaggcgaggcgctcggtcccgtgatgtcgcgctataccggtattgatgagattggtcgtaaggaaggggcgatcggcgtgtttaccgccgggaaacttacccgcgccagcgtctatcaccaggcggtgatcctggcgctgagtccgtttcataatgcggtgtatcagtga

SEQ ID NO: 263314 - DNA, 297 bp, Klebsiella pneumoniae
atggcagaacagcgtcaccaggagtggttacgttttgtcgacctgcttaagaatgcctaccaaaacgatctccatttaccgttgttaaacctgatgctgacgccagatgagcgcgaagcgttggggactcgcgtgcgtattgtcgaagagttgttgcgcggcgaaatgagccagcgtgagttaaaaaatgaactcggcgcgggcatcgcgacgattacgcgtggatctaacagcctgaaagccgcgcccgtcgagctgcgccagtggctggaagaggtgttgctgaaagatcactga

SEQ ID NO: 263315 - DNA, 1938 bp, Klebsiella pneumoniae; identical to SEQ ID NO: 9440

SEQ ID NO: 263316 - DNA, 729 bp, Klebsiella pneumoniae
  misc_feature (659)..(668): n is a, c, g, or t
gtgggtaatcgccacaacagtgccttcgaagtcgtgcaggaagcgttccagccacgccacggattcggcatccaggtggttcgtcggttcgtcgagcagcagcatgtctggtttttccagcagcaggcggcacaacgccacgcgacgacgctcaccaccggagaggttagcgattttcgcgtcccagtccggcagacgcagcgcatccgccgcacgctccagctgaacgttcaggttgtgaccgtcgtgagcctgaatgatctcttccagacggccttgttcagcggccagcttgtcaaaatcggcatccggatcggcgtacagcgcatacacttcatccaggcgtttcagggcgttaaccacttcagaaaccgcttcttcaatggactcacgcacggtgtgttccgggttcagctgcggttcctgcggcagataaccaatcttgatatccggttgcggacgcgcttcgccttcgatgtctttatcaatgcccgccataatgcgcagcagggtggacttacccgcgccgttcagacccaggacaccaatttttgccccagggaagaaactcagagagatgtttttcaaaatatgacgtttcggcggaacaactttgccgacacgatgcatggtataaacgaattgagccacgttggacnnnnnnnnnnacacgatgcatggtataaacgaattgagccacgttggacttcgcctctatgtttatcgtga

SEQ ID NO: 263317 - DNA, 174 bp, Klebsiella pneumoniae
atgcagacgaccgcgctcaccgccggagagttcaccaacgcgtttaccctgatcaacccctttaaagttaaagcggccaacgtaggcacggcttggcatctcggtgttgccgatcttcatgatatccagcccgccggaaacttcttcccaaacggttttgctgttatccattga

SEQ ID NO: 263318 - DNA, 414 bp, Klebsiella pneumoniae; identical to SEQ ID NO: 5302

SEQ ID NO: 263319 - DNA, 432 bp, Klebsiella pneumoniae
atgttcctgaaaacagaacaatttgaatataacggtgtatccgtcacgctttctgagctgtctgcgctgcagcgtattgagcatcttgccctcctgaaacggcgggcagaagaggctgaagccagcggcaacctgcaggtgagtgtggaagatcttgtcagaaccggcgcgtttctggtggcgatgtccctgtggcataaccatccacagaaaacgcagtcaccgtcaatgaatgaggccgtgatgaagatagagcaggaagtgctcaccacctggcctgccgatgccattgcccgggcggaagacgtggtgttgtgcctgtccgggatgatcgaagctgttcgtccggatactgatattactgaagtggcgaaaaataacacgctgactgatgatgatttttctgcgggaaagtcttcgacggcgagctga

SEQ ID NO: 263320 - DNA, 747 bp, Klebsiella pneumoniae
atggcaacaccaaatccccttgagccggtaaaaggtgccggtaccactctgtgggtttacaacggcaaggctgatgcttatgcaaacccgttgtcagacgatggctggcagcgactggctaaggtgaaggatctgacgccgggcgagatgacggctgaaccctacgatgataactacctggatgatgaagacgcggactggaccgcgaccgggcagggacagaaatctgcaggtgataccagttttacgctggcctggaaaccgggagaggaaggccagaaagggcttataggctggtttgaaagcggcgatgtccgggcctataaaatccgttttccgaatggcacggtggatgtgtttcgtggctgggtcagcagtatcggtaaggccgtgacggcgaaagaagtgatcacccgcacggtgaaagtcactaacgtgggtaaaccttctgtagcggaagaacgcagcaaaattacgccggtcactgcgattaaggtaacgccgacaggtacggttgaaaaagggaaaacaaccaccctgaccgttactgtggaaccggaaaatgcaacggataagacattcagggcgatttccgccgatccatcaaaagccaccattagcgtgaaagatatgacgattactgtgacgggggttaaggatggaaaagtcagcatccctgtgatttccggtaatggtcagtttgctgcggtggctgaaattaccgttaataatgtgccgggtggctaa

SEQ ID NO: 263321 - DNA, 396 bp, Klebsiella pneumoniae; identical to SEQ ID NO: 5305

SEQ ID NO: 263322 - DNA, 534 bp, Klebsiella pneumoniae
atggcgataaaagggcttgatcaggcgattgataatctgagccgggttcgtaaaaacgccattccggcggcttcagcaatggccattaaccgcgtggccacaacggcgattaatcagtcttcatcacaggttgcccgggagacaaaggtacgccggaaactggtaaaggaacggtccagactgaaacgggcgacggtcagaaatccgaacgcaaaaattatcgttaaccgcggtgatcttccagtgattaagctggggatcaggatgctgggccgtcgtccgaacagcatacttaaagccggtcagcatcggtatcagcgggcattcattcagcgattaaaaaacggtcgctggcatgtcatgcagcgtgtggccgggaaaaaccgttaccctattgatgtggtgaaaatcccgatggcggccccactgaaacaggcgtttgatgagaatgttgaccgtatccggcgtgaacgcctgcccggagaactggcatccgcgctgaaacaacaactgaggattacgataaaacgatga

SEQ ID NO: 263323 - DNA, 354 bp, Klebsiella pneumoniae
atgcgtgattttcagaatgcctttgatgctgcccttgccggggtggacagcacgattgttgaagtgatggggatccgtgcgcagttcacctccggagcacaacgtggcggcgaagttcagggggtttttgacgatccggagtcgctgggttttgccggtggcggggtccgtattgaaggaagcagcccgtcattatttgtgcggacggatacggtgcgtgccgtgcggcgtggtgacacgctgaccattaacggcgagatgttctgggtggatcgtgtttctccggatgacgggggaagctgttatctctggctcaaccgtgggcaaccacccgctgttaaccggcgacgataa

SEQ ID NO: 263324 - DNA, 384 bp, Klebsiella pneumoniae; identical to SEQ ID NO: 10122

SEQ ID NO: 263325 - DNA, 1029 bp, Klebsiella pneumoniae
atgggattgtttacgacccgccagttactcggttataccgaacaaaaagtgaaattccgtgcgctgtttctggagctgtttttccgccgtacggtgaatttccacaccgaagaggtgatgctggacaaaattaccggaaaaacgccggtggcggcctatgtctccccgatcgttgaaggaaaagtgcttcgccatcgcggtggtgaaacccgcgtgttacgtccgggctacgtcaagcccaaacacgaatttaattaccagcaggcggttgagcgccttcctggtgaagatccggctcagctgaacgacccggcctaccgtcgtctgcgtatcattaccgataacctcaaacaggaagagcacgccattgtccaggtggaagaaatgcaggcggtgaatgccgtgctgtatggcaaatacaccatggaaggggatcagtttgatactgtcgaggtggatttcgggcgctctgaaggaaataacattgagcaggctgacggtaaaaaatggtctgagcaggaccgtgatacgtttgatccgacgcatgatattgacctctactgcgatcaggccagcggccttgtgaatatcgccattatggacggtacggtctggcgtctgctgaatggctttaagctgttccgcgaaaaactggatacccgtcgcggctcaaattcacaactcgaaacggcagtgaaagacctgggggcggtggtgtccttcaaggggtattacggcgatctggccattgtggtggcgaaaacgtcttatgtggcagaggacggtaccgaaaaacgttatctgccggagggcacactggtcctggggaatacggcagcagagggcattcgttgctatggtgccattcaggatgcgcaggcgttgtccgaaggtgtggtggcctcttcccgttatccgaaacactggctgaccgtgggcgatccggcccgtgaattcaccatgacgcagtccgcaccgctgatggtgctgccggatccggatgagtttgtggtggtacaggtgaaataa

SEQ ID NO: 263326 - DNA, 348 bp, Klebsiella pneumoniae
atggtgacgaaaaccatcactgaacagcgtgcggaagtacgtatttttgccggtaatgatccggctcacaccgccacaggcagcagcgggatttcctcggcaacaccggcactgacacccctgatgctggatggggccaccgggaaactggtggtctgggacggacagaaagccggtagtgcggttggcatactggtactgccgcttgaaggcacagaggcggtgctgacgtattacaagtcggggacctttgcgacggaggcaatccgctggcctgaaagtgtggatgaacacaaaaaggccaacgcctttaccggcagtgccctgagtcacgcggcgctgccgtaa

SEQ ID NO: 263327 - DNA, 1506 bp, Klebsiella pneumoniae
gtgagacgtaatctttcacacattattgcagcagcattcaatgaaccgctgcttctggagcccgcctatgcgcgggttttcttttgcgcgctcgggcgcgagatgggggcagcaagtctttcggtaccgcaacagcaggtacagcttgatgctcccgggatgctggctgaaacggacgagtacatggccggaggtaaacgaccggcccgtgtttaccgggtggtgaacggtattgcggtactgccggtgaccggcacgctggtgcaccggctgggggggatgcggccattttccggaatgactggctatgacggtattgtcgcctgtcttcagcaggcaatggcagatagccaggtgcggggcatactgctggacattgacagtccgggcgggcaggccgccggcgcgtttgactgcgctgacatgatttaccgcctccggcagcagaagccggtctgggcactgtgcaatgacacggcctgttctgcagccatgctgctggcgtcggcctgctcccgacggctggttacccagacatcccgtatcggctccattggcgtgatgatgagccatgtcagctatgccggtcatctggcgcaggccggtgtggatatcacgctgatttatgccggggcgcacaaggtggatggcaatcagtttgaagcgttgccggcagaggttcgccaggacatgcagcagcggattgatgcggcgcgccggatgtttgccgaaaaagtggcgatgtataccggtctgtctgttgatgccgtcacgggaacagaggctgccgtttttgaaggtcagtccggcattgaggccgggctggcggatgaattaatcaatgcgtcggatgccatcagtgtgatggccacggcgctgaacagtaatgtcagaggaggcactatgccgcaattaactgcaacggaagccgccgtgcaggagaaccagcgagtgatggggatcctgacatgccaggaagcgaaaggacgtgaacagcttgccacgatgctggcagggcaacagggcatgagcgttgaacaggcccgggcgattctggccgcggcggcaccgcagcagccggtggcatccgcacagagtgaagccgatcgcattatggcgtgtgaagaagcgaacggtcgtgaacaactggcagcaacgctggcggcgatgccggagaggacggtggaaaaagcccgcccgatcctggctgcttcaccgcaggcgaatgccgggccctcacttcgtgatcagatcatggcactggatgaggcaaaaggggctgaggcgcaggctgaacagctggctgcctgcccgggaatgactgtggagagcgcccgggctgtgctggctgcgggatcaggtaaggcagaaccggtctctgcatccacaaccgccctgtttgaacatttcatggcgaaccattcaccggctgcggtccaggggggcgtgtcacaggcgtcagaagacggtgatgcggacgtgaaaatgctcatggccatgccatga

SEQ ID NO: 263328 - DNA, 1593 bp, Klebsiella pneumoniae
atgaaacgaacgcctgtcctgattgatgtgaacggcgttccgcttcgggagagcctcagctacaacgggggcggcgcaggatttggcgggcaaatggcggagtggttgccaccggcgcagagtgccgatgcggccctgctgcccgcgttgcgtctggggaatgcccgggcagatgatctggtgcgcaataacgggatagcggccaatgcggtggccctgcataaggatcacattgtcgggcatatgtttcttatcagctaccgcccgaactggcgctggctggggatgcgggagaccgcgacaaaaagttttgtcgatgaggtggaggcggcctggtcagaatacgcagaagggatgtttggtgagatcgacgtggaagggaaacgcacgtttacggaatttatccgtgaaggtgtgggcgttcatgcgtttaacggcgaaatctttgtgcagccggtctgggatacggagagcacgcaactgtttcgtacgcgttttaaagccgtgagtccgaaacgggtggacacgccaggacacggtatcgggaaccgttttctgcgggccggtgtggaggttgatcgatatggccgtgccgttgcgtaccatatctgtgaggatgattttcctcgctccgggagtggacgatgggaacggatcccgcgtgaacttcccaccgggcgtccggccatgctgcatattttcgagccggtggaggacgggcagacccgtggggccaaccagttttacagcgtcatggaacggctgaagatgctcgattccctgcaggcaacacagcttcagtcggccattgtcaaggcgatgtatgcagcgacaattgaaagtgaactggataccgaaaaggcctttgaatatatcgccggtgcgccgcaggggcagaaggataatccgcttattaatattctggagaagttctccagctggtatgacacgaataacgtgacgctgggcggtgtcaaaattccgcaccttttccctggtgatgatctgaaactacagacagcgcaggattcagacaatggattttctgcgcttgaacaggcgctgctgcggtatatcgccgccggtcttggcgtttcctacgaacagttgtcccgtgattactcgaaggtcagttactcaagtgcccgcgcctccgccaatgagtcgtggcgctattttatggggcggcgaaaatttattgcgtcccggctggccacgcagatgttttcctgctggctggaagaggcacttctgcgggggattatccgtccgccacgggcacgttttgatttttatcaggcgcgttcagcctggtcacgggctgagtggattggtgccggaagaatggccattgacgggctcaaggaggttcaggaatcggtgatgcgtattgattccggactgagcacgtatgagaaagagctggcgctgatgggcgaggattatcaggacattttccgccagcaggtcagggaatctgcagagcgggaaaaagccggactctcacgtccggtgtggatagcgcaggcgtatcagcagcagatagcggagagtcgcaggccggaagaggagacaacaccacgtgagacgtaa

SEQ ID NO: 263329 - DNA, 207 bp, Klebsiella pneumoniae
atggttacagtcgctgaactacaggcgctgcgtcaggcgcgccttgatttattaaccggtaaacgggtggtgtctgtccagaaagatggtcgcagaattgaatatacggcggcctctctggatgagcttaaccgtgcgatcaatgatgctgagttggtactggggacaacccgccgtcgccgtcgtccgctgggagtgaggttatga

SEQ ID NO: 263330 - DNA, 1929 bp, Klebsiella pneumoniae
atgatttcagacgaactgagggcggctaattctgcaggagcgatagcaaccggcctccttgcgctaaaaattcctgtccctctgacgacagttcagtgggcagatcgacattattaccttccgaaagagtcatcttacaccccggggcggtgggaaacactgccgtttcaggttgccatcatgaacagcatggggaatgaccggatccgcactgttaatctgattaaatctgcccgtgttggttatacaaagatgttgctgggagtggaggcttattttattgagcataaatcacgcaacagccttcttttccagcccacggattctgctgctgaagattttatgaaatctcatgtggaacccacgatcagggatgtgccggttttactcgatcttgcaccgtggtttgggcgtaaacatcgtgataataccctcacgctgaaacgtttttcatcgggcgtgggcttctggtgcctgggcggggctgccgctaaaaactaccgtgaaaaatccgtggacgtggtctgctatgacgaactttcctcgttcgaaccggatgtcgaaaaagagggttcgccaaccctgcttggggataaacgtattgagggctcggtatggccaaaatccattcgcggctcgacgcctaaaataaaaggctcctgccagatcgaaaaagcggccaacgagtcggcgcatttcatgcgtttttatgtgccctgcccacactgtggggaggagcagtatctgaaatttggcgatgaatccacgccttttggccttaaatgggagaaagacagccccgaaagcgttttctacctctgtgaacatcatggctgcgtgatccatcagtctgagcttgaccagagcaacgggcggtggatctgtgaaaacacggggatgtggacccgtgacggtctgacgtttttcagcgccgcggataatgaaattccgccgccgcgctccatcacgttccatatctggacggcgtacagtccgttcaccacctgggtacagatagtctatgactggctggatgcactgaaagatcccaacggcctgaaaacctttgtgaacaccacgctgggcgagacctgggaagaggccgtgggcgaaaaactcgatcaccaggtactgatggataaggtcgtgcattacacggcggcggtgccagcccgggtggtttatctgacggcgggcattgactcgcagcgaaaccgttttgagatgtatgtctggggatgggcaccgggagaggaagcttttctggtggataaaatcatcattatgggccgtcccgatgaggaagagacgctgttacgtgtggatgcggcgatcaacaaaaaatactgccatgcagacggaaccgaaatgaccatttcccgtgtctgctgggacaccggggggatcgatggtgaaattgtctatcagaggtcaaaaaaacacggtgttttccgggtgctgccggtaaaaggtgcatctgtttatggcaagccggtgatcaccatgccaaaaacccgcaatcagcggggcgtgtatctgtgcgaagtggggacggacaccgcaaaagaaattctctatgcccgtatgaaagccgatcccacgcctgcggatgaagccacgtcgtatgccatccgttttcctgatgatccggagattttttcgcagacagaggcgcagcaactggtggcggaagagcttgtggagaagtgggaaaaaggaaagatgcgtctgctgtgggataacaaaaagcggcgtaacgaagcgctggactgcctggtgtatgcctatgcggcattacgtgtgtccgtgcaacgctggcagcttgatctggctgtactggcaaaatcccgggaagaagagacgacccggccaacccttaaagaactggcagcgaagctgtccggaggagtgaatggttacagtcgctga

SEQ ID NO: 263331 - DNA, 549 bp, Klebsiella pneumoniae
atgaacgtcaataagaaaaaactggccgatatttttggcgttgatgtcaggaccatcaccgcctggcagagtcaggggttaccactagtttctggtggagggaaagggactgaatcagtttttgatacaactgctgccattcagtggtatgcgcagagggaagctgatattaaaaacgaaaaactccgtaaagagatcgaggatttgagggctgccagcgaatcagaccttcagcccggcaccattgattacgaacgttaccgactgacgaaggcacaggccgatgcacaggagctgaaaaatgctcgtgaggaaggccttgtcctcgagacggagttatttacctacatctttcagcgagtggcacagaatatatcagggatccttgtccgtgtccctcagacactgcagcgtaaataccctgatatatcacccgtacatcttgatgctgtgaaaactgaaatcgcgaaagcatccgatgtggcttctgaagccggtgagaatgtgcgcaggtggattgatgatttcagacgaactgagggcggctaa

SEQ ID NO: 263332 - DNA, 1449 bp, Klebsiella pneumoniae
ttggctgaaatcgcagaactgtcagacaaagtcacctttaaagaagataacagcttgccggtgcgtaagccgtctttcctgatcaccaacccaggttctaaccaggggccacgttttgcaggttccccgctgggccacgagtttacctcgctggtactggcgttgttgtggaccggtggtcatccgtcgaaagaagcgcagtctctgctggagcagattcgccatattgacggtgattttgaattcgaaacctattactcgctctcttgccacaactgcccggatgtggtgcaggcgctgaacctgatgagcgtactgaacccgcgcatcaagcacactgcaattgacggaggtaccttccagaacgaaatcaccgatcgcaacgtgatgggcgttccggcagtattcgtaaacgggaaagagtttggtcagggtcgcatgacgttgactgaaatcgtcgccaaaattgatactggcgcggaaaaacgtgcggcagaagagctgaacaagcgtgatgcttatgacgtattaatcgtcggttccggcccagcgggtgcagcggcagcaatttactccgcacgtaaaggcatccgtactggtctgatgggcgaacgttttggtggtcagatcctcgataccgttgatatcgaaaactacatttctgtaccgaagactgaagggcagaagctggcaggagcgctgaaagttcacgttgatgaatacgacgttgatgtgatcgacagccagagcgccagcaaactgatcccggcagcggttgaaggtggtctgcatcagattgaaacagcttctggcgcggtactgaaagcacgcagcattatcgtggcgaccggtgcaaaatggcgcaacatgaacgttccgggcgaagatcagtatcgcaccaaaggcgtgacctactgcccgcactgcgacggcccgctgtttaaaggcaaacgcgtagcggttatcggcggcggtaactccggcgtggaagcggcaatcgacctggcgggtatcgttgagcacgtaacgctgctggaatttgcgccagaaatgaaagccgaccaggttctgcaggacaaactgcgcagcctgaaaaacgtcgacattattctgaatgcgcaaactacggaagtgaaaggcgacggcagcaaagtcattggtctggaatatcgagatcgtgtcagcggcgatattcacaacatcgaactggccggtattttcgtgcagattggtctgctgccgaacaccaactggctcgaaggcgcagtcgaacgtaaccgcatgggcgagattatcattgatgcgaaatgcgaaaccaacgtgaaaggcgtgttcgcagcgggtgactgtacgacggttccgtacaagcagatcatcatcgccactggcgaaggtgccaaagcctctctgagtgcttttgactacctgattcgcaccaaaactgcataa

SEQ ID NO: 263333 - DNA, 429 bp, Klebsiella pneumoniae
atgtacaaaacaatcatcatgccagtggatgttttcgaaatggaattgagcgacaaagcggttcgccacgctgaattcctcgcccaggatgacggagttattcatctacttcacgtactaccggggtcagccagcctgagcctgcaccgttttgccgctgatgtgcgtcgttttgaagagcatctgcaacatgaagcagaagaacgtctgcaaacgatggtcagccacttcaccatcgatccttcccgcattaagcaacatgtccgttttggtagtgtgcgggatgaagttaacgagttagcgaaagaacttgatgcagatgtagtagtgattggttcgcgcaacccatcgatttcgacccatctgttaggttctaacgcctcaagcgttatccgccacgccaatctgccggtgctggttgtgcgttaa

SEQ ID NO: 263334 - DNA, 411 bp, Klebsiella pneumoniae
atgtccagaccaactatcatcattaacgacctggatgccgaacgcatcgatattctgctggagcaacccgcctatgctggtttgccaatcgccgacgcgttaaacgcagagttggatcgcgcccaaatgtgttcgccagaagagatgccacacgacgtggtgacaatgaacagccgggttaaattccgcaatcttagcgatggcgaagtgcgtgtgcgcacgctggtgtatccggcaaaaatgaccgatagcaatactcagctttccgttatggctccggtaggtgccgcactgctggggctgcgcgttggcgattccattcactgggaacttccgggcggcgttgcaacccaccttgaagtgctggaactcgaataccagccagaagctgctggcgactacctgctttaa

SEQ ID NO: 263335 - DNA, 807 bp, Klebsiella pneumoniae
atgaaagcattctggcgtaacgccgcgttgctcgcggtttctctgcttcccttctcttctgccaacgccgtagcgttgcaggcaaaacagtttggcgattttgatcgctatgtcctggccctctcctggcaaaccggattttgccagagtcaacacgatcgaaatcgtaacgaacgagatgaatgtcgcctgcaaaccgaaacgaccaacaaagctgattttctgaccgtacatggtctgtggccaggattgcctaaatcggttgctgcccgtggtgttgatgaacgccgctggatgcgcttcggttgcgctactcgcccaatcccgaatctaccagaagcgcacgccagccgaatgtgttcatcgccggaaaccgggttatcgctggaaacagccgctaaactaagtgaagtcatgccaggagctggcggacgttcctgcctggaacgctacgaatatgccaaacacggtgcctgctttggttttgatccagacgcatacttcggcacgatggtacgcctgaatcaagaaattaaagagagcgaagccggaaaattccttgcggataactacggtaagacagtgagccgccgtgactttgacgccgcctttgccaaaagctggggaaaagagaacgtgaaagcagttaagctaacgtgtcagggtaaccctgcgtatttgactgaaattcagatctcgatcaaagctgacgccatcaacgctccgctttctgcaaactcattcttgccacaaccacacccaggcaactgtggcaaaacctttgtgattgataaagcaggttattaa

SEQ ID NO: 263336 - DNA, 1464 bp, Klebsiella pneumoniae
atgtctttagcaaaagataatatatggaaattattggcgcccctggtggtgatgggtgtcatgtttcttatccctgtacctgacggtatgccgccgcaggcgtggcattactttgcagtgtttgtggcaatgattgtcggcatgatcctcgagccaattccggcaacggcgatcagttttattgcggttactatttgcgttattggcagtaattacctgctctttgatgccaaagaattagctgacccagcgtttaatgcgcaaaaacaggcgctgaaatggggtctggctggtttttccagcaccacggtatggctggtatttggcgcatttatttttgcattagggtatgaagtttccgggttaggtcgtcgcattgcccttttcctggtgaaattcatgggcaaacgcacgctgacgttgggttatgcgattgtcattatcgacattctgctggcaccgtttacaccgtccaacaccgcgcgtaccgggggtacggtttttccggtcattaaaaacctgccgccgctgtttaaatcattcccgaacgatccgtccgcgcgtcgtattggcggctatttgatgtggatgatggtcattagtaccagtctgagttcgtccatgtttgtcaccggtgcggcaccaaacgtactgggtctggagttcgtcagcaaaattgccggtatccagattagctggttgcagtggttcctctgcttcctgccggttggggttatcttgcttatcattgcgccgtggctttcctacgtgctgtacaaaccggaaatcacacacagtgaagaagtggcaacctgggcgggtgatgaactaaaaaccatgggtgcgctgacacgcagagagtggacgctgattggtcttgtattgctcagcttaggtttgtgggtatttggcagtgaagtcattaatgctactgcggtaggtctgctggcagtttcgctaatgctggccctgcacgttgtgccgtggaaagacattacccgctataacagcgcatggaacacactggtcaacctggcaactctggttgtgatggctaatggcctgactcgttctggttttattgactggttcgccggtaccatgagtacgcacctggaaggattctcaccaaacgcaacggtgattgtactggttctggtgttctactttgcgcactacctgtttgccagcctgtctgcgcacaccgcaaccatgctgccggttattctggccgtcggtaaaggtattccgggcgtaccaatggaacaactgtgtatcctgctggtgctgtctatcggtatcatgggctgtctgacgccgtatgcaaccggtcctggggtgattatttacggctgtggctatgtgaaatcaaaagattactggcgtcttggcgcaatcttcggggtgatttacatctctatgttgctgttggttggctggccgattctcgccatgtggaactaa

SEQ ID NO: 263337 - DNA, 879 bp, Klebsiella pneumoniae
atgtcgatgcctgcaacgtcaactaaaaacacaaagcttgcgacgtcattaatcgatgagtacgccctgctgggctggcgcgccatgctgactgaagtcaatctgtcaccgaaaccaggcctcgtggatcgcattaactgcggtgcgcataaagatatggcgctggaagatttccaccgcagcgcgctggcgattcagggctggttaccccgtttcattgaatttggtgcctgtagtgctgaaatggcaccagaagaggtactccacggattacgcccaataggtatggcttgcgaaggtgatatgttccgcgccactgcgggcgtaaacacgcataaaggcagcattttttctttagggctactgtgtgcggcaattggccgtttgcttcaactcaaccagtcgataacgccaataacaatttgtgcgacggcggcaagtttctgccgtggcctgaccgatcgcgaactgcgtaccaataattcacaactgacggcaggtcaacggttgtaccagcagcttggccttaccggcgcacgcggtgaagccgaagcgggttatccactggtgatcaaccacgccctgccgcattacctcactctgctggatcaggggttagatcctgaactggcactgctcgataccttactcctactgatggcgatcaacggcgataccaacgttgcatcgcgcggtggcgaggggggcctgcgctggctacagcgcgaggcgcaaacattattgcaaaaagggggcatccgaacccccgccgatctcgattatctccggcagttcgacagggagtgtatcgaacgaaatctcagtccaggcggcagtgccgacctgctgatccttacttggtttttagcacagatttaa

SEQ ID NO: 263338 - DNA, 552 bp, Klebsiella pneumoniae
atgcacctgcttcctgaactcgccagccaccatgcggtatcaattcccgagctgctcgtcagccgggatgaaaggcaagcacggcaacacgtctggctcaagcgccatcctgttccactggtctcctttaccgtggttgcgcctgggccgattaaagacagcgaggtcacacgccgaatttttaatcatggcgtgacagccttgcgtgccttagccgcaaaacagggctggcaaattcaggagcaggctgcactggtttccgccagcgggccggagggcatgttgagcattgccgccccggctcgcgacctcaagctcgccaccattgagcttgaacatagtcatcctctcgggcggttatgggatatcgatgtcctgacacccgaaggcgaaattctctcccgccgcgactattcactgccgcctcgccgctgcctgttgtgcgagcaaagcgcagctgtttgcgcgcgtggaaaaacccatcaactgaccgatttactcaaccgcatggaggcgctgctgaacgatgtcgatgcctgcaacgtcaactaa

SEQ ID NO: 263339 - DNA, 1533 bp, Klebsiella pneumoniae
atgacgcagaaaattgaacaatctcaacgacaagaacgggtagcggcctggaatcgtcgcgctgaatgcgatcttgccgctttccagaactcgccaaagcaaacctaccaggctgaaaaagcgcgcgatcgcaaactgtgcgccaacctggaagaagcgattcgtcgctctggtttacaggacggcatgacggtttccttccatcacgctttccgtggcggtgacctgaccgtcaatatggtgatggacgtcatcgcgaagatgggctttaaaaacctgactctagcctccagctccctgagtgattgccatgcgccgctggtagaacacattcgccagggcgtggttacccgcatttatacctctggcctgcgcggtccactggcggaagaaatctcccgcggtctgctggcggaaccggtgcaaatccactctcacggcggacgtgtgcatctggtacagagcggcgaactgaatattgatgtggctttcctcggcgtcccatcctgtgatgaattcggtaatgccaacggctacaccggtaaagcctgctgcggctccctcggctatgcaatggttgatgccgacaacgcgaaacaggttgtgatgctcactgaagaactgctgccttatccgcataatccggcaagcattgagcaagatcaggttgatctgatcgtcaaagttgatcgcgttggcgatgccgcgaaaatcggcgctggcgcgacccgtatgaccactaacccgcgcgaactgcttattgcccgtagcgctgcggatgtgattgtcaactcaggctactttaaagaaggtttctccatgcagaccggcaccggcggcgcatcgctggcggtaacccgtttcctggaagacaaaatgcgtagccgcgatattcgcgccgacttcgcccttggcggtattaccgcaacgatggttgatctgcacgaaaaagggctgatccgcaaactgctggatgtacagagctttgacagccacgctgcacaatcgctggcccgtaaccccaatcacatcgaaatcagcgccaaccagtacgctaactggggttcaaaaggcgcatcggttgatcgtctcgacgtggtggtactgagcgcgctggaaattgacacccagttcaacgttaacgtgctgaccggctctgacggcgtactgcgtggtgcttccggtggtcactgcgataccgcgattgcctctgcgctttccatcatcgtcgcgccgctggtacgcggtcgtattccgactctggtggataacgtgctgacctgcatcaccccgggctccagtgtcgatattctggtcactgaccacggtatcgcagttaacccggcacgtccggagctggcagaacgtctgcaggaagcgggcattaaagtggtttccattgagtggctgcgtgaacgtgcgcgtctgctgaccggtgaaccacagccgattgaattcaccgaccgcgtcgttgccgttgtgcgttaccgcgatggctcggtgatcgatgttgtgcatcaggtgaaggaataa

SEQ ID NO: 263340 - DNA, 909 bp, Klebsiella pneumoniae
atgatttccgcttcgctgcaacaacgtaaaactcgcacccgccgcagcatgttgtttgtgcctggtgccaatgccgcgatggtcagcaactccttcatctacccggctgatgccctgatgtttgacctcgaagactccgtggcattacgtgaaaaagacaccgcccgccgcatggtttaccacgcgctgcaacatccgctgtatcgcgatattgaaaccattgtgcgtgtaaacgcgctggattccgaatggggtgttaacgacctggaagccgtcgttcgcggtggtgcggacgttgtgcgtctgccgaaaaccgataccgctcaggatgttctggatatcgaaaaagagatcctgcgtatcgaaaaagcctgtggtcgtgaacccggcagtaccggcttgctggcggcgattgaatctccgctgggcattacccgcgcagtggaaatcgctcacgcttccgagcgtttgatcggtatcgccctcggtgcagaagactatgtgcgcaacctgcgtacagaacgctccccggaaggaactgaactgctgttcgctcgctgctccattttgcaggccgcgcgctctgcgggtattcaggcgttcgataccgtctattccgacgctaacaacgaagccggattcctgcaagaagccgcccacatcaaacagctgggctttgacggcaaatcgctgatcaacccgcgtcagattgatctgctgcacaacctctacgcaccgacccagaaagaagtggatcacgcccgccgcgtcgtagaagccgctgaagccgccgctcgcgaaggcctcggcgtggtttccctgaacggcaagatggtggacggtccggttatcgatcgcgcccgtctggtgctctcccgtgcagaactttccggcatccgcgaagaataa

SEQ ID NO: 263341 - DNA, 297 bp, Klebsiella pneumoniae; identical to SEQ ID NO: 285

SEQ ID NO: 263342 - DNA, 1059 bp, Klebsiella pneumoniae
atgttcggcaatgatattttcacccgtgtaaaacgttcagaaaataaaaaaatggcggaaatcgcccaattcctgcatgaaaatgatttgagcgttgacaccacagtcgaagtatttattaccgtaacccgcgatgaaaagcttatcgcgtgcggtggaattgccggaaatattattaaatgcgttgctatcagtgaatccgttcgcggtgaaggactggcgctgacattagccaccgagctaattaacctcgcctatgagcggcacagcacgcatctgtttatttataccaaaaccgaatacgaggcgctgttccgccagtgcggtttttccacgctgaccagtgtacccggcgtgatggtgctgatggaaaacagcgccacgcgactgaaacgctatgccgaatcgctgaaaaaatttcgtcatccagggaacaagattggctgcattgtgatgaacgccaatccctttacgaatggtcaccgttatctgattcaacaggctgcagcacagtgcgactggttacatctgtttttagttaaagaagattcttcacgctttccctatgaagaccggctggatctggtgttaaaaggcaccgccgatattccacgcctgactgtgcatcgcggctccgaatacatcatctcccgcgctacgttcccttgctacttcattaaagaacagagcgtcattaaccattgttacaccgaaattgatctgaagattttccgtcagtacctcgctcccgcgctgggtgtaactcaccgctttgtcggtactgaacccttttgtcgcgttaccgcccagtacaaccaggatatgcgctactggctggaaacgccgactatctccgcaccgcccatcgaactggttgaaattgagcggctgcgttaccaggagatgccgatatccgcttcccgggtacgtcaactgctggcgaaaaacgatctcacggctatcgcgccgctggtccctgcagtcacgctgcattatttgcagaacctgcttgagcactcccgccaggacgcggcagctcgtcaaaagacccccgcatga

SEQ ID NO: 263343 - DNA, 210 bp, Klebsiella pneumoniae
atgggaaatcggacaaaagaggatgaactgtaccgagaaatgtgcagagttgtcggtaaagttgtgctggaaatgcgcgatctggggcaggaaccaaagcatattgttatcgcaggcgtattacgtacagcattagccaataaacgcattcagcgcagtgagctggaaaagcaggcgatggaaaccgtcattaacgcactggtaaaatga

SEQ ID NO: 263344 - DNA, 627 bp, Klebsiella pneumoniae
atgaacccggttgatcgtccactattagatattggcttaacgcgattagaattcttgcgtatatcaggaaaaggccttgctggtctaacaattgcccctgcgttactgtcacttttgggttgcaaacaggaagatattgatagcggcacagtagggttgataaatacacccaaaggggtgctggtgacccagcgagcgcgatgcacgggttgccaccgctgtgaaatctcttgtaccaacttcaacgatggctcagtagggacattcttctcccgtatcaaaatccatcgcaattatttctttggcgacaacggggttggctctggcggcggcctgtatggcgatctcaactataccgcggacacctgccgacaatgcaaagagccgcaatgcatgaacgtctgcccgattggtgcgattacctggcagcagaaagaaggctgtattaccgtcgatcataaacgctgtattggctgtagcgcctgtactacggcatgcccgtggatgatggccaccgtaaataccgaaagtaaaaaatcctcgaaatgtgtgttatgcggtgaatgcgcaaacgcctgcccaacaggggcgttaaaaattatcgagtggaaagatattactgtgtga

SEQ ID NO: 263345 - DNA, 2103 bp, Klebsiella pneumoniae
atggctaacggttggacaggtaatatattaagagtcaatctcacgacaggaaatattaccctcgaagattccagtaagtttaaaagttttgttggtggtatgggcttcggctacaaaattatgtatgacgaagtaccgccaggcacgaaacctttcgatgaagcgaataaattagtctttgctaccggcccattaactggatctggtgccccctgtagttctcgcgtaaatatcacctcactttctacttttaccaaaggaaatttagtcgtcgatgcccatatggggggcttttttgcagcgcaaatgaaattcgctggatacgacgtcattattatcgaagggaaagcgaaatcaccggtatggctgaatattaaagatgacaaagttagcctggaaaaagccgatttcttatggggaaaaggtacgcgcgcaactacggaagagatttgtcgcttgaccagccctgaaacctgtgtggcggctattggtcaggctggggaaaaccttgttcctctctctggcatgttgaatagccgtaaccacagcggtggtgcgggaactggcgcaataatgggttcgaaaaacctgaaagcgattgcggttgaagggacgaaaggggtcaacattgccgatcgtcaggagatgaagcgtctcaacgattacatgatgactgaacttatcggtgcgaataacaaccatgtcgtgccaagtacgccgcaatcgtgggcagagtattcagatcccaagtcacgttggacagcacgtaaagggctgttttggggcgcggctgaaggtggtccgattgaaacgggggaaattccgccaggcaatcagaacacggtcggctttcgtacctataaatccgtttttgacttaggtccggcggcagagaaatacacagtaaaaatgagcggctgccactcttgcccgatccgttgtatgacccaaatgaatattcctcgggtgaaagagtttggcgtgcctggcaccggtggtaacacttgtgtagcaaactttgtccataccaccatcttcccaaacgggccgaaagattttgaagataaagacgatggtcgtgtgattggtaacctggttggtctgaatctattcgatgactacggcctatggtgtaactatgggcagctgcatcgcgactttacttattgttacagcaaaggggtgttcaagcgtgttctaccagctgaagagtatgcggaaattcgctgggatcaactggaagcgggtgacgttaacttcattaaagatttttactaccgtctggcgcatcgtgtgggtgagctgagtcacctggctgatggttcatatgccatcgcagaacgctggaatttgggtgaagagtactggggctacgcgaaaaataaactctggtcgccgtttggctatccagttcaccatgccaatgaagcgtcagcgcaagtcggttccattgttaactgtatgttcaaccgtgactgcatgacgcatacccatatcaattttattggttccggtttgccattgaaactgcaacgtgaggtggcgaaagagctttttggttctgaagatgcttacgatgaaaccaaaaactacacgccaatcaatgacgcaaaaattaaatatgctaagtggtcgctgttgcgggtctgtttgcataacgccgtcacactgtgcaactgggtctggccaatgaccgtttcgccgctgaaaagccgtaattatcggggcgatctggcgcttgaagccaaattcttcaaagcgatcactggcgaagagatgactcaggaaaaattagatttagctgcagagcgtatctttacgttgcatcgtgcctacacggtaaaactgatgcaaaccaaagatatgcgtaatgaacacgatcttatctgttcctgggtattcgacaaggatccgcagatcccggtctttactgaaggtactgacaaaatggaccgtgacgatatgcatgcttcgctcacgatgttctacaaagaaatgggctgggacccacagcttggttgtccgacccgtgaaacattgcagcgtctggggctggaagatattgccgccgatctggcagcacacaatctactgcctgcgtaa

SEQ ID NO: 263346 - DNA, 639 bp, Klebsiella pneumoniae
atgaaccatcaggatgaattgccgttagcgaaagtcagcgaagttgatgaggcgaagcggcaatggttgcaggggatgcgtcaccccgttgatacggtaaccgaaccagaacctgctgaaatcctggcagagttcattcgtcagcattctgcggctgggcagctggtggcgcgcgccgtgtttctttcgccaccctattcggttgcagaagaggaactgtcagttttgctggaaagcattaagcagaacggagaccacgcggatatcgcttgtttgacgggaagccaggatgattactattactcaactcaggccatgagtgaaaactacgcggcgatgtctttgcaagttgtggagcaggacatttgtcgcgccattgcacacgccgttcgttttgagtgccagacgtatcctcgtccttacaaagtcgccatgctgatgcaagcgccatattacttccaggaagcgcagatcgaatccgcgatcgccgcgatggatattgcacctgaatatgctgatatacggcaggtggagtcatcgacggcggtgttgtacttgtttagcgagcgatttatgacctatggcaaggcgtatggcttatgcgaatggttcgaggtagagcagtttcagaacccctga

SEQ ID NO: 263347 - DNA, 669 bp, Klebsiella pneumoniae
atgtccttcactcgacgcaaatttgttctggggatgggaacagtaatcttttttactggttctgcgtcttctctgttagcgaacacgaggcaagaaaagaaagttcggtatgccatgattcatgacgagtcacggtgcaatggctgtaatatttgcgcccgcgcatgccgtaaaactaaccacgtccccgctcagggaagccgtttatcgatagcacacattccagtcaccgataacgacaacgaaacgcagtatcactattttcgccagtcatgccagcactgtgaagatgctccttgcatcgacgtatgcccgacaggggcgtcgtggcgtgatgagcaggggatcgtgcgggtagaaaaatcgcagtgcatcggctgcagttattgcattggcgcttgtccttaccaggttcgctaccttaaccctgtcactaaagtggcagataaatgtgatttctgcgctgagtcccgactggcaaaaggctttccgcccatttgcgtcagcgcctgtccggaacacgcattgatctttggtcgcgaagatagcccagaaattcaggcgtggttgcaggaaaataaatactatcaatatcagctacctggtgccgggaaaccgcacctgtatcgccggttcggtcaacatttgattaaaaaggaaaatgtatga

SEQ ID NO: 263348 - DNA, 786 bp, Klebsiella pneumoniae
atgaacccgtcgcaacatgctgaacagtttcagagccagttggcgaactatgtgccacagttcactccccaattttggccggtgtggttgatcattgccggactattgctggtagggatgtggtttgtgctggggctgcatgccttgcttcgtgctcgtggcgtgaagaaatcagccaccgaccatggtgagaaggtttatctttacagcaaagcggtcagattatggcactggtcgaatgcgttactctttgtattgttgctggcaagtgggctgataaatcactttgcgctggtgggcgcaactgcggttaaaagtctggttgcggtgcatgaagtttgcggatttttgttactggcatgttggctcggctttgttctgatcaatgccgttgggggtaatggtcaccattatcgcattcgtcgtcaggggtggctggagcgagcggcaaaacaaacgcgattctatttgtttggcattatgcagggggaagaacatcctttcccggcaacaacacagtctaaatttaatcccttacagcaggttgcctatattggtgtcatgtatggattgctgccgttgttactattgacggggctgctgtgtctctatccgcaagccgtgggagatgtgtttcctggcgtaagatactggttattgcaggcgcattttgctctggcatttataagcctcttttttatcttcggtcatctttatctttgcaccacggggcgtacgccacacgaaacctttaaaagcatggtcgatggctatcaccggcactaa

SEQ ID NO: 263349 - DNA, 765 bp, Klebsiella pneumoniae
atgtatcgctggttcctgcgccatttcccacgcggcggtagttatgccgatattcatcatgcactgattgaggaaggatatacggactgggcggagagtctggttgagtatgcgtggaaaaaatggctggcggatgaaaacttcgcgcatcaggaagtttcctctatgcaaaaattggccacagatcccggagagagaccattttgcagtcagtttgcccgcagcgacgatcatgctcgcatcggctgttgtgaggataatgccagaatcgcaaccgctgggtatgccgcgcaaattgccagtatgggttatagcgtgcggattggaagtgtcggctttaacagtcacattggcagctccggtgaacgcgcacgggttgctgtaaccggtaattcttcgcggataagcagcgctggagatagtagtcggattgcgaataccggaatgcgagtacgcgtttgtacattgggtgaacggtgtcatgtcgccagtaatggtgacctggtgcaaatcgccagctttggtgcaaacgccagaattgccaacagcggcgacaatgtacacatcattgccagcggtgaagattcaacaatagtgagcacgggcgtggtcgactcaattattctcgggccagggggaagcgccgcactggcatatcatgacggcgaaagagttcgcttcgccgtcgccattgaaggtgaaaacaatattcgagccggagtccgctatcgtcttaatgaacagcatcagtttgttgagtgctga

SEQ ID NO: 263350 - DNA, 1605 bp, Klebsiella pneumoniae
atgaaaaaaattgctattgtgggtgccgggcctacggggatctacaccttattctcgcttctacagcaacaaactccactttctatttctatcttcgagcaggctgacgaagccggtgtcgggatgccatacagtgatgaggaaaactcaaaactgatgctggcaaatattgccagtattgaaataccgccgatttattgtacgtatctcgaatggctacaaaagcaagaagccagccatctccagcgttatggcgttaaaaaagaaaccttgcacgatcgtcagtttttaccgcgaattctgctgggcgaatatttccgcgatcaatttttacgattagtagaccaggcacgacagcaaaaatttgcggtggctgtttatgaatcatgccaggttaccgatctgcaaattacaaatgctggcgtcatgctcgctacaaatcaggatttacccagcgagacgtttgatttagcggtgattgccacgggtcacgtctggcctgatgaagaagaagcaaccagaacgtactttcccagcccgtggtcaggcctgatggaagcaaaggtcgatgcgtgtaacgtgggtattatgggaacatccttgagcggactggatgcggcaatggcagtggctattcagcatggttcgttcattgaagatgataaacaacacgtcatttttcaccgcgataacgcaagtgaaaagctaaatattacgttaatgtcgcgcacgggtattttacccgaagccgatttctattgccctattccctacgagcccttacacatcgtcactgatcaagcattaaatgctgagattcaaaaaggcgaatatggccttttggatcgggtatttagattgatagtagaggaaatcaagtttgctgatccaggctggagccaacgcatagccttagagagcctgaatgtcgattcctttgctcaagcctggtttgccgagcgcaaacaacgcgacccatttgactgggcagaaaaaaatctccaggaagtcgaacgcaataaacgagaaaaacatactgttccctggcgttatgtcattctgcgcctgcatgaagcagtacaggaaattgttccacatctgaatgaacacgaccataaacggttcagtaaaggccttgcccgggttttcatcgataattatgcggcaatcccttcagagtctattcgtcgactactggccttacgtgaagcgggaatcattcatattctcgccctcggtgaagactacgaaatggaaattaatgagtcgcgcaccgtcctgaaaacggaagacaacagctactcgtttgacgtttttattgatgcccgtgggcagcgtccgcttaaagtgaaagatattcctttccctggactacgcgaacaattacagaaaacaggggataaaaaccctgatgttggcgaagattatacgttacagcaacccgaagatattcgtgggcgcgtagcgttcggcgcgttgccctggttaatgcacgaccagcctttcgttcagggacttacggcatgtgcagaaattggtgaggcgatggctcgggctgtcgtaaaacctgcctcccgtgcacgtaggcgtctttcgtttgattaa

SEQ ID NO: 263351 - DNA, 306 bp, Klebsiella pneumoniae
atggcaactttgttacaacttcattttgcttttaatggcccatttggcgacgcaatggctgagcagcttgaaccgcttgctgagtcgattaatcaggaacctggttttctgtggaaggtatggacagaaagtgaaaagaaccacgaagccggtgggatctaccttttcactgatgaaaaaagcgcccttgcctatctggaaaaacatactgcccgactgaaaaatctcggcgttgaggaagttgtcgccaaagttttcgatgtcaatgagccactgagtcaaatcaatcaggcaaaactcgcctga

SEQ ID NO: 263352 - DNA, 723 bp, Klebsiella pneumoniae
atgcatgtgcctttgggagaatacattcgcaaacgaaggctttgtcgtgccgccattcttgtccgactcaccgcgaaatctatgcttgatattgcactctctttacattttgactcacagcagtcattcagccgcgaatttaaaaagttattcggctgctctccccgtgaataccgccaccgtgattattgggatctcgcaaatatcttcccttcttttttaatacgtcaacagcaaaagacggagtgtagattagtcaactttcctgagacacctatttttggcaattcatttaaatatgatattgaagtatcgaataaatcaccggatgaagaagtcaaactgcgacgtcatcatttagccagatgtatgaagaattttaagacggatatctatttcgtctccacattcgaaccgtcaacaaaatcggtcgatttgctcacagttgaaacttttgccggtacggtatgcaaacaaaccgattcagagatgtcgaaagagtggacaattaaccgaggactgtatgcctctttccgctatgaaggtgagtgggagcactaccctgaatgggcgcgaaacctctatctgatggaattacctgccagggggttagccagagtgaacggcagtgatattgagcgattttattacaatgaaaacttcgtcgaaattgatatcaataacattgtttgcgaaatttttatccccgttcgcccggtttag

SEQ ID NO: 263353 - DNA, 4251 bp, Klebsiella pneumoniae
atgtcacgttataaaacaggtcataaacaaccacgatttcgttattcagttctggcccgctgcgtggcgtgggcaaatatctctgttcaggttctttttccactcgctgtcacctttaccccagtaatggcggcacgtgcgcagcatgcggttcagccacggttgagcatgggaaatactacggtaactggtgataataacgtggagaaaaatgtcgcgtcgtttgccgcaaatgccgggacatttttaagcagtcagccagatagcgatgcgacacgtaattttattaccggaatagccaccgctaaagctaaccaggaaatacaggagtggctcggaaaatatggtacagcgcgcgtcaaactgaatgtcgataaagatttctcgctgaaggattcttcgctggaaatgctttatcctatttatgatacgccgacaaatatgttgttcactcagggggcaatacatcgtaccgacgatcgtactcagtcaaatattggttttggctggcgtcatttttcaggaaatgactggatggcgggggtgaatacttttatcgatcatgatttatcccgtagtcatacccgcattggtgttggtgcggaatactggcgtgattatttgaaactgagcgccaatggttatatccgggcttctggctggaaaaaatcaccggatgttgaggattatcaggaacgcccggcgaatggctgggatattcgtgctgagggctatttacctgcctggccgcagcttggcgcaagcctgatgtatgaacagtattatggcgatgaagtcgggctgtttggtaaagataaacgccagaaagatccacatgcgattaccgctgaagtgaattacacgccagtgcctcttctgaccctgagtgccgggcataagcagggcaagagtggtgagaatgacactcgctttggcctggaagttaattatcggattggcgaacctctggaaaaacaactcgatacagacagcattcgcgagcgtcgaatgctggcaggcagccgctatgacctggttgagcgtaataacaacatcgttcttgagtaccgcaaatctgaagtgattcgtattgctctgcctgagcgtattgaaggcaagggcggtcagacactttccctggggcttgtggtcagcaaagcaactcacggactgaaaaatgtgcaatgggaagcgccgtcattactggctgaaggtggcaaaattaccggtcagggtagtcagtggcaagtaacgctcccggcttaccgtccaggcaaagacaattattatgcgatttcagcagttgcctacgataacaaaggtaatgcctcgaaacgtgtgcagacagaagtggttattaccggagctggtatgagcgccgatcgcacggcgttaacgcttgacggtcagagccgtattcaaatgcttgctaacggtaatgagcaaaagccgctggtgctgtctctgcgcgacgccgagggccagccagtcacgggcatgaaggagcagatcaagactgaactaaccttcaaaccggctggaaatattgtgactcgttccctgaaggccactaaatcacaggcaaagccaacactgggtgagttcaccgaaactgaagcaggggtgtatcagtctgtctttacgaccggaacgcagtcaggtgaggcaacgattactgttagcgttgatggcatgagcaaaaccgtcactgcagaactgcgggccacgatgatggatgtggcaaactccaccctgagcgctaacgagccgtcaggtgacgtggttgctgatggtcagcaagcctacacgctgacgctgactgcggtggactccgagggtaatccggtgacgggagaagccagccgcctgcgacttgttccgcaagacactaatggtgttaccgttggtgccatttcggaaataaaaccaggggtttacagcgccacggtttcttcgacccgtgccggaaacgttgttttgcgcgccttcagcgagcagtatcagctgggcacattacaacaaacgctgaagtttgttgccgggccgcttgatgcagcacattcgtccatcaccctgaatcctgataaaccggtggtcggcggtacgcttacggcaatctggtcgacaaaagatgccaatgacaaccctgtgaccagcctcacgccggaagcgccgtcattagcgggtgccgctgctgttggttctacggcatctggctggacaaataatggtgatgggacgtggactgcgcagattactctcggctctacggcgggtgaattagaagttatgccgaagctaaatggacaggatgcggcagcaaatgcggcaaaagtaaccgtggtggctgatgcgttatcttcaaaccagtcgaaagtctctgtcgcggaagatcacgtaaaagccggcgaaagcacaaccgtgacgttggtggcgaaagatgcacatggcaacgctatcagtggtctttcgttgtcggcaagtttgacggggaccgcctctgaaggggcgaccgtttccagttggaccgaaaaaggtgacggttcctatgttgctacgttaactacaggcggaaagacgggcgagcttcgtgtcatgccgctcttcaacggccagccagcagccaccgaagccgcgcagctgactgttattgccggagagatgtcatcagcgaattctacgcttgttgcggacaataaaactccaacggttaaaacgacgacggaactcaccttcaccgtgaaggatgcgtacgggaatccggtcaccgggctgaagccagatgcaccagtgtttagcggtgccgccagcacggggagtgagcgtccttcagcaggaaactggacagagaaaggtaatggggtctacgtggcgaccttaacgctgggatctgccgcgggtcagttgtctgtgatgccgcgagtgaacggccaaaatgccgttgctcagccactggtgctgaatgttgcaggcgacgcttcccgggcagtgatcagtgatatggcggtgaaggtgaataaccaactggcaaatggacagtctgctaaccaggtaaccctgaccgtcgtggacagctatggtaacccgttgcaggggcaagaagttacgctgactttaccgcagggtgtgactagcaagacggggaatacagtaacaaccaatgcggcaggtaaagcggatattgagttgatatcaaccgttgcaggggaacttgaaatcgcggccgcggtgaaaaactctcagaagacggtcacggtgaaattcaacgcggatgccagcaccggtcaggcaaacctgcaggtagacaccgccgttcaaaaagtggcaaacggcaaagatgcctttacgctgacggcgaccgttgaggataaaaacggtaaccctgttccaggcactctggtgacctttaatctgccccggggtgtcaagccgcttactggcgataatgtctgggtgaaagccaacgatgaggggaaagcagagttgcaggtggtttccgtgactgccggaacctatgagatcacggcatcggcaggaaatgaccagccttcggatgcgcagactataacgtttgtggccgataaggcgaccgcaaccgtctccggtattgaggtgattggcaactatgcactggcggatggcaaagccaaacagacgtataaagttacggtgactgatgccaataacaacctgttgaaagatagcgaggtgacgctgactgctagcccggcaaatttagctctggatcccgatgggacggcgacaacgaatgagcaaggacaggctattttcaccgccacgaccagtgtcgcagcgacatatacactcacggcgaaagtggaacaggccgacggtcaggaatcgacgaaaactgccgaatctaaattcgtcgcggatgataaaaacgcggagctcgctgcatctccagagcgtgtagattctctggtggcggacgggaagactactgcaacactgacggttactctgatgtcgggtgtcaaccccgtaggaggaaccatgtgggtcgacattgaggctccggaaggggtgacagaggcggattatcagttcctgccgtcgaaaaatgaccatttcgcgagcgggaaaatcacgcgtacatttagtaccaacaagccaggtacatacacattcacattcaactctttgacatatggagggtatgaaatgaaaccagtgactgtgacaattaacgccgttcctgcagatactgaaggtgctgaggagaaataa

SEQ ID NO: 263354 - DNA, 927 bp, Klebsiella pneumoniae
atgatgaaaatagagccttcaattttgccttctcttgcctggtttgcgcttattgttcgtgccggcagtttttccagagccgcttctgaaatgggtattacgcgggccgcattgtcccagaatttaaaatctcttgaggaacgtcttaacaccaagctgatataccgtacgacccgcaatatgtcgcttactgaggaaggacagcgtctgtatgaagtgctggtgtcggctttggggcaaattgatgatgctttgaaagatgttggtgatacccaacttgaacctacaggcctgttgagaataaattcctcccgtgttgcagcacggatgcttgttgagcctcatattggcgagtttcttactcgttaccccaaaacaaagatagaactcattatggatgacggtttatctaacattattgcggacggctgtgatgtgggcatacgtcttgagcaaggactggatgagcatatgactgccgttcctgtttctccgcttattaaactggttactgtggcatcgccagattatttaaaagaacacggtattcctgaaacgcctcaggaactgagtaaccataattgccttcggttgcggcataaaagtagcggtgcactctctgcatgggagttttctaatgttgtggggggtaatgaagagttcgaaatagaggtttcaggtaagtatatttctaatgatgacgaaagcatgatacgaatggcgctgaatggaacgggtatcattcaacatctggattttgcaatcgctgaacatatcaatgcgggcaagttacagccgattcttgaggattgggccgtttcatttcctggattttatatatatgtttcatcacgggtgagaatgccctctaaagttcgtgcttttattgattttatggtggagaaaagagtaaaaatagaaagttaa

SEQ ID NO: 263355 - DNA, 921 bp, Klebsiella pneumoniae
atgaaaactgtttcgataaaacatacttactgggatatagctgctgatatctatttccctgacgattttaatagtgaaaaaaagtatcctgccattatcagcgcccatccaattggaagctgcaaagaacagacatcgggtagtgtgtatggtgccgccctggcaaaagctggttttatcgtcattgcttttgatgccagttttcagggaagcagcggtggagaaccgcgttatctggaagatccaacaatgcgagtaaaagacttcagcattgtcgttgattaccttaccaccttaccttacgttgatgccgggcgtattggtgtactgggtatttgtggtggaggtggatatgccattaatgccgcaatgacagaacgtcgaattaaagctattggtactgtcacgggtgcaaactacgggcgtcttatgcgtgagggatttacagcgtttaatcctatcggagcactcgaagcgatggcgcaacaaagaacagacgaagctaacggcgcaaaacttcgcgtagatgatttactcccctcttctccggatgcagctcttgaagcgggattaacagaaatagacctttttgaagccacagaatattatcgttcgccacgaggctgtgcacctaatggggtaaatcgttcgctattctcacatcagactgttgccgtgggttgggatgcatttcatcttgcagaagtcctgttaactcaaccaataatggttgtggtgggcgatagagtgggcgcatttggtgcctaccgtgacggctgcgaaattattggccgcgctgcctcaaaacataaagagctggtcgtggttgaaggttattcacattacgacctgtatgataagccagaacctgtgaaacaggcactcgaaaaattaattcctttttataaaacacatttgtaa

SEQ ID NO: 263356 - DNA, 726 bp, Klebsiella pneumoniae
atggacagtctcaatcttaataaacatatttccggccagttcaacgccgaactggaaagcatccgcacgcaggtgatgaccatgggcggcatggtggagcagcagctttctgatgcaatcaccgcgatgcataaccaggacagcgatctggcgaagcgcgtcatcgaaggcgacaagaacgtcaacatgatggaagtggcgatcgatgaagcctgcgtgcgcattatcgccaaacgtcagccgacggcgagcgacctgcgtctggttatggtgatcagtaaaaccattgccgagctggagcgtattggcgacgtggcggacaaaatctgccgtactgcgctggagaaattctcccagcagcatcagccgttgctggtaagtctggagtcgctgggccgtcataccatccagatgctgcacgacgtgctggacgcgttcgcgcggatggacattgacgaagcggtacgtatttatcgtgaagataaaaaagtcgatcaggagtacgaaggtattgttcgtcaactgatgacctacatgatggaagattcgcgcaccattccgagcgtacttaccgcgctattctgtgcgcgttcaatcgaacgtatcggcgaccgctgccagaatatttgtgagtttatcttctactacgtgaaggggcaggatttccgtcatgtaggcggtgatgagctggataaactgctggccggaaaagacccgaaagagtaa

SEQ ID NO: 263357 - DNA, 774 bp, Klebsiella pneumoniae
atgagtatggttgaaactgccccgagtaaaattcaggttcgtaatttgaacttctactacggcaaattccatgccctgaaaaacatcaacctggatatcgctaaaaaccaggtaacggcgtttatcgggccgtccggctgcggtaaatcgacgctgctgcgtaccttcaataaaatgtttgaactgtacccggaacagcgtgcggaaggtgaaattctgctcgatggcgacaacatcctgaccaactctcaggatatcgccctgctgcgtgcgaaagtgggcatggtgttccagaaaccgacgccgttcccgatgtccatctacgacaacatcgcctttggtgtgcgtctgtttgagaagctctcccgtgccgacatggacgagcgcgtgcagtgggcattgaccaaagccgcattgtggaacgaaaccaaagataaattgcatcagagcggttactctctctctggtggtcagcaacagcgtctgtgcattgcgcgtggtatcgccattcgcccggaagtgctgctgctcgacgaaccgtgttcggcactcgaccccatctctaccgggcgtattgaagagctgatcaccgaactgaagcaggattacaccgtggtgatcgtcacccacaacatgcagcaggctgcgcgttgttccgaccacacggcgtttatgtacctgggcgaattgattgagttcagcaacacggacgatctgttcaccaagccagcgaagaaacaaacagaagactacatcaccggtcgttacggttga

SEQ ID NO: 263358 - DNA, 1371 bp, Klebsiella pneumoniae
atgttgaataatgctatgagcgtagtgatccttgccgcaggcaaaggcacgcgcatgtattccgatcttccgaaagtgctgcatacccttgccgggaaagcgatggttcagcatgtcattgatgctgcgaatgaattaggcgcggcgcacgttcacctggtgtacggtcacggcggcgatctgcttaaacaggcgctgaaagatgacaacctgaactgggtgcttcaggcagaacagctgggtacaggtcatgcgatgcagcaggccgcacctttctttgccgatgatgaagacattttaatgctctacggcgacgtgccgctgatctctgtcgaaacactccagcgcctgcgtgatgctaaaccgcagggtggcattggtctgctgacggtaaaactggatgatccgaccggttatggacgtatcacccgtgaaaacggcaaagttaccggcattgttgagcacaaagacgccaccgacgagcagcgtcagattcaggagatcaacaccggcattctgattgccaacggcgcagatatgaaacgctggctggcgaagctgaccaacaataacgctcagggtgaatactacatcaccgacattattgcgctggcgtatcaggaagggcgtgaaatcgtcgccgttcatccgcaacgtttaagcgaagtagaaggcgtgaataaccgcctgcaactctcccgactggagcgcgtttaccagtccgaacaggctgataaactgctgttagcaggcgttatgctgcgcgatccggcgcgttttgatctgcgcggtacgcttactcacgggcgcgatgttgaaattgatactaacgttatcatcgagggcaacgtgactctcggtcatcgcgtgaaaatcggcaccggttgcgtgattaaaaacagcgtgattggcgatgattgcgaaattagcccgtataccgttgtggaagatgcgaatctggcagcggcctgtaccattggcccgtttgcccgtctgcgtcctggtgctgagttgctggaaggtgcacacgtcggtaacttcgttgagatgaaaaaagcgcgtctgggtaaaggctcgaaagctggtcatctgacttacctgggcgatgcggaaattggcgataacgttaacatcggcgcgggaaccattacctgcaactacgatggtgcgaataaatttaagaccattatcggtgacgatgtgtttgtcggttccgacactcagctggtggccccggtaacagtaggcaaaggcgcgaccattgctgcgggtacaactgtgacgcgtaatgtcggcgaaaacgccctggcgatcagccgtgtgccgcagactcaaaaagaaggctggcgtcgtccggtaaagaaaaagtaa

SEQ ID NO: 263359 - DNA, 420 bp, Klebsiella pneumoniae
atggcaatgacttaccacctggacgtcgtcagtgcagagcaacaaatgttctctggtctggtcgagaaaatccaggtaacgggtagcgaaggtgaactggggatctaccctggccacgcaccgctgctcaccgccattaagcctggtatgattcgcatcgtgaaacagcacggtcacgaagagtttatctatctgtctggcggcattcttgaagtgcagcctggcaacgtgaccgttctggccgacaccgcaattcgcggccaggatctcgacgaagcgcgagccatggaagcgaaacgtaaggctgaagagcacattagcagctctcacggcgacgtagattacgctcaggcgtctgcggaactggccaaagcgatcgcgcagctgcgcgttatcgagttgaccaaaaaagcgatgtaa

SEQ ID NO: 263360 - DNA, 804 bp, Klebsiella pneumoniae
atgaccgactccaacgttatcgacaaagtatccctggtgtatggccagatgaacgagccgccgggaaaccgtctgcgcgttgctctgaccggtctgaccatggctgagaaattccgtgacgaaggtcgtgacgttctgctgttcgttgacaacatctatcgttacaccctggccggtacggaagtatccgcactgctgggccgtatgccttcagcggtaggttatcagccgaccctggcggaagagatgggcgttctgcaggaacgtatcacctccaccaaaactggttctatcacctccgtacaggcggtatacgtacctgcggatgacttgactgacccgtctccggcaaccacctttgcgcaccttgacgcaaccgtggtactgagccgtcagatcgcgtctctgggtatctacccggccgttgacccgctggactccaccagccgtcagctggacccgctggtggttggtcaggaacactacgacaccgcgcgtggcgttcagtccatcctgcaacgttatcaggaactgaaagacatcatcgccatcctgggtatggatgaactgtctgaagaagacaaactggtggtagcgcgtgctcgtaagatccagcgcttcctgtcccagccgttcttcgtggcagaagtattcaccggttctccgggtaaatacgtctccctgaaagacaccatccgtggctttaaaggcatcatggaaggcgaatacgatcacctgccggagcaggcgttctacatggtcggttccatcgaagaagctgtggaaaaagccaaaaaactttaa

SEQ ID NO: 263361 - DNA, 1416 bp, Klebsiella pneumoniae
atggaaaactttaaacatctccctgaaccgttccgcatccgtgttattgagccagtaaaacgtaccactcgcgcttatcgtgaagaagcaattattaaatccggtatgaacccgttcctgctggatagcgaagatgtgtttatcgatttactgaccgacagcggcaccggggcggtgacgcagagtatgcaggccgcgatgatgcgcggcgacgaagcttacagcggcagccgcagctactatgcgttagccgagtcagtaaaaaatatctttggttatcaatacactattccgactcaccagggccgtggtgcagaacaaatctatattccggtactgattaaaaaacgcgagcaggaaaaaggcctggatcgcagcaaaatggtggcgttctctaactatttctttgataccacgcagggccatagccagatcaacggctgtaccgtgcgtaacgtctatatcaaagaagccttcgatacgggcgtgcgttacgactttaaaggcaactttgaccttgagggattagaacgcggcattgaagaagttggcccgaataacgtgccgtatatcgttgcgaccatcaccagtaactctgcaggtggtcagccggtttcactggcaaacttaaaagcgatgtacagcatcgcgaagaaatacgatattccggtggtaatggactccgcacgctttgctgaaaacgcctatttcatcaagcagcgtgaagcagaatacaaagactggaccatcgagcagatcacccgcgaaacctacaaatatgccgatatgctggcgatgtccgccaagaaagatgcgatggtgccgatgggcggcttgctgtgcatgaaagacgacagcttctttgatgtgtacaccgaatgcagaaccctttgcgtggtacaggaaggcttcccgacatatggcggcctggaaggcggcgcgatggagcgtctggcggtaggtctgtatgacggcatgaatctggactggctggcttatcgtatcgcgcaggtacagtatctggtcgatggtctggaagagattggcgttgtctgccagcaggcgggcggtcacgcggcattcgttgatgccggtaaactgctgccgcatatcccggcagaccagttcccggcacaggcgctggcgtgcgagctgtataaagtcgccggtatccgtgcggtagaaattggttctttcctgttaggccgcgatccgaaaaccggtaaacaactgccatgcccggctgaactgctgcgtttaaccattccgcgtgcaacatatactcaaacacatatggacttcattattgaagcctttaaacatgtgaaagagaacgcggcgaatattaaagggttaacctttacctacgaaccgaaagtattgcgtcacttcaccgcaaaactgaaagaagtttaa

SEQ ID NO: 263362 - DNA, 1248 bp, Klebsiella pneumoniae
atgactgatcaagctgaaaaaaagcactctgcattttggggtgttatggttatagcaggtacagtaattggtggaggtatgtttgctttacctgttgatcttgccggtgcctggtttttctggggtgcctttatccttatcattgcctggttttcaatgcttcattccgggttgttgttattagaagcaaatttaaattatcccgtcggctccagttttaacaccatcaccaaagatttaatcggtaacacctggaacattatcagcggtattaccgttgccttcgttctctatatcctcacttatgcctatatctctgctaatggtgcgatcattagtgaaacgatatcaatgaatttgggttatcacgctaatccacgtattgtcgggatctgcacagccattttcgttgccagcgtattgtggataagctcgttagccgccagtcgtattacctcattgttccttgggctgaagattatctcctttgtaattgtttttggttctttcttcttccaggtcgattactccattctgcgcgattccaccagcaccactgcgggtacatcttatttcccgtatatctttatggctttgccggtgtgtctggcgtcatttggtttccacggcaatattcccagcctgattatttgctatggcaaacgcaaagataagctaatcaaaagcgtggtcttcggttcgctgctggcgctggtgatttatctcttctggctctattgcacgatggggaatatcccacgagaaagctttaaggcgataatctcctcaggcggcaacgttgattcgctggtcaaatcgttcctcggcaccaaacagcacggcattatcgagttttgcctgctggtgttctccaacttagctgttgccagttcgttctttggtgtcacgctggggttgttcgattatctggcggatctgtttaagattgataactcccacggcgggcgtttcaaaaccgtgctgttaaccttcctgccacctgcgttgttgtatctgatcttcccgaacggcttcatttacgggatcggcggtgccggactgtgtgccaccatctgggcggtcattatccccgcggtgctggcaatcaaagctcgcaagaagtttcccaatcagatgttcacggtctggggcggcaatcttattccggcgattgtcattctctttggtataaccgtaattttatgctggttcggtaacgtctttaacgtgttacctaaatttggctga

SEQ ID NO: 263363 - DNA, 1176 bp, Klebsiella pneumoniae
atgtcccgctttttgatttgtagttttgccctggttttactttatcccgccgggattgatatgtacctcgttggtttaccgcgcatcgccgccgatctcaatgccagcgaagcgcagttgcatattgcgttctccgtttatctggcgggcatggcagctgcgatgttatttgccggtaaagtggccgatcgttcagggagaaagcctgtcgccatacccggcgcggcgctatttattatcgcctcggtgttctgttcactggctgaaaccagcacgttatttcttgcagggcgctttctacaggggctgggcgcgggctgttgttacgtggttgcgttcgccattttacgcgacacactggatgatcgacgtcgggctaaagtgctgtcgttactcaacggcattacctgcatcattccggtgttagcgccagtgctcggacacctgattatgcttaaattcccgtggcagagtctgttctggacgatggcaacgatgggcatcgcggtactgatgttgtctttgtttattttaaaagaaacgcgccctgcggcccccacaaattcggacaaaccacgagaaaatagcgagtcgctgcttaaccggtttttcctcagccgtgttgttatcaccaccctcagcgtttcggtgatcctcaccttcgtcaacacgtcgccggtattgctgatggaaatcatgggttttgagcgcggagaatacgccaccattatggcgttgaccgctggcgtcagcatgaccgtttcattctccacgccatttgcgctgggaatttttaagccacgtacgttgatgatcacctcgcaggtattattcctggcggcgggcatcacccttgccgtttcaccttcccatgcggtttctctgtttggtatcacgctgatttgcgccggtttctcggtaggttttggcgtagcgatgagtcaggcgttagggccgttttcattacgcgcgggcgtagccagctcgaccttaggtattgcgcaggtttgcggttcgtcactgtggatttggctggcagcggtggttggtatcggcgcatggaatatgctgatcgggattctgattgcctgtagcatagtgagcctgttgctgattatgttcgtcgcgcctggacgcccggttgccgctcatgaagaaatccatcaccacgcttga

SEQ ID NO: 263364 - DNA, 960 bp, Klebsiella pneumoniae
atgaagaaatccatcaccacgcttgatctcaatctgctgctctgtctgcaactgctgatgcaggagcgcagcgtgaccaaagcggcgaagcggatgaacgtgaccccttcggcggtgagtaagtcgctggcaaagttaagagcgtggtttgacgacccgctctttgtgaactcaccgctggggctgtcgcccacaccgctaatggtcagcatggagcaaaatctggcggagtggatgcaaatgagcaacctgctgctggataaaccgcatcaccagacaccgcgcggcctgaagtttgagctggcggcggaatcgccgctgatgatgatcatgcttaatgcgctgtcgaaacggatctaccaacgttacccgcaggcgaccatcaaattacgtaactgggattacgattccttagatgccattactcgtggtgaagtggatattggtttttccggtcgcgaaagtcatccccgttcgcgggagctgttaagctcgctaccgttagccattgattatgaagtgctgtttagtgatgtgccctgcgtctggttacgaaaagatcatccggcactgcatgaaacgtggaatctggacacctttttacgttatccgcatatcagcatttgctgggaacagagcgatacctgggcgctggacaatgtgttacaggagctggggcgcgaacgcacgattgctatgagcctgccggaattcgagcagtcactgtttatggcagcacagcccgacaatctgctactggcgaccgcaccgcgctactgtcagtactacaatcaactccaccaactgccgttggttgctcttcctctcccgtttgacgaaagccagcaaaaaaagctggaagtcccttttaccctgctgtggcataaacggaacagccataatccgaagatcgtctggttacgggaaaccattaaacatctttacgcgtcgatggcataa

SEQ ID NO: 263365 - DNA, 750 bp, Klebsiella pneumoniae
atggcgactcactttgcccgagggattttaacggaaggacatctgatttctgttcgtctcccctcccagtgtcatcaagaagcccgaaacattccccctcatcgtcaaagccgttttctggcgtccagaggtttactcgcagaactgatgttcatgctgtatggcattggcgaattgccggaaatcgtcaccctgccgaaaggtaaaccggttttcagcgataaaaatttgccttcgttttctatttcctatgccgggaatatggttggcgtggcgttaacaaccgaaggtgaatgtggcctcgatatggaactgcagcgtgcgacgcgcgggtttcatagtccacacgcgcccgataaccacaccttttccagcaatgaatcgctatggatcagtaaacaaaatgatccaaacgaagcgcgggcgcagctcatcacgctgcgccgaagcgtgctaaaactaaccggtgatgttttgaatgacgatccgcgcgatctgcagctgctgcccattgccggacgcctgaaatgtgctcatgtaaatcatgtagaagcgttatgcgacgcggaggacgtgctggtgtggtccgtggcggtcacgcccacgattgaaaagctcagtgtctgggagttagatggcaaacacggctggaaaagcctgcccgatattcacagccgcgccaacaatcctaccagccggatgatgcgttttgcccagctctctaccgtgaaggctttttcgccaaattga

SEQ ID NO: 263366 - DNA, 567 bp, Klebsiella pneumoniae
atgtctgaaaaattgcaggtggttacgttactggggagcctgcgcaaaggctcatttaatggcatggttgcacgtaccctgccgaaaattgctccggcgagcatggaagtcaatgcgttaccttccattgccgacattcccttgtatgacgctgacgtacagcaggaagaaggttttccagcaacggttgaagctctggcggaacagatccgtcaggctgacggtgtggtgatcgtcacgccggaatataactactcggtaccgggtgggctgaaaaatgccatcgactggctttcccgcctgccggatcaacctctggccggtaaaccggtgttgattcagaccagctcaatgggcgtgattggcggcgcgcgctgtcagtatcacctgcgccagattctggttttcctcgatgcaatggtgatgaacaagccggaatttatgggcggcgtgattcagaacaaagttgatccgcaaaccggagaagtgattgatcagggtacgctggaccacctgaccgggcaattgactgcatttggtgagtttattcagcgagttaagagctaa

SEQ ID NO: 263367 - DNA, 1338 bp, Klebsiella pneumoniae
atgagtcaacaacacacaacccaggcttctggccaggggatgctggaacgcgtgtttaaactgcgcgaacatggcacgacggcacggaccgaagtgatcgccggttttaccaccttcctgacgatggtttacatcgtttttgttaacccgcaaattcttggcgttgctggcatggataccagcgccgtcttcgttactacctgtctgattgctgcattcggcagtattatgatgggactgtttgctaacctgccagttgcgctggcacctgctatgggcctgaatgcgttcttcgcttttgtggttgtacaggcgatgggcttgccgtggcaagtcgggatgggcgcaatcttctggggcgcgataggtctgctgttactgacgattttccgcgttcgctactggatgatagccaacattccggtgagtctgcgtgtgggcattaccagcggtatcggcctgtttattggcatgatgggactgaagaatgcaggtgtgattgtcgctaacccggaaacgctggtgagcatcggtaatctgacttctcacagcgtactgctggggatcctcggcttcttcatcattgctattctggcctcacgcaacattcacgcggcggtgctggtttccatcgtggtgacgacgctgctgggctggatgctgggtgatgtccactacaatggcatcgtttctgcgccgccgagcgtaatgactgtcgtgggtcatgtagatttagccgggtcgtttaaccttgggctggcaggggtgattttctctttcatgctggtcaacttgtttgactcctccggtacgctgattggcgtgacagataaagcaggactggcggatgaaaaaggtaaattcccgcgcatgaagcaggcactgtatgtcgacagcatctcttccgtgaccggttcgtttatcgggacttcttctgttacggcgtatatcgagtcttcttccggcgtttccgttggggggcgtaccggcctgacggcagtcgttgttggtctgctgttcctgctggttatcttcctgtcgccgctggcggggatggtgccgggatatgccgcagctggcgcgctgatctacgtgggcgtactgatgacctcaagtcttgctcgcgtgaactggcaggatcttactgaatgtgttccggcgtttattaccgctgtgatgatgccgttcagcttctcgattaccgaaggtattgcgctgggctttatctcctactgcgtgatgaagattggtaccggacgtctgcgtgatctaagcccgtgcgtaatcatcgttgcgctgctgtttatcctgaagattgtgtttatcgacgctcactaa

SEQ ID NO: 263368 - DNA, 666 bp, Klebsiella pneumoniae
atgacccagatagaagcggtatttttcgactgcgacggtacgctggtcgatagcgaggtcatttgctctcgcgcctatgtcacgatgttcagggaatttggcattcacgttgaccaggaagagatttttacccgttttaaaggcgtaaaactctacgaaatcatcgacatcatcagtaaagaacagggcgtgacgatggtccaggccgatgccgagcacgtttaccgcgcagaagtagcacgtctgtttgataccgaacttgcggacatcgcaggagcgaacgaattgctggcgagcattaacgtgccgatgtgcgtcgtctctaacggtccggtcagcaaaatgcagcattcgcttggtaagctcaatatgctgcactacttcccggaaaaactgttcagcggctacgatattcagcgttggaagcccgacccggagttaatgttccatgcggcaaaagcgatgaatgtgaacgttgaaaactgcattctggtcgatgactccagcgccggtgcgcaatcaggaatcgatgccggtatggaagtgttttacttctgcgctgacccgcacaataagccgatcgttcatccgaaagtcaccacctttaccgagctggggcagctgcctgcgctctggaaggcacgcagctggaatataacgcgataa

SEQ ID NO: 263369 - DNA, 630 bp, Klebsiella pneumoniae
atgattccgccgccagatggaacaatacttactgaaaatccaaaagaatatgtccaaaagcaaataaaggagtctcataaagaatctgctacaaatgtaacatttgattataaggaacttgcacccatttttgaaggtgttcaaaaaaaacaaattgaagcgctatcaaaccaactggaacatataaaatcttttaagacagattacgattcaaggctcaataagtttgctcgcgattttcaatatttatccagtgcattttcaattaacaggcaggatttattaaaaaactatcaggaaataagagcttccattacagattacgatgacttattgcgagaaattaaagagttgaccataagtcgggataaatcagtagatgataaaaggactttatttgataaaaaaagggacaactggaatagtcaagaagtacagggtgaagtaaaggcattaaatgaggatattgctgactctgacaataagatacgttctaagcttactattgttcaaaatcatagacgcgagaatcaatataaagcgaataaaaatatcagtaacgcgatgcttaatattctggattggttcgaacggtatcccgatattgtaaaaaatataacccaggcttaa

SEQ ID NO: 263370 - DNA, 243 bp, Klebsiella pneumoniae
gtgccacgctttgtgggtgaaatgggtatcggtagacacagagtaaacgtctacgcccagcttctgcagttcttcgtaatggtcagccacgtcgcccagttcggtcgggcagacgaaggtgaagtcagccggatagaagaagaagacgctccagcggccttcggtgtctttctcggtgacttcgatgaattcaccatttttgaatgcctggtttttgaacggtttgattttggtgttaattaa

SEQ ID NO: 263371 - DNA, 219 bp, Klebsiella pneumoniae
atgaagaaacagcataattatacggtgatgcactggggaacctggcaggtggagagccgtgagggcgagatcgtggcggttaagccggtgccctgggataaaaatccctcacgcatcggccagtcgctccccgacgcggtgaccagccaaacgcgcattcgccgtccggcggtgcgcgccggctatctccagcacgggccggcgtcacgagaagggtga

SEQ ID NO: 263372 - DNA, 1203 bp, Klebsiella pneumoniae
atgacacaattcgcttctcctgttctgcactcgttgctggatacagatgcttataagttgcatatgcagcaagccgtgtttcatcactattacgatgtgcatgtcgcggcggagtttcgttgccgaggtgacgatctgctgggtatttatgccgatgctattcgtgaacaggttcaggcgatgcagcacctgcgcctgcaggatgatgaatatcaatggctctcagccctgcctttctttaaggccgactatcttaactggctacgcgagttccgctttaacccggaacaagtcaccgtgtccaacgataatggcaagctggatattcgtttaagcggcccgtggcgtgaagtcatcctctgggaagttcctttgctggcggttatcagtgaaatggtacatcgctatcgctcaccgcaggccgacgttgcgcaagccctcgacacgctggaaagcaaattagccgacttctcggcattaaccgccggtcttgatatgtcgcgcttccatctgatggattttggcacccgccgacgtttttctcgtgaagtacaagaaaccatcgtgaaacgtctccaacaggaatcctggttcgtgggcaccagcaactacgatctggcgcgtcggctttccctcacgccaatgggaacacaagcacacgaatggttccaggcgcatcagcaaatcagcccggatctagccaacagccagcgagctgcacttgctgcctggctggaagaatatcccgaccaacttggcattgcattaaccgactgcatcactatggatgctttcctgcgtgatttcggtgtcgagttcgccagtcgctatcagggcctgcgtcatgactccggcgacccggttgaatggggtgaaaaagccattgcacattatgagaagctgggaattgatccacagagtaaaacgctggttttctctgacaatctggatttacgcaaagcggttgagctataccgccacttctcttcccgcgtgcaattaagttttggtattgggactcgcctgacctgcgatatcccccaggtaaaacccctgaatattgtgattaagttggtagagtgtaacggtaaaccggtggcgaaactttctgacagccctggcaaaactatctgccacgataaagcgtttgttcgggcgctgcgcaaagcgttcgaccttccgcatattaaaaaagccagttaa

SEQ ID NO: 263373 - DNA, 2613 bp, Klebsiella pneumoniae
atgactcaacagccacaagccaaataccgtcacgattatcgtgcgccggattaccagattactgatattgacttgacctttgacctggacgcgcaaaagacggtcgttaccgcggtcagccaggctgtccgtaatggtgcatcagatgctccgcttcgtcttgatggcgaagatcttaaactggtttctgttcatattaatgatgagccgtggaccgcctggaaagaagaagagggcgcactggtcatcagtaatttgccggagcgttttacgcttaagatcgttaatgaaattagcccggcgacgaataccgcgctggaagggctttatcagtcaggcgatgcgctttgcactcagtgtgaagccgaaggtttccgccatattacgtattatcttgaccgcccggacgtactggcgcgttttaccaccaaaattattgccgataaaaccaaatatcccttcctgctttccaacggtaaccgcgttgcgcaaggcgaactggaaaacggacgtcattgggtacagtggcaggacccgttcccgaaaccgtgctacctgtttgcgttggtggcaggcgacttcgacgtgctgcgcgacaccttcaccacgcgttctggtcgcgaagttgcgctggagctgtacgtcgatcgcggcaaccttgatcgtgcgccgtgggcgatgacctcgctgaaaaactccatgaaatgggatgaagaacgcttcggcctggagtatgacctcgacatctatatgatcgtcgcggtggatttcttcaatatgggcgcaatggagaataaaggtctgaatatctttaactccaaatatgtgctggcccgtaccgacaccgccaccgataaagattacctcgatattgagcgtgttattggtcacgaatatttccacaactggaccggtaaccgtgtgacctgccgcgactggttccagctcagcctgaaagaaggtttaaccgtgttccgcgatcaggagttcagctctgaccttggttcccgcgcggtaaaccgtatcaacaacgtgcgcaccatgcgcggattgcagtttgcggaagacgccagcccgatggcgcacccgatccgcccggatatggtcattgagatgaacaacttctacaccctgaccgtttacgagaagggcgcggaagtgattcgcatgatccacaccctgctgggcgaagaaaacttccagaaagggatgcagctttatttcgagcgtcatgatggtagtgcagcgacctgtgacgactttgtgcaggcgatggaagatgcatcgaatgtcgatctctctcatttccgccgttggtacagccagtccggtacgccggttgtgaccgtcaaagacgactacaatccagaaaccgagcagtacaccctgaccatcagccagcgcacgccagctacgccggatcaggcagaaaaacagccgctgcatattccgtttgccatcgaactgtatgataacgaaggcaaagtgatcccgttgcagaaaggcggtcatccggtcaattcggtgctgaacgtcacccaggcggaacagacctttgtctttgataatgtctacttccagccggtgcctgcgctgctgtgcgaattctctgcgccagtgaaactggaatataagtggagcgatcagcaactgaccttcctgatgcgtcatgcgcgtaatgatttctcccgctgggatgcggcgcaaagcctgctggcaacctacatcaagctgaacgtcgcgcgtcatcagcaagggcagccgctgtctctgccggtgcatgtggctgacgctttccgcgcggtgctgcttgatgagaagattgatccggcactggcggcagaaatcctgacgctgccttccgtcaatgaaatggcagaactgttcgatatcatcgacccgattgctattgctgaagtacgcgaagcactcactcgtactctggcgactgaactggcggatgagctactggctatttacaacgcgaattaccagagcgagtaccgtgttgagcatgaagatattgcaaaacgcactctgcgtaatgcctgcctgcgcttccttgcttttggtgaaacgcatctggctgacgtgctggtgagcaagcaataccatgaagcaaacaatatgaccgatgcgctggcagcgctttctgcggcggttgctgcacagctgccttgccgtgacgcgctgatgcaggagtacgacgacaagtggcatcaggatggtctggtgatggataaatggtttatcctgcaagccaccagcccggcggcgaatgtgctggagacggtgcgtggcctgttgcagcatcgctcatttaccatgagcaacccgaaccgtattcgttcgttgattggtgcgtttgcgggcagcaacccggcagcgttccatgccgaagatggcagcggttaccagttcctggtggaaatgctaaccgatctcaacagccgtaacccgcaggtggcttcacgcctgattgagccgctgattcgcctgaaacgttatgatgccaaacgtcaggagaaaatgcgcgcggcgctggaacagttgaaagggctggaaaatctctctggcgatctgtacgagaagataactaaagcactggcttaa

SEQ ID NO: 263374 - DNA, 792 bp, Klebsiella pneumoniae
atggcaacgccagtgaaaaagtggttattgcgcgttgccccctggtttttaccggtgggcatcgtggcggtgtggcaactggcctcctcagttggctggctgtcgacgcgtattttgccctctccggaaggagtggtgacggcgttctggacgctctccgccagcggcgaattgtggcagcatctggcgatcagctcctggcgggcgctcattggcttttcaattggcggatcgctgggcttgattctgggactgattagcgggctgtcgcgctggggagaacggctgctggatacctcaattcagatgttgcgcaacgtgccgcatctggcgctgatcccgctggtgattttgtggtttggcattgatgaatccgcaaaaatctttctggtggcgcttggcacgctattccccatttatatcaacacctggcatggcatccgtaatatcgatcgcgggctggtggagatggcgcgtagctatggattatccggcataccgctgtttatccatgtgatcctgcctggcgccctgccctcaattatggtcggcgtgcgttttgcgttgggcctgatgtggctgacactgatcgttgccgaaactatttctgccaattccggcattggttatctggcgatgaatgcgcgggagtttctgcaaacggacgtggtggttgtcgctattattctttacgccctgctcggcaaacttgctgacgtcagcgcgcagctgttagagcgcctctggttgcgctggaacccggcttatcatttgaaggaggccacggtatga

SEQ ID NO: 263375 - DNA, 1146 bp, Klebsiella pneumoniae
atgagtctgaatatgttctggtttttaccgacccatggtgacgggcactatctgggaacggaagaaggttcacgtccggttgatcacggttatctgcaacaaattgcgcaagcggcggatcgtctgggttataccggtgtgctgatcccaacaggacgatcgtgtgaagatgcgtggctggtggcggcgtcgatgatcccggtgacgcaacggctgaagtttcttgtcgccctgcgtcccagcgtaacctcacctaccgttgccgcccgccaggccgccacgcttgaccgtctctcgaatggtcgtgcgttgtttaatctggtcacaggcagcgatccacaagagctggcaggcgacggcgtgttccttgatcatagcgagcgctacgaagcctcggcggaatttacccaggtctggcggcgcttattgctgggggaaaccgtcaatttcaacggtaaacatattcatgtgcgcggagccaaactactcttcccgccgattcaacagccgtatcctccgctttactttggcggatcgtcagatgtcgcccaggagctggcggcagaacaagttgatctctacctcacctggggcgaaccgccggaacttgttaaagagaaaatcgaacaagtgcgggcgaaagctgccgcgcatggacgcaaaattcgtttcggtattcgtctgcatgtgattgttcgtgaaaccaacgacgaagcgtggcaggccgccgagcggttaatctcgcatcttgatgatgagaccatcgccaaagcacaagccgcatttgcccggacggattccgtaggacaacagcgaatggcggcgctacataacggcaagcgcgacaatctggagatcagccccaatttatgggcgggcgttggcttagtgcgcggcggtgccgggacggcgctggtgggcgatggtccgacggtcgccgcgcgaatcaacgaatacgctgcacttggcatcgacagttttgtgctttcgggctacccgcatctggaagaagcgtatcgggttggcgaattgctgttcccgcatctggatgtcgccatcccggaaattccccagccgcagccgctgaatccgcaaggcgaagcggtggcaaatgattttatcccccgtaaagtcgcgcaaagctaa

SEQ ID NO: 263376 - DNA, 960 bp, Klebsiella pneumoniae
atgcgtaacatcattcaactggcgctggcgggattacttagcgtctctacgattgcggttgctgcagaatcctctcctgaagcgttacgtataggctatcagaaaggcagtattggtatggtgctggcaaaaagccaccagttactggaaaaacgctatccgcaaaccaaaatctcctgggtggagttccccgctggcccacagatgctggaggcgttaaacgttggcagtattgatctcggcagtaccggagatattccgccaatctttgcccaggctgccggggctgatttggtgtacgtgggcgtcgagccgccgaagcccaaagccgaagtgattctggtgccagaaaacagcccgatcaaaaccgtagccgatcttaaaggtcacaaagttgcctttcagaaaggttccagctcgcacaatcttttactacgcgcactacgccaggccgggcttaaattcacggatatccagcccacttacctgacgcctgccgatgcccgcgccgcgttccagcaaggtaacgtcgacgcatgggctatctgggatccctactactccgctgcattattacagggcggcgtgcgggtgctaaaagacggtaccgatctcaatcaaaccggatcgttttatctggctgcccgtccgtatgcagaaaaaaacggcgcttttattcagggcgtactggcaacctttagtgaggccgatgcgttaacccgcagccagcgcgagcaaagcatcgctttactggcaaaaacgatgggcttaccggccccggtgattgcctcttatttagatcatcgcccccctaccaccatcaaaccggttaacgccgaagttgccgccttacagcagcaaacggcagatctgttttatgaaaatcgtctggtgcctaaaaaagtcgatattcgccagcgcatctggcagcccactcaactggaaggaaaacaattatga

SEQ ID NO: 263377 - DNA, 576 bp, Klebsiella pneumoniae
atgcgtgtcatcaccctggcgggtagtcctcgttttccttctcgctccagctccttgctggaatatgcgcgggaaaaactgaatggcctggatgtagaggtttatcactggaatctgcaaaactttgccccggaagatctgctttatgctcgtttcgatagtccggcactcaagaacttcaccgaacaactgcaacaggccgatggactgatagtcgccacgcctgtgtataaagccgcctattccggtgcgctgaaaaccctgctcgacctgctgccagaacgcgctttgcaaggcaaagtggtactgccactggcgacgggcggcacggtggctcatctgctggcggtcgattacgcccttaaaccagttttaagtgcgctgaaagcccaggagatcctgcacggcgtgtttgccgatgactcgcaagtaattgattaccaccacaaaccccagttcacgccaaatctgcaaacccgtcttgataccgcgctggaaactttctggcaggcattgcaccgtcgggatgttcaggttcctgaccttctgtctctgcgaggtaatgcccatgcgtaa

SEQ ID NO: 263378 - DNA, 1683 bp, Klebsiella pneumoniae
atgaaagtatggatggcgatattaataagtatcttgtgctggcaatcatcggcgtgggcagtctgtccggcctggtcgccagccagagcacaggaagaaatttcccgcctgcaacagcaaataaaacagtgggacgatgactactggaaagaagggaaaagtgaggtggaagacggtatttacgatcagttaagcgcccgtcttacgcaatggcaacgctgttttgggaacgagacccgcgatgtgatgatgccgcctttaaacggtgcggttatacatccggttgcccatacgggtgtacgcaaaatggcggataaaatcgcattaagtctgtggatgcgcgaacgtagcgatctttgggtgcagccaaaagttgatggcgttgcggtaaccctggtttatcgggacgggaaactgaacaaagcaatcagtcgcggcaatggcctgaaaggcgaggactggacgcagaaagttcgcttaatttccgctgtgccgcaaaccgctagcgggcctttagccaacagtacgcttcagggggaaatatttctcaaacgcgaggggcatatccaacaacaaatggggggaataaatgcccgcgcaaaagttgctggtctgatgatgcgccaggacgatagcgacacgctgaattctctgggcgtttttgtctgggcatggccggatggaccgcagttaatgaccgatcgtttaaaagagctgactaccgctggttttactctaacgcagacgtatacccgtgcggtgaaaaatgctgatgaagttgcgcgcgtacgcaatgcgtggtggaaagcgaaattacccttcgtcaccgatggcgtggttgtgcgagcggcgaaagaacccgaatcccgctattggctaccaggccaggcagaatggttggtggcctggaaatatcaaccggtagctcaggttgccgaagtgaaggcgattcagtttgcggtgggtaagagcggtaaaatatcggtggttgcgtcactcgcacctgtcatgcttgatgataaaaaagtccagcgggtgaatattggttccgtcaggcgctggcaggagtgggatattgcgcctggtgatcagatcctcgtcagccttgccggtcagggtattcctcgcattgatgatgtggtgtggcgcggtgcagaacgcacaaaaccgacaccgccagaaaaccgctttaactcgttgacctgctactttgcttctgatgtttgtcaggaacagttcatttcacgcttagtctggctggggtcaaaacaggttcttgggctggatggcattggtgaggccggctggcgcgcgctgcatcagactcatcgctttgagcatatcttttcctggcttttattaacgccagagcaattacagaacacgccggggatcgcgaaaagtaaaagtgcgcagttatggcatcagtttaatctggctcgtaagcagccttttactcgctgggtgatggcaatgggaataccgctaacccgggtggcgcttaatgccagtgatgaacggtcctggtcgcaacttttattgagcacggagcagttctggcagcagctgccggggactggatcggggcgcgccagacaggttattgaatggaaggaaaatgcgcaaatcaagaagctgggcagttggctggctgcccagcagatcacaggttttgaaccttag

SEQ ID NO: 263379 - DNA, 618 bp, Klebsiella pneumoniae
atgctgttacacattttgtatttggttggcattactgccgaagccatgacgggggcgctggcggccggacgacggcgcatggatacatttggcgtaattattattgcgaccgccacggcaattggcggagggtcagtgcgcgatattctgctgggccactatccgctcggctgggtcaaacacccggaatatgtgattattgtcgctaccgccgcagtactcaccactatcgttgctcctgtaatgccttacctgcgcaaagtgtttctggtgctcgatgcgctcggactggtggtcttttctatcattggcgcacaggttgcactggatatgggacacggcccgatcattgccgttgtcgcagctgtgacgaccggcgtatttggcggcgttttgcgcgatatgttctgtaaacgcatcccgctggtattccagaaagaattgtatgccggtgtctcatttgcctccgccgtgctgtacatcgcgctgcaacactatgtttctaatcatgatgtggtaattatctccaccctggtattcggcttttttgcccgtttactggcgctacgccttaagctgggattaccggtcttttactacagccacgaaggacactaa

SEQ ID NO: 263380 - DNA, 825 bp, Klebsiella pneumoniae
atgaacgaacatcatcaaccttttgaagagataaagctgattaatgcaaacggagcagaacaatggtcagcaagacaacttgggaaactactgggttattcagagtatcgtcactttatacctgtattaacgcgcgccaaagaagcttgtctgaatagtggtcacacaattgatgaccatttcgaggagatcctcgatatggtcaaaattggctcaaatgccaaaagagcattaaaagacatcgtactctcccgctatgcctgttacctggtagtacaaaacggcgaccctgcgaaaccggttattgcggcagggcaaacttattttgctatccagacccgacgacaggagctggctgacgatgaagctttcaggcaacttcgtgaagacgaaaagcgtctttttctgagaaatgagttgaaagaacataacaaacaattagttgaggcagcgcagcaagctggggtagcgacagctatcgatttcgccatatttcagaatcatggttaccgggggctgtatggtggattagatcagaaagccatccatcagcggaaggggctgaaaaagagtcagaagatcctggatcatatgggttcaacagaactggcggctaatctctttcgagctacccaaacagaagaaaaactcaagcgggatggcgtgaattcaaaacagcaagctaacaccacacactttgacgtgggtcgcaaggtgaggcaaaccattcaggaacttggcggaaccatgcctgaggagttgccgaccccgcagatcagcatcaagcagttggaaaacagtgtaaaaattacagagaaaaaatag

SEQ ID NO: 263381 - DNA, 669 bp, Klebsiella pneumoniae
gtgaaaaacaatgcacagctgttgatgccgcgcgaaaaaatgctgaagtttggtattagcgccttaacggatgtcgagctgctggcgctatttctgcgtaccggaacgcgcggtaaagatgtattaaccctggcaaaagagatgctggagaatttcggctctctttatggcttgttaacctctgaatatgaacaatttagtggtgttcatggaattggcgtggcgaaatttgcccagttaaaggggattgctgaactagcgcggcgttactacaacgtgcggatgcgtgaagaaagccctttactcagcccggagatgacgcgggaatttttacaaagccagctcacgggggaggagcgggagatctttatggtgatctttctcgactcacaacaccgggttataacgcatagccgtcttttttccggcacgctaaaccatgttgaagtccatcctcgggaaattatccgcgaagcgataaaaataaatgcctcggcgctgatccttgcacataatcacccttcgggttgtgctgaacccagtaaagcggataaactcattactgaacggataataaagagttgtcagttcatggatttacgcgtgctcgaccatatcgtgattgggcgtggagagtatgtttcttttgccgaacgcggctggatttaa

SEQ ID NO: 263382 - DNA, 213 bp, Klebsiella pneumoniae
atgcttagacaacatcaggatagcctcttactgcgctttgcgcaaggagaagaaggccatgaaactaccacgcagctctcttgtctggtgtgtgttgatcgtgtgtctcacactgttgatattcacttatctgacacgaaaatcgctgtgcgagattcgttacagagacggatacagggaggtggcggctttcatggcttacgaatccggtaa

SEQ ID NO: 263383 - DNA, 1542 bp, Klebsiella pneumoniae
atgccaacagttccaatttctatgagaaaacttaaagaaattcttaggcttaaatacggtgttggactcagccatcgacaaattggtcgtagtcttgcaatctccccttccgttgtatccagatatgctaatcgggcggctcaacttggcataaagcagtggcccttacctacaggatgggatgatacaaaactaaaacatgcgttccttcagacccaggttaagatgaagaagcactctctgcctgactgggctacagtacaccgggaactgcgtaataaatgcgtgacgctgcagctactctgggaagaatactgtgagcgtaatccaggcggtttttacagctataaccattactgccggatgtaccgtgaatggctcaaaaccacttcaccatcaatgcgtcaggtacataaagctggcgaaaaacttttcgttgattactgtggacctaccgttggcgttaccgaccctgagaccggagaaataagaactgctcaggtcatcgtagctgttctcggggcatcaagttacacatgggcagaggccacctggtctcagcagcttgaagactgggtgatgagtcatgttcgctgcttccagtggttgggtggcgttcctgaacttgttgttccggacaatctgaaaagcgccacatccagggcatgtaagtatgatcctgacgttaaccctacctaccagcagatgcttgagcattataatgtcgcagttttgcctgcgcggccacgtaaaccgaaagataaagccaaagctgaagttggcgttcaggttgttgaacgctggatcatggcccgaatcaggcatgagatcttctacagccttgcatcgcttaatcagcgcattcgggagttgctggaaagactgaataacaaaataatgcagaagttgggttattcacgtgcagaactcttcatccagcttgataaacccgcactgaagcctcttcctgaagccagttacagttacaccctggtgaagaaagtcagagtccatgccgattaccacgtggaaatcgacaaacattactactcggttccatgttcgctgttaggccagcaactggaagcatggatctccggagaactggtaagactcttcaatcaggggcaggaggttgctgtgcacccgcgcaagcgtacttatggctacagtacccgcaacgagcacatgcctgaagctcatcgacagcatgccacctggacgccagagcgtcttctggaatgggcggggcacataggcagtgaaactcatagttatgtgcttcatatactgaactctcgtccacatccggaacaaagctatcgcttctgccttggactcctgaaccttcataaaaaatacagtaaagccagacttaatgcagcatgtgcaagagctctgaaaacaaaggtatggcgtctgtcaggtattaaatcgatcctggaaaaaggtctggataaacaacctgttcaggatccaaaaccagatctgttatccacgatggaacacgaaaacgtacgcggcagtgagtattaccactga

SEQ ID NO: 263384 - DNA, 747 bp, Klebsiella pneumoniae; identical to SEQ ID NO: 107025

SEQ ID NO: 263385 - DNA, 1902 bp, Klebsiella pneumoniae
atgctgcctgatgaacttgagaaaagattagatggaattgaggatgcttcaaaaaaagggtatccagtacgtaatctatacaaaattgcgtgtgagcccggactgtggctgcaagcctacgtgaatatacgggccaatgcaggtgcactgactcaaggtgtatcaacagataccattgatggcttctctatcgaaagagcagagaagctggcaaaaacattgcggagtagagaatacgtagcgaaacctgtacgcagagttcagatcccaaaaaaggacggaaaaaccagaccgctggggattccaggtggagacgataaactggcgcaagaagtagcaagaattattctggaaagggtttatgaaccagtattctctgaacactctcatggattcagaccaaaacgttcgtgtgaaactgcgctcagatctattcgtccagtctggaacggagttaaatggatcgtggatgttgatatcaaaggtttctttgacaatatcccccacaaactattgctgaatacactggcagagaaaattaaggataagaatttcctgaaattaatcgaacagtggctgaaggcaggatatgtggacaattggaaataccatcgctcatattctggcacgccacaaggtgggataatttctcccttactggcaaatatatacctcgacaaactggaccgttttgtagaacagaacttaattcctgcatatacaagcggtacaaaacgaagagcgaatccagatatgaacaggctggcccataagattcataaactacgaaagaaagtagacggtatggcaactgattctgaatcagaaaaagaagccataaagaaagaaattgaacgactgcttgaagaaaaacgttctataccatctcaggtcatgaacgatccaaacttcaggcgtatgtactatgttcgatatgctgatgacttcgtaattggtgtcatcggctcgaagaaagatgctgaacatatatcaagacaggtcagaaactttattactacttcactgggattggaagttaatgaagcaaagaccaggatccgccatatctcagaaggagttaattttttaggctatgaaatcagacaggcagatgcaaagaaattgctgaagcagaaaatgcaagggcggcatgctctccggagatccaccacaggaattgtgcagctcttcgttcctgacaatatagccgctaaattttgtcaccaaaagaaatatggctgttatgagaatgtgaaggctgtacatcgttcaagtctacaaaatctcagtgaagctgaaattgttctgactttcaacgcggaaatgcgcggattggcgaactactacagtctggcgctggacatgaaatataaattatcaaaattatatttcatatggcaaataagcctttttaagaccctagcgaataaacgacgtagttcagtgaataaagtcgccaaatcgctacggcaaaataatggagatctggctattaccgttcaggccaaaaatggatcccgaaagattgaggttttcaaactcaaacatgtcaatcgcaaccgaacaacgattgtcgatacggaaccgagaaccgcacatatcacaacccgcacaacagagatcatgcgtcgattaggggcaaggatctgcgagtattgtgcgaagactgggcgctgcgaagtacatcatgtcagaaagctaaaagacctgaagaaaggtcgtaaggccggatataaacccagcctgtggcaactaatgatgatcgcacgccgccggaaaacgatgattttgtgcgcaagttgccacgacaagttacatagcggaaaactacccgatctgagacaggaaaagggaagaatactcctgcaaccacctgtctcaagtggggattctgctaaatga

SEQ ID NO: 263386 - DNA, 288 bp, Klebsiella pneumoniae
atgtcgctggtgaatattacgcctgatacagatggcaccaccctgacgctacgtattcagggcgagtcgaatgatcccttgcccgcattcagcggaactgttgaatatgggcaaattcagggaacaatagacaactttcaggaaatcaatgtgcagaatcaattgattaacgcccctgccagcgtcctcgcccccagcgatgttgatattccgttacagttaaagggtatttctgtggatcagttaggctttgtacgtatccacgacattcaacctgttatgcagtaa

SEQ ID NO: 263387 - DNA, 885 bp, Klebsiella pneumoniae
atgaaaaaaacattactggcagccggtgcggtactggcgctctcttcgtcttttactgtcaacgcagctgaaaacgacaaaccgcagtatctttccgactggtggcaccagagcgttaacgttgtcggaagctatcacacccgtttcggaccgcagatccgcaacgatacctaccttgagtacgaagcattcgctaaaaaagactggttcgacttctatggttatgcggatgcgccggtattcttcggcggtaactccgatgcaaaaggtatctggaaccacggttctccgctgtttatggaaatcgaaccacgtttctccatcgacaagctgaccaatactgaccttagctttggtccgttcaaagagtggtacttcgcgaacaactacatttacgacatgggtcgtaataaagatggtcgccagagcacctggtacatgggtctgggtaccgatatcgatactggcctgccgatgagcctgtccatgaacgtctatgcgaaataccagtggcagaactatggcgcagcgaatgaaaacgagtgggacggttaccgtttcaaaattaaatactttgtgccgattaccgatctgtggggcggtcagctgagctacatcggctttaccaacttcgactggggttccgatttaggggatgacagcggtaatgcaatcaacggtattaagacccgtaccaataactccatcgcttccagccatattctggctctgaactacgatcactggcactactctgtcgtagctcgttactggcacgacggtggtcagtggaacgacgatgcagaactgaacttcggcaacggcaacttcaacgttcgctctaccggctggggtggttacctggtagtaggttacaacttctga

SEQ ID NO: 263388 - DNA, 348 bp, Klebsiella pneumoniae
atggctataatcccaaaaaactatgcgcggttagaaagcggctatcgcgaaaaagcattaaaaatctatccgtgggtctgcggtcgctgttctcgcgagtttgtttattccaacctgcgtgaacttaccgttcaccacattgatcacgaccataccaataacccggaagacggcagtaactgggagttattgtgtctttattgccacgatcacgagcattcaaaatataccgaagcagatcagtatggtacgaccgttatcgcaggggaagatgcgcagaaagatgtcggtgaagcgaagtacaacccattcgctgacctgaaagcgatgatgaacaagaagaagtga

SEQ ID NO: 263389 - DNA, 972 bp, Klebsiella pneumoniae
gtggcacaggaatatactgttgaacaactaaaccacggccgtaaagtctatgactttatgcgctgggactactgggcttttggcatctctggtctgctgttaatcgccgctatcgttattatgggcgtgcgcggctttaactgggggctggatttcaccggtggtacggttatcgaaattacgctcgaaaaaccggctgaaattgacgtaatgcgtgatgcattgcaaaaagccggttttgaagagccgatgctgcaaaactttggtagcagccacgacatcatggtccgtatgccgcctgctgaaggcgaaaccggcggtcaggtgctgggcagccaggtcctgaaggtgattaacgaatccaccaatcagaatgcggcagtgaagcgtattgagttcgtcggtccgagcgtgggggcagaccttgcgcaaaccggtgcgatggcgttgatggcggcgctgctgtctatcctcgtgtacgtaggtttccgctttgagtggcgactggcggcaggggttgttattgcgctggcgcacgacgttatcattacgctgggtattttgtcgttattccatatcgagattgacctgaccattgtggcatcgttgatgtcagttatcggttactcgcttaacgacagtatcgtggtatcggaccgtattcgtgaaaacttccgcaagatccgtcgcggtacgccttacgaaatctttaacgtgtccttgacccagacgctgcaccgtaccttgatcacatccggtactaccttgatggttatcctgatgctgtacctcttcggtggtccggtactggaaggcttctcgctgaccatgctgattggtgtttccatcggtactgcatcttccatctacgtagcatcggcgctggctctgaaactgggtatgaagcgcgaacacatgctgcagcagaaagtggaaaaagaaggggcggatcagccgtcaattctgccgtaa

SEQ ID NO: 263390 - DNA, 582 bp, Klebsiella pneumoniae
atgaattttttagctcacctgcatctagctcacctggcggaaagctcgctttctggcaatttactggctgatttcgtacgcggaaatcctgaagaaagttttccgcccgacgtcgtggctggcattcatatgcatcggcgcattgatgtactaaccgacaatctgccggaagtccgcgaagcacgggaatggtttcgtagtgaaacccgccgcgttgcgcctattaccctggatgtcatgtgggatcactttctttcccgccactggtcgcagctgtcgccggactttccgctacaggaatttgtctgttatgcccgcgaacaagtgatgacgattttgccggactcaccgccgcgctttatcaatctgaacaactacttatggtcagagcagtggctggtgcgctatcgcgatatggatttcatccagaacgtgttaaacggcatggcaagccgtcgcccacgtctggatgccctgcgtgactcctggtacgatttaaacgcccattatgccgccctcgaaacccgcttctggcagttttatccgcggatgatggcgcaggcgtcacgcaaggcgctctga

SEQ ID NO: 263391 - DNA, 1122 bp, Klebsiella pneumoniae
atgactgataagaacgggcagagtattgaagtgtcctatattttcactgataccatagataataattatgatggaaaattatgcttaaaaatctgtaacccctgcaaccaaaatgattctagtacacatgaatataaaatagatcatcaacagttgaaaaatcacataaggcaacttgaggagtgggcccttcttgaaaagttttatgataacaacgcttattattctaaacgtacaaaacaattagagaagaaaattgccgatgcggggtttatagcagggaaggttaatgccgataactttaatgtaaaagagtttaaagacgatatagcctcgatgctttgtgaacagccccccatgcgaacacaccagatatcttcatccggatacttatctgccgataaagtacccgatctctataagacaaatttggaagacgcgcagagagatctgaaaacaacaccggttgacatcgatggtgttagtctaaaaccaaaaactcgggaaaaaattgcggaaaaaattgcgaaaaaaactgaggaagaaaatgcgaaaaaaattgcgaaacaaaatgcgaagaccattgaggagaagaatagtgaaaaaaacaagaaagaaacaaatcctgaggataattttgtcttaaaattctcaccggaagaaatcaatgagatgctcctggattacagcgatgaagaacaaaaaaaattaagaccttttttcactagtgatcatatctattgtttgtttgatgcttttagtcagggtttgtataatgttgctcgtaatggcagtccacggtatgcaggtttactacgtcaaatagcatccaagtgtgcgatattacaagattttgatcaacaattgttctggcgcacgttttcaggaggagtcttccatcgacgtatctctgtgaacagcgagccagaaaagacagatgtatggcgattcagtacacaatttgattttccacatataaatgacaacggagagttgtccagaacggtactcatgttcgagggggttgctgaaagcaactttaaagatatcgccaatcattccagcgaatgtttttcttacagttgttatgccgccccgctggatgcgaatgctaaaaaatag

SEQ ID NO: 263392 - DNA, 1053 bp, Klebsiella pneumoniae
gtgaacatatatatcgggtggcttttcaaattaatccctttaattatgggcttaatttgtatcgcgttaggtggctttgtgctggaaagttctgggcaaagtgagtatttcgtcgcgggtcatgtgctgatttctctggcagccatatgcctggcattattcactaccgcatttattatcatttcgcagctcacgcgcggcgttaatacgttttacaatacattgttccccattattggctatgcggggtcaattatcaccatgatatggggttgggcactgttagcaggcaatgatgtgatggcagacgagtttgttgccggccatgttatttttggcgttggtatgattgccgcctgtgtatcgacagtggcagcgtcatccggtcactttctgctcattcccaaaaatgcagcagggagcaagagcgatggaataccggtacaggcttattcgtcattaatcggtaattgcctcattgccgttcccgtgttactcaccctgctcggtttcatttggtctattacgctgttacgtagtgccgacataactccgcattatgtcgccggtcacgtattgcttgggttaaccgcaatctgtgcctgtctaattggccttgttgccacaatcgtccatcaaacacgtaatacgttctcatccaaagaacactggctgtggtgttattgggttattattctcggctcaatcacggtgctgcagggcatatacgtgttagtcagctccgatgcaagcgcccgactggctcccggcattatcctcatttgcctcggaatgatctgttacagcatattctcaaaagtctggctactggcactggtctggagacgtacctgttcgttagccaacagaataccgatgattcccgtcttcacctgcctgttttgccttttcctggcatcgtttcttgcggaaatggcgcagaccgatatgggatattttattccttcgcgggttctggtcggtttgggagcggtatgctttacgttgttctcaatcgtttcaatattagaagcgggttctgctaaaaaataa

SEQ ID NO: 263393 - DNA, 1203 bp, Klebsiella pneumoniae
gtggaaaggtttgatgccattattataggcgctggtgcggcgggtatgttctgttctgcgctggcaggtcaggcaggacgccgggttctgctgatcgataatggtaaaaaaccagggcgcaaaatcctcatgtctggcggtgggcgctgcaactttaccaatctttatgtcgaaccgggcgcttatctgagccagaatccgcatttttgtaagtctgcactcgcgcgttttacccagtgggatttcattgatctggtcaataaacacggcatcgcctggcacgagaaaacgttagggcaactcttctgcgatgactccgctcagcagattgtcgacatgctggtggatgagtgcgagaagggcaatgtgaccttcagattgcgtagcgaagtgctgagcgtggagaaggatgatacaggcttcacgcttgaactgaacggcatgactgtcggttgcgaaaagctagtcatcgcgaccggtggactgtcaatgccggggctgggcgcgtcgccgtttggttataagattgccgaacaatttggcctcaacgtgctgccgacccgcgcgggtctggtgccattcactctgcataaaccgttgctcgaagagttacaggtgctggcaggcgtggcggtgccttccgtgattaccgctgaaaacggcaccgttttccgtgagaacttactcttcacccaccgcggcttatctggaccggcggtgttgcaaatttccagctactggcaaccgggtgaatttgtcagtatcaatctgctaccggatgtggacctcgaaaccttcctgaatgagcagcgtaatgcacatccgaatcagagcctgaaaaacacactggcggttcatctaccgaagcggttggttgaacgtttacaacaactcgggcaaatcccggatgtttcgctaaaacagctcaacgtgcgtgaccaacaggcactgattagcacattgaccgactggcgcgtacaacccaacggcactgaaggctatcgcactgccgaagtgacgctcggcggcgtggacaccaacgaactctcttcacggacgatggaagcgcgcaaagtgcctgggctgtacttcatcggcgaagtgatggacgtcaccggttggctggggggctataacttccagtgggcgtggtcgagtgcgtgggcttgtgcgcaggatttgattgcagcgaagtcgtcctga

SEQ ID NO: 263394 - DNA, 1500 bp, Klebsiella pneumoniae
atgctacatttgtttgctggcctggatttgcataccgggctgttattattgcttgcactggcttttgtgctgttctacgaagccatcaatggtttccatgacacagccaacgccgtggcaaccgttatctatacccgcgcgatgcgttctcagctcgccgtggttatggcggcggtgttcaactttttgggtgttttgctgggtggtctgagtgttgcctatgccattgtgcatatgctgccgacggatctgctgcttaatatgggatcgtctcatggccttgccatggtgttctctatgttgctggcggcgattatctggaacctgggtacctggtactttggtttacctgcatccagctctcatacgctgattggcgcgatcatcgggattggtttaaccaatgcgttgatgaccgggacgtcagtggtggatgcactcaatatcccgaaagtattaagtattttcggttctctgatcgtttcccctattgtcggcctggtgtttgctggcggtctgattttcttgctgcgtcgctactggagcggcaccaagaaacgcgcccgtatccacctgaccccagcggagcgtgaaaagaaagacggcaagaaaaagccgccgttctggacgcgtattgcgctgatcctttccgctatcggcgtggcgttttcgcacggcgcgaacgatggtcagaaaggcattggtctggttatgttggtattgattggcgtcgcaccagcaggcttcgtggtgaacatgaatgccactggctacgaaatcacccgtacccgtgatgccatcaacaacgtggaagcttactttgagcagcaccctgcgctgctgaaacaggctaccggtgctgatcagttagtaccggctccggaagctggcgcaacgcaacctgcggagttccattgccatccgtcgaataccattaacgcgctcaaccgcctgaaaggcatgttgactaccgatgtggaaagctacgacaagctgtcgcttgatcaacgtagccagatgcgccgcattatgctgtgcgtttctgacactatcgacaaagtggtgaagatgcctggcgtgagtgctgacgatcagcgcctgttgaagaaactgaaatccgatatgcttagcaccatcgagtatgcgccggtgtggatcatcatggcggtcgcgctggcgttaggtatcggtacgatgattggctggcgtcgtgtggcaacgactatcggtgagaaaatcggtaagaaaggcatgacctacgctcaggggatgtctgcccagatgactgcggcagtgtctatcggcctggcgagttataccgggatgccggtttccactacccacgtactctcctcttctgtcgcggggacgatggtggtagatggcggcggcttacagcgtaaaaccgtgaccagtattctgatggcctgggtgtttacccttccggctgcggtactgctttccggcgggctttactggctctccttgcagttcctgtaa

SEQ ID NO: 263395 - DNA, 336 bp, Klebsiella pneumoniae
atgataagcaccgtcgcattattttgggctttatgtgtcgtttgcattgttaacatggcgcgctatttctcatcactacgcgcgttgttagtggtactgcgtaactgcgatccattgctctatcaatatgttgatggagggggcttttttacctcacatggccaacccaacaaacaggtgcgtctcgtttggtatatctatgcccaacgttatcgcgatcatcacgatgatgagtttattcgccgctgtgagcgggtgcgtcggcagtttattctgaccagcgcattgtgtggtctggtggtggtcagtctgattgcattgatgatttggcattaa

SEQ ID NO: 263396 - DNA, 435 bp, Klebsiella pneumoniae
atggcttataaacacattctcatcgcggtcgatctctccccggaaagcaaagttctggtagagaaagcagtctctatggctcgcccctacaatgcgaaagtttctctgatccacgtagatgtaaactactctgacctatacaccgggcttattgatgtgaatctgggtgatatgcagaaacgcatctctgaagagacacatcatgcgctgaccgagctttccactaatgcaggctacccaatcactgaaaccctgagcggcagcggcgatctgggccaggttctggtcgatgcaatcaagaaatacgatatggatctggtggtttgtggtcaccaccaggacttctggagcaaactgatgtcttccgcacgtcagctgatcaacaccgttcacgttgatatgctgattgttccgctgcgcgacgaagaagaataa

SEQ ID NO: 263397 - DNA, 1470 bp, Klebsiella pneumoniae
atgaatacaacaacacccatggggatgctgcagcaacctcgcccatttttcatgatcttttttgtcgagttatgggagcgattcggctactacggcgtgcagggcgtactggcggttttcttcgttaagcagcttggattctcgcaagaacaggcttttgtcacttttggtgcttttgctgcgctggtctatggcctcatttccattggcggctatgtcggcgaccacctgctggggaccaaacgcaccattgttctcggagcacttgtgctggcgattggctacttcatgaccggcctgtcgctacttaagcctgacctgattttcatcgccctggggactatcgctgtcggtaacggcctgtttaaagctaacccagccagcttgctttcgaagtgctatccgccgaaagatccgcggcttgatggcgcatttaccctgttctatatgtcgatcaacatcggctcgttgatagcgttatcgctggcccccgtgatcgctgatagattcggttattcagtcacctacaacctgtgcggtgcggggttaattatcgcgctattggtttacatcgcctgtcgcggaatggtgaaagacattggttctgaacccgacttccggccgatgagcttcagcaaactgttgtacgtgttacttggcagcgtggtgatgatcttcgtctgtgcatggctgatgcacaacgtagaagtcgccaatctggtgctgattgttctctctatcgtcgtcaccatcattttctttcgtcaggcattcaagctggataaaaccgggcgcaataaaatgtttgtcgcctttgtcctgatgctcgaagcggtggtgttttacattctctacgcccagatgccaacgtcgctgaacttctttgccatcaacaacgtgcatcatgaaattctcggcttttccatcaacccggtcagcttccaggcgcttaacccgttctgggtggtactcgccagcccaatactggcaggcatttacacgcatctgggtaacaaaggcaaagacctctctatgccgatgaaatttactctcggcatgtttatgtgctcactgggctttttgacggctgcagctgcgggaatgtggtttgcggatgcccaaggactgacatcgccgtggtttattgtgctggtttacttattccagagcctgggtgaattgtttattagcgccctgggtctggcgatgattgctgccctggtgccgcagcatttgatgggctttattctcgggatgtggttcctgacgcaggctgccgcgttcttgctgggcggctatgtggcaacatttaccgcagtaccagacaacattaccgatccgcttgagacgttgcccgtctataccaacgtgtttggtaagattggcctggttacgctgggcgttgcggtggtgatgctgctgatggtgccgtggctgaaacgaatgattgcgacgcccgaaagccattaa

SEQ ID NO: 263398 - DNA, 753 bp, Klebsiella pneumoniae
gtgaaaatctgcttaattgatgaaacaggcaccggagacggtgccttatctgttctggcggcccgctgggggctggagcacgatgaagacaacctgatggcgctggtattaacgccggagcatctggaactgcgcaagcgtgatgagccaaaacttggcggcatcttcgttgattttgttggcggagcgatggcgcaccgacgcaaattcggtggtggtcgcggtgaggcggtggcgaaagcggtgggcattaaaggcgattatttgccggatgtcgtcgatgctaccgcagggctggggcgcgatgcctttgtgctggcttcagtcggctgccgcgtgcggatgctggagcgtaatccggtggttgctgcattgctcgacgacggcctggcgcgtggttatgcggatgcggaaatcggcggctggttgcaggagcggttgcagttaattcacgcctccagcctgacggcgctgaccgatattaccccacgcccgcaggtggtctatctcgatccgatgttcccgcataagcagaaaagcgctctggtgaaaaaagagatgcgtgtctttcagtcgctggtggggccggatcttgatgccgatggattactagagcctgcacgcttgctggcgaccaaacgcgtggtggtaaagcgcccggactacgcgccgccgctggcgaatgtcgccacgccaaacgcggtagtgaccaaagggcatcgctttgatatttatgccggaacgccggtgtaa

SEQ ID NO: 263399 - DNA, 531 bp, Klebsiella pneumoniae
atggaaaactggtgctgggagcctgaggcgctggcatttatctccggtcactatgaaaccggcgaaccgctgccgaaggagctgctggataaaatgctggcggctaagaactaccaggcggcgctgtttattctgcgccagctggagttcggcctgtttgatttccgcctccatgccgagttccgcccggatcagggagcgaaaatcctcgaaactctggcagaaatcaagaaactggttgccgtagtaccgtctccatcctggggccgtttcccgcacgctttcagccatattttcgccggtggttatgccgcaggttactacagctacctgtgggccgacgtgctggcggcagatgccttctcgcgctttgaggaagagggcattttcaaccgtgaaaccggacagtcgttcctcgacaacattctgagccgtggcggttcagaagagccgatggatctgttcaaacgcttccgtggtcgtgaaccgcagctggatgcgatgctggagcattacggcattaagggctga

SEQ ID NO: 263400 - DNA, 312 bp, Klebsiella pneumoniae; identical to SEQ ID NO: 9576

SEQ ID NO: 263401 - DNA, 2409 bp, Klebsiella pneumoniae
atgggccgcgaacaccacaccgaatacagtggtcacgacctgccggtgaagatgcgcggccccggcggtcagtcagtgcgcttacagtggcagcagcaccataaactgagtggccttgagcgcactggcaccggcgcggaaggattccgctacgaccgtcacggcaacctgctggcgtacacggacggtaacggtgttgtctggacaatggagtacggcccgtttgatttgccggtggcgcgaacggacggtgaaggccaccgctggcagtaccgctacgataaagacacgctgcaactgacagaagtcatcaacccgcagggtgagtcatatctttatgttctggataactgcggccgggtgacggaagagcgtgactggggcggcgtggtctggcgttaccgttatgatgccgatggcctgtgtaccgccagggttaacggtctggaggaaaccatcctctacagccgggacgccgcaggccgcctggcagaagtcatcacgccggaaggcaaaacgcagtatgcgtatgacaaatccggcaggctgacgggtatcttcagcccggacggcacatcacagcgcaccggctatgacgaacgcgggcgggtgaatgtcaccactcagggccgacgggccattgaataccactaccccgatgaacacaccgtcatccgctgtatcctgccaccggaagatgaacgcgacagacaccccggtgaatccctgctgaaaaccacgtaccgctacaacgcagccggagaactggcagaggtcatcctgccggaggatgagacgctgacgttcagccgtgatgaggcaggacgtgaagtgctccggcacagtaaccggggttttgcctgtgagcagggctggaatgcagccggtcagcttaccagccagcgcgccggacttttcccggcggaagccacatggggcggactgctcccctcactggtgcgggagtaccgttacgacagcgcgggcaatgtgtcggctgtcaccagccgggaagattacggacgggaaactcgccgggagtaccggctggaccggaacggccaggtcacggcggtgacagcctcaggcaccgggctgggctatggcgaaggcgatgagtcctatggctatgacagctgcggctacctgaaggcgcagtctgcgggctggcaccggataagtgaagagactgaccagtatgccggaggccaccggctgaaacaggccggaaacacgcagtatgactatgacgccgcaggccggatggtcagccgcataaaacaccgtgacggctaccgcccggaaacagagcggttccggtgggacagccgtgaccagctgaccgggtattgcagcgcacagggtgaacagtgggaataccgccacgacgccagcggcagacggacggaaaaacgctgcgaccggaagaaaatccgcatcacgtacctgtgggacggcgacagtattgcggaaatccgggaataccgcgatgataaactgtacagcgtacggcacctggtgtttaacggctttgagctgataagccagcagtgcagccgggtacggcagccgcatccgtccgtggccccgcagtgggtgacgcggacgaatcatgcggtgagcgacctgacgggccgtccgctgatgctctttaacagtgaaggtaaaaccgtctggcgaccggggcagaccagcctgtgggggctggcactcagcctgcccgcagacaccggctacccggacccgcgcggggaactggacgcggaagccgaccccggcctgctgtatgcgggacagtggcaggatgcagaatccgggctgtgctataaccggttccggtattacgagccggaaaccgggatgtacctggtgagtgatccgctggggttgctggggggtgagcagacttaccggtatgtgccaaatccgtgtgggtgggttgatccgctgggattggctgcaagttctaaaatcagcagtttgatggactatattggcgatggtcgtcgtgttagtgggcatacgggtttcctggatggggttcgtttatcacgtagtcaaataaacaatattgctaaagaaatggagaagctaggaattaaagtaataaggaaagcagataaatatttgccaccaaatgctagggcagcttttgattatggccttcgcaatatttatcttaggaaaaatgctaccttatatgaggtgtatcatgaagtgattcatgctaagcaatttgcgaaaattggacgagaagcatacgaagcactaggacgtttatctagggaggaacacgttctaaatgaaatattaaaaagtaaaaatttattcaatgaggcggaaatagctcatgccataaaatatgttgagggattgagagaaaaattcatgatgggactaataaattga

SEQ ID NO: 263402 - DNA, 711 bp, Klebsiella pneumoniae; identical to SEQ ID NO: 9980

SEQ ID NO: 263403 - DNA, 4833 bp, Klebsiella pneumoniae
atgagtgaaggaccaggcgggccacagggagcgaccgcaggcggtacgctggcaatgcgaatgctgtcacagcaggcgatggtcgccagccagatgaaacgggcagccaacgacaaagccattgcacagatgctggcatcaaaaaagtccggcccccccgccgccaggctgggcgatgaaattcagcacaagagttttttgggggcgctggcaggggccgtgctgggggcgatagtgaccatcgcagaaggttgcctgattatggccgcctgtgccaccggcccttatgcgctggttctggtgcctgcgctgatgtatgccagctataaggcgagtgattatgtggaggagaaacagaaccagcttgaatcatggataaacagcttttgtgacacggacggcgccatcaataccggttctgaaaatgtaaacattaacggaaagcccgctgccagggccgccgtcacccttccccctcctcccccacctggagcaatacctgaaatcccacagggggaaccctcatggggtgatattgccactgacctgcttgaatcggcagcggaaaaagcagtaccactggcgaaggcctgggggaacgctgttatcaccctgacggacagcaatgccggttttatggatcgcgtcagcgccggcgcatcgcttctgtttcccgccggtccggtattaatggagtttgccaccatggtgggcgggcgtggcgaaatcaaaaaagatgtggatttcccggaagccggtgaggacacggcgctctgcgacaaggagaacaaaccaccgaggatagcccagggcagcagcaacgtctttatcaacaatcagcccgccgcgcgcaagggcgacaaactggagtgcagcgcggcaatcgtggaaggttcgccggacgtctttattggcggtgaacaggtgacctatctggatatccagccagagttcccgccgtggcagagaatgatcctggggggaataacgatagccagctatcttctgccgccagcgggactgctgggaaaactgaagaatctggcgagactcggcaaactggggaacctgctggggaaaagcgggaagctgctgggggcaaagctcggcgcgttgctgggaaaaacaggtaagtcgttaaaaagtattgccaataaagtcatcagatgggtaacagatcctgtcgatccggtaaccggcgcgtactgcgacgaacgtaccgactttacgctgggccagaccctccccctctccttcacccgtttccacagttctgtactgccgctgcatggcctgaccggcgtgggctggagcgactcctggagcgaatacgcctgggtgcgtgaacagggaaaccgggtggatatcatcagccagggagccacgctgaacttcgccttcgacggtgacagtgatacggcggttaacccgtatcacgcccagtacattctgcgccgccgcgatgattatctggagctgttcgacagggatgcactgagcagccgcttcttttatgacgcctttccgggaatgcgtctgcgccacccggtgactgacgataccagcgatgaccgcctggcacacagccccaatgaccggatgtacatgctgggcgggatgagcgacaccgccagcaaccgcatcacgtttgagcgcgacagccagtaccggatcacaggtgtcagtcacaccgacgggatccggcttaaactgacgtaccacgccagcggctacctgaaagccattcaccgcacggataacggcatacagacgctggcgacctacgaacaggatgcgcgggggcggctgacagaagcggatgcgcggctggactaccacctgttttatgagtacgacgctgcggaccggatcatccgctggtccgataacgaccagacgtggagccgtttcacctacgatgaacagggccggtgcgtgaatgtcaccggggcggagggctattacaacgccacgctggactatggtgacggctgcaccaccgtgacggacggcaagggcattcaccgttattactatgatcctgacggcaatattctgcgggaagcagcgccggacggcagcaccaccatgtatgaatgggatgaattccatcacctgctggcccgtcactcccctgccgggcgggtggagaaatttgaatacaacgccgcacacggtcagttaagccgttacacggcggcagacggcgcggagtggcagtaccgctatgatgagcgcggcctgctcagcaacatcaccgaccctgccgggcagacgtggacacagcagtgtgatgaacgcggcctgccggtaagtctggtgtcgccacagggcgaagagacccggctggcatacaccgctcaggggctgctgtcgggaatattccgccaggatgaacggcgtctgggcatagagtacgaccaccacaaccggccggaaacactcaccgacgtgatgggccgcgaacaccacaccgaatacagtggtcacgacctgccggtgaagatgcgcggccccggcggtcagtcagtgaggttgcagtggcagcagcaccataaactgagcggccttgagcgcactggcaccggcgcggaaggattccgctacgaccgtcacggcaacctgctggcgtacacggacggtaacggtgttgtctggacaatggagtacggcccgtttgatttgccggtggcgcgaacggacggtgaaggccaccgctggcagtaccgctacgataaagacacgctgcaactgacagaagtcatcaacccgcagggtgagtcatatctttatgttctggataactgcggccgggtgacggaagagcgtgactggggcggcgtggtctggcgttaccgttatgatggcgatggcctgtgtaccgccagggttaacggtctggaggaaaccatcctctacagccgggacgccgcaggccgcctggcagaagtcatcacgccggaaggcaaaacgcagtatgcgtatgacaaatccggcaggctgacgggtatcttcagcccggacggcacatcacagcgcaccggctatgacgaacgcgggcgggtgaatgtcaccactcagggccgacgggccattgaataccactaccccgatgaacacaccgtcatccgctgtatcctgccaccggaagatgaacgcgacagacaccccggtgaatccctgctgaaaaccacgtaccgctacaacgcagccggagaactggcagaggtcatcctgccggaggatgagacgctgacgttcagccgtgatgaggcaggacgtgaagtgctccggcacagtaaccggggttttgcctgtgagcagggctggaatgcagccggtcagcttaccagccagcgcgccggacttttcccggcggaagccacatggggcggactgctcccctcactggtgcgggagtaccgttacgacagcgcgggcaatgtgtcggctgtcaccagccgggaagattacggacgggaaactcgccgggagtaccggctggaccggaacggccaggtcacggcggtgacagcctcaggcaccgggctgggctatggcgaaggcgatgagtcctatggctatgacagctgcggctacctgaaggcgcagtctgcgggctggcaccggataagtgaagagactgaccagtatgccggaggccaccggctgaaacaggccggaaacacgcagtatgactatgacgccgcaggccggatggtcagccgcataaaacaccgtgacggctaccgcccggaaacagagcggttccggtgggacagccgtgaccagctgaccgggtattgcagcgcacagggtgaacagtgggaataccgccacgacgccagcggcagacggacggaaaaacgctgcgaccggaagaaaatccgcatcacgtacctgtgggacggcgacagtattgcggaaatccgggaataccgcgatgataaactgtacagcgtacggcacctggtgtttaacggctttgagctgataagccagcagtgcagccgggtacggcagccgcatccgtccgtggccccgcagggggtgacgcggacgaatcatgcggtgagcgacctgacgggccgtccgctgatgctctttaacagtgaaggtaaaaccgtctggcgaccggggcagaccagcctgtgggggctggcactcagcctgcccgcagacaccggctacccggacccgcgcggggaactggacgcggaagccgaccccggcctgctgtatgcaggacagtggcaggatgcggaatccgggctgtgctataaccggttccggtattacgagccggaaacagggatgtacctggtgagtgatccgctggggttgctggggggtgagcagacttaccggtatgtgccgaatccgtgtgggtatgttgatccgctgggattagcattttgccccagaatgcagaagacattgcaaaaattaactgacaaggctgttgctgatattatcgctaaccccagactcgctgaagatctgatgtcggcggggagctatgcacatttaaaaaatggaactaatttatatgcagccagttttggtaaggctgttgaacgtagggttgcacagttagttagtgacaattcccgattaagcaaacttgttgaacatactggtcaggccaagggggctaatggacagtttatatcgagccctgacttcaccactaaaggtaaaggcgtgttcgacgttacaacaaataaagcactccaagcgcatatagacagatatactaaagctggtgtgtatactccctataatgatattggttacttggtatatgatgtcgtatatggattatctttctaa

SEQ ID NO: 263404 - DNA, 462 bp, Klebsiella pneumoniae; identical to SEQ ID NO: 9580

SEQ ID NO: 263405 - DNA, 504 bp, Klebsiella pneumoniae
atgaccatccgctccaaaacgtacatgggcagcggatttaatgagctgaagtttgatgatgcgacagggagagaacaggtctacatccacgcgcagaagaacatggataccgaagtgctcaacgaccgtaccaccaccgtaaaacacgatcaccacgaaaccgtaaaaaatgaccagacggtcacgatccaggaaggtaaccgccttcttacggtggaaaaaggccacaagatcaccggagtactgaaagggtctttatctgaggatgtctttcaggacagaggcacgattgccggttcggtgcatgttgacgctgtaaacaatggtggcgaaggcgacggtatacaggcttatacggcgattaaggaaattttgctggccgtggaggaaagcaaaattgcgctgacgccggatggcattcagctacaggtcggggaatcgacggtaatcaggctgtcgaaggatggcatcaccatcgtgggcggttctgttttcatcaactga

SEQ ID NO: 263406 - DNA, 741 bp, Klebsiella pneumoniae
atgttagatcaagtatgccagcttgcacggaatgcaggcgatgccattatgcaggtctacgacgggacgaaaccgatggacgtcgtcagcaaagcggacaattctccggtaacggcagcggatattgccgcacacaccgttatcatggacggtttacgtacgctgacaccggatattccggtcctttctgaagaagatcctcccggttgggaagtccgtcagcactggcagcgttactggctggtagatccgctggatggtactaaagagtttattaaacgtaatggcgaatttaccgttaacattgcgctcatcgaccacggcaaaccgattttaggtgtggtgtatgcgccggtaatgaacgtaatgtacagcgcggcagaaggcaaagcgtggaaagaagagtgcggcgtgcgcaagcagattcaggtccgtgatgcgcgcccgccgctggtggttatcagccgttcccatgcagatgcggagctgaaagagtatctgcaacagcttggcgaacatcagaccacgtccatcggctcttcgctgaaattctgcctggtggcggaagggcaggcgcagctgtacccgcgcttcggaccaacgaatatttgggacaccgccgctggacatgctgtggccgcagctgccggagcgcacgttcacgactggcagggtaaaccgctggattacactccgcgcgagtcgttcctgaatccggcgttcagagtgtctatttactaa

SEQ ID NO: 263407 - DNA, 1944 bp, Klebsiella pneumoniae
atgattaagtttagcgcaacgctcctggccacgctgattgccgccagtgtgaatgcagcgacggtcgatctgcgtatcatggaaaccactgatctgcatagcaacatgatggatttcgattattacaaagacaccgccacggaaaaattcggactggtacgtaccgcaagcctgattaacgatgcccgcaatgaagtgaaaaacagcgtactggtcgataacggcgatttgattcaggggagtccgctggccgattacatgtcggcgaaaggtttaaaagcaggtgatattcacccggtctataaggcattaaatacgctggactataccgtcggcacgcttggcaaccacgagtttaactacggtctggattacctgaaaaatgcgctggcgggagcgaaattcccttatgtaaatgccaacgtcattgacgccagaaccaaacagccaatgtttacaccgtatttaattaaagacaccgaagtggtcgataaagacggaaaaaaacagacgctgaagattggctatattggcgtcgtgccgccgcaaatcatgggctgggataaagctaatttatccgggaaagtgacggtgaatgatattaccgaaaccgtgcgcaagtacgtgcctgaaatgcgcgagaaaggtgccgatgtcgttgtcgttctggcgcattctggtctgtctgccgatccgtataaagtgatggcagaaaactcagtttattacctcagtgaaattccgggcgttaacgccattatgtttggccatgctcacgccgttttcccaggtaaagattttgctgatatcgaaggggctgatatcgcgaaaggcacgctgaatggtgttccggcggtaatgccaggcatgtggggcgatcatcttggtgtggtcgacttacaacttagtaatgacagcggtaaatggcaggtgacgcaggcgaaagcggaagcacggccgatttacgacatcgcgaataaaaaatccctcgcggcggaagacagcaagctggtagaaacactcaaagccgatcacgatgccacacgccagttcgtcagcaagccaatcggtaaatccgccgacaatatgtatagctatctggcgctagtgcaagacgatccgaccgtgcaggtagtgaacaacgcgcaaaaagcgtatgtcgagcattacattcagggcgatccggatctggcaaaactgccggtgctttcagctgccgcaccgtttaaagttggtggtcgcaaaaatgacccggcaagctatgtggaggtggaaaaaggccagttgaccttccgtaatgccgccgatctttatctctaccccaatacgctgattgtggtgaaagccagcggtaaagaggtgaaagagtggctggagtgctccgccggacagtttaaccagattgatcctaacagcacgaaaccacagtcactcatcaactgggatggtttccgcacctataactttgatgttattgatggtgtgaattatcagattgatgttacccaacccgcccgttatgacggcgagtgccagatgattaatgccaatgcggaaaggattaagaacctgacctttaatggcaaaccgattgatccgaacgccatgttcctcgttgccaccaataactatcgcgcttacggcggcaaatttgccggtacgggcgacagccatatcgcttttgcttcaccggatgagaaccgctcggtgctggcagcgtggattgctgatgagtcgaaacgtgtggggaaaattcacccggcggcagataacaactggcgtttagcaccaatagctggcgataagaaactggatatccgtttcgaaacctctccatcagataaagccgcggcgtttattaaagagaaagggcaatatccgatgaataaagtcgcgaccgatgatatcgggtttgcgatttatcaggtggatttgagtaagtaa

SEQ ID NO: 263408 - DNA, 381 bp, Klebsiella pneumoniae
atgagtcaggttagcctgtcgcaacaactgaaagagggaaatctcttcgctgaacagtgtccgtcgcgcgaggttttgaaacacgtcaccagccgttggggggtgttgattctggtggcgctacgcgaaggtactcatcgctttagcgacctgcggcgcaaaatgggcggggtgagtgaaaagatgcttgcgcagtcgttacaggcgctagagcaggatggttttcttaaccgtatcgcgtatccggtggtgccgccgcatgtggaatatagcctcacgccgctgggcgagcaggtgagcgaaaaggttgctgcactggcggactggattgagttgaatttgcccgaggtgttggcggtgcgggatgaacgtgcggcgtaa

SEQ ID NO: 263409 - DNA, 861 bp, Klebsiella pneumoniae
atgatcgcaattactggtgccactggccaacttggtcactatgttattgaatccttgatgaaaacggttcctgccagccaaatagtggctatcgttcgtaatccggcaaaagcccagtcactgacagcacaaggcattaccgtgcgtcaggctgactacggcgatgaagccgcactgacatctgcacttcagggagtggaaaaactactgctgatctcttccagcgaagtgggtcaacgtgccccgcagcatcgtaatgttattaatgccgcaaaggcggctggtgtgaaatttatcgcttataccagtctgcttcacgcggataaatctccgctcggcctcgccgatgagcacattgagacggagaaaatgttggctgattctggcatcgtttacaccctgctgcgcaacggctggtacaccgaaaactacctcgccagcgccccggcagcactggaacacggcgtatttatcggtgcggcgggcgatggcaaaatcgcctcagcaacgcgggcagattatgcggcagctgcggcacgcgtgattagcgaagccggtcacgaaggcaaggtttacgaactggcgggcgatagtgcctggacgttgacacagttagcggcagagctgaccaaacagagcggaaaatccgttacctatcaaaatctgagcgaagccgatttcgccgcggcactgaaaagcgtcggactgcccgacggactggcggatatgctggcggattctgacgttggcgcatcgaaaggtggtctgtttgataacagcaaaacgcttagcaaattgattggccgcccaacgacaacgttagccgaaagcgtaagccatctttttaatgttaataactag

SEQ ID NO: 263410 - DNA, 966 bp, Klebsiella pneumoniae
atgattagcggcgtgctgtacgccctgttagcagggttgatgtgggggcttatttttgtcgggccgttgatcgtgccggaatacccggcgatgttgcagtctatggggcgttatctggcgttagggttaattgcgctgcccattgcctggctggggcgcgtgcgtctgcgtcagttggcgcgtcgcgactggcttaccgccttgatgctcactatgatgggcaacctcatttattacttctgccttgccagtgccattcaacgtactggcgcgcctgtttccacgatgattatcggcaccctgccggtggtcattcctgtctttgccaatctgctttatagccagcgcgacggcaaactcgcgtggggaaaactcgccccggcactgatttgtattggcatcggcctggcgagtgtgaatattgctgagttaaaccacggactccccgattttgactgggcacgttatacctctggcatcgtgctggcgttagtttccgtggtctgctgggcatggtatgccctgcgcaacgcccgctggctgcgggaaaatcccgacaaacatccgatgatgtgggcgacggcgcaggcgctggtcacgctgccggtttcgcttatcggctatctcgtcgcttgttactggctgaatacgcaaacgccggacttctccctaccttttggcccccgtccgcttgtatttgttagcctgatgattgcgatagctgtgctttgctcatgggtcggcgcactttgctggaacgtcgccagccagcgattaccaacggtgattctcgggccactgattgtcttcgaaacgctggcaggtttgctgtacacctttttgttacgccagcaaatgccgccactaatgacgctgagcggtatcgcgctgttagtggttggcgtggtcattgcggtcagagcaaaaccggaaaaacccttaattgaacctgtctctgaaagttga

SEQ ID NO: 263411 - DNA, 663 bp, Klebsiella pneumoniae
atggcttatcgcgaccaacctttaggtgaactggcgctctctattcctcgcgcttcggctctgtttcgtaaatatgatatggattactgctgcggcggtaagcaaacgctggcgcgtgcggcggcacgtaaagagctggatgttgaggtcattgaagctgagctggcaaagctcgctgaacaaccgattgagaaagactggcgtagcgccccgctggcagaaatcatcgaccatatcatcgtgcgctaccacgatcgtcaccgcgagcaactgccggagctgattctgcaagccagcaaagtcgaacgcgttcacgccgacaaaccgagcgtgccaaaagggctgacaaaatacctgactatgctgcatgaagagctttccagccacatgatgaaagaagagcaaattctcttcccgatgatcaaacaaggcatgggcagccaggcaatgggaccaatcagcgtgatggaaagcgagcacgatgaagcgggcgaactgctggaagtgattaaacacaccaccaataacgtcacaccgccgccagaagcctgcaccacctggaaagcgatgtataacggtattaatgaactgattgatgacctgatggatcacatcagtctggaaaacaatgtactgttcccacgcgccctggcgggtgagtga

SEQ ID NO: 263412 - DNA, 1413 bp, Klebsiella pneumoniae
atggtagatcaggtaaaagtcgttgccgatgatcaggctccggctgaacagtcgctacggcgcaatctcacaaaccgacatattcagcttattgccattggcggtgccattggtacggggttgtttatggggtccggcaaaacgattagccttgccgggccgtcgatcattttcgtttatatgatcattggttttatgctctttttcgtgatgcgggcaatgggggaattgctgctttcgaatctggaatacaaatcttttagtgacttcgcttccgatttactcgggccgtgggcaggatatttcaccggctggacctactggttctgctgggttgtaaccggtatggcagacgtggtggcgatcacggcttatgctcagttctggttccccgagctctccgactgggtcgcctcgctggcggtgatagtgctgctgctgacgctcaacctcgccaccgtgaaaatgttcggtgagatggagttctggtttgcgatgatcaaaatcgtcgccatcgtgtcgctgattgtcgtcggcctggtcatggtggcgatgcactttcagtcaccgaccggtgtggaagcgtcattcgcgcatttgtggaatgacggcggctggttcccgaaaggtttaagtggcttctttgccggattccagatagcggttttcgctttcgtggggattgagttggtaggtacaacagctgcggaaaccaaagatccagagaaatcactgccacgcgcgattaactccattccgatccgtatcattatgttctacgtcttcgcgctgattgtgattatgtccgtgacgccgtggagttcggtagtcccggagaaaagcccgttcgttgaactgttcgtgttggtaggtttgcctgcggctgccagcgtgatcaactttgtggtgctgacctctgcggcgtcttccgctaacagcggtgtcttctctaccagccgtatgctgtttggtctggcgcaggaaggtgtggcaccgaaagcgttcgctaaactctctaagcgcgcagtacccgcgaaagggctgaccttctcttgtatctgtctgctcggcggcgtggtgatgttgtatgtgaatcccagcgtgattggcgcgttcacgatgattacaaccgtttccgcgattctgtttatgttcgtctggacgattatcctttgctcgtacctggtgtatcgcaaacagcgtccgcacctgcatgagaaatcaatctacaagatgccgctcggcaagctgatgtgctgggtatgtatggcattctttgtgttcgtggtcgtgctgctgacactggaagatgatacccgccaggcgctgctggttaccccgctgtggtttatcgctctggggctgggctggttgtttattggtaagaagcgggctgctgaactgcggaaataa

SEQ ID NO: 263413 - DNA, 621 bp, Klebsiella pneumoniae
atgaccaccccaacttttgacaccatcgaagcgcaagcaagctacggcattggtttgcaggtagggcaacaactgagtgaatctggcctggaagggctgctgccagaagcactggttgcaggcattgctgatgcgctggaaggcaaacatccggctgttccggttgatgtggtgcaccgcgcgctgcgtgaaatccacgaacgcgccgatgccgttcgtcgtcagcgtttccaggcgatggctgctgaaggtgtgaaatacctggaagaaaacgccaaaaaagaaggtgtaaatagcaccgaatctggcctgcaattccgcgtgatcaaccagggcgaaggcgcaattccggcacgtaccgaccgcgttcgtgttcattacaccggaaaactgatcgacggcaccgtgtttgacagctccgttgctcgcggcgagccagctgaattcccggttaacggtgtgatccctggctggattgaagcactgactctgatgccggtaggttctaaatgggaactgactatcccgcaggaactggcatatggcgagcgtggcgcaggcgcgtccatcccaccgttcagcaccctggtgtttgaagtcgaactgctggaaatcctctaa

SEQ ID NO: 263414 - DNA, 639 bp, Klebsiella pneumoniae
atgcccgggcgctttgaactaaaaccaaccctggagaaagtctggcacgcgccagacaattttcgcttcatggacccgctgccgccgatgcatcgtcgggggatcattattgccgccattgtattggtggtcggatttctgcttccatctgatgatacgcccaacgcgctggtggtgacgcgtgaagcgcagttagatattcagtcgcaatcacaaccaccgacagaagaacagctgcgggcgcagctagttacgccacaaaatgatcctgatcaggtggccccggtcgctccagaaccaatacaggaaggccagccagaagagcagccgcaaaccacccaaacgcaaccattccagccagatagcggaattgataatcaatggcgctcttaccgtgtcgaacccggtaaaacgatggcgcagctgttccgcgaccacggactgcccgctaccgatgtctatgcaatggcgcaggttgaaggcgcgggtaagccgctgagtaatttgcaaaacgggcagatggtgaaaatccgccagaacgccagcggcgtggtgacgggcttaaccattgatacggggaataatcaacaggtcttgtttacccgccagccggatggcagttttattcgtgcgcggtag

SEQ ID NO: 263415 - DNA, 768 bp, Klebsiella pneumoniae
gtgacatattcgattggcattgattccggctcaaccgccaccaaagggatcttactggctgacggcgtgattacgcgccgtttcctcgttccaacaccctttcgcccggcaacagcaattactgaagcctgggaaactctgcgcgaagggttagagacaacgccgtttctgacgctcaccggctacggacggcaactggtggattttgccgataaacaagtgacggaaatctcctgtcacgggctgggcgcacggtttcttgagccagcaacgcgcgcggtaatcgacatcggtggtcaggacagcaaagtgattcagcttgatgatgacggtaacctgtgcgatttcctgatgaatgacaaatgcgcggcgggcaccgggcgtttcctggaggtgatctcgcgcacgcttggcaccagcgtcgagcaactcgacagcattaccgaaaatgtcataccgcacgccatcacgagtatgtgcacagtgtttgctgaatcagaagtgatcagcctgcgctctgcgggcgtagcgccagaagcgattctcgccggagtgattaacgcgatggcgcggcggagcgccaatttcattgctcgtctctcctgtgaagcgccgattctgtttactggtggcgttagccactgtcaaaggtttacccacatgctggaaagccatctgggaatgccggtacaaactcaccctgatgcgcaattcgctggtgcaattggcgcggcggtgatcggtcagcggcagagaaaacgcgcatga

SEQ ID NO: 263416 - DNA, 258 bp, Klebsiella pneumoniae; identical to SEQ ID NO: 2020

SEQ ID NO: 263417 - DNA, 972 bp, Klebsiella pneumoniae
atggtggctggcgctgcattgcacattacgggatttctccgcgttaaggattcattaagatcgctacgtatacttctcgatatcttattgatttgccttaaagggattaccgtgacaaaaagtatttcgttaagtaaacgcatcttcgttattgtgattctttttgtcattgtggcagtgtgtactttcttcgtgcaatcttgcgcccgtaaaagcaatcatgcagcatcatttcagaattaccacgccaccattgacggcaaagaaattgcaggcataacgaataatatctcttcgctgacctggtcggcacaaagcaatactctttttagcactatcaacaaacctgccgccattgttgaaatgaccaccaatggtgatttgatccgcacaattcctctggattttgttaaggatctcgagacgatcgaatacattggcgataatcagtttgtcattagcgatgagcgcgattacgccatttatgtgatttcactgaccccaaactcggaagtaaaaatcctcaaaaaaataaaaatcccgctgcaggaatccccaaccaattgcggttttgaaggattggcctattctcgccaggatcacactttctggttttttaaagagaaaaacccgattgaggtctacaaagttaacgggctattaagtagcaatgaattgcacatcagcaaagacaaggcactacaacggcaatttactttagatgatgtgtccggcgcagaatttaaccaacaaaaaaatacgcttctggtgctgtctcatgaatctcgcgcactccaggaagtaacgctggttggcgaggttatcggtgaaatgtcactaaccaaaggcagtcgaggtttgtcgcataacatcaaacaggccgaaggggttgcgatggatgcctctggtaatatttatatcgttagcgaaccaaatcgtttttatcgctttacccctcaatcatcgcattaa

SEQ ID NO: 263418 - DNA, 1179 bp, Klebsiella pneumoniae
atgccttcgccctcgcatcccgtagaacgcttttctttcagcaccgcgcttttcgggatgctggttctgaccttaggtatgggtttaggccgcttcctttatacacctatgttgcccgtcatgatggcggaaggatcgttctcatttagccagctctcgtggattgccagcggcaactatgcggggtatctggctggcagtctgctattttcttttggcgcatttcaccagccatcgcgcctgcgcccatttctgttggcttctgccctggcgagcgggttgttgatcctcgcaatggcatggttgccgccatttattctggtgttattgattcgcgtcctggcgggtgtcgccagcgccggaatgctgatttttggttcgacgctgattatgcagcacacgcgccatccttttgtgctggcagctttgttttctggcgttggcattggcatcgcactgggcaatgaatatgttctggcaggcctgcattttgacctctcctcgcaaacgttatggcaaggcgccggggcgctttctggcatgatgctgattgcacttacgcttttaatgccctcgaaaaaacacgccatcacaccaatgccattggcaaaaacggagcaacagataatgagctggtggttactggctattctgtacggcctggcgggatttggttatatcatcgtcgcgacttacctgccgctcatggcgaaagatgcaggctcaccattgttaaccgcccatctctggacgttagtcggcttatcaattgtgcctggttgctttggctggctatgggcagcaaaacgttggggggctttgccctgcctgacggcgaatttgctggtgcaggctatctgtgtgctgcttactctcgccagcgactcgcctctcttgcttatcatcagcagtcttggttttggcggtacctttatgggcacgacatctctggtgatgactatcgcccgccaactgagcgtaccgggaaatctcaatcttttaggctttgtgacgctcatttacggcattgggcaaattcttggcccggcgctgaccagtatgcttggcaatggaacatcggcgcttgcctgcgccactctctgcggcgcggcggcgttgtttattgctgcgcttatcagcactgcgcaattatttaagctgcaagtggtcacttcatga

SEQ ID NO: 263419 - DNA, 555 bp, Klebsiella pneumoniae
atggcaaaatacaacgacaaagagctggcagagacgagcaagtttttaagttttgtcctccgacataaaccagaggcgattggtatcgtgctggaccgtgaaggatgggcggatatcgataagctcatactctgtgcccaaaaagcgggcaagcggttaacccgcgcattactggatatcgttgtcgctaccagcgataaaaagcgctttagttattccagtgatggtacgtgtattcgcgccgttcaggggcattcgacttcgcaggtcgccattggcttcatcgaaaaaacaccgccacaatttctctaccatggtacggcaagccgttttcttgacgagataaaaaaacaagggctgattgcaggggagcgccattacgtgcatctctctgctgatgaagcaacggcacgcaaagtgggagcaagacacggatcgccagttattttaaccgtcaaagcacaggaaatggcgaaacgaggcatccctttttggcaagcggaaaacggggtctggctgacatcaacggttgcggttgagtttcttgagtggtaa

SEQ ID NO: 263420 - DNA, 684 bp, Klebsiella pneumoniae
atgacacaacaaggggatgctgtagctggggagctggcgacagaaaaagtgggtgttaaagggtatctggccttttttctcacgattatctttttttccggagttttttccgggacagacagttggtggcgcgtttttgacttttccgttctgaacggatcgtttgggcaactgcctggtgcgaatggcgctaccacctcgtttcgcggcgcaggtggcacaggagctaaagatggctttctcttcgcactggaactggctccgtcagtgattctctctctgggaattatctcgattaccgatggtcttggcggattgcgcgccgcgcagcagttaatgacgcccgtgctaaaaccgttgttgggcattccaggcatctgttcactggcgctgattgctaacctgcaaaacaccgatgccgccgcaggtatgaccaaagaactggcgcaggaaggggaaattaccgaacgtgataaagtgatattcgccgcctatcaaaccagcggtagcgccatcatcaccaactacttctcttccggcgtcgcggtgtttgcctttctgggcacgtccgtaatcgtacctttagccgtcatcctggtgtttaaatttgtcggagccaacattttgcgcgtctggcttaacttcgaagaacgtcgcaacccaacgcaaggagcacaagcatga

SEQ ID NO: 263421 - DNA, 462 bp, Klebsiella pneumoniae
atgacaactcaggtccgcaaaaacgtcatggatatgtttattgatggcgcgcgccgtggctttactatcgctaccaccaacctgctgccaaacgtggtgatggcctttgtcatcatccaggcgctgaaaattactggcctgctcgactgggtgggacatatctgtgaacccgtaatggcgctgtggggattgcccggtgaagcggcaaccgtccttttagccgcattgatgagcatgggcggcgcagtcggtgttgccgccagtctggcaaccgctggcgcattaaccggccacgatgtcaccgttttactgcccgcgatgtatttaatgggcaacccggtgcaaaatgtcggtcgctgcctgggaacagccgaagtgaatgccaaatattacccgcatatcattacggtctgcgtgattaacgcattgctgtcgatctgggttatgcagcttattgtttaa

SEQ ID NO: 263422 - DNA, 1173 bp, Klebsiella pneumoniae
atgattgattattccgcagccggttttaccctgctgcagggagcgcatttgtatgcgccggaagatcggggaatttgcgatgtcctcatcgctaacggcaaaattattgccgttgccagcaacatcccttctgacattgtaccggactgcacggttgtcgatctcagcgggcagatcctctgcccaggttttattgatcaacacgtccatttgattggtggtggcggcgaagcaggtcccacgacacgcacgccagaagtggcgttaagtcgtctgacggaagcgggcgtcacgtcagtggttggtctgctgggtaccgactctatctctcgccacccggaatccctgctcgccaagacccgtgcgctcaatgaagaaggcatcagcgcctggatgctgaccggcgcttatcatgtcccttcccgcactattacgggttccgtggaaaaagacgtggcgattatcgatcgcgtgattggtgtgaaatgcgccatctctgatcaccgttctgccgcaccggacgtttatcacctagctaatatggcggcggaatcccgcgttggcggtttgctcggcggtaaacctggcgtcaccgtgttccacatgggtgacagcaaaaaggcgttacagcctgtctatgacctgctggaaaactgcgatgtgccgatcagcaagctgctgccgacccacgttaaccgcaacgttccgttgtttgagcaggcgctggagttcgcgcgcaaaggcggcaccatcgacatcaccagcagcattgacgaaccggtcgcccctgccgaaggtattgcccgcgccgttcaggcgggtataccgctggcacgcgtcactctcagctccgacggcaacggtagccagccgttcttcgatgacgaaggaaatttaacccatatcggtgttgcaggttttgaaacattgctggaaaccgtgcaggtgctggtcaaagactatgatttcagtatcagcgatgccctgcgcccgctcaccagtagcgtagccggtttccttaacctgaccgggaaaggcgaaattctgccaggcaatgacgcagacttagtggtcatgacgcctgaattgcgcattgagcaggtatacgctcgcggcaaactgatggtcaaagacggcaaagcctgcgtgaaaggaacgtttgaaacggcataa

SEQ ID NO: 263423 - DNA, 912 bp, Klebsiella pneumoniae
atggatgactgtggtgcggttttgcataacattgaaaccaaatggctttatgattttctgaccctggaaaaatgtcgcaatttttcccaggcggcagtcagtcgcaacgtctcgcaaccagcattcagccgccgcatccgtgcgctggaacaggcgattggtgttgaattgtttaaccgccaggtaacgccgctgcaactctcagaacaagggaaaatcttccattcgcagatccgccatctgttgcaacagttagagagcaatctggcagagctgcgtggcggcagcgattacgcgcaacgtaaaatcaagatagccgctgcacactctctttccctcggtctgttaccgtccattatcagccagatgccgccgctctttacctgggcaattgaagccattgatgtcgatgaagcggtcgataaactgcgcgaagggcaaagtgactgtattttttcctttcacgacgaagatttgctggaagcgccgtttgaccacatccgcttatttgaatctcaattgttccccgtctgcgccagtgacgaacacggagaagcactttttaacctcgctcagccacactttccgttactgaattacagccgcaactcctacatggggcgattgattaatcgcactctgacgcgccacagtgagttgagtttcagcaccttttttgtctcttcgatgagcgagcttttaaagcaggttgccctcgacggatgtggaattgcctggttgccggagtatgccatccaacaagaaattcgcagcgggcagctcgttgtactgaatcgggacgaactggtgatcccgattcaggcctatgcataccggatgaatacccgcatgaatccagttgccgaacgcttctggcgtgaactgcgcgagctggagattgaacctggctga

SEQ ID NO: 263424 - DNA, 342 bp, Klebsiella pneumoniae
atgattgaggttcctgccgcagtcatgattgcagaaaaattagccagtgaagtcgatttcttttccatcggcaccaacgatctgacgcaatatattatggcggcagacagaggaaatagcaccgtcgcgaaactggtcgattattgtaatgacgcggtgattaacgctattgctatggtgtgtcaggccggacgtaataatgaaattccggtcagtatgtgcggcgaaatggctggagatatccagcaaacagcacgactgctcaccatggggattgataagctcagtgccagtccatcccggcttccggccttgaaagcagcaatcagaacctcccactaa

SEQ ID NO: 263425 - DNA, 384 bp, Klebsiella pneumoniae
atgatgcgccaatcagttcagacggtattacctgaaagtacaggaaacaatacgttatcgctgcgtgattccgtatgccgggatctctttcaactttttagttctccccattcaccgctaccaatattacttgtttcaggcatgcctgagtggcaagggcataatcagagcgacaagcttctccagagttggtattgccgccagttacgttccgcgcttttatttcatgagccacgtattgcggcattgcaggtcaatctgaaagaagcctattgctacgagttggccattagtctggagatgatgctgtaccacgatgatgagccgctaacgtttgacctggtctggcagaagggcagctggcatcgcacgatgccgcagtaa

SEQ ID NO: 263426 - DNA, 402 bp, Klebsiella pneumoniae
atggcgaaagaatttggtcgcccgcagcgcgtagcgcaggaaatgcaaaaagagatcgctctcatcctgcagcgtgaaattaaagatcctcgtctgggcatgatgaccaccgtttccggtgtcgaaatgtctcgcgacctggcgtatgccaaagtatatgtaacgttcctcaacgacaaagatgaagacgcggttaaagcgggcatcaaagcgttgcaggaagcttctggtttcatccgcagcctgctggggaaagcgatgcgcctgcgtatcgtgccggaactgaccttcttctacgacaactcgctggttgaagggatgcgtatgtcaaacctggtgaccagcgtggtcaaacatgacgaagaacgtcgtgttaacccggacgacagcaaggaggactaa

SEQ ID NO: 263427 - DNA, 2673 bp, Klebsiella pneumoniae
atgacagatgtaacgattaaaacgctggccgcagagcgacagacctccgtggaacgcctggtacagcaatttgctgatgcaggtatccggaagtctgctgacgactctgtgtccgcacaagagaaacagactttgattgaccacctgaatcagaaaaattcaggcccggacaaattgacgctgcaacgtaaaacacgcagcacccttaacattcctggtaccggtggaaaaagcaaatcggtacaaatcgaagtccgcaagaaacgcacctttgtgaaacgcgatccgcaagaggctgaacgccttgctgcggaagagcaagcgcagcgtgaagcggaagagcaagcccgtcgtgaggcagaagaatcggctaaacgcgaggcgcaacaaaaagctgaacgtgaggccgcagaacaagctaagcgtgaagctgctgaacaagcgaaacgtgaagctgcggaaaaagacaaagtgagtaatcaacaagacgatatgactaaaaacgcccaggctgaaaaagcccgccgtgagcaggaagctgcagagctcaagcgtaaagccgaagaagaagcgcgtcgtaaactcgaagaagaagcacgtcgcgttgctgaagaagcacgtcgtatggcggaagaaaacaaatggactgataacgcggaaccgactgaagattccagcgattatcacgtcactacttctcaacatgctcgccaggcagaagacgaaagcgatcgtgaagtcgaaggcggccgtggccgtggtcgtaacgcgaaagctgcgcgtccgaagaaaggcaacaaacacgctgaatcaaaagctgatcgtgaagaagcacgcgcagcagtacgtggcggtaagggcggaaaacgtaaaggttcttcgctgcagcaaggcttccagaagcctgctcaggccgttaaccgtgacgttgtgatcggcgaaaccatcaccgttggcgaactggcgaacaagatggcggttaaaggctctcaggtcatcaaagcgatgatgaagctgggcgcaatggcgaccatcaaccaggtcatcgaccaggaaaccgcacagctggttgccgaagagatgggccacaaagttatcctgcgtcgtgaaaacgagctggaagaagcggtaatgagcgaccgtgacacgggtgcagcggctgaaccgcgcgcgccggttgtgaccatcatgggtcacgttgaccacggtaaaacctctctgctggactacattcgttcaacgaaagtggcctctggcgaagcgggcggcattacccagcacattggtgcataccacgttgaaactgaaaacggcatgatcaccttcctggacaccccggggcacgccgcgtttacttcaatgcgtgctcgtggtgcgcaggcaacggacatcgtagtcctggttgttgctgccgacgacggcgtaatgccgcagaccatcgaagcaatccagcacgcgaaagcggcgcaggttccggtggtcgttgcagtgaacaagatcgataaaccagaagccgatccggatcgcgttaagaacgaactctcccagtacggcatcctgccggaagagtggggcggtgaaagccagttcgtacatgtgtctgcgaaagcgggtactggtatcgatgagctgctggacgctatcctgctgcaggcggaagttctggaactgaaagcggtacgtaaaggcatggcgagcggtgcggttatcgaatccttcctcgataaaggtcgtggtccggttgctaccgttctggtacgtgaaggtactctgcacaagggcgatatcgttctgtgtggcttcgaatacggtcgtgttcgtgcgatgcgtaacgaactgggtcaggaagtgctggaagcgggtccgtccattccggtggaaatcctcggcctgtccggcgttccggctgcgggtgatgaagttaccgttgtacgtgacgagaagaaagcgcgtgaagttgcactctatcgtcagggtaaattccgcgaagttaaactggcgcgtcagcagaaatctaaactcgagaacatgttcgccaacatgaccgaaggcgaagttcacgaagtgaatatcgtcctgaaggcagacgtacagggttctgtggaagctatctccgactccttgctgaaactgtctactgacgaagttaaagtgaagatcatcggttctggcgtaggtggtatcaccgaaaccgacgctaccctggctgcggcgtccaacgccatcctggttggcttcaacgtacgtgctgatgcctctgcacgtaaagtaattgaagcggaaagcctggatctgcgttactactccgtcatctataacctgatcgacgaagtgaaagcggcaatgagcggtatgctgtctccggaactgaaacaacagattatcggtctggcggaagttcgtgacgtgttcaaatcaccgaaatttggtgccatcgcaggctgtatggttaccgaaggtgtggttaaacgtcacaacccgatccgcgttctgcgcgacaacgtggttatctacgaaggcgagctggagtccctgcgccgcttcaaagatgacgttaacgaagtccgtaacggtatggaatgtggtatcggcgttaagaactacaacgatgtccgcactggcgatgtgatcgaagtattcgagatcatcgaaatccaacgtaccatcgcttaa

SEQ ID NO: 263428 - DNA, 1488 bp, Klebsiella pneumoniae
atgaacaaagaaattttggctgtagttgaagccgtatccaatgaaaaggcgctacctcgcgagaagattttcgaagcattggaaagcgcgctggcgacagcaacaaagaaaaaatatgaacaagaaatcgacgttcgcgtacagatcgatcgcaaaagcggtgattttgacaccttccgtcgctggttagttgttgatgaagtcacccagccgaccaaggaaatcacccttgaagccgcacgttatgaagatgaaagcctgaacctgggcgattacgttgaagatcagattgagtctgttacctttgaccgtatcaccacccagacggcaaaacaggttatcgtgcagaaagtgcgtgaagccgaacgtgcgatggtggttgatcagttccgtgaacacgaaggtgaaatcatcaccggcgtggtgaaaaaagtaaaccgcgacaacatctctctggatctgggcaacaacgctgaagccgtgatcctgcgcgaagatatgctgccgcgtgaaaacttccgtcctggcgaccgcgttcgtggcgtgctctattccgttcgcccggaagcgcgtggcgcgcaactgttcgtcacccgttccaagccggaaatgctgatcgaactgttccgcattgaagtgccggaaatcggcgaagaagtgattgaaattaaagcagcggctcgcgatccgggttctcgtgcgaaaatcgcggtgaaaaccaacgataaacgtatcgatccggtaggtgcttgcgtaggtatgcgtggcgcgcgtgttcaggcggtttctactgaactgggcggcgagcgtatcgatatcgtcctgtgggatgataacccggcgcagttcgtgattaacgcaatggcaccggcagacgttgcttctatcgtggtggatgaagataaacacaccatggatatcgccgttgaagccggtaacctggcgcaggcgattggccgtaatggtcagaacgtgcgtctggcttcgcagctgagcggttgggaactcaacgtgatgaccgttgacgacctgcaggctaagcatcaggcggaagcgcacgcagcgatcgacactttcaccaaatatctcgacatcgacgaagacttcgcgactgttctggtagaagaaggcttctcgacgctggaagaactggcctatgtgccgatgaaagagctgttggaaatcgaaggccttgatgagccgaccgttgaagcactgcgcgagcgtgctaaaaatgcactggccaccattgcacaggcccaggaagaaagcctcggtgataacaaaccggctgacgatctgctgaaccttgaagggatagatcgtgatttggcattcaaactggccgcccgtggcgtttgtacgctggaagatctcgccgaacagggcattgatgatctggctgatatcgaagggttgaccgacgaaaaagccggagcactgattatggctgcccgtaatatttgctggttcggtgacgaagcgtaa

SEQ ID NO: 263429 - DNA, 423 bp, Klebsiella pneumoniae
atgattactgcgccagttgaggccctgggttttgaactggttggcatcgaatttattcgcggtcgcacatccacactgcgcatctatattgatagtgaagatggcatcaatgttgatgattgtgctgatgtgagccaccaggtaagtgctgtgctggatgttgaagatcccatcaccgttgcttataacctggaagtctcctcaccgggtctcgatcgcccactgttcacggctgaacactacgcccgtttcgtcggagaagaggtgactctggttctccgcatggcggtacaaaaccgtcgtaaatggcagggcgttatcaaagcggtagacggtgaaatgatcacagttaccgtcgaaggtaaagatgaagtgttcgcgctgagtaatatccagaaggcgaacctggttccccacttttaa

SEQ ID NO: 263430 - DNA, 165 bp, Klebsiella pneumoniae
atgtctctttgtttcagtgctatcccccttttaaagggcagatttcagtcgccaatacaacacatttttaaatacactttaacctggttcattattacacatctaaaacatcacaaaaatatcacttcacacactatcggtgaacatcataactttttaaaatga

SEQ ID NO: 263431 - DNA, 1002 bp, Klebsiella pneumoniae
atgagtagttggcttgcgatgctgcaagatgccgcagagatgtttgtgtttctcgccgtcgagctttctttgctgtttatagtgattagtgccggtgtcagcctgataagacaaaaggtgccagaccataaaatccagcagatgatgggggcaagaaaagggaaaggctatctcctggctgctctgttgggagccgttaccccgttctgtagttgctcgacaatccccatgttacgtggattgttatcagcgaaagccgggtttggtccgactctcacttttttatttgtttccccattacttaatcccattatcgtcgggttaatgtgggtgacctttggctggaaagttaccttgttgtacgcgattatcgccgccggcgtctccgtacttgccagtattatcctggattccctgggatttgaacgtcatatcattgccagtaaaagctcatcagcaaattgttgtgctccagccaaaacttcgccggggacgacatatacgccaataaaagtgagttgctgtagtccagcggctaaagccattgagaaacctgtagtaaactgttgcagtaccaaagctgtggtaagtattaatcccataaaactagccaccaaagatgcgttgcaacagtttaaagatgtactgccatatcttttgttaggggtattaataggctcttttatttatggctttattccctcagagtggattgccgctcatgcaggggcagataatcccttcgccatcccattgagcgccgttgtcggaattccgctgtatatccgggcagaggcggttatccctctggcatctgttctgatgacaaaaggaatggggctgggagcattaatggcattaatcatcggcagtgccggagcaagcctgacggaagtgatattacttaaatcaatgttcagaatgccgatgatagctgcattcctgacggttatcttaggtatggctatcttgatgggctatttgactcaaatgctattttaa

SEQ ID NO: 263432 - DNA, 297 bp, Klebsiella pneumoniae
atgcagttggaagaagttgctaaagcgctgaaagagctaggtcacccgacccgtttgttcatattcaaacacctggtcaaagcgggggaacaaggtttgccggtcggtgagttgcaaaagcagcttgggatccccggctccacactcagtcaccatatttcagcactggtatcggtagggctggtcaaacaaaaccgtgagagtcgaacgctgatgtgtgtttcgcaatacgcaatgctggaagcgataattgaattcttacgtgaggagtgctgcgtaaatagcaaaattgcctga

SEQ ID NO: 263433 - DNA, 354 bp, Klebsiella pneumoniae
atgtcatttctgttacccatccaactgttcaaaattcttgctgatgaaacccgtctgggcatcgttttactgctcagcgagctgggagaattatgcgtctgcgatctctgtactgccctcgatcagtcgcagcccaagatatcccgccacctggcattgctgcgtgaaagtgggctattgctggatcgcaagcagggtaagtgggttcattaccgcttatcaccgcatattccatcatgggccgcgaaaattattgatgaggcctggcgatgtgaacaggaaaaggttcaggcgattgtccgcaacctggctcgacaaaattgttccgaagacagtaagaacatttgtagttaa

SEQ ID NO: 263434 - DNA, 174 bp, Klebsiella pneumoniae
atgcatccgcttactcatccactgcctgtcacggcgcatgccccattgttagatgtgggcattctcactccgaccagagcatcagttaacggcaccacccgtacttctgaccaggactttgaaagcgtttatgcgcattaccagagtgaaaatgcctcagaactaactggataa

SEQ ID NO: 263435 - DNA, 1353 bp, Klebsiella pneumoniae
atgactaaacactatgattacatcgccatcggcggcggcagcggcggtatcgcctccatcaaccgcgcggctatgtacggccagaaatgcgcgctgattgaagccaaagagctgggcggcacctgcgtgaacgtcggctgcgtaccgaagaaagtgatgtggcacgcggcgcaaatccgtgaagcgatccacatgtacggtccggattatggtttcgataccactataaataaattcaactgggaaacgttgatcgccagccgtaccgcctatatcgaccgtattcatacttcctatgaaaacgtgctcggtaaaaataacgttgatgtaatcaaaggctttgcccgcttcgttgatgccaaaacgctggaggtaaacggcgaaaccatcacggccgatcatattctgatcgccaccggcggtcgtccgagccacccggatattccgggcgtggaatacggtattgattctgatggcttcttcgcccttcctgctttgccagagcgcgtggcggttgttggcgcgggttacatcgccgttgagctggcgggcgtgattaacggcctcggcgcgaaaacgcatctgtttgtgcgtaaacatgcgccgctgcgcagcttcgacccgatgatctctgaaacgctggtcgaagtgatgaacgccgaaggcccgcagctgcacaccaacgccatcccgaaagcggtggtgaaaaatgccgacggcagcctgacgctggagctggaagatggtcgcagtgaaacggtagattgcctgatttgggcgattggtcgcgagcctgccaatgacaacatcaacctggaagccgctggcgttaaaactaacgaaaaaggctatatcgtcgtcgataaatatcaaaataccaacgttgaaggtatttacgctgtgggcgataacacgggggcagtggaactgacaccggtggcagttgcagcgggtcgccgtctctctgaacgcctgtttaataacaagcctgatgagcatctggattacagcaacattccgaccgtggtcttcagccatccgccgattggtactgttggtttaacggaaccgcaggcgcgcgagcagtacggcgacgatcaggtgaaagtgtataaatcctctttcaccgcgatgtataccgccgtcaccactcaccgccagccgtgccgcatgaaactggtatgcgttggaccggaagagaagattgtcggaattcacggcattggttttggtatggatgaaatgttgcagggcttcgcggtggcgctgaagatgggggcgaccaaaaaagacttcgacaataccgtcgccattcacccgacggcggcagaagagttcgtgaccatgcgttaa

SEQ ID NO: 263436 - DNA, 522 bp, Klebsiella pneumoniae
gtgacgcagcgcgaggatctcttccatcaccttgctgttgtcccacttaccggcgttcggaccttgatcggaggcgcgggtgctgtaagcgcgatacatctcttcgcgcagagcctggttgtcgcagtaggtcattaccggcaggtagcttgggatatccagcgtcagcaggtagccttcaagttctttcgcttcagcctgggcttttgccgcagccagcgcgctttctggcatccccgccagctccgcttcgtcggtaacgagtttggtccagcccattgtcgcatcgaggacgttgttgctgtactggttgcccagctcggaaagacgagtggcaatctcaccataacgctgctgtttctctttcggcagaccgatgccagagagttcaaagtcgcgcagtgcgttatcaaccgctttcttctgcgccgtgttcagcgtggcgtaatgatcgccatcgcgcaggtcgcgatatgctttatacagcccttcatgttgtcctacccaggtgctgtattctga

SEQ ID NO: 263437 - DNA, 540 bp, Klebsiella pneumoniae
atggtgcaggccgtgaccgaactcgtggaacagggtgatcacttcgtcatgggtaaacagcgccggtttaccatttaccgggcggttgaagttacaggtcagatacgcgaccggtttttgcagcgaaccgtcggctttacgcatctggcctacacagtcatccatccacgccccgccgcgcttgttttcacgggcatacaggtcgaggtagaagctgccgcgcagttcgttgttctcgtcatacagttcgaagaaacgtacatccggatgccagacatcaacatctttacgctctttagcggtgatgccgtaaatacgtttcaccacttcaaacaagccgttaaccgctttgttttccgggaagtacggacgcagctgttcgtcactgatgctgtagaggtgctgtttttgtttttcgctgtagtacgcgatatcccacggctgcaactcatccacgccaaattcggctttagcgaaggcacgcagttgcgccagctctttttcgccttgtggacgcgcgcgttttgccagatcggttaa

SEQ ID NO: 263438 - DNA, 1518 bp, Klebsiella pneumoniae
atggttcagcgattgctgttcttcgttctgaccatcttggttgttaaacgtatatcatcccttccgcttcgcctgcttgttgccgcaccatttgtgttactgacagcggcagacatgagtattagcctctattcatggtgtacctttggtacaactttcaatgatggatttgcgattagtgtgctgcagagtgatccggatgaagttgtcaaaatgctggggatgtatatcccttatctatgtgcttttgcctttttatcccttctttttttggcagtaataataaaatatgatgtttccttgccgacgaaaaaagtgacaggaatattattgctgattgtcatttcgggcagtttattttccgcttgtcaatttgcttataaagatgcaaaaaataaaaaagcgttcagtccatatatactagcgtcgcgatttgctacctatacgccgtttttcaatctcaattattttgctttagcagcgaaagagcatcaaagattactctcaattgcaaacacggtgccatattttcaattatcagtcagggatacaggtattgatacctacgtgttgattgtgggggagtctgtacgtgtcgacaatatgtctttgtatggatacacacgctctacgacaccgcaagtcgaagcacaaagaaaacagatcaaactgtttaatcaagcaataagcggtgcaccttacactgcgctgtcggttcccctttctttaactgctgattctgttttgagtcatgacattcataattacccggacaacattattaatatggctaatcaagcaggatttcagactttctggctaagctcgcaatccgcttttcggcagaatggtacagcagttaccagtatcgccatgcgcgccatggaaacagtctatgtcagaggatttgatgaattgttgttgccgcatttatcgcaagcgttacagcaaaagacgcagcaaaagaaactgattgttcttcatttaaatggaagccatgaaccggcttgtagcgcctatccgcaatccagcgccgtgtttcaaccgcaggacgatcaggatgcctgctatgacaactccattcattacacagatagtttgctaggtcagatttttgaattattaaaagatcgccgcgcctcggtcatgtattttgccgaccacggcctggaacgcgaccctacgaagaagaacgtctattttcatggaggcagggaggccagccagcaggcatatcatgtcccgatgtttatctggtatagccccgttcttggggatggcgttgatcgtacaacggaaaacgatatcttttccactgcgtacaataattaccttattaatgcgtggatgggggtaacaaagccggaacagccgaaaacgctggaggaagtgattgcacactataaaggagactcacgggttgtggatgcaaaccatgatgttttcgattatgtgatgctcagaaaggagtttacagaggataagcaaggtaaccccacccctgaagggcagggttga

SEQ ID NO: 263439 - DNA, 435 bp, Klebsiella pneumoniae
atgcatatgcagggaaatccaaagaccatgcaggaagccccgaagtatgacgatgtctttgcggaagtgaatcgctattttattgagcaaatagcacgttgcgagcaggcgggtatcgcaaaagagaaattgttgctcgaccccggattcggtttcggtaaaaatctctcccataactattcattactggcgcgcctggctgaatttcaccatttcaacctgccgctgttggtgggtatgtcacgaaaatcgatgattgggcagctgctgaaggtggggccgtccgagcgtctgagcggtagtctggcttgtgcggtcattgccgctatgcaaggcgcgcatatcattcgtgttcatgacgtcaaagaaaccgtagaagcgatgcgggtggtggaagccactctgtctgcaaaggaaaacaaacgctatgagtaa

SEQ ID NO: 263440 - DNA, 1944 bp, Klebsiella pneumoniae
ttgagtgacatggcgaaaaacctaatactctggctggtcattgccgttgtgctgatgtcagtattccagagctttgggcccagcgagtctaatggccgtaaggtggattactctaccttcctacaagaggtcaataacgaccaggttcgtgaagcgcgtatcaacggacgtgaaatcaacgttaccaagaaagatagtaaccgttataccacttacattccggttcaggatccgaaattactggataacctgttgaccaagaacgtcaaggttgtcggtgaaccgcctgaagaaccaagcctgctggcttctatcttcatctcctggttcccgatgctgttgctgattggtgtctggatcttcttcatgcgtcaaatgcagggcggcggtggcaaaggtgccatgtcgtttggtaagagcaaagcgcgcatgctgacggaagatcagatcaaaacgacctttgctgacgttgcgggctgcgacgaagcaaaagaagaagttgctgaactggttgagtatctgcgcgagccgagccgcttccagaaactcggcggtaagatcccgaaaggcgtcctgatggtcggtcctccgggtaccggtaaaacgctgctggcgaaagcgattgcaggcgaagcgaaagttccgttctttactatctccggttctgacttcgtcgaaatgttcgtcggtgtgggtgcatcccgtgttcgtgacatgttcgaacaggcgaagaaagcggcaccgtgcatcatctttatcgatgaaatcgacgccgtaggccgccagcgtggcgctggtctgggcggtggtcacgatgaacgtgaacagactctgaaccagatgctggttgagatggatggcttcgaaggtaacgaaggtatcatcgttatcgccgcgactaaccgtccggacgttcttgacccggccctgctgcgtcctggccgtttcgaccgtcaggttgtggttggcttgccagatgttcgtggtcgtgagcagatcctgaaagttcacatgcgtcgcgtaccattggcacccgatatcgacgcggcaatcattgcccgtggtactcctggtttctccggtgctgacctggcgaacctggtgaacgaagcggcactgttcgctgctcgtggcaacaaacgcgttgtgtcgatggttgagttcgagaaagcgaaagacaaaatcatgatgggtgcggaacgtcgctccatggtgatgacggaagcgcagaaagaatcgacggcttaccacgaagcgggtcatgcgattatcggtcgcctggtgccggaacacgatccggtgcacaaagtgacgattatcccacgcggtcgtgcgctgggtgtgactttcttcttgcctgagggcgacgcaatcagcgccagccgtcagaaactggaaagccagatttctacgctgtacggtggtcgtctggcagaagagatcatctacgggccggaacatgtttctaccggtgcgtccaacgatattaaagttgcgaccaacctggcacgtaacatggtgactcagtggggcttctctgagaaattgggtccactgctgtacgcggaagaagaaggtgaagtgttcctcggccgtagcgtagcgaaagcgaaacatatgtctgatgaaactgcacgtatcatcgaccaggaagtgaaagcactgattgagcgtaactataatcgtgcgcgtcagcttctgaccgacaatatggatattctgcatgcgatgaaagatgctctcatgaaatatgagactatcgacgcaccgcagattgatgacctgatggcacgtcgcgatgtacgtccgccagcgggctgggaagaaccaggcgcttctaacaattctggcgacaatggcagtccaaaggctcctcgtccggttgatgaaccgcgtacgccgaacccgggtaacaccatgtcagagcagttaggcgacaagtaa

SEQ ID NO: 263441 - DNA, 474 bp, Klebsiella pneumoniae
atgacggttgtcgaccttggtgctgcgccgggtggttggtcacaatatgtggtcacccaaattggcggcaaaggccgcatcatcgcttgcgatcttttacctatggatcctatcgttggtgtggactttcttcagggcgattttcgtgatgaactggtgatgaaagcactgctggagcgcgttggcgacagcaaagtccaggttgtcatgtccgatatggcaccaaacatgagcggaacaccggcggtggatatcccccgtgccatgtatctggtggaactggcgctagaaatgtgtcgtgatgtattagcgccaggtggcagttttgtagtgaaggtgttccagggcgaaggtttcgatgagtatctaagggaaattcgctccctgtttacgaaggtcaaagttcgtaagccggactcttctcgcgcacgttcgcgggaagtgtatattgtagcgaccgggcgtaaaccctaa

SEQ ID NO: 263442 - DNA, 1077 bp, Klebsiella pneumoniae
atggatgaagagaaggtaaaaaaattacgattcaaaaaagtcaggagatttctgtcaaagtttttcccttatgaagacaaaagacaaaatgatattcaattaaatatatccaatcttctgaaatcaaaggttttttcacattatctaattgatacttaccctcacgtagctatgaaggccacctgcttacagcttagatataattgtgagtataatacaaatttctttacgtatttaatatctaacccaaacagcattatgtatagggagttacgagacaaccaaaatcgttcatatacaggggagtatgcactcgacgaaagtaatgccttgcttaatttttatttaaatgatattcgcatggcgatagatttagaaatatggaaacctgtgggtgattatgtcattagctacataaaaaaacaaaaagggagttcttgcttttacaatcatccagataattactattcaagtagtgatgagcgttgggaatgcccaatcttcgttggattgacgtttttcgatgttatggtatctacagcaatattcaaacgctcaaaaaacaatatgtggctcatgtattatcgttgtttcctaaaggaaatacttgagagctatgaaaaatctagtagcatagatgtaaatagagagttccccatgcgatttgattatttaatatatgagctaatcagccgttgtaatatatgggcaggagcaacagaacacctcaattatgataactggacaacagaagataaagagcaatctccagagttctttgcctctaaaaccttgggggaaatgatgtatctgattattacttcagaaaaaatgcataacaatcaaaagacatatcttttagaaatcattattaaaagaatggactctcttgataaaaagaagaaatctgcttactccaaggaaatcttcaacaatcttatccgagcattctcccctgcttccattgatataaatgcagtaaataaattacggcaactttataaaggtgttgatcatgttctaaaaaacaaaaattcaacttttgaagttgaactatcaaaatatcctgaccaataa

SEQ ID NO: 263443 - DNA, 1224 bp, Klebsiella pneumoniae
atggcgttgtctgatgcgtggttgcgttcagtcgttggaaaggaacgtgataaggttttggttaaatccgatcgtgatggtttgtctgtcagagtatcaccgaaaggtcgcgtagtgttccaatatcgttatcaatgggcagggaaaggcgagcgccttgatatcggaacttacccggcaactggattaaaagaggccagagaagaagttatccgtcttcgtggtgaactcgagtcaaaccgcaatccacgattggtcaagcaggtagaaaaacgcaaagctactgaagccatgacggtggagtctgtgatccgtgcctggtatgcagcatattgtgtaaaaaataaaaaaggttctgagcagatactccgctcatttgaactgcacctgttctctaaaatcgggagtatccctcacgatgtagctacattgcatgattggttagaggtcctggagcctcttagcactaagactccagcaatagcagaccgattgctaattaacgcaaagcaggcccatgtctgggcgtataagagaaagctcattgaaactcgcccgctgtcggatatcacgggtaaagatatggatatccgtaaaggtcagaagaaacggtttctgacacatgatgaaattaaaatcctttatgctgcgatcgatggttctcgaatggttcctaaataccgggccttcattaaactattgctgcattttggttgccgtagttcagagctaattactgcccgggtggacgattttgatttcattaataaagtatggactgtaccaccagaacgacataagactggggagataacaggcgaacagctaaagcgacccattattgaaccggttgaagagcttataaagtacgctatctctatgaacaatggttccgatatgctttttactaaggaaggaagcagggaacccgttggtcggacatcattgcagtcgctgccttacaatttaatgcagtacgcatggcggcgtttggggtatcaattccctcattggtctcttcatgatttgagacgaacagcacgaacaaacttttctgatcttactgagcctcatattgcagaaataatgctaggtcataaactgccaggggtatggcaagtttatgataagagcgattatctagaagaacagcgtaaagcctaccaggcatggtgggagagagttgaatcgattgttacttgtactaactcatgctccaattga

SEQ ID NO: 263444 - DNA, 678 bp, Klebsiella pneumoniae
atgaagtgggactggattttctttgatgccgatgaaacgctgtttacctttgactcattcaccggcctgcagcggatgtttcttgattacagcgtcacctttaccgctgaagattttcaggactatcaggccgttaacaagccactgtgggtggattatcaaaacggcgcgatcacttcattacagcttcagcacgggcggtttgagagctgggccgaacggctgaacgtcgagccgggtaaactcaacgaagcctttattaatgcgatggcggaaatctgtacgccgctgccgggcgcggtttctctgcttaacgccattcgtggcaacgctaaaattggcatcatcaccaacggctttagcgccttgcagcaagtgcgtctggaacgcacgggcctgcgtgattatttcgatttgctggtgatttccgaagaagttggcgttgccaaaccgaataagaaaattttcgattatgcgctggaacaggcgggcaatcctgaccgttcacgcgtgctgatggttggcgacactgccgagtccgatattctcggtggcatcaacgccgggcttgcgacctgctggctgaatgcgcacaatcgcgagcaaccagaaggcatcgcgcctacctggaccgtttcttcgttgcacgaactggagcagctcctgtgtaaacactga

SEQ ID NO: 263445 - DNA, 447 bp, Klebsiella pneumoniae
atgaacacgatttcttccctcgaaacgactgatttaccagcggcttaccacattgaacaacgcgcccacgcctttccgtggagtgagaaaacctttgccagcaaccagggcgagcgttatctcaactttcagttaacgcaaaacggcaaaatggcggcgtttgcgattacgcaagtggtgctggatgaagctacattgttcaatattgcggtcgatcctgactatcagcgtcagggattgggaagggcgctgctggaacatctgatcgacgaactggaaaaacgcggcgtggcgacgctatggctggaagtccgtgcctcaaacgctgccgccattgcactgtacgaaagtttaggctttaacgaggcgacgattcgccgcaattactaccccaccacggacggtcgcgaagacgccatcatcatggcgttgccaatcagtatgtaa

SEQ ID NO: 263446 - DNA, 414 bp, Klebsiella pneumoniae
atgacatcccgacgagactggcagttacagcaactgggcattacccagtggtcgctgcgtcgccctggcgcgttgcagggggagattgccattgcgatcccggcacacgtccgtctggtgatggtggcaaacgatcttcccgccctgactgatcctttagtgagcgatgttctgcgcgcattaaccgtcagccccgatcaagtgctgcaactgacgccagaaaaaatctcgatgctgccacaaggcagtcgctgcaacagctggcggttgggtactgacgaaccgctatcactggaaggcgctcaggtggcatcaccggcgctcaccgaattacgggcaaacccaatggcacgcgccgcgttatggcaacaaatttgcacatatgaacacgatttcttccctcgaaacgactga

SEQ ID NO: 263447 - DNA, 1032 bp, Klebsiella pneumoniae
atgtctgcatttaccccggcaagtgaagtcttgctgcgtcacagtgatgatttcgaacaaagccgtattctgtttgccggagacttacaggatgacctgcccgcgcgtttagataccgcggccagccgtgctcatacccagcaattccaccattggcaggtgttaagccgccagatgggggataacgcccgttttagtctggtcgcaacggcagatgacgtcgcagattgcgatacgctgatctactactggccgaagaataaaccggaagcccagttccagttgatgaatttactttctctgctgccggtgggcacggatatttttgtcgttggcgagaaccgcagcggcgtgcgcagcgccgaacagatgctggcagattatgcgccgttgaataaagtcgacagcgcccgtcgctgcggcctctattttggtcgtctggaaaaacagccggaatttgatgcggataaattctggggcgaatataacgtggatggcctgacggtcaaaacgctgccgggcgtgtttagccgcgacggtctggatgtcggtagccagttactgctctcgacgttaactccgcacacgaaaggtaaagtgctggatgtcggctgtggcgcgggcgtgctttctgttgcctttgcgcgccattcgccgaaaattcgtctcactctgtgcgatgtctctgcgccagcggtagaagccagccgcgcaacacttgcggccaacggtgttgaaggtgaagtctttgccagtaacgtcttttccgaggtgaaaggtcgttttgatatgatcatctccaacccgccgttccacgatgggatgcaaaccagcctggatgcggcgcaaacgctgattcgcggcgcggtgcgtcatcttaatagcggcggcgagctgcgaattgtagcgaacgccttcctgccttacccggacgtgctggatgagacatttggcttccacgaagtgatcgcgcaaaccgggcgcttcaaggtgtatcgcgccattatgacccgccaggcgaagaaaggttga

SEQ ID NO: 263448 - DNA, 237 bp, Klebsiella pneumoniae
atgttgcaacgtacgctgggcagtggctggggagtgttgctgccgggattgctaattgcagggctgatgtatgcggatttatcgccggatcagtggcggattgtcattctgatgggattagtattgacgccggtgatgctgtatcacaaacagttgcggcattacattttgctgccatcgtgcctggcgcttattgctggcatcatgctgatgataatgaatttgaagcagggatga

SEQ ID NO: 263449 - DNA, 789 bp, Klebsiella pneumoniae
atggcctatcgttccgcaccgctctatgaagatgttatctggcgaacgcatctccagccgcaggatgctgggcttgcacaagccgtacgggcgacgatcgccgaacatcgtgaacatttgctcgagtttatccgcctggatgaacccgctccgcttaacgccatgacgctggcgcaatggtcatcaacgaatgcgctaagttctctactcgcggtctattccgatcatatctatcgcaaccaaccaacgatgatccgcgagaacaaaccgctgatctcactatgggcgcaatggtatatcggcctgatggtgccaccattaatgttggcgctgctgacgcaggaaaaagcattagatgtgtcgccggaacatttccacgttgagtttcacgaaaccggacgcgccgcctgtttctgggtcgatgtgtgtgaagataaaaacgcaacaccacattcgccgcagcagcgaatggaaacgttaatcagccaggcgctggttccggttgtgcaggcattagaagcgacgggagagatcaacggcaaacttatctggagtaataccggttatttgatcaactggtatctcactgagatgaagcagctgcttggcgaggcgacggttgaatcgctgcgccatgccctcttttttgagaaaatgctcacgaacggtgaagataatccactctggcgtaccgtggtactgcgcgacggcctgctggtgcgccgcacttgctgccagcgttatcgcttaccggatgtgcagcaatgtggcgattgtacgctgaaatga

SEQ ID NO: 263450 - DNA, 678 bp, Klebsiella pneumoniae
atggaacacagccgaattaagaagagaaatgtcgcactcatagaaaaatgcgtcatgagtagtatcggtattgagagtttattcagaaagtttgcgggtaacccttataagctccatacctataccagtcaggagtcatttcaggatgccatgtcgcggatctcgtttgcggcggtcattttttctttttctgccatgagaagtgagcgcagagagggattatcttgcctgactgaactggcgattaagtttccgcgtacccggcgtttagttattgcggatgatgatattgaagctcggctgattggttcattgtcgccatcaccgttggacggtgtattaagtaaagcgtcaacgctggagatttttcatcaggaactctttttgtcattaaatggtgtacgtcaggcgaccgaccgactgaacaatcagtggtacattaatcaaagccgaacgctaagcccgacggagagagaaatattgcgctttatgtcgcgtggctactcaatgacacaaattgccgagcagcttaaacgcaatatcaaaacgatccgtgcacataaatttaatgtgatgtcgaaactgggcgtcagttctgatgcagggttgttggaggccgcagatattctgttatgtatgcggcattgcgaagcaagtaatgtgttgcatccctattaa

SEQ ID NO: 263451 - DNA, 726 bp, Klebsiella pneumoniae
atgttgccaggatgctgcaaaaatggaattgttatcagtaaaatacctgttatgcaagcagggttaaaagaggtcatgaggactcacttccctgaatatgaaataatatccagcgcctctgcggaggaccttaccttattacaattacgtcgttccggattagtcattgctgatttagccggtgaaagtgaagatccacgttctgtttgtgaacattattattctttaatctcgcaatatcgggaaattcactgggttttcatggtgtcacgctcctggtattcccaggcagtagaactgcttatgtgccctacggcgacgttattgtctgatgttgaacccattgagaatctggtcaagaccgtacgttccggcaatacgcacgcagagcgtatcagcgccatgctgacctctccggcaatgactgaaactcatgattttagctatcgctccgtcattctcactctttcagagcgcaaggtactgcggctattaggtaaaggatggggcatcaaccagatagcttcattgcttaagaaaagtaataaaactatcagcgcccaaaaaaacagtgcgatgcgtcgactggcaattcacagcaacgctgaaatgtatgcatggataaatagcgcgcagggtgcaagagaacttaacttgccttctgtttatggagatgccgcagaatggaacacagccgaattaagaagagaaatgtcgcactcatag

SEQ ID NO: 263452 - DNA, 132 bp, Klebsiella pneumoniae
atgcgtcagttttatcagcactattttaccgcgacagcgaagttgtgctggttgcgttggttaagcgtcccacaacgattaaccatgcttgaagaactgatgcagtgggaggggagtcattctggctactga

SEQ ID NO: 263453 - DNA, 1659 bp, Klebsiella pneumoniae
atgccatctgctcgtctgcaacaacagttcatccgcctgtggcaatgctgcgagggtaaatcgcaggacacgacgctcaacgaactggcagcgttattgagctgctcgcgtcgtcatatgcgtaccctgctcaacaccatgcaggatcgcggctggctgacgtgggaagcggaagtcgggcgcggtaaacgctcgcgtctgaccttcctctataccgggctggcacttcagcaacagcgggcggaagacctgctggagcaggatcgtatcgaccaactagtgcagttggttggcgacaaagcgactgtgcggcaaatgctggtttctcatctgggccgcagcttccgccaggggcggcacatcctgcgcgtgctctactatcgtccgttgcgtaatctgctacctggcagcgcattgcgtcgttccgaaacccatatcgcccggcaaatcttcagttcgctaacgcgcataaatgaggaaaatggggaactggaagcggacatagcccaccactggcagcaaatatcaccgcttcactggcgtttctttttgcgtccaggagtccattttcatcatggtcgtgaactggaaatggacgatgtgatcgcctctttaaaacggatcaatacgctgccgctctattcgcatattgctgaaattgtatcgccgacgccctggacgctggatatccacctcacgcagccggaccgctggttgccgttactgctgggacaagttccggcgatgatcctgccgcgcgaatgggaaaccatcagtaactttgccagccatcccatcggcaccggtccgtatggggtgatccgcaacagcaccaatcaactgaaaattcaggcattcgatgacttcttcggttaccgggcattaatcgacgaagttaacgtctgggttctaccggaaattgccgacgagccagccggagggctgatgctaaaaggtccacagggcgaggaaaaagagattgaaagccgcctggaggaaggttgctactatttactgttcgacaaccgcacccatcgcggggcgaatcagcaagtcagggactgggtaagctatgtgctttctccaactaatctggtctatttcgctgaggaacagtaccagcaactgtggttcccggcttatggactgctcccacgttggcaccatgctcgtccgacacattgcgaaaaacccgccgggctggaaagcctcaccctgaccttttatcaggatcatattgagcatcgagtgattgccgggatcatgcagcagattctggcaagtcaccaggtcacgctggaaatcaaagagatcagctacgatcagtggcatgaaggagagatcgagagcgatatctggcttaacagcgccaactttacgctgccgctggatttttcgctgttcgcgcacctgtgcgaggtgccgctgctccaacactgtattccgatcgactggcaagccgacgccgcccgctggcgcaatggcgaaatgaatctggcgaactggtgccagcaactggtcgccagtaaagcaatggtgccacttatccaccactggctgatcattcaggggcaacgcagtatgcgcggtctgcgtatgaacaccctcggctggttcgattttaaatcagcgtggtttgcgccgccggatccagagtag

SEQ ID NO: 263454 - DNA, 570 bp, Klebsiella pneumoniae
atgaaagtaagaaacccagaacagattagtatccctgcaagtaataccactaaagatccaggccttactcattctcagattatcaggatggttaacctggtcaaaaagaccgagaatatgaatatctttgaagagctatgggagacgttacgcaatctcttccggtcagataaacattcccagactgcggcaaggcaaattctgaaggatgcattttatttccagaattgtgatgactactcaaaatactttaccggggctgtagatggggatgcgcgtgataagtttacccactggctgataaattttaataaactcaaagaacatgcaatagatccggaaaatatggccgcgaaggcctcactctcgtcaggagatacgttaagagtcagtttttttattggagatgaggcgatacttactctggatttgcagctgaaagagagcaccagtaccgggtgcattgatctgagtcatgcttactttaacggggttgtcatttgtggtattgaccgtctcgaggttgacctgagcaatgctgaaacgaacaatagccgttggtatgactga

SEQ ID NO: 263455 - DNA, 1410 bp, Klebsiella pneumoniae
atgacggggcgttgccttttcggcttctcaggcgagaagccgttcttattaccggacaatgaagggataaagatgaacacttcaccggtgcgaatggatgatttaccacttaaccgttttcactgccgcattgctgcgctcactttcggcgcacacctgaccgacggttatgtcctcggcgtcattggttacgccattattcagcttacgcccgccatgcaactgacgccgtttatggcgggaatgattggcggctcagcactccttggtttgtttcttggcagcctggttctgggctggatctccgaccatattgggcgacaaaaaatcttcaccttcagctttttgctgattacgcttgcttcgtttttacaattttttgccaccacgccagagcatcttattggactgcgcattttgattggcattggtctgggaggcgattactcagtcggtcacaccttgctggctgaattttccccgcgccgccaccgcggtattttgctgggcgcgttcagcgtggtgtggactgtaggctatgtgctggcaagtattgccggacatcactttattagcgaaagcccggaggcctggcgctggctgctggcatcggcagctctgcccgcattgttgattacgttattacgctggggaacgccagaatcgccacgctggctactgcgccaggggcgttttgcagaagctcacgctatcgtgcatcgctattttggtccccatgttttactgggcgatgaagtggcaacggcgacccataaacacatcaaaaccttgttctcttcgcgctactggcggcgcacagcgtttaacagcgtcttctttgtctgcctcgtaatcccatggtttgtgatttatacctggctgccaactatcgcccagactattggtctggaagatgcgttgaccgctagcctgatgcttaatgcgttgttaattgtgggtgcgctgctgggattagttctgacgcacctgctggcacatcgcaaatttttgctgggaagttttttgctgctggcggcaacgctggtagtgatggcttgtttgccttccggcagttcattaacgctgctgctttttgttctcttcagcaccaccatttcggcagtcagtaatctggtgggcattttgcctgcggaaagttttcctactgacattcgctcgctgggcgtcggttttgccaccgccatgagtcggttgggcgcggcggtaagtactggcctgctgccgtgggtgctggcgcagtggggaatgcaagtcaccttattgctcctggcggcagtgttgttggttggttttgtcgtgacctggctatgggcaccagaaaccaaagcactcccgctggtggcggcgggaaatgttggaggtgcgaatgaacattctgttagcgtttaa

SEQ ID NO: 263456 - DNA, 780 bp, Klebsiella pneumoniae
atgaacattctgttagcgtttaaagccgaaccggatgccggaatgctggcggaaaaagagtggcaggcggcggctcagggtaatagcggaccggatgtttcgcttctgcgaagtttgctcggtgctgatgaacaggctgccgccgcgctgctgttggcgcagagaaaaaacggtacgtcgatgtctttaaccgcgttgagcatgggggatgaacgggcgttgcactggctgcgctatcttatggctcttgggtttgaggaagctgtattgctggagacggcggcagatctgcgctttgcgccggaatttgtcgctcgccatattgccgaatggcagtaccagaatccgctggagctgataattactggctgccaaagcagcgaagggcagaatgggcaaacgccatttttgctggcggaaatgctgggctggccctgcttcacccaggtggagcgttttactctcgacgcgccgtttatcacccttgaacagcgtactgaaaacgggctgcgctgttgccgggttcgcttgcctgcggtgattgccgtgcgtcagtgcggtgaagtggccttgccagtaccgggaatgcgtcagcgaatggcggtggggaaagcagcaattatccgtaaaactgttgctgccgaatcgccagcgatgcagtgtctgcaactggcaagagcagagcaacaacgcggagcgacgctgattgatgggcaaacggtagcagaaaaagcgcaaaagctatggcaggactatttacgccaaaggatgcagccatga

SEQ ID NO: 263457 - DNA, 861 bp, Klebsiella pneumoniae; identical to SEQ ID NO: 9679

SEQ ID NO: 263458 - DNA, 978 bp, Klebsiella pneumoniae
atgagttggatatcaccggaactgattgagatcctgctgaccatcctcaaagcggtggtgatcctgctggtggttgtcacctgtggggcattcatgagctttggcgaacgtcgcctgctgggtctgttccagaaccgttacggacctaaccgtgttggctggggcggttcgctccagctggtcgcggacatgatcaagatgttctttaaagaagactggatcccgaaattctcggatcgcgtcatctttaccctggcaccgatgattgcctttacctcgctgctgctggcctttgcgattgtgccagtcagcccaggttgggtggttgccgacctgaacatcgggattttgttcttcctgatgatggccggtctggcggtctacgcggtgctgtttgcgggctggtcaagtaacaacaaatactcgctgctgggtgcgatgcgtgcttctgcgcagactctgagctacgaagtgttcctcgggctttccctgatgggcgtggtggcgcaggccggttcattcaacatgaccgacatcgtcaacagccaggcgcatgtgtggaacgtcatcccgcaattctttggttttattacctttgccatcgcgggcgtggcggtgtgtcaccgtcacccgtttgaccagccggaagccgagcaggaactggcggatggttaccacattgaatattccggcatgaagttcggtctgttcttcgtgggcgaatacatcgggattgtgaccatctctgcactgatggtgacgctgttcttcggtggctggcaaggcccgttgttaccgccattcatctggttcgcgctgaaaaccgcgttctttatgatgatgttcattttgattcgtgcgtcgttaccgcgtccgcgttatgaccaggtaatgtccttcggctggaaaatctgcctgccgctgacgctgatcaacttgctggtaacggcggctgtcattctctggcaggcgcaataa

SEQ ID NO: 263459 - DNA, 3552 bp, Klebsiella pneumoniae
atgaccactgtgaataaaaagttaaaaaaaactgcatctggcgcgattacatggtcagtaattgttacccagatattatctccagtttctctttctttgattccggcaaacagttttgcatcgtctgataataaagatgttacgcaaatttatgctagcgatgagcgtgcaaataaagtggcctcatttgcagtaagtgcaggtcagagtctggcgaataataatgcaagtagttttgctgtaaatactttatcaactcaggcgacaaaagaggtcgtcgattggttgcaacaatatggcaatgcgcgcatcaagcttaatgtcgataattctttttccttgaaggattcatcattcgactttttatatccatggctggatactcaggattatgtgctattcagtcaaacatcactacatcgtactgatgaccgtaatcagaccaatattggtttggggattcgtcatttcactcctgataatgcaatgttgggtgcgaatgttttctacgattatgatttaagtcgcagccactctcgcgcaggttttggggttgagtactggagagattatttcaggcttggtgtaaatacctattttggtttatctgactggaaggacagtcgggatattgatgattatctggaaagacccgcaaatggctgggatttttctgctgaaggatggctacctgcttatccgcaattaggggcatctattcagtttgaaaaatattatggtaaaaatgtcggattatttggaagcgataatctgcaggaaaacccttacgcagttactgggggaatttcttatacaccagttcctctgattaagttttctgcacagcataagcaaggacagagcaacgttcacgatacaacctttggtgttgagtttaattaccgcccaggcgtttcccttgctgaacagcttagcagtgacaatgttgcagttatgcgagaagtccagaaccggcgttatgattttgttgaacgaaataacaacattgttctggagtacaagaagaagcatgcactgaaaatcagcttaccagagtctgttcagggggatggcgaatcaatcatccctgtaacactgacaatcaacaatgccagtggtggtatcaagtctgtacagtggaatgatagtgtattcactgcggctggcggtaagatcagtggaaatggcacatcatggcaggtcactttaccggcttataaaagcgaaggtgtaaattcgtggaatgttggagccacggtccaggataatagaggcaacgtttccaactatgcggtgatgaatattagcgttatcaatagtggtgtctcgacagcggattcttcttttatgttggatggagattcatctccgacgatctctgctgatggtcaatccactcatccaatagtattaagcctgaaagacagtaacggtaaggcattaaccggactggctgatgacattgaaatgtcagtggaatttactgcggatagcaatagtgctcgacagcgtgaaacggtaactgccccgtcattaggcgcggtagaggaaatctctgctggtgtatatcgctctgttctgactgctggttcgcaggctggcacagtacgtgtaactgcaaaagtaatggataaaacatttactctcagtattaagcaaacagcagcaacagaacctgattctgaggtcagtgctgttttaaccgctgcaccagcagaacaggtagttggttacaatatcaatctacaactggcagtgaaggattcacaaggaaatgcaatcactggtgataacactctgagcttttatgctcttaaccaggcagaaggagtcgagtttggggctgtaacggaaaaagacggtgtctatagcgcgacagtaacttcaaaacgagctggtaagattcggatcggtgttaaatcgggtagtcacaatttctcaggtattgagaaagaaatctcctttattgaagatcgaacacagttcgcattctctcgtattgaagccagtaaaaataatgcattggctgacggcaaacaacagaatacggtgactttaagccttgcagatcgtttcggcaatgttgtgcccggttatgctgttacgctgtccttacctgcgggggtaactcaagttggtggtgaacatgctgtgtcaactgacgaaaacggtaatgctgtttttgcgttaataagctccactccgggttcttacgtgattaaagctcatgctggttctcagatgtctactgagttaacagtaacctttgcatcaaatatgatcggagcttcactgtcactgacgcctggaaacagtagcttaatttccaatattcctgctaatggtaaggatgctgcggtattgaatgtgcaactgacaaatacgaatgcgtcggtcaatggacagaagattcagctcatcacctcatctgaaagattgtctgtaccgacaaatatcgtgactgattcaacagggcatgtttccgtaccacttacaacggtgagagctggtgagtatacggtggctgcacgagtgactgacggttcccatagtgtggagtctggcagcgttaagttaacttttgtaccagatgctgcttccgcagaacttactatgagtacatcaaaacagcagattgtggccgatggtagtgaaagtgcaacagtggacattcagttggttgatgccaataacaatgcgtttacaggcgatgtggatttaacggttacaccatcgacgggagcatcattgaccagtagtaaactgcagttggatgctcatggacaggcaacaacgcagttcacagcatcgaaatcaggccagtacacaattcaggctgagtatgttctagatgggaaacgtataaccgcaagcaaaaatattgatgccgtgacggatgtgaaggaggctgtgttggagatcacatcatctgcatcttcggctgtagtgagcgataccaacaatctgatatttacgttactgttgaaaagtacgtcaggcgaagtattaagtggtcgagtattgaatatcaaggcatctgggccgtccaaatatggtgcgttggtggttgataaaaccactgtaacgactgatgagtatggtctggctacggtaagcgtacatggtcgaacggctggttcgtataaattaacggcgaccttagatgaacttggcagtgatgttagtgaggtgaagtcattctctctgtatgctgatgaggcaaatggagtattgacactgcataaagatggaggctatgacacagatgatggtactccagtgggggtttatgcccgatttgttgaccatttcggcaatccgttatctggtacggttgagttttctgctggtagtgaagatagtccaaactctcaacgggttaaaatggagcctgctacagtaacgttacactggacaggtaatgcagcctcggagttcagcacctatgaaagcggttatcactggattaaggccaaaataacgaacagcaaaaatacatatgagaaaacaataaggacttatgttgtaaagctccctgaaaaggatagttaa

SEQ ID NO: 263460 - DNA, 456 bp, Klebsiella pneumoniae
gtgaacctcccacaagatggcatcaaattacatcgcggtaacttcaccgctatcggtcggcagatccagccttatctggaggagggcaaatgctttcgcatggtgcttaaaccgtggcgtgagaaacgcagtctttcccagaatgcactcagccacatgtggtacagcgaaatcagtgaatacctcatcagcaggggtaaaacgttcgccactccagcttgggtaaaagatgctctcaaacacacatatctcggttatgaaaccaaagacctggttgatgtcgtaaccggtgatatcaccactatccagtcgttacgccatacctccgatcttgataccggagagatgtatgtcttcctgtgtaaggttgaagcctgggcggtgaatattggctgccacctgactattccgcagagctgcgagttccagctgctccgcgacaagcaggaggcgtaa

SEQ ID NO: 263461 - DNA, 171 bp, Klebsiella pneumoniae
atggctacaccgcttattcgtgtcatgaacggacacatctacaaagtaccaaatcgtcgtaagcgtaggcctgagctgaaaccatccgaaataccaacactgctcggatataccgccagcctggttgataaaaaatggttgcgactggcagcaaggaggaatcatggctga

SEQ ID NO: 263462 - DNA, 228 bp, Klebsiella pneumoniae
atgctggatatcggcctggctatgcctgtgaaaatccgcattgagtgccacatgccggatcgccgtagccgtgacctggataatctgcaaaaagccgcttttgacgcactcactaaagcaggtttctggctggatgatgctcaggtcgttgattaccgcgttgtgaagatgccggttgtcaaaggtggaaagctggaactgaccatcactgaacagggagatgaatga

SEQ ID NO: 263463 - DNA, 138 bp, Klebsiella pneumoniae
atgtttgagttttatatggcagaacttcttcgccaccgctgggggcgtctgcgcttatatcgtttccccggctctgttttgaccgattaccgaatactgaagaattacgccaaaacactgacaggagcaggagtatga

SEQ ID NO: 263464 - DNA, 378 bp, Klebsiella pneumoniae; identical to SEQ ID NO: 9922

SEQ ID NO: 263465 - DNA, 525 bp, Klebsiella pneumoniae; identical to SEQ ID NO: 9921

SEQ ID NO: 263466 - DNA, 753 bp, Klebsiella pneumoniae
atgtgtttcagccacgaccagaatgaggatgtgacagagagaatgacagagtttagtcgttcttatatggacaaattaaaggatgtatcggggtttgtggtttgtgctaaatctcccagctgtggcatggagcgcgtgcgtgtctatgatgaaaatggtaatcgaggtcgtaaagatggagtgggactatttacgagcactttgatggaaaagttttcctggctaccggttgaagaggatgggcgattacatgatccagtgcttcgtgagaattttgttgaaagagtttttgctttgcatgagctcaatcacctttacaaggagaaattatcaagaagagagttattagcttttcatagtcgttataagcttcagttgttggcgcatagtcaggcaggctataaagatatgggaccatttgtggctgcaatacacgagtgggcggaccttgaatcatactttgaggtgtatcgtgataagctgatggcgattctcagaaaacctgcatcacgtaaaaatcacacgaatgtgatgatgcatatacaggggtattttagtaactacttaagtacacgccagcgtaaagagttgagcgaggttatacttaactatcgttctggcacattacctcttcttgcgccgttgactctgctgaagcattatctgggtgagtatcctaatgattacttgcttacacagaattacttcgatccctatccggacgaactggctctaagactgatggtaaattaa

SEQ ID NO: 263467 - DNA, 162 bp, Klebsiella pneumoniae
atgcaggatatttacaatcgtaaaaactacactatgatacccagagtgtcagtttgtataaaaactctgtttacgctgaagaaaccattgagatgcaacttaaagttggtaaacatgccagtcaaaatatataatattatgattccacgcagctatatataa

SEQ ID NO: 263468 - DNA, 693 bp, Klebsiella pneumoniae
atgccatacatatgttctatcattttggtgttgaactcgtttgatgtccgaattggtaaagaagatattttgtttaaaaaaggaagtgctgttctcattgattacaatttaaaagattttttttcatcaaatatagatcatgtaatgatcgtagatgttgaagagaaaacagttaatgatttctttaaaagcaacacactctcacctttttctgtaagaaggttttatccggcatacttgatggtggaatgtgaagatttttcattgttaaagaacttgattgcatgcttgaattgtgatggcagaactgtggattttgttagaaatcaaatatcacttgcatgtcttgctatcttatcttcagagaaaatagtgcaaagttttttatttggatgtcttaatagtttaggaagtaaagttaaggctattattcacacggatatatctgcagcatggagactttgtgatatatcttcaagactgtatctgagtgaaagtctgttaaaaagaaaattaaagcacgaaggcttatcatttagtaagttaattcttgaagagcgaatggtgatggcggaaaggttattaagctacaatttatattctgttggaaaagttgctgagatatgcggttatgaaaacacgtcatattttgtaagtgttttcagaagatattttggtgttcctccccggtaa

SEQ ID NO: 263469 - DNA, 645 bp, Klebsiella pneumoniae
atgatgaagaaaggaatggcaaacagtatatcaatgacatggcaacttttatgcgatgatcatggttttacccgggagcactacaatcagctgaagaaattcagcccggaggcattacgtgaaattattgctgaaatagcctgctgccatccgtcaaccagtatattgctcaggaataagtggctgacactgccggaggatattccggagcaggttacccgtgaatacgaacgaagaatacagaactgtccatctttcaggagcgagaaagaggcggaatcctggctaaatgaactgttttttgctgtgattgcgccgctataccgggttgtccccggacaatcagaacaggttgaatcctttgttctgcagcttattgccgaacaggagcgggtttgggagcttattctaaccaatgatggttattcatggcattgcgcactttatgatatattatttcatctggttttacgaaatatggaagaccagcctgaacatcagagacagcgaataacaaaaatacttaatgagtccgatacaaggcgggttgcagaagagattaaattccggattcaatatcttcaggatgaagaacaaaagagagttttaagtgagttggtaaatgtcctgatttcaaaaagataa

SEQ ID NO: 263470 - DNA, 639 bp, Klebsiella pneumoniae
atgggggattctgtgacaccggagatactgagcaacatgattcgtcagtacttcagccaggaacgaccagaagaagaggccatacaggccctgaatcatctgcgcagggtgcttcatgaggtcagtccatttgcacaggagcctgtggactgtgtgctgtgggtgaaagcagatgaggtggtggctaacgattataaccccaatgtcatggcgccgggtgagaagaaactgctgaaacattcactggagcaggatgggttcacgcagcctgtggttgtctcggaagagaaggagcattatctggtcgtggatggttttcatcgtcaattactgggcagggaagcaggtacgggaaaacgcctgaagggctggttgccagtgacctgtattaatccggaaagaaagggacaggcctcacgtattgctgcaaccattagacataaccgggccagggggaagcaccagataacttcaatgtctgatattgtcagggacctgtcgcggctgggctggacggatgaacgtattggtacggagctgggtatggaccaggatgaagttctcaggttgaaacagattagcgggctgacggagctgtttctggaagaggatttcagtccggcatggacgattcgctga

SEQ ID NO: 263471 - DNA, 615 bp, Klebsiella pneumoniae
ttgttagctcgttgtatcggaactggtagattgaaaggagatgtgagaagtgattttattgggtttaatggtagtaaacaggtaggttatgttttattaactttattcttaacgaaagtaataaattctgatttgctctctcattatcgtatatttaatcgttttttgcattatgagagaaaagttatggacatatataattctttgagtgatatagaagttgattgtatttgccaggaagtgatggctatatatgaacatactcagcgatgctgcaacgaaaagaaaatcacaactatccagttaggcaggaaacttaatggcaggtatgcagatacgattgctgagttaaaagaaacagcagagataagaggggaggatgtgatttcttttgagatggatatattgaattcttttaatgatgcggatgaatatcacggacgtgttaaactggagttggatatacctgcttcagatatattatattgccatgattttattgattcaaaacatgtaaactcctggttggttgaaccacatgagtgggtggttataaatcgttctctcaatgggattgttacagtgccagtatcatcaataaagattctttattga

SEQ ID NO: 263472 - DNA, 786 bp, Klebsiella pneumoniae
gtgatctccttccatgaaaatacgcaggcttggcacgaacttaaacagagcagtaaagtggctttaccggaagccatggtgaagggatatatcacccgcctggagaaccagcctgtgcagggggaagtatcgtctccggtaacgctactggcgcaggcactcaggcttgaagctccggatgtgcaggaacatcagaccctgccgcactcccgtctggtgtatgttgtttctgaaacaaaaacagagcccacactcttccttcaaaaatccccgctcacgtttctgaaaacgtttgttacaggtgtctgtacggcattgctggcggtctgcgtggccattccgggatggcagtttctgacacagccatcaccggcggagcagcaactcagggcgctgctgacaccctcaccggatgtgctttcagcagaccagatgatgcagctcagcagaacactgttaaatcatgcgtcagagtggataaccctttccggtcagcagataacgcgactgacagaattccccccggcatacaacctgcaacgcagtgtgcaattgctgcagcaactgatggtacttttccccgacaatcctcgtgttcaggaaatggtggataactggcagaagagtgcaaggagtcgtgcgctcccggaagaggcgatgactggctggaacgaaggcatgacccgcttacagctgttggctgagcgcctgaaccgtccggatgaacagcggggaaaatacatgacggtcagtgagctgaaaacggaggtgtctggcatcatgtag

SEQ ID NO: 263473 - DNA, 441 bp, Klebsiella pneumoniae; identical to SEQ ID NO: 9726

SEQ ID NO: 263474 - DNA, 162 bp, Klebsiella pneumoniae
atgaacccgttatttaacgatattcagatgcgtctttttcatctgaaccactcgccgtactcctggtactggaatgtaagattcatacctctggaagccgtgtatattggcaacgatacctgtcatatcaccattacctgtaatcagtccggttttcactga

SEQ ID NO: 263475 - DNA, 1746 bp, Klebsiella pneumoniae; identical to SEQ ID NO: 9727

SEQ ID NO: 263476 - DNA, 234 bp, Klebsiella pneumoniae
atggcaaggtccgattatgatattattaatctgtctctgaaacatgaactgaatgagtggctgacagagagaggttatgccggactggcggataaccggaaccgcttggcagaggtggttacccggaaattgcaggacagcttttatataaacgtttcctgggatgcgctgaacacggcatacagtgaacaccctgagtggttttcagggcttgtctccggagatgagaattaa

SEQ ID NO: 263477 - DNA, 1428 bp, Klebsiella pneumoniae
atgatgaatgacggtaagcaacaatctacctttttgtttcacgattacgaaacctttggaacgcaccccgcgttagatcgccctgcacagttcgcagccattcgcactgataacgaattcaatgtcatcggcgaacccgaagtcttttactgcaagcccgcggatgactatttaccccagcctggagcagtattaattaccggtattaccccgcaggaggcacgggcgaaaggagaaaacgaagccgcgtttgccgcccgtattcactcgctttttaccgtaccgaagacctgtattctgggctacaacaatgtgcgtttcgacgacgaagtcacacgcaacgttttttatcgtaatttctacgatccttacgcctggagctggcagcatgataactcgcgctgggatttactggatgttatgcgtgcctgttatgccctgcgcccggaaggaataaactggcctgaaaatgatgacggtctaccgagctttcgccttgagcatttaaccaaagcgaatggtattgaacatagcaacgcccacgatgcgatggctgatgtgtacgccactattgcgatggcgaaactggtaaaaacgcgtcagccacgcctgtttgattatctctttacccatcgtaataaacacaaactgatggcgttgattgatgttccgcagatgaaacccctagttcacgtttccggaatgtttggggcatggcgtggcaataccagctgggtggcaccgctggcgtggcatcctgaaaatcgcaatgccgtaattttggtggatttggcaggagacatttcgccattactggagctggatagcgacacattgcgcgagcgtttatataccgcaaaagccgatcttggcgataacgccgccgttccggttaagctggtgcatatcaataaatgtccggtactggcccaggcgaatacgctacgcccggaagatgccgaccgactgggaattaatcgtcagcattgcctcgataacctaaaaattctgcgtgaaaatccgcaagtgcgtgaaaaagtggtggcgatattcgcggaagccgaaccgtttacaccttcagataacgtggatgcacagctttataatggctttttcagtgacgccgatcgtgcagcaatgaaaattgtgctggaaaccgagccgcgtaatttaccggcactggatatcacttttgttgataaacgaattgaaaaactgttgttcaattatcgagcgcgcaacttcccggggacgctggattatgccgagcagcaacgctggctggagcaccgccgccaggtcttcacgccagagtttttgcagggctatgctgatgaattgcagatgctggcacaacagtatgccgatgacaaagagaaagtggcgctgttaaaagcgctttggcagtacgcggaagagatcgtctga

SEQ ID NO: 263478 - DNA, 1167 bp, Klebsiella pneumoniae
ttgaaacgccgtcttattattgctgcttctttgttcgtttttaatttatcgtctggttttgcggcggaaaacattcctttttcacctcagcctccagagattcatgccgggtcctgggtattgatggattacaccaccggtcagattctcaccgcgggtaatgagcatcaacagcgcaatcccgccagcctgacaaagctgatgacgggctatgtcgtggatcgcgctatcgatagtcatcgcattacgccagacgatattgtcaccgtggggcgtgatgcgtgggcgaaagataatccggtgtttgtcggttcttcactgatgtttttgaaagagggcgatcgcgtatcggtacgtgatttaagccgtggtttaattgtggattccggaaatgacgcttgtgttgctctggctgactatattgccggtgggcaacggcagtttgttgaaatgatgaacaactatgccgagaagctgcatctcaaggatacgcattttgaaacagtgcatggtctggatgcacctggccagcatagctcggcttatgatttagccgtgctttctcgcgctatcatccacggcgagcccgagttttatcatatgtacagtgagaaaagcctcacctggaacggtatcacccagcaaaaccgtaacgggttattgtgggataaaaccatgaatgttgacggcctgaaaacgggccatacttctggtgccgggtttaatcttattgcttcggctgtagacgggcagcgtcgcctcattgcagtggtaatgggggctgacagcgcaaaaggtcgtgaggaagaggcaagaaaattactgcgttgggggcaacaaaactttactacggtgcaaattttgcaccgtgggaaaaaggtcggtacggaacgcatctggtatggtgataaagaaaatatcgccctgggaacggaacaagagttctggatggtgctaccgaaagccgaaattccacatatcaaagccaaatatacccttgatggtaaagaactcaccgcgccaattagcgcccatcagcgggtaggggaaattgaactttacgaccgtgataaacaggtggcgcactggccgctggttaccctggaatctgtcggggaaggcagcatgttttcccgcctgagtgattatttccaccataaggcctga

SEQ ID NO: 263479 - DNA, 474 bp, Klebsiella pneumoniae
atgaactacgagattaagcaggaagataaacgtaccgttgcaggtttccatcttgttggcccgtgggagcagatggtaaagaaaggttttgagcagttgatgatgtggatagatagcaaaaatattgtgccgaaggagtgggttgctgtctattacgacaatccagatgaaacacccgccgaaaaattacgctgcgacaccgtcgtgacggtaccgaataactttacgctccccgaaaacagtgagggcgtcattctgacagaaatttcaggtggtcagtatgcggtggcggtggctcgtgtagtcggtgatgattttgctaaaccctggtatcagttctttaatagcctcttgcaggacagtgcttatgaaatgttaccaaagccctgcttcgaggtttacttgaacaatggcgcggaagatgggtactgggatatcgaaatgtatgttgcggtgcagccaaaacatcactaa

SEQ ID NO: 263480 - DNA, 1059 bp, Klebsiella pneumoniae
gtgcgtgccgataagtcattaagcccgtttgaaatccgggtataccgccattaccgcattgtgcatggtactcgggtcgcgctggcattcctgctcacttttctcattatccgcctgtttactatcccggaaagcacctggccgctggtcaccatggtggtgattatggggccaatctcgttctgggggaacgttgtccctcgtgccttcgaacgtattggcggtacggtgttgggttcgattttaggtcttatcgctctgcaactggagttaatttcgttaccgctgatgttagtctggtgcgcggcggcgatgtttctttgcggttggctggcgctgggcaagaaaccgtatcaaggattattgattggggtgacgctggcaattgttgtgggttccccgacaggtgaaattgatacggcgttatggcgaagcggcgatgtgatcctcggctctttactggcaatgttgtttaccggtatctggccacaacgggcgttcatccactggcgcattcaactggcgaaaagtctgaccgagtataatcgggtctatcaatctgcattctcaccgaacttactcgaacgcccacgtctggaaagccatctacaaaaactcctgaccgatgccgtgaaaatgcgtgggctgattgcgcccgccagcaaagaaacccgtattcccaaatcgatatatgaaggtatccagaccattaatcgcaatctggtttgtatgctggagttgcaaatcaatgcatactgggccacgcgccccagccatttcgtgttattgaacgcgcaaaaacttcgtgatacccagcacatgatgcagcaaatactgctgagccttgttcatgcgctgtacgaaggtaatccgcagccggtttttgccaatacggaaaaattgaacgatgctgtggaagagctgcgtcagttgctcgataaccaccatgacctgaaagtcttggaaacaccaatctatggttatgtgtggctgaacatggaaacggcacatcagcttgagttgctatcgaatctgatttgccgggccttgcgcaaataa

SEQ ID NO: 263481 - DNA, 330 bp, Klebsiella pneumoniae; identical to SEQ ID NO: 3689

SEQ ID NO: 263482 - DNA, 195 bp, Klebsiella pneumoniae
atgatgacactggaagccgacagcgttaacgtacaggcgctggatatggggcacattgtcgttgacattgatggtgttaatatcactgaactgattaataaggccgctgaaaacggttattcactccgcgtggtggatgaccgtgactctaccgaaacaccggcaacttatgccagccctcaccagttgctgtaa

SEQ ID NO: 263483 - DNA, 369 bp, Klebsiella pneumoniae
gtgtcagacaaactccatgagacaaattatcccgacgaccataacgaccgcctctggtggggactgccctgcaccgtgacgccctgtttcggggcacgtctggtgcaggagggtaaccggttgcattaccttgccgaccgcgccggtatcagaggcaggttcagcgacgtagatgcgtaccacctggaccaggcctttccgctgctgatgaaacaactggaactcatgctcaccagcggtgaactgaatccccgccatcagcataccgtcacgctgtatgcaaaagggctgacctgcaaagccgataccctcagcagttgtggttacgtttatctggctgtttatccgacgcccgaaatgaaaaattaa

SEQ ID NO: 263484 - DNA, 645 bp, Klebsiella pneumoniae; identical to SEQ ID NO: 7672

SEQ ID NO: 263485 - DNA, 336 bp, Klebsiella pneumoniae; identical to SEQ ID NO: 35775

SEQ ID NO: 263486 - DNA, 480 bp, Klebsiella pneumoniae; identical to SEQ ID NO: 35774

SEQ ID NO: 263487 - DNA, 702 bp, Klebsiella pneumoniae; identical to SEQ ID NO: 35773

SEQ ID NO: 263488 - DNA, 501 bp, Klebsiella pneumoniae
atggtcgccaaaagcgatccgcgcctgggttttcgcgcggttctcgacagcaccattgcgctggcagtgtggctgcaaattgaactggcggaaccgtggcagccgtggctggcggatatccgttcgcgtcttggcaacattatgcgtgccgatgcgctgggggaaccgctgggcgatcaagcgattgtcgggctttctgacgaagatctgcatcggctttctcatcagccgctgcgctatctcgaccacgatcatctggtgccggaagccagccacgggcgcgatgcggcgttgctcaatctgctacgcaccaaagtgcgggaaaccgaaaccgtagcggcgcaggtctttatcacccgcagctttgaagtattacgcccggacatcttgcaggcgctgaaccgcctttccagcacggtctacgtgatgatgatcctgagcgtaacgaagccgccgctaacggtgaagcagatccaacaacgactgggggaaacgcaatga

SEQ ID NO: 263489 - DNA, 468 bp, Klebsiella pneumoniae
atgattattgaacgttgtcgtgaactggcgttgcgagcgcccgccagagtggtttttccggatgcgttagatcagcgtgtgctgaaagcggcgcaatatttacatcaacaaggtctggcaacgcccattctggtcgctaatccgtttgaacttcgtcagtttgcgctcagtcatggcgtagcgatggacgggctacaggtgattgatccgcatggcaacctcgcaatgcgggaagaatttgctcatcgctggctggcccgcgcgggcgaaaaaacgccgccggatgcgctggaaaaacttaccgacccgctgatgttcgccgcagcaatggtcagcgccggtaaagcggatgtctgtatcgcgggcaacctctcttccacggcgaatgtgctgcgtgccggattacgcattatcggcttgcagccaggctgtaaaacgctctcatccattttcctgatgctgccatag

SEQ ID NO: 263490 - DNA, 288 bp, Klebsiella pneumoniae; identical to SEQ ID NO: 35769

SEQ ID NO: 263491 - DNA, 1404 bp, Klebsiella pneumoniae
atgaatcaacaggatattgaacaggtggtgaaagcggtactgctgaaaatgcaaagcagtgatacgccgcccgccgccgttcatgagatgggcgttttcgcgtccctggatgacgccgttgcggcagccaaaattgcccagcaagggttaaagagcgtggcaatgcgccagttagccattgctgccattcgtgaagcaggcgaaaaacacgccagagatttagcggaacttgccgtcagtgaaaccggcatgggccgcgtcgaagataaatttgccaaaaacgtcgctcaggcgcgcggcacaccgggcgttgagtgcctctctccgcaggtgctgactggcgacaacggcctgactttaattgaaaacgcgccctggggcgtggtggcttcggtaactccgtccaccaacccggcggcaaccgtaattaataacgccatcagcctgattgccgcgggcaacagcgtcatttttgccccgcatccggcggcgaaaaaagtctcccagcgggcgattacgctgctcaaccaggcgattgttgccgcaggcgggccggaaaacttactggttactgtggcaaatccggatatcgaaaccgcgcaacgtttgttcaagtttccgggcatcggcctgctggtggtgaccggcggcgaagcggtagtagaagcggcgcgtaaacacaccaataaacgtctgattgccgcaggcgctggcaacccgccggtagtggtggatgaaaccgctgacctcgcccgtgctgctcagtccatcgtcaaaggcgcgtctttcgataacaacatcatttgtgccgacgaaaaggtactgattgttgtggatagcgtagccgatgaactgatgcgtctgatggaaggccagcacgcggtgaaactgaccgcagagcaggcgcagcagctgcaaccggtgttgctgaaaaatatcgacgagcgcggaaaaggcaccgtcagccgtgactgggttggtcgcgacgcaggcaaaatcgcggcggcaatcggccttaaagttccgcaagaaacgcgcctgctgtttgtggaaaccaccgcagaacatccgtttgccgtgactgaactgatgatgccggtgttgcccgtcgtgcgcgtcgccaacgtggcggatgccattgcgctggcggtgaaactggaaggcggttgccaccacacggcggcaatgcactcgcgcaatatcgagaacatgaaccagatggcgaacgccattgataccagcattttcgttaagaacggaccgtgcattgccgggctggggctgggcggggaaggctggaccaccatgaccatcaccacgccaaccggtgaaggggtaaccagcgcgcgtacgtttgtccgtctgcgtcgctgtgtattagttgatgcgtttcgcattgtttaa

SEQ ID NO: 263492 - DNA, 837 bp, Klebsiella pneumoniae; identical to SEQ ID NO: 35768

SEQ ID NO: 263493 - DNA, 1188 bp, Klebsiella pneumoniae; identical to SEQ ID NO: 35767

SEQ ID NO: 263494 - DNA, 702 bp, Klebsiella pneumoniae
gtggtcacccagggcgaaagcagcggaaacggcgaaggcacagttgatcactttgccgcgggtatccatctgcttcatcatgccgaacatcgggatattgttggcaagggttgcgaccatgccagctgccgcgatgttgttcatattcagcaccttaccgacgctcatcagcggtttttcaaaccagcgagtcagcagcagcaccatcggatacgcccccagcagcacgcaggagatagaaccgataacttcaatggcgcgcatcacttcaccgggtttgtcgcctggagccatgaagatcggatccagaccggggatcagttcccaaccgagcaggaatttcactaccgcagcggcaagaccgagggtgatcaatgcaacgaggaatttggcgaagatctggaagccgttgatcattttttccgggatgaatttcagccccagcgccaccagtaccgcgacgataagtaccgggatcatgttcatcaggatcagggcaaaggtgaattccactggctgaccgttgatctgcacaccggaatacatagccaccagaccaccggcaatacagccaatcggaatggtcacaatgcccgccagcacgccgagcgccagataacgacggtcagaaggttcgataatgccgagcgccaccggaatggaaaacacaatcgttggacccatcatcgacccgagaattaa

SEQ ID NO: 263495 - DNA, 2103 bp, Klebsiella pneumoniae
ttgttttataaagaactcgaggataaattttctggcaaggagctggcgacgcctctattaaaaagcttctcagagaactgtagacaaaatggtcgtcatatctttagtaacaaggattttgtcattaagttttccacgtccgtcttacagactgataaaaaagaaattacgataattaataaaaatgaaaacacgacactcactcaaaccattgctccaatatttgaagaatacctgatggaaattttacctcaacgctcagacgctcttgataaacaaaaattaaatctaaaatcagatagaaaagaaaaagaatttccaagaattaaacttaatggtcaatgttattttccggggcgaccccaaaaccgtatagtatgccgacacattgctgcacaatatattaatgatatttatcagaatgttgattacaaaccccatcaagatgattactcttcagctgaaaaatttctcactcacttcaacaaaaaatgcaaaaaccagactttggcgttgatttccagccgtcctgaggggcgttgcgttgctgcctgcggtgatttcgggctagttatgaaagcatattttgacaagatggaatcaaatggcatcagtgttatggcagccatattattggtggataaccatgctttgacggtccggctaagaataaagaacacaactgaaggatgtacccattacgtggtttcggtttatgatccaaatgtaactaacgataaaataagaatcatgagcgaaagtaaagaggatattaaacactattcactgatggactttatgaatgtagattatagcctcctgaaatggtcaaatgatcatgttattaaccaatctgttgcaataattccagcacttccgaaagaacagctattgatgctaaaaggatctgtggatgaaataccccctccattatcacctgcaacgatgaatttgctaatggcaattggtcagaatcatcaacttacgcaactgatgactcaactccagaaaatgccagaactacatagaacagaaatgttgactgcctataatagtattaacctccccggtttatatttggctataaattatggtaatgcggatatcgttgagactattttcaattcattgtcagagccaggatatgaagggttactctcgaaaaaaaatctcatgcatattctggaggcaaaagataaaaatggtttttctggattatttttagcgatatcacgtaaggataaaaatgttgtaacctcgattctgaacgtcttacctaaactggccgcaacacatcatttagataatgaacaggtgtataaattcctgagtgccaaaaatagaacgtccagccatgttttataccatgttatggcgaatggtgatgccgacatgctgaaaattgttttggacgcgttacctttgttaattcgcacatgtcatttgactaaagaacaggtactcgatctcctgaaggcaaaggatttttatggttgcccaggactatacctggcgatgcaaaatggacatagcgatatcgtgaaagttattctcgaagcattaccctgtctggcccaggaaattaacatttcagcttccgatattgtagatcttctgaccgctaaaagtcttgcgcgcgacacgggtttgtttatggccatgcagcgcggacatatgaacgttattaagactatttttaacgcattacccactctgtttaatacgtttaaattcgataaaaaaaatatgaagcccctcctcctggcaaataattctaatgaatatcccggtttgttttcagcgatacagcataaacaacaaaacgttgtagagacggtttatcttgctttatctgaccatgcacgcctgtttggatttactgctgaagatattatggatttttggcaacataaagcgccacaaaaatactctgcctttgagttggcttttgaattggatcaccgggttattgctgaattaatccttaatacgataaataagatggctgaaagctttggctttacggataaccctcgatacattgcggagaaaaattatatggaagctttactcaaaaaagcatctccccataccgtacgctaa

SEQ ID NO: 263496 - DNA, 1737 bp, Klebsiella pneumoniae; identical to SEQ ID NO: 18605

SEQ ID NO: 263497 - DNA, 444 bp, Klebsiella pneumoniae; identical to SEQ ID NO: 18609

SEQ ID NO: 263498 - DNA, 918 bp, Klebsiella pneumoniae
atggaattaatttttttaggtacttcagccggtgtgccaacccgtacgcgcaatgtcacggcaatattgcttaacctgcaacatccgacccagagcggtctttggttgtttgactgcggtgaaggcacccagcatcagctactgcataccgcctttaaccctggaaaactggacaagatttttatcagtcaccttcatggcgatcatctctttggtttacccggcttgctgtgcagtcgttctatgtctggtattgtccaacccttaacgatttatggtccgcaaggtatccgtgaatttgtggagaccacgctgcggattagcggctcatggaccgattatccgctggaaattgtcgaaattggcgctggcgaaattttcgatgatggcctgcgcaaagtgaccgcttatccgctggaacacccactggaatgctatggctatcgtattgaagaacatgataaaccgggtgcattaaatgcccaggcattaaaagctgctggcgtaccgcctggcccactgtttcaggaattaaaagcgggcaaaacaatcatgctggaagatggaaggcagattaacggcgcagattacttagccgctccagtgccaggtaaagcgctcgctattttcggcgataccggcccctgcgatgccgcacttgacctggctaaaggtgtcgatgtcatggtgcacgaagcgacgctggatataaccatggaagccaaagccaatagtcgcggccacagctctacacgccaggctgcgacactggcccgtgaggctggagtcggtaagctaatcattacccacgtcagctcgcgctatgatgacaaaggttgtcagcacctgttacgtgaatgcaggtcaattttcccggcgactgaactggcgaatgatttcaccgtgtttaacgtttaa

SEQ ID NO: 263499 - DNA, 462 bp, Klebsiella pneumoniae; identical to SEQ ID NO: 9526

SEQ ID NO: 263500 - DNA, 306 bp, Klebsiella pneumoniae
atgtctaatcagtttggtgatacacgtatcgatgatgacctgacgctgcttagtgaaacactggaagaggtgctccgctcctctggcgatcccgccgatcagaaatatgttgagctgaaagcgcgtgcagaaaaagcgctggatgatgtgaaaaaacgggttagccaggcttcagacagttattactatcgggcgaagcaggctgtttatcgtgctgatgactacgtccacgaaaaaccctggcaaggaattggtgtgggcgcggccgttgggctggtactaggactgttgctggcacgccgttaa

SEQ ID NO: 263501 - DNA, 234 bp, Klebsiella pneumoniae
gtgcaatcacttactacggcgctggaaaatctactgcgccatttgtcgcaagagattccggcgacacccggcattcgggttattgatattcctttccctctcaaagacgcttttgatgccttgagctggctggccagtcagcaaacgtacccgcaattctactggcaacaacgtaatggtgatgaagaagctgccgtcctgggcgcgattacccgttttacgtcgttggactag

SEQ ID NO: 263502 - DNA, 840 bp, Klebsiella pneumoniae
ttgcctgggttacatttaaccaccacccgagaacaacactggccggacaaaacggggtggacgcaattaatcgaactggcaacgaaaaccatcgccgaaggtgagctcgacaaagtggtgcttgctcgggcaactgacctgcatttcgcaagtccggtcaatgcggcagcgatgatggctgccagtcgtcggcttaatctgaactgctatcatttttatatggcctttgatggcgaaaatgcttttcttggctcttcaccggaacggctatggcggcggcgtgacaaagcgctgcgtactgaagcgctggcgggaacggtagcaaatcatcctgatgataagcaggcgcagcggttgggtgagtggctgatggcggatgataaaaaccagcgtgagaacatgttggtggtggaagatatctgccaacgattacaggccgatacccaaacgctggatgttttaccgccgcaggtactgcgtctgcgtaaagtgcagcatcttcgccgctgtatctggacttcactcaacaaagcggatgatgtgatctgtttacatcagttgcagccaacggcagcagttgctggcttaccgcgcgatctggcgcgacagtttatcgcccgtcacgaaccgttcacccgagaatggtacgccggttctgcgggctatctctctttacaacaaagcgaattctgcgtttccctgcgctcagcaaaaatcagtggcaatgtcgtgcgactatatgctggcgcgggcattgtccgtggttccgaccccgagcaagagtggcaggaaatcgacaacaaagcggcagggctgcgtactttattacaaatggaatag

SEQ ID NO: 263503 - DNA, 1671 bp, Klebsiella pneumoniae
atgtcagtaagcgcatttaaccgacgctgggcggcggtcattctggaagcattaacgcgtcacggcgtaagacacatctgtatcgcccctggctcgcgttctacaccgttaacgttagcggcggcggagaattccgcattcattcaccacacccatttcgatgagcgtggactggggcatctggcgctggggctggcgaaagtcagcaagcagccggtggcggtgattgtgacctccggcacggcggtagcaaatctctatcctgcactgattgaagctgggttaaccggagaaaaactgatcctgttaaccgccgatcgcccgccggagctaattgactgcggcgcgaatcaggcgattcgtcagccgggaatgttcgcctctcaccccacgcacagtatttcactgccgcgcccgacccaggatatccccgcacgttggctggtttctaccatcgaccacgctctcggtacgcttcatgctggtggagtccatatcaactgcccgtttgctgaaccgctgtatggcgaaatggacgacaccgggcttagctggcaacagcggctgggcgactggtggcatgacgacaaaccgtggctgcgtgaagcgcctcgtctggaaagtgaaaaacagcgcgactggttcttctggcgacaaaagcgcggcgtggtggttgccgggcgcatgagtgcggaagagggcaaaaaagtcgcactgtgggcgcaaactcttggctggccgctgatcggtgacgtgctgtcgcaaaccggacagccgctgccgtgtgccgatctctggttaggcaatgccaaagcgaccagcgaactgcaacaggcgcaaattgtggtgcaactgggaagcagcctgacgggcaaacggctcctgcaatggcaggcaagctgtgaacccgaagagtactggattgttgatgacattgaagggcgacttgatccggcacaccatcgcggacgtcgcttaattgccaatattgccgactggctggagcaacatccggcagaaaaacgccagccctggtgcgttgaaatcccgcgcctggctgaacaggcaatgcaggcggttattgcccgtcgcgatgcgtttggcgaagcgcaactggcgcatcgcatcagcgactatttgcctgaacaggggcaattgtttgtcggtaacagcctggtggtacgtctgattgatgcgctttcgcaacttccggcaggttacccggtgtacagcaaccgaggtgccagcggtatcgacgggctgctctcaactgctgctggcgttcagcgggccagtggcaaaccgacgctggcgattgtgggcgatctctcagcactttacgatctcaacgcgctggcgttattacgtcaggtttccgcgccgctggtattaattgtggtgaacaacaatggcgggcaaattttctcgctgttgccaacgccgaaaaacgagcgcgagcgtttctatctgatgccgcaaaacgtccattttgagcacgccgccgcgatgttcgagctgaaatatcatcgtccgcaaaactggcaggaacttgaaacggcacttgccgacgcctggcgcacgccgaccaccacggtaattgaaatggtggttaacgacaccaatggtgcgcaaaccctccagcaactgctggcgcaggttagccatttatga

SEQ ID NO: 263504 - DNA, 759 bp, Klebsiella pneumoniae
atgatcctgcacgcgcaggcaaaacacggtaaaccaggtttaccctggctggtgtttttgcacggtttttccggcgattgccatgaatggcaagaagtgggcgaggtgtttgccaactactcgcggttgtatgttgatctcccaggtcacggtggttcggcggcgattcgcgtcgatggatttgatgatgtcaccggcttactgcgcaaaactctggttagttacaacatccttaacttctggctggtggggtactcgcttggcggacgggtggcgatgatggcggcttgtcaggggatgccggggctttgtggggttattgtcgaaggcgggcaccctgggttgcaaaatgctgaacaacgcacggaacgtcagcgttccgatcgccaatgggcgcagcgttttcgcacagaaccgttaacggcggtatttgctgactggtatcaacagcctgtttttgcctcactcaatgacgaacaacgccgggagctggttgcgctgcgcagcaacaataatggcgcaacgcttgccgccatgctggaggcgacttctctcgccgtccagcccgatttacgtgctaaccttagcgcccgcacatttgcgttttattatttatgtggtgaacgtgacagcaaattccgcgccctggcggcggaactggctgccgaatgccatgtcattcctcgcgccggacataacgcgcatcgggaaaatcccgctggcgtaatcgcaagtctggcgcagatcttgcgtttctga

SEQ ID NO: 263505 - DNA, 858 bp, Klebsiella pneumoniae
atgatttatcctgatgaagcaatgctttacgcaccggttgaatggcacgactgctccgaaggtttcgaggacattcgttatgaaaaatccaccgacggtatcgcaaaaatcaccattaatcgtccgcaggtgcgcaatgccttccgtcctctgacggtaaaagagatgatccaggcgctggcagatgcgcgttatgacgacaacatcggcgtgatcattctgactggtgcaggcgataaagcgttctgctccggtggtgaccagaaagtgcgtggtgattacggcggctataaagatgattccggcgtacatcacctgaacgtgctggacttccagcgtcagatccgtacctgtccgaaaccggttgtcgcgatggtggctggctactccatcggcggcggtcacgttctgcacatgatgtgcgacctgactatcgcggcagataatgccatcttcggtcagactggcccgaaagtcggttccttcgacggcggctggggcgcttcctacatggctcgcatcgtcgggcagaaaaaagcgcgtgaaatctggttcctgtgccgtcagtacgacgcaaaacaggcgctggatatgggccttgtgaacaccgtggtaccgctggcggatctggaaaaagaaaccgtccgttggtgccgcgaaatgctgcaaaacagcccgatggcgctgcgctgcctgaaagctgcactgaacgccgactgtgacggtcaggcaggtctgcaggagctggcaggtaacgccaccatgctgttctatatgacggaagaaggtcaggaaggtcgcaacgctttcaaccagaaacgtcagcctgacttcagcaaattcaaacggaatccgtaa

SEQ ID NO: 263506 - DNA, 963 bp, Klebsiella pneumoniae
atgcgtagcgcgcaggtataccgctggcagatccccatggacgcgggggtggttctgcgcgacaggcggttaaaaacccgcgacgggctgtacgtttgcctgcgtgagggcgagcgcgaagggtggggggagatctccccactgccgggcttcagccaggaaacctgggaagaggcgcaaagcgtgctgcttgcctgggtaaataactggctggcaggcgattgcgagctaccgcagatgccttccgtggcctttggcgtaagctgtgcattggcagaactgaccgatgcgttgccgcaagcagccaactaccgtgcggcaccgctgtgtaatggcgatccggacgatctgatcctcaaacttgccgatatgcctggcgagaaagtggcgaaggtcaaagtgggattgtacgaagccgtgcgcgacggcatggtggtcaatctgttgctggaggcaattccggatctgcatctgcgtcttgacgcgaaccgcgcctggacgccgcggaaaggccagcagtttgccaaatacgttaacccggattatcgccaccgcattgcttttctcgaagagccgtgcaaaacccgcgatgattcgcgagcgtttgcccgtgaaaccggcattgccattgcctgggatgaaagcctgcgcgagccagattttgcctttgtagctgaagagggcgtgcgcgcggtggttatcaagcccacgctcacgggcagcctggataaagtacgcgagcaggtgcaggcggcgcacgcgttggggctgacggcggtgatcagttcttctattgagtcgagcttaggcttaacgcaactggcgcggattgccgcctggttaacgccagacaccattccggggctggacacgctggatctgatgcaggcgcagcaggttcgtcgctggccgggtagcccgctaccgttagtggaagttgatgcactggagcggctgttatga

SEQ ID NO: 263507 - DNA, 351 bp, Klebsiella pneumoniae
atgatcttctctgactggccgtggcgtcactggcggcaagtgcggggagaagccatcgccttacgtcttaatgacgagcaacttaactggcgcgagctttgtgctcgcgtcgatgaattagcctccggctttgcggcgcaggacgttgttgagggcagcggcgtgatgttgcgggcgtggaatacgccgcaaacgctgctcgcctggctggcgttactgcaatgcggggcgcgggtgctgcccgtgaaccctcagctgccgcaaccgttgcttgaagaattgctgcccaatctgacgctgcaatttgcgctggtgccggatggggaaaacctgtctcttatacacatctga

SEQ ID NO: 263508 - DNA, 354 bp, Klebsiella pneumoniae; identical to SEQ ID NO: 36882

SEQ ID NO: 263509 - DNA, 327 bp, Klebsiella pneumoniae; identical to SEQ ID NO: 5216

SEQ ID NO: 263510 - DNA, 459 bp, Klebsiella pneumoniae; identical to SEQ ID NO: 6020

SEQ ID NO: 263511 - DNA, 132 bp, Klebsiella pneumoniae
atgtcagacaaactcataacgctggcgaagatcctctgtgtaattgtcggcatttcattttcactaatgctggttgctctttttctttccatggtctggatgatgttgtcttcgtcggggttgctggggtga

SEQ ID NO: 263512 - DNA, 183 bp, Klebsiella pneumoniae
atggcgaagtataaacgaattctgttgaggttgactatgaaaaatggccttgaactgaaagcgcctgtaactgatgacatcagcagagcactggcttttgccattaagtgggtggcggtcggtgttgctgtgtccccgatgctgtatgggctggcaaaactggtcattgcgttgaaatcgtga

SEQ ID NO: 263513 - DNA, 534 bp, Klebsiella pneumoniae; identical to SEQ ID NO: 20942

SEQ ID NO: 263514 - DNA, 891 bp, Klebsiella pneumoniae
atgaataaaaaatatgaactggttgttaaggggataaataattacggggataaggttactgttactgtgaagccggaaggtgacgggcaagcgtcgctgttgttgccagatgtggcgattagtcttgaccgtactgaaggtgccacgctggagttttacgaagctgaggcgaaaaagcaggcgaagcagtttttcatggatgttgctgccgggttatgtgaaggggatggtccgttgccggaaaagcgccccgtaattttagaggcgcaggatgtgttgataacctacaaaggaaagctaccgggaagaattacttgttctctgaagatgccgccgtcaacactgcggtcagaaaaagatgatgttgaatcacgtattgaaaaactggagagctacgtcgttgagctgaataagaaatggtcgatattggtgccttctggcgatgaaaagcagtttgctgcgtttgacgattattgtcggaaagtgatgagcagaaatctcgcagagtgtttcagtattcataatgataatttcagtgagctggaatgggagtgtaaccggccatcctttgttgtatccggtgatgctgggaaaataaccatctcagaaaatgggaaagtaacacctccatcgcaccagcacagtgaggagctcattgaatttgccattgattacctgaagaacaataaaaagcaggggctgatgaagcgcgttggccgttgcatgggatatcttcaggtagccgctgagattgaagcgctggccagtggtgctgataaggatgcaattgtgcgggaggctcttcttcgtgattttaatactccaccctttaaaaaagtgccggcttactggcttcatccggggctgacttatcttaaagtgcgtatttag

SEQ ID NO: 263515 - DNA, 216 bp, Klebsiella pneumoniae; identical to SEQ ID NO: 6015

SEQ ID NO: 263516 - DNA, 189 bp, Klebsiella pneumoniae; identical to SEQ ID NO: 6014

SEQ ID NO: 263517 - DNA, 336 bp, Klebsiella pneumoniae
atgaagtggattgtgattgatacagttatccagccatcatgcggaatatctttttcagtcatatggagtaaaataaaattaataatctggtatcaatcggatgctttcttacctcctgaaagtatatttacactgactcacacaggtatcatgctcaataacaaagtgctacctgtaaccatttacaacgtagtaccattcaataaaacattctggaatttaatcaaaaacagccaggaatgccctacaaatacagataacgtattgaatgaatgctttaataaccgttgcactctgcaaatatgtccttatgggctaaaacaacaaagtccataa

SEQ ID NO: 263518 - DNA, 1050 bp, Klebsiella pneumoniae
atgcttaatactgtaaaaatatccagttgtgagttaatcaacgccgactgcctggaatttatccggtcgttacccgaaaattctgttgacctgatagtcacggacccgccgtactttaaagtgaagcctgagggctgggataaccagtggaagggcgacgatgattacctgaagtggctggaccagtgtctggcgcagttctggcgggtgctgaaacctgccggaagtctttacctgttctgtggtcatcgcctggcatctgatatcgaaatcatgatgcgtgaacgcttcagtgtgctgaaccatattatctgggcgaagccgtccggatgctggaacggatgcaacaaggaaagcctgcgggcgtatttccccgccacagagcgcattctgttcgcggaacattatcaggggccgtatcgtccgaaagatgccgggtatgaggcgaagggcagggcactgaaacagcatgtgatggccccgctgatttcttactttcgtgatgcgcgcgcggccctggggataacggcaaaacagattgcagatgccacaggaaagaaaaacatggtgtcgcactggttcagtgccagtcagtggcagctaccgaacgaaagcgattatctgaaattacagtcgctgtttgcccgggtggcagaagagaaacatcagcggggagaactggaaaagtcccattaccaactggtcagcacatacagtgagctgaaccggcagtatacggaactgcagagtgaatataagcatctgcggcggtattttggcgtgacggcgcaggtgccgtacacggatgtgtggacgcataaaccggtgcagtactatccagggaaacatccgtgcgaaaaaccggcagaaatgctgcagcagataatcagcgcaagtagtcgtcctggtgatctggttgcggattttttcatggggtcgggttcaacggtaaaagcggcgatggcactggggcgtcgtgcgattggtgttgagctggagaccggacgttttgagcagacagtcagggaagttcaggatttaatcgtttga

SEQ ID NO: 263519 - DNA, 198 bp, Klebsiella pneumoniae
atgctaaaacagcaggatatgacagaaaccgccagagtggtgtttaatgaattaagcgttaccgaaccggcgacagtcggggagatagcgcagaatacttacctttcacgcgaacgctgccagttaatactgacccagctggttatggcgggtctggcagactatcagttcggttgttacagacgccttccgcagtga

SEQ ID NO: 263520 - DNA, 552 bp, Klebsiella pneumoniae
atgatatatccggaaattacaggcaaaagcggcgaacatttacgcctgaacacgctggaagcagtctggatccaggggaaattacggatgtgggggcggtggtcgtatatcggtgggggtaaatccggaaatatgtttaaccggttactggtttcgaaaaagctgacgaaaacagcagttaatgaggttttacgcagaatgaagaaatccgggctggaaaaaccggaacttgaggcattttttcgggatatgacaagaggaaagcagaagagctggttgtcacattgtacagacacagaggcgttgattattgatcgcgttatcagtgaggtgcttggggaatatcccgggctaatcaatgttctccggcaaaggtacgaaggacggggaatgagcaaactgaaaatggccgaaaggttaaatgcagatcatcctgattggtcgttggttacgtgcagacgccgaattgatcaatggttgggggtatctgaatttatgttatatgcccccatgcgcatggcttttgttacagagaaaaatgttgcaaactga

SEQ ID NO: 263521 - DNA, 516 bp, Klebsiella pneumoniae
atggaaaagaccacaacgcaggagttattagcgcaggctgaaaaaatctgcgcgcagcgtaatgtgcgcctgaccccacagcgcctggaagtgttgcgcctgatgagtctgcaggatggcgctatcagcgcttatgatctgcttgatttgctgcgcgaagctgagccgcaagccaagccgccaacggtttatcgcgcgctggattttcttcttgagcaaggttttgtgcataaggtggaatccaccaacagctatgtgctctgtcatctgttcgaccagcccacccatacttcagccatgtttatttgcgatcgctgcggcgcggtgaaagaagaatgtgcagaaggcgtggaagacattatgcatacgctggcggccaaaatggggtttgccctgcggcataatgtgattgaagcacatggactctgtgcggcatgcgtggaagtggaagcgtgtcgtcatcctgaacagtgccagcatgatcactctgtacaggtgaaaaagaaatcacgttaa

SEQ ID NO: 263522 - DNA, 210 bp, Klebsiella pneumoniae
atgaataaagatgaagccggcggtaactggaaacagtttaaaggtaaagtgaaagagcaatggggcaaactgaccgatgatgatatgacgatcattgaaggtaaacgtgatcaactggtcggtaaaatccaggaacgttatggttatcagaaagatcaggcagaaaaagaggtcgtggattgggaaacccgcaatgagtatcgctggtaa

SEQ ID NO: 263523 - DNA, 1326 bp, Klebsiella pneumoniae
atggcattcctcacttcatctgataaagcactctggcatctcgccttacccatgattttctccaatatcaccgttccgttgctgggactggtcgatacggcggtaattggtcatcttgatagcccggtttatttgggcggcgtggcggttggtgcaacggcgaccagctttctctttatgctgttgctgtttttgcgcatgagcactaccgggctgactgcgcaggcttatggtgccaaaaatcctcaggcattagcccgtgcgctggtgcaaccgttgctgttggcgttgggggccggggcgttaattgcgctgctgcgtacgccgattatcgatctggcgctgcatattgttggcggcagcgaagcggtgctagaacaggcgcggcgctttcttgaaatccgctggttaagcgcaccggcgtcgctggcgaatctggtattacttggttggttactcggcgtgcaatatgcccgtgcaccagtaattttgttagtggtcggcaatatcctcaacattgtgctggatgtctggctggtgatggggctgcatatgaacgtgcagggcgcggcgctggcgacggttattgcggaatatgcaacattgctgattggtctgctaatggtgcgtaaaatcctcaaacttcgcggaatatccggcgaaatgctgaaaactgcctggcgaggaaacttccgtcgcttgctggcgcttaaccgcgatatcatgctgcgctcgctgttgttgcaactctgtttcggcgcgatcaccgtacttggcgcgcgactggggagtgacattatcgctgttaacgcggttctgatgacgttactcacctttaccgcctatgcgctggatggttttgcctacgcggttgaagcacattctggtcaggcgtacggtgcgcgcgacggtagccagttactggatgtctggcgggcagcgtgccgccagtcggggattgtagcgttactgttttcggtggtttatttgctggcaggggaacacatcattgcgttactgacgtcgttaacccagattcagcagctggccgaccgctatcttatctggcaggtgattttgccgttggttggcgtctggtgttatctgctggacggcatgtttataggcgcaacgcgtgccgccgaaatgcgtaacagtatggcggtggccgccgcaggttttgcgctgacgctccttacgctgccgtggctgggtaatcatggtttgtggctggcattaaccgtctttctggctttgcgcgggctttctctggcggctatctggcggcgtcactggcgcaatggtacctggtttgccgcaacgtga

SEQ ID NO: 263524 - DNA, 369 bp, Klebsiella pneumoniae
atggccaataataccactggactcacccgaattatcaaagctgctggctattcctggaaaggtttacgcgctgcatggatcaacgaagcggcattccgtcaggaaggcgtagcggtattgttggcggtggtcatcgcctgctggctggatgtggacgcaattacccgcgtgctgcttatcagctccgtgatgctggtgatgattgtggaaatcctcaatagcgccatcgaagcagtggttgaccgaattggctctgaataccatgagctatccggacgcgctaaagatatgggatccgccgcggtgctgattgcgattatcgtcgccgtgattacctggtgcatcctgttatggtcgcattttggataa

SEQ ID NO: 263525 - DNA, 873 bp, Klebsiella pneumoniae
atggagtggagtctgacgcagaataagctgctggcgtttcatcgcttaatgcgtacggataagccaattggcgcgttactgctgctctggccaacattatgggcgttgtgggtggcgacaccgggcgttccccagctctggatcctggcggtgtttgtcgcgggtgtctggctgatgcgcgctgccggatgtgtggtgaatgattatgctgaccgcaagtttgatggtcatgttaagcgcacggcgaaccgaccgcttcccagcggcgcggtaacggagaaagaggcgcgcgcgctgtttgtcgtgctggtactgatttcgtttttactggtgctgacgctgaatacgatgaccattctgttgtcgattgccgcgctggcgctggcgtgggtgtacccgtttatgaagcggtatacccatctaccgcaagtggtgctgggcgcggcgtttggctggtcgattccaatggcttttgctgctgtgagtgagtcggtgccattgagttgctggttaatgttcctcgccaatattctctgggcggtggcttacgacacgcagtatgcgatggttgaccgcgatgatgatgtgaagattggcattaaatccaccgcaatcctgttcggccaatacgataaattgattattggtattttgcagattggcgtactggcgctgatggcgatcatcggtgagttaaatggcttaggctggggatattactggtcaattctggtggctggcgcgctgtttgtttatcaacaaaaactgattgccaaccgcgagcgtgaagcctgctttaaagcatttatgaataataactatgttggtctggtactgtttttagggctggcaatgagttactggcatttctga

SEQ ID NO: 263526 - DNA, 498 bp, Klebsiella pneumoniae
atgtcacaccccgcgttaacgcaactgcgtgcgctgcgctattttacagagatccctgccctggatacgcaactgcgcgactggctgttgctggaagattccatgacaaaacgttttgaacagcagggaaaaacggtgagcgtgacgatgatccgcgaagggtttgtcgagcagaatgaaatccccgaagaactgccgctgctgccgaaagagtctcgttactggttacgtgaaattttgttatgtgccgatggtgaaccgtggcttgccggtcgtaccgtcgttcctgtgtcaacgttaagcgggccggagctggcgttacaaaaattgggtaaaacgccgttaggacgctatctgttcacatcatcgacattaacccgggactttattgagataggccgtgatgccgggctgtgggggcgacgttcccgcctgcgattaagcggtaaaccgctgttgctaacagaactgtttttaccggcgtcaccgttgtactaa

SEQ ID NO: 263527 - DNA, 534 bp, Klebsiella pneumoniae; identical to SEQ ID NO: 9566

SEQ ID NO: 263528 - DNA, 903 bp, Klebsiella pneumoniae
gtggtcaaccatttcctgcgcgtcttgctcggtgattttacccgcctgcaggtcacgctcgatgtagatatccaggaagctggaggtacgaccgaaggacattgccgcgccgttctgagatttcacggcagccaggtaaccgaagtaggtccactgaatcgcttcctgagcggtggtcgccggaccggagatgtcatagccatatttagcggccatctctttgatctggcccagtgcgcggtgttgttcagcgatttcttcacgcagacggatggtcgcttccaggtcttcgccgctttccagtttcgcttgcagagagttgaactgggcgaatttgtctttcatcaggaagtcgataccgtacagcgcaacgcgacggtagtcaccgatgatacgaccacgaccgtaagcatccggcagacccgtcagcacgccggatttacggcagcgcaggatgtccggggtatagacgtcgaaaacgccctggttgtgagttttacggtactctgtgaagatttttttcagcatcgggtccagctcgcgattatacgctttgcaggaaccttcaaccattttgataccaccgaacgggatgatcgcacgtttcagcggcgcttcggtctgcagaccaacgattttttccagacctttctcgatatagcccgcgtcgtgagaggtgatggtggaagccagggcagtgtcaaaatcaacaggcgcgtgagtgcggttttcctgttttacaccttccattacggtgtcccacagcttggtggtcgcttcagtcgcgccagccaggaaggattcgtcgccttcatatggggtgtagtttttctgaataaagtcacggacgttgacttcattctgccagtcacctttcgcaaaaccttcccaggctgtggctaa

SEQ ID NO: 263529 - DNA, 171 bp, Klebsiella pneumoniae
atgtccgcgctgcgcaaatgcagaatggtcgaaggccagccgggcgaaacggcttacctgacagcaaatatgtcggttttattacgtcaagccgatagattctgttgtgtgacggcggccgcgttttaccgtcggcgagttttagccattgcggaccgtgtcactgaatga

SEQ ID NO: 263530 - DNA, 207 bp, Klebsiella pneumoniae
atggaactctacagagaatatcctgcatggcttatctttttacgccgtacttatgcggttgcagcgggcgttctggcgctgcctttcatgcttttctggaaagaccgcgcccgcttttacagctacctgcaccgcgtctggtcgaaaaccagcgagaaaccggtgtggatggatcaggccgaaaaggcaactggtgatttttactga

SEQ ID NO: 263531 - DNA, 1674 bp, Klebsiella pneumoniae
atggctgcgcaagggttcttactaattgccacgtttttactggtattaatggtgctggcgcgtcccttaggtagcgggctggcgcggctgattaatgatattcctcttcctggtacgacgggcgttgaacgcgtactctttagcgcgcttggcgtctctgaccgcgagatgaactggaagcagtatctctcagccattcttggcctgaatatactggggctggcggtgctgttttttatgttgctcggtcagcactatctgccgcttaatccacagcagttgccggggctgtcgtgggatctggcgctgaataccgccgtcagctttgtcacgaataccaactggcaatcttacagcggtgaaaccacgttgagctatttcagccagatggcgggcttaacggtgcaaaactttctttctgccgccagcgggattgcggtgatttttgccctcatccgtgcgtttacccgccagagcatgagcacactcgggaatgcctgggtcgatctgttacgcatcacgttatgggtgctagtccctgtggcgttgttgattgcattgttttttattcaacaaggtgcgttgcaaaactttctgccctatcaggcagtgaataccgttgaaggagcgcaacagctgttaccaatgggtccggtggcttctcaggaagcgatcaagatgctcggcactaacggtggtggcttctttaatgccaactcgtcgcatccgtttgaaaacccaaccgcactgaccaacttcgtgcagatgctggcgatcttcttgatcccaacagcgctgtgctttgcctttggtgaagtggcgggcgatcgccgccaggggcgcatgttactgtgggcgatgtcagtgatttttgtcatctgcgtaggcgtggtgatgtgggcagaagttcagggtaatcctcatctgctggcactgggcgcggacagcagcatcaatatggaaggtaaagagagccgtttcggcgtgctggtcagtagcctgtttgcggtcgtgactacggcggcttcctgcggcgcggtgattgcgatgcatgattcgtttaccgcccccggtggcatggtgccgatgtggctgatgcaaattggtgaagtggtattcggcggtgtcggttctggtctttacggcatgatgctgtttgtcctgctggcggtgtttattgccgggctgatgattggtcgtacaccggaatatctgggtaaaaaaatcgacgtacgcgagatgaaactgaccgcactggcgattctggtcaccccgacgctggtgctgatgggcgcggcgctggcaatgatgaccgacgccggacgtagcgccatcctcaacccgggcccgcatggttttagcgaagtgctgtacgccgtgtcgtccgccgctaacaacaacggcagcgcctttgccggattaagcgccaactccccattctggaactgtttgctggcgttctgcatgtttgttggtcgcttcggggtgattattccggtgatggcaattgctggttcgctggtgagtaaaaagagccaacccgccagctccggcacactgcctacgcacggcccgctgtttgttggcctgttaatcggcaccgtgttgctggttggcgcactgacctttatccctgccctggcgcttggcccggtggcggaatatctctcctga

SEQ ID NO: 263532 - DNA, 2049 bp, Klebsiella pneumoniae; identical to SEQ ID NO: 9583

SEQ ID NO: 263533 - DNA, 573 bp, Klebsiella pneumoniae; identical to SEQ ID NO: 9582

SEQ ID NO: 263534 - DNA, 2685 bp, Klebsiella pneumoniae
atgaataacgaacccttacgtcccgaccccgatcgtctgctggaacaaactgccgcgccgcatcgggggaagctgaaagttttcttcggtgcctgtgcaggcgtcgggaagacctgggcgatgctggcagaagcccagcgactgcgggcgcaagggctggatattgtggttggcgtggtagaaacccacgggcgaaaagataccgccgccatgctggaagggctggctgttctgccgttaaaacgccaggcgtaccgtgggcggcatatcagcgagtttgatctcgatgccgccctcgcccgccgtccggcgctgatcttaatggacgaactggcgcacagtaatgcgccaggttctcgtcatcctaaacgctggcaggatatcgaagaactgctggaagctggcattgatgttttcacaaccgtcaacgttcagcatctggaaagtctgaatgatgtggtcagcggcgtcaccggaattcaggttcgggaaaccgtgcccgatccttttttcgatgccgccgacgacgtggtgctggtggacttgcccccagacgatctgcgccagcggctgaaagaaggcaaagtctatattgccgggcaggcggagcgcgccattgaacattttttccgcaaaggcaatctgatcgccctgcgcgaactggcactgcgccgtactgccgatcgcgttgatgagcaaatgcgcgcctggcgggggcatcctggcgaagagaaagtctggcacacgcgcgacgcgatccttttatgcatcgggcataacaccggcagcgaaaaactggtccgcgcggcggcgcggctggcgtcacggctgggaagcgtctggcacgcggtgtatgttgaaacccctgccctgcaccgcttaccggagaaaaaacgtcgggcaattctcagcgccttacgtctggcgcaggagctgggcgcggagacggcaacactttctgatccagcggaagagaaagcggtagtgcgttatgcccgtgaacataatctcggcaagattattctcggtcgcccggcctcgcgccgctggtggcgtcgggaaacgtttgctgaccgactggcgcgaatcgcccccgatctcgatcaggtgctggtcgcgcttgatgaaccacccgcccgcacgataaacaacgcgccggatagccgctcttttaaagacaagtggcgggtacagattcagggatgcgtggttgccgccgcgttatgcgccgttatcaccttaattgccatgcagtggctgatggcgtttgatgccgccaacctggtgatgctgtatctgcttggcgtggtggtggtggcgctgttttatggacgctggccttcggtggttgccaccgttattaatgtggtgagtttcgatctcttttttatcgccccacgcggcacgctcgccgtctctgatgtgcaatatctgctgaccttcgcggtgatgttaaccgtcgggctggtgatcgggaaccttactgcgggtgtgcgttatcaggcgcgggtagcccgttaccgcgagcaacgcacacggcacttatatgaaatgtcgaaagctctggctgtgggccgcagtccgcaggacatcgccgccaccagcgaacaatttattgcctccacgtttcatgcccgcagtcaggtgttgttgcccgatgacaacggtaaattgcagccgttaacacatccgcaaggaatgacgccgtgggacgatgccatcgcgcagtggagttttgataaaggcctgcctgcgggcgcgggcaccgacacgttacccggtgtaccgtaccagattctgccgttaaaaagcggcgagaaaacctacggactggtggtggtagaaccggggaatctgcgtcagttgatgatcccggaacagcagcgcctgctggagacatttacgctgttagtcgccaatgcgcttgagcggctgacgctgaccgccagcgaagaacaggcgcggatggcaagcgaacgagaacagatccgcaacgccctgctggcggcgctttcgcatgatttacgcacgccgcttacggtgctgttcggtcaggcagaaatcttaacgctcgatctggcaagcgaaggatcgcctcacgcccgccaggccagcgagattcgccagcatgtgctgaacacgacccgactggtgaataatctactggatatggcgcgaattcagtccggcggctttaatttgaagaaagagtggttaacgctggaagaagtggtcggcagcgcgctgcaaatgctggaaccgggtttatcgtcgcccatcaatctttctctgccagaaccgctgaccttaatccacgttgacgggccgctctttgaacgggtgctgattaatctgctggagaacgcggtgaaatacgcgggggcgcaggccgaaattggtatcgatgcccacgttgagggcgagaagctacaactggatgtctgggataacggccccggtcttccgccaggccaggagcagacgatatttgataagtttgctcgcggaaataaagagtcggcggtaccgggtgtcgggcttgggctggcaatttgtcgggcgattgtggatgtacacggcggcaccattaccgcgttcaaccgaccggaaggtggtgcctgttttcgtgttacacttccccagcaaactgcccctgaacttgaagaatttcatgaggatatgtga

SEQ ID NO: 263535 - DNA, 678 bp, Klebsiella pneumoniae
gtgacaaacgttctgattgttgaagatgaacaggctattcgtcgctttctgcgcacggcgctggagggcgacggtatgcgcgtctttgaggccgaaacgctgcaacgcggcttgctggaagcggcaacccgtaagccagatttgattattctcgatctcggcctgcccgatggtgatgggattgagtttatccgcgacctgcgccagtggagcgcggtgccggtgattgtgctttccgcacgtagcgaagagagcgataaaatcgccgcgctggatgccggagcggatgattacctgagtaagccatttggtattggcgaattgcaggcccgtctgcgcgtcgctttacgtcgccactccgccaccgctgcgcccgatccgctggtgaaattttccgatattaccgtcgatttagccgcccgcgtgatccatcgcggtgaggaagaggtgcatctcaccccaattgagtttcgcctgctggcagtgttgcttaataatgcgggaaaagtgctcacccagcgccagctccttaaccaggtgtgggggccaaacgcggtcgaacacagtcattatttgcgtatttatatggggcatctgcgacaaaaactggagcaagatcccgcccgcccccgccacttcattactgaaaccggtattgggtatcggtttatgctttga

SEQ ID NO: 263536 - DNA, 1047 bp, Klebsiella pneumoniae
atgaacagaactgacgaactccgtactgcgcgtattgagagcctggtaacgcccgccgaactcgcgctacggtatcccgtaacgcctggcgtcgccacccatgtcaccgactcccgccgcagaattgaaaaaatactgaatggtgaagataagcgactgttggtcattattggcccctgctcgatccacgatctcaccgctgcaatggagtacgccacccgtctgcagtcgctgcgcaaccagtaccagtcacggctggaaatcgtaatgcgcacctattttgaaaaaccacgaactgttgtcggctggaaagggctaatctccgatccagatttaaacggcagctatcgggtaaatcacggtctggagctggcgcgcaaattacttttacaggtaaatgagctgggcgtccctaccgcgactgagttcctcgatatggtgaccggtcagtttattgctgatttaatcagttggggcgcgattggcgcacgtactaccgaaagtcagatccaccgtgaaatggcttcggcactctcctgtccggtaggttttaaaaatggtaccgatggcaacacgcggattgccgtagatgctatccgcgcagcccgcgccagccatatgttcctctcgccagacaaaaacggtcagatgaccatctatcagaccagcggcaacccgtatggccacattattatgcgtggcggcaaaaaaccgaattatcatgccgatgatatcgccgcagcctgcgatacgctgcacgagtttgatttacctgaacatctggtggtggatttcagccacggtaactgccagaagcagcaccgtcgccagttagaagtttgtgaggatatttgtcagcaaatccgcaatggctctacggcgattgctggaattatggcggaaagtttcctgcgcgaaggaacgcaaaaaatcgtcggcggtcagccgctcacttacggtcaatcgattaccgacccgtgtctgggctgggaagataccgaacgcctggtcgaaaaactcgcctctgcggtagatagccgcttctga

SEQ ID NO: 263537 - DNA, 192 bp, Klebsiella pneumoniae
atgcgttatacggatagcagaaaactcacgcctgaaacggatgccaatcacaagaccgcttccccgcagcccatccggcgaattaccagccagacactgttaggtccggatggcaaactgattatcgatcatgacgggcaagaatatctgctccgtaaaactcaggctggcaagctgctgttgaccaagtag

SEQ ID NO: 263538 - DNA, 1437 bp, Klebsiella pneumoniae
atgaccctgtcttttattacccgttggcgcgatgaattgccagcaacctatacaacactttcccctacgcctttaaataatgcccggctgatttggcataatgccgaactggctaacacgctgggtattccatcgtcactgtttaaaaatggcgcaggtgtctggggtggcgaaaccctactgcctggtatgtcaccactggcgcaggtttacagtggtcatcagttcggcgtctgggcgggccaactgggtgatgggcgcggcattttactcggcgaacaacggcttgctgatggcactacaatggactggcatctgaaaggtgctggcctgacgccttattcgcgaatgggtgatggacgggcggttttacgttcgacgatacgagaaagtctcgccagtgaggcgatgcattatctgggcattccgacgacccgcgctttaagtatcgtcaccagcgattcgccagtgtatcgggaaacggtggagccaggcgcgatgctgatgcgtgtggcaacaagtcatctgcgctttggtcatttcgaacatttttactatcgccgcgagccggaaaaggttcgtcagttagctgactttgccattcgtcattactggtcacatcttgcagatgatgaggacaaataccgtctctggtttaccgatgttgtcgcacgtaccgcatcgttaattgcccaatggcagacggtcggctttgctcatggggtgatgaataccgacaacatgtcgctgttggggctgacgcttgattacgggccgtttggttttcttgatgattacgaacccggttttatttgtaatcactcggatcaccaagggcgttacagctttgataatcaacctgccgtcgcgttgtggaatttacagcgtctggcgcagacattgtcaccatttgtcgccgttgatgccctgaatgaggccctggatagctatcagcaggttttgttgacgcattatggacaacggatgcggcagaaactgggcttcatgacggagcaaaaagaggataacgcgctactgaatgaattattcagtctgatggcgcgagagcgcagcgattatacccgcacattccgcatgctgagtctgaccgagcagtacagcgcggcgtcaccgctacgtgatgagtttatcgatcgtgcggcatttgatgactggtttgcccattatcgggtacgtttgcaacaagacgaggttaccgatagtgagcgtcagcagctgatgcaaagcgttaacccagctctggtgttgcgcaactggttggcgcaacgggcgattgaagcggcagaaaagggtgatatgacggaattgcaccgcctgcatgaggcgttgcgaaatcctttcagcgacagagatgatgactacgtcagtcgtccacctgactggggtaaacggctggaagtcagctgctcgagttaa

SEQ ID NO: 263539 - DNA, 714 bp, Klebsiella pneumoniae
atgaagatttttttggagaatctttatcattctgattgctatttcctgccgataagagataaccagcaagaccttgtcggcgttgagttaattacccatttctccagtgaagatggtacggttcgtatcccgacgagtcgggttatagcgcaacttaccgaggagcaacattggcaattattttcagagcagttggaattactaaaatcatgccaacacttttttattcaacataaactctttgcttggcttaatttaacgccacaagtggctactttattattagacagggataattacgcaggcgaactattaaaatatccgtttattgaactgttgattaatgagaattacccgcatctcgatgaaggaaaagataatcgcgatcttttttccttatcgcaaatgtatccccttgtgttaggtaatttgggcgcaggcaatagcacaatgaaagcggtttttgatggtcttttcacccgcgtcatgctggataaaagttttattcagcaacaaatcacgcatcgctccttcgaaccgtttattcgtgcgatccaggcgcaaatttccccatgttgcaattgcatcatcgcggggggcattgatacgccagaaataatggcacagattaccccctttgatttccatgctctccagggatgcctgtggcctgccgttcccataaatcagataacgacgttggttcagcgataa

SEQ ID NO: 263540 - DNA, 465 bp, Klebsiella pneumoniae
atgcgtttctgccttattttgatcacagcactgtttctggccgggtgtagccaccataaagcaccgccgccaaatgccagactttctgattcgattaccgttattgccggtttgaacgaccagctacaaagctggcatggcacgccgtatcgttatggtggcatgacgcggcgcggtgtggactgttcgggatttgtggttgtgacgatgcgcgatcgtttcgatttgcagctgccccgagaaaccaaagaacaagcctctatcggcacgcaaattgataaagacgagttgctgcctggtgacctggtctttttcaaaacgggttccggacaaaatggtttgcatgtaggtatttacgataccaacaaccaatttatccacgcctctaccagcaagggagtgatgcgttcctcactcgataatgtctattggcagaaaaatttctggcaggcgagacgaatctag

SEQ ID NO: 263541 - DNA, 750 bp, Klebsiella pneumoniae
atgtctattgtgatgcagttacaggatgttgcggaatctacccgcctggggccgctttctggcgaggttcgggctggggagatcctgcatctggtggggccgaacggcgcgggtaagagtaccttactggcgcgaatggccggaatgaccagcggtaagggaagcattcagttcgcggggcaaccactggaagcatggtccgcaacaaaactcgcgctgcatcgcgcctatctttcacaacaacagacgccaccgtttgcaatgccggtctggcactacctgacactgcatcagcacgataaaacgcgtaccgaactactgaatgatgtcgcaggggcgctggctcttgatgacaaactcggacgtagcaccaatcaactttccggcggcgaatggcaacgcgtacgtcttgctgcggtggtgctgcaaatcacaccacaagccaatcccgcaggtcaattgctgcttcttgatgagccgatgaacagtcttgatgttgcgcaacaaagtgcgttagacaaaattctgagcgcgctgtgtcagcaaggactggcgattgtgatgagcagtcacgatctcaaccatacattgcgtcatgcgcatcgggcatggttgctaaaaggtggaaaaatgctggccagtggacgcagggaagaggtgctcacgccgccaaatctggcgcaggcctatgggatgaattttcgccgtctggatatcgaaggtcacagaatgctgatttcgaccatctga

SEQ ID NO: 263542 - DNA, 552 bp, Klebsiella pneumoniae
atgcaagattccattctgacgaccgtagtgaaagatatcgacggtgaagtgaccacgctggagaagtacgccggtaatgtgctgttgattgtcaatgtcgcctcaaagtgtggcttaacgccgcaatatgagcagttggagaatattcagaaagcctgggccgatcgtggttttgtggtgctgggattcccgtgcaaccagtttctggagcaagaaccgggcagcgatgaagagattaaaacttactgcaccactacatggggggtgacgttcccgatgttcagtaagattgaagttaatggcgaaggacgccatccgctgtatcaaaaattgattgccgcagcgccgaccgcagtcgcgccggaagagagcggattctatgcccgtatggtcagcaaaggtcgtgcaccgctgtaccttgatgatattttatggaattttgagaaatttttagttggcagggacggattggtcatccagcgtttttccccggatatgacgccggaagatcccattgtgatggaaagcattaaactggcgttggcgaaataa

SEQ ID NO: 263543 - DNA, 981 bp, Klebsiella pneumoniae
atgctgacacttgcccgccaacaacagcgacaaaatattcgctggttattatgcctgtcagttttgatgctgctggcgcttctcttaagcctttgcgccggtgaacaatggatttcgcccggtgactggtctactcctcgtggcgaactgttcgtctggcaaattcgcctgccacgtacgctggctgtattgctggttggtgcggcgctggctatatccggcgcagtaatgcaggcgttgtttgaaaatcctctggcagaacctggactacttggcgtctctaacggcgcaggcgtagggcttatcgccgcggtgttgcttgggcaagggcaactcccaaactgggcactagggctgtgtgcgattgctggcgcgcttatcatcactttaatactcttacgtttcgcccgtcgtcatctttcgaccagtcggttattgctggctggcgttgcattagggattatctgtagcgcactaatgacgtgggctatctacttttccacctctgttgatttacgtcagctgatgtactggatgatgggcggttttggcggcgtagactggcggcaaagctggctgatgctggcattgatccccgtgttgttgtggatctgttgtcagtccaggccgatgaatatgttagcacttggcgagatctcggcgcggcaactgggtttacccctgtggttctggcgcaatgtgctggtggcagcgaccggctggatggttggcgtcagtgtggcgctggcgggtgctatcggctttattggtctggttatcccacatattctccggctgtgtggtttaaccgatcatcgcgtattacttcccggctgcgcgctggcaggggcgagcgcattgctgctggccgatattgtagcgcgcctggcattagctgccgcagagctgcctattggcgtggtcaccgcaacgttgggtgcgccggtgtttatctggttattgttaaaagcaggacgttag

SEQ ID NO: 263544 - DNA, 2949 bp, Klebsiella pneumoniae
atgcactcctggaaaaagaaacttgtagtatcacaattagcattggcttgcactctggctatcacctctcaggctaatgcagcgaccaacgatatttctggtcaaacttacaatactttccatcactacaacgacgccacctatgctgatgacgtttactatgatggttatgtaggctggaataactatgccgctgatagttattacaacggcgatatctatccggtcattaataacgctaccgttaacggcgtgatttctacctactatctggatgacggtatttctactaataccaacgccaatagcctgacaatcaaaaacagcactattcacggcatgatttattccgagtgcatgacaactgattgtgctgatcgtgcggatgactactaccatgatcgtctggcgctgaccgttgataattcaacgatcgatgacaactacgaacactacacatataacggcacctacaataatgccgctgacactcatgttgtaaatgtatttaacattggtactgccatcactctggatcaggaagttgatctgtccatctctaataactctcatgtagcaggtattacgctgactcagggttatgagtgggaagatatcgacgacaacactgtcagcactggtgtaaacagcagcgaagtgtttaataacaccatcactgttaaagattcaaccgtgacctctggttcatggactgatgaaggtacaactggttggttcggtaatacaggtaatgccagcgattacaatggtaaaggttggaatgctgacgatatcgcattagctgttattgcacatcctgctgctgataacgccatgcaaaccactgcaacattcgataattccacactgatgggcgatgtattcttctcaagtaactttgatgagaacttcttcccgcatggtcgtgatagctatcgtgatgctgacggtgatgtagatactaacggttgggatggtactgatcgcctggatctgaccctgaacaatggcagcaagtgggtcggtgcggcaatgtctgcgcatcagattggtgttgatactgatgacgatggtgtaaatgactcctatacatatggaatcaatactgaagccactgcaactctgatcgacatcgcagctaacagcctgtggccttcatcaactgttggtgtagaaaacagcgactctgaatatagcgaatttgatcacatcatcggtaacgaagtttaccagagcggtctgttcaatgtaaccctgaacaccggttcacagtgggataccaccaaaacttctctgattgatactctgagcatcaacagtggttcaacggttaatgttgctgattcaacgctgatttctgactctatctctctgacaggtctttctgcgctgaacatcaacgaagatggtcatgttgcaactgattcactgactgtcgacaacagtaccgtaaccatttctgatgaagtttctgctggttgggctgtaggtgatgctgctctgtatgccaacaacatcaaagtgactaacgacggtattctgaatgtcggtaacactgcggcgaatgctctgcaggttgatactctgaacctgaccagcaccactgatactagtggtaacattcacgctggtgtgttcaacatcgaaagcaaccgcttcgtacttgatgccgacctgaccaacgaccgtaccaacgatactaccaagtcaaactacggttatggcttaatcgcaatgaactctgatggtcacctgaccattaacggtaacggcgataacgacaacactgcttctatcgaagctggtcagaacgaagttgataacaacggtgaccatgttgcagctgcaaccggtaactacaaagttcgtatcgacaacgctacaggtgctggttctatcgctgactacaacggcaacgagctgatctacgttaacgacaaaaacagcaacgcgaccttctctgctgctaacaaagctgacctgggtgcatacacctatcaggctgaacagcgtggtaacaccgttgttctgcaacagatggagctgaccgactacgctaacatggcgctgagcatcccgtctgcgaacaccaatatctggaacctggaacaagacaccgttggtactcgtctgaccaactctcgtcatggcctggctgataacggcggcgcatgggtaagctacttcggtggtaacttcaacggcgacaacggcaccatcaactatgatcaggatgttaacggcatcatggtcggtgttgataccaaaattgacggtaacaacgctaagtggatcgtcggtgcggctgctggcttcgcgaaaggtgacatgaatgaccgtactggtcaggtggatcaagacagccagactgcctacatctactcttctgctcacttcgcgaacaacgtctttgttgatggtagcttaagctactctcacttcaacaacgacctgtctgcaaccatgagcaacggtacttacgttgacggtagcaccaactccgacgcttggggcttcggtttgaaagccggttacgacttcaaactgggtgatgctggttacgtgactccttacggcagcgtttctggtctgttccagtctggtgatgactaccagctgagcaacgacatgaaagttgacggtcagtcttacgacagcatgcgttatgaactgggtgtagatgcaggttataccttcacctacagcgaagaccaggctctgactccgtacttcaaactggcttacgtctacgacgactctaacaacgataacgatgtgaacggtgattccatcaataacggtactgaagggtctgcggtacgtgttggtctgggtactcagttcagcttcaccaagaacttcagcgcctataccgatgctaactacctcggtggtggtgacgtagatcaagactggtccgcgaacgtgggtgttaaatatacctggtaa

SEQ ID NO: 263545 - DNA, 624 bp, Klebsiella pneumoniae
atgttatctgtagttaaacctcttcaggaatttggtaagctcgataaatgtttgtccagatatggcacgcgcttcgagtttaataatgaaaagcaagttatattttcaagtgatgtcaatagcgaagatactttcgttattttagagggcgttatctctctgcgtagagaagaaaacgtacttatcggtattacccaggctccttatattatgggactggctgatggtttaatgaaaaacgatataccatacaaattaatatcagaaggaaattgtacgggatatcatctaccagccaaacaaaccattacccttattgaacaaaatcaactctggcgagatgctttttactggttagcctggcaaaatagaattctggaattacgtgacgtacagctcattgggcataattcctacgaacaaatccgcgcaacgttattatcaatgattgactggaatgaagaattacgctcacgtattggtgtgatgaattatattcatcaacgtacacgcatatcgcgttctgtcgtcgcagaagttctcgctgctttacgtaaaggcggctatatcgaaatgaataaaggcaaactggtcgctatcaaccgtttgccttcagagtattaa

SEQ ID NO: 263546 - DNA, 1158 bp, Klebsiella pneumoniae
ttgaaacgttgtctgcttttttctgccgtgctgtgtgcggcgtcattgacctccgtccatgcggcgcagccgatcactgaaccggagttcgcctctgatattgtcgatcgttatgccgatcatattttttacggcagcggtgccacggggatggcgctggttgttatcgacggtaaccagcgcgtctttcgcagttatggcgaaacgcgacctggtaataacattcgcccgcagctggattcggtcatacgtattgcttccctcaccaagctaatgaccagtgagatgctggtgaaattgctcgaccaggggaccgtgaagttaaacgatccgctaagtaaatatgctccgccaggcgcacgcgtaccgacctacaacgggacgcccattacgctggtgaatctggcaacccataccagcgccctgccccgtgaacagcccggtggcgcggcacatcgtccggtatttgtctggccaacgcgcgagcaacgctggaaatacctttccactgccaaactaaaagccgcgccgggcagccaggccgcgtactccaacctcgcattcgatctgctggcagatgcactggcgaatgcgtccggcaagccttatacccagttgtttgaagagcagattacccgtccattggggatgaaagacaccacctacaccccctcgccggatcagtgccgccgtttaatggttgctgagcgcggtgccagtccgtgcaataacacgctggcggcaattggcagcggcggagtctattccacgcctggcgatatgatgcgctggatgcagcagtatttgtcatctgatttttatcagcgcagtaaccaggcagatcgcatgcagacgttgatttatcagcgagcgcagtttacaaaagtgattggcatggatgtccccggcaaagcggatgcgcttggtttaggctgggtatatatggccccgaaagagggtcgtccagggattattcagaagacaggtggtggtggcggtttcattacctatatggcgatgatcccgcagaagaacattggcgcatttgtggtggtcactcgttcgccattgacgcgctttaaaaatatgagcgatggcatcaatgacctggtgaccgaactgagcgggaataaaccgttggtcatccccgcgtcctga

SEQ ID NO: 263547 - DNA, 1221 bp, Klebsiella pneumoniae
atgtttaagtcttttttcccaaagccgggaacgttttttctctcggcctttgtttgggcattgattgccgttatcttctggcaagcaggtgggggtgattgggtggcgcgtatcaccggagcttccgggcaaatcccgattagcgccgcgcgtttctggtcgttggatttcctgattttttacgcttactacattgtttgtgtaggactctttgcattgttctggtttatctacagcccgcatcgttggcaatactggtcaatactcggtactgcactgatcatcttcgtcacctggtttttggtggaagtcggggtcgccgtcaacgcctggtatgcgccgttctatgatctgattcaaaccgcgctaagttcgccgcataaagtcaccatcgaacaattttaccgcgaagtgggcgtctttctggggattgcgctgatcgctgtggtgatcagtgtgctgaacaacttctttgtcagtcactacgtgttccgctggcgtacagcgatgaacgaatattacatggcgaactggcaacaactgcgtcatatcgaaggtgccgcacagcgtgtgcaggaagacaccatgcgttttgcttcaacgctggagaatatgggcgtcagttttatcaacgccatcatgacgttgatcgccttcctgccggtgctggtaacgctctccgcgcatgtgccggagctgccaattgtcgggcacattccgtatggtctggtgattgccgctatcgtctggtcgctgatggggaccggattactggcagtggtagggatcaaactgccggggctggagtttaaaaaccagcgtgtagaggctgcctaccgtaaagagctggtttatggtgaagacgatgccacgcgcgcgacgccgcctacggtacgcgagctgtttagcgctgtacggaaaaactatttccgcctctattttcactatatgtatttcaacatcgcccgcattctctatttgcaggtcgataacgttttcggtttgttcttgctgtttccgtcaattgtcgccggtacgattacgctcggcctgatgacgcagattaccaacgtttttggtcaggttcgtggagctttccagtacctgattaactcatggaccacactggttgagttgatgtctatctacaaacgtctgcgcagctttgaacatgagctggatggtgacaaaattcaggaagtaacccataccttgagctaa

SEQ ID NO: 263548 - DNA, 1095 bp, Klebsiella pneumoniae
atgtcgcgcgtcaatcatctatcttcgctgtcattgttggcggttctggttttagtggggtgtagtagtcaggctccgcaaccgttgaaaaagggcgaaaaagcgatagatgtggcgagcgtcgtgcggcagaagatgcctgcgagcgtgaaagaccgcgatgcctgggcgaaagatctcgccaccacgtttgaaagtcaggggctggcaccgacgctggaaaacgtctgctcggtgctggcggtggcgcagcaggagtcaaattatcaggcagatccggccgttccgggcttaagcaagatcgcctggcaagagattgaccgtcgtgctgaacggatgcacattcctgcttttctggtgcataccgcgctaaaaatcaaatcgccaaacggcaaaagctatagcgaacggttagattcggtgcgtacagaaaagcaattgagcgcgatttttgacgatctgatcagcatggtgccaatggggcagacgttgtttggttcgcttaatccggtgcgcaccggtgggccgatgcaggtcagcattgcctttgccgaacagcataccaaagggtatccgtggaaaatggacggtacagtccgtcaggaagtcttcagtcgtcgcggcgggttgtggtttggtacttaccatttactgaattatcccgccagctatagcgcgccgatataccgttttgctgattttaacgctggctggtacgccagccgtaatgccgcgtttcagaacgcagtcagtaaggccagcggcgtgaagctggcactggacggtgatttaattcgttacgacagtaaagaacccgggaaaaccgaactggcaacgcgcaaactggcgggaaaactggggatgagcgacagcgaaattcgccgtcagttagagaaaggtgacagcttctcttttgaggagacggcgctgtacaagaaagtttatcaacttgccgaagctaaaacgggtaaatcactaccccgcgaaatgttgcctggcattcaactggaaagcccgaaaatcacccgcaacctgactacggcctggtttgcgaagcgcgtagacgaacggcgggcgcgttgtatgaaacagtga

SEQ ID NO: 263549 - DNA, 309 bp, Klebsiella pneumoniae
atggctgatttcaccctgtcaaaatcgctgtttagcggaaaatatcgcaatgcctcttcaacgcctggcaacattgcctatgcgttgtttgtgctgttttgcttttgggctggggcgcaattgctgaacctgctagtgcatgtgcccggcgtctatgagcgtttaatgcaggtccaggaaacaggtcgcccacgggtggaaattggtttaggtgtcggcaccattttcgggctgatcccgtttttagttggctgcctcatttttgcagtagtggcgctatggctgcactggcgacatcgccgccagtaa

SEQ ID NO: 263550 - DNA, 258 bp, Klebsiella pneumoniae
atgaaaccgctttgccatatcctgatcatgatagggcacaccatcacggtagtttggattgtgccgccatgccatattcttatcagtaagatgctcaccggtgatacggttgaaattattgacgtcgatattgatgttgtcgccgttgtgttgccagtcattaccgtcacgatgaccgccatcgtggtgatgataatcatcatcgtcatgatgatgatggtcatgatcgtcgtcatcccagtcgatgctgctgaatag

SEQ ID NO: 263551 - DNA, 363 bp, Klebsiella pneumoniae
atggattacgaatttctgcgtgatattaccggagtggtaaaggtgcgtatgtccatggggcatgaagtggtcgggcactggtttaacgaagaggtgaaagaaaacctggccttgcttgatgaagtagaagacgccgcgcgcacgctcaaaggtagcgaacgttcctggcagcgggcagggcatgagtacacgctatggatggacggcgaagaagtgatggttcgcgccaatcaactggaattcgctggcgatgaaatggaagaggggatgaactactacgacgaagaaagcctgtcgctatgcggcgttgaggattttctgcaggtggtggctgcttatcgtaatttcgtgcagcaaaagtaa

SEQ ID NO: 263552 - DNA, 867 bp, Klebsiella pneumoniae
atggccgaaaaaaaacagtggcatgaaacgctacacgaccagtttgggcagtactttgcggtagataacgttctgtatcatgaaaagaccgatcaccaggatctgatcatttttgagaacgctgcatttggccgcgtaatggcgctggatggcgtagtacaaaccaccgagcgcgacgagtttatctatcatgagatgatgacccatgttccgctactggcccacggtcacgcgaaacatgtgctgattatcggcggcggcgacggtgccatgctgcgtgaagtgacccgacataaaaacgttgagtcaatcacgatggtggaaatcgatgcgagtgtcgtgtcgttctgccgtcagtatctacccaaccataacgctggtagctacgacgatccgcgctttaaactggtgatcgacgatggcgtcaatttcgttaatcaaaccaaccagacttttgatgtcattatctccgactgcaccgatcctatcggtcccggcgaaagtctgttcacctcagcattttatgaaggttgtaaacgctgcctgaatcctggcggtatcttcgtcgcacaaaacggcgtctgctttttacagcaggaagaggctatcgacagtcatcgcaaactcagccattacttcagcgacgttggcttttatcaggcggcgatcccgacctattacggcggcatcatgacctttgcatgggcgacagataacgatgccttacgccatctctcaaccgaaattattcaggcgcgttttctcgcttctggcctgaaatgccgttattacaatccggcaatccatacggcagcttttgccttacctcagtatctgcaagacgcactggcttcacagccgtcctaa

SEQ ID NO: 263553 - DNA, 348 bp, Klebsiella pneumoniae
atgaagacgtttttcagaacagtgttattcggcagcctgatggccgtctgcgcaaacagttacgcgctcagcgagtctgaagccgaagatatggccgatttaacggcagtttttgtctttctgaagaacgattgtggttaccagaacttacctaacgggcaaattcgtcgcgcactggtctttttcgcccagcaaaaccagtgggatctcagtaattacgacaccttcgacatgaaaaccctcggtgaagacagctaccgcgatctcagcggcattggcattcccgtcgctaaaaagtgcaaagccctggctcgcgattccttaagcctgcttgcctacgtcaaataa

SEQ ID NO: 263554 - DNA, 1188 bp, Klebsiella pneumoniae
atgcaaggtaatgcactaaccgttttattatccggtaaaaaatatctgctattgcaggggccgatgggaccttttttcaatgatgtcgccgaatggttagagtcattaggacgtaacgctgtgaatgttgtattcaacggcggggatcgtttttactgccgtcatcgacaatacctggcttactaccagacaccgaaagagtttcccggatggttacgggatctccaccgacaatatgactttgacactatcctctgctttggcgactgccgcccattgcataaagaagcaaaacggtgggcaaagtcgaaaggtatccgcttcctggcatttgaagaaggatatttacgcccgcaatttattactgttgaagaaggcggagtgaacgcatattcatcgctaccgcgcgatccggatttttatcgtaagttaccagatatgcctgcgccgcatgttgagaacttaacaccttcaacaatgaaacgtattggtcatgcgatgtggtattacctgatgggctggcattaccgtcatgagtttcctcgctaccgccaccacaaatcgttttccccctggtatgaggctcgttgctgggttcgtgcatactggcgcaagcaactttacaaggtaacacagcgtaagctattaccgaggttaatgaacgagttggaccagcgttattatcttgccgttttgcaggtatataacgatagccagattcgtaaccacagcaattataacgatgtgcgtgactatattaatgaagtcatgtactcattttcacgtaaagcaccgaaagaaagttatttggtgatcaagcaccatccaatggatcgtggtcacagactctatcgaccattaattaagcggttgagtaaggaatatggcttaggtgagcgcgtcatttatgtgcacgatctcccgatgccggaactattacgccatgctaaagcggtggtgacgattaacagtacggcggggatctctgcactgattcataacaaaccactcaaagtgatgggcaatgccctgtacgacatcaagggcttgacgtatcaagggcatttgcaccagttctggcaggccgattttaaaccagatatgaaactgtttaagaagtttcgtgggtatttattggtgaagacgcaggttaatgcggtttattatgggggctttaaaaaaaaatga

SEQ ID NO: 263555 - DNA, 2028 bp, Klebsiella pneumoniae
atgattggtatttactcgcctggcatctggcgtattccgcatctggagaaatttctggcgcaaccgtgccagaaactttctctgctgcgccctgttccacaagaagttgatgctatcgccgtgtggggacatcgtcccagcgcggcgaaaccagtcgccatcgccaaagcagcgggaaaacccgtcattcgtctggaagatggatttgtgcgttcgctggatcttggcgtcaatggcgagccgccgctttctctggtggtggatgattgttgcatttactacgatgccagcaagccttcagcactggagaaactggtacaagataaagccggaaatacagctctgataagccaggccagagaagcgatgcacaccatcgtgaccggggatttgtcgaaatataacctggcacctgcgtttgtggctgatgagtcagaacgttcagacatcgttctggttgtcgatcagacatttaatgatatgtcagtgacgtatggcaatgctggcccgcatgagtttgctgccatgctggaagccgcgatggcggaaaattctcaagccgaaatttgggtgaaggtgcatccggatgtcctggaaggaaagaaaacaggttatttcgccgctctgcgcgccacgcaacgagtacgtttaattgccgagaatgtcagcccgcagtcgctgttgcgacacgtttcccgggtttacgtcgtgacctcccagtacggctttgaagccttgctggcaggaaaaccggtgacatgcttcggccagccctggtatgcaggctggggcttaaccgacgatcgccatccgcagtccgctttgttatctgcccgacgcggttctgccacgctggaggaactttttgccgctgcatacctgcgttactgtcgctatatcgatccgcaaacgggagaagtaagcaatctatttaccgtgctgcaatggctgcaattacaacgtcgacatctgcaacagcgtaatggttatttatgggcgccaggcttaacgctgtggaagtcagcgatcctgaaacctttcttacgaacggcgacaaaccggctgagtttttcacgtcgctgtactgcggcaagcgcctgcgtggtatggggtgtaaagggagaacagcaatggcgagccgaagcgcagcgaaactcactgccattatggcgaatggaagatggttttctgcgttcatccggacttggctctgacctgctgccaccgctatcgctggtgctggataaacgcggaatctactatgacgccacgcgccccagcgacctggaagtgctgcttaatcatagccagctaacgctggcgcagcagatgcgagctgaaaaattacgccagcgactggttgaaagtaaactgagcaagtacaacctgggagccgatttctctctaccagccgaagccaaagataaaaaagttatcctggtgccgggtcaggtagaggacgatgcctctattaaaacaggcactgtctcgattaagagcaaccttgatttattacgcacagtacgcgagcgtaatccgcacgcctacattgtttataaaccgcacccggatgtactggtggggaatcgcaagggcgatattccggcagaactaattgctgaactcgctgattatcaggcactggacgcagatattattcaatgcattcagcgctcagatgaagtgcacaccatgacatcattgtccgggtttgaagcgttattacatggcaagcaagttcattgttacggcctgccattctatgccggttggggtttaaccgttgatgaacatcactgcccgcgccgcgagcaaaaattaacgttagcagatttgagctatcaggcgttgattgtttatccaacctatatccacccaacacggctacaacctattacggtagaagaagctgcggaatatttaatcaagacgccgcgcaagccgatgtttattacccgaaaaaaagcggggcaggtaatacgctattaccgcaaattaattatgttctgcaagatcagatttggctaa

SEQ ID NO: 263556 - DNA, 741 bp, Klebsiella pneumoniae
atgagcaaagcagttattgtcattccggctcgctatggctcctcgcgcctgccgggtaagccactgctcgatattgttggtaaaccgatgatccagcatgtttacgagcgtgcgttacaggtggcgggcgttgcggaagtttgggtggcaacagacgatccgcgtgttgaacaggccgtacaggcgtttggcgggaaagccatcatgacgcgcaacgatcatgaatccggcaccgatcggctggtcgaggtgatgcataaagtcgaggcagatatctacattaacctgcagggcgacgaaccaatgattcgcccgcgggatgtagaaacgctgctacaaggaatgcgtgacgatcccgcgttgccggtggcaacgctatgccacgcgatttctgccgcagaagcggctgagccaagcacggtaaaagtggttgtgaatacccgccaggatgcgctttatttcagccgctcaccgattccgtatccgcgtaatgctgaaaaagcgcgctacctgaaacacgtcggtatttacgcttatcgtcgcgatgtgctgcaaaactacagccagttaccggagtccatgccggagcaggcggaatcactggagcagctaaggttgatgaacgcggggatcaacatccgcacatttgaggttgccgcaaccggtccgggcgtcgacaccccagcatgcctggaaaaagtgcgcgccctgatggcacaggaactggctgaaaacgcatga

SEQ ID NO: 263557 - DNA, 1677 bp, Klebsiella pneumoniae
atgaaattatttaaatcaattttactgattgccgcctgtcacgcggcgcaggccagcgcgaccattgatattaacgctgacccaaacctgacaggagccgcgccgcttaccggtattctgaacggacagaagtcggatacgcaaaacatgagcggcttcgacaataccccgccgcccgcaccgccggtggtaatgagccgtatgtttggtgctcaacttttcaacggcaccagcgcggatagcggtgcgacggtaggattcaaccctgactatattctgaatccgggtgatagcattcaggttcgcttgtggggtgcgttcacctttgatggtgcgttacaggttgatcccaaaggtaatattttcctgccgaacgttggtccggtgaaagttgctggcgtcagtaatagtcagctaaatgccttggtcacatccaaagtgaaggaagtataccagtccaacgtcaacgtctacgcctccttattacaggcgcagccagtaaaagtgtacgtgaccggatttgtgcgtaatcctggtctgtatggcggtgtgacgtctgattcgttactcaattatctgatcaaggctggcggcgttgatccagagcgcggaagttacgttgatattgtggtcaagcgcggtaaccgcgtgcgctccaacgtcaacctgtacgacttcctgctgaacggcaaactgggactttcgcagttcgccgatggtgacaccatcatcgtcgggccacgtcagcatactttcagcgttcagggcgatgtctttaacagctacgactttgagttccgcgaaagcagcattcccgtaacggaagcgttgagctgggcgcgccctaagcctggcgcgactcacattacgattatgcgtaaacaggggctgcaaaaacgcagcgaatactatccgatcagttctgcgccaggccgtatgttgcaaaatggcgataccttaatcgtgagcactgaccgctatgccggcaccattcaggtgcgggttgaaggcgcacactccggtgaacatgccatggtattgccttatggttccactatgcgtgcggttctgggaaaagtccgcccgaacagcatgtcgcagatgaacgcagttcagctttatcgcccatcagtggctcagcgtcagaaagagatgctgaatctctcgctgcaaaagctggaggaagcctcactttctgcccagtcatccaccaaagaagaagccagcctgcgaatgcaggaagcacaactgatcagccgctttgtggcgaaagcacgcaccgtggttccgaaaggtgaagtgatcctcaacgaatccaatattgattctgttctgcttgaagatggcgacgtcatcaatattccggagaaaacatcgctggttatggttcatggcgaggtgctgttcccgaacgcggtgagctggcagaaagggatgaccaccgaggattacatcgagaaatgcggtggcctgacgcaaaaatcgggtaacgccagaattatcgtcattcgtcagaacggtgcggcagtcaacgctgaagatgtagattcactcaagcctggcgatgagattatggttctgccgaaatatgaatcgaaaaacattgaagttacccgtggtatttccaccatcctctatcagctggcggtgggtgcaaaagtgattctgtctttgtaa

SEQ ID NO: 263558 - DNA, 1149 bp, Klebsiella pneumoniae
atgttgataaaagtgaagtctgccgtatcctggatgcgtgctcgtctgtctgccatctcactggcagatatccaaaaacacctggcgaaaatcatcattctggcaccgatggcggtgctgctgatctatctggctatcttcagccagcctcgctatatgagcgagtcgaaagtcgccattaaacgctcggatgatttaaacagcggcagcctgaattttggtctgcttctgggtgcctctaaccccagttccgcagaagatgcgttgtatctgaaagagtacatcaactcgccggatatgctggcggcgctggataagcaactaaattttcgtgaagcgtttagccacagcgggctcgattttcttaatcatcttagcaaggatgaaaccgcagaaggcttcctgaagtactacaaggaccgtatcaacgtctcgtatgacgataaaaccggattactgaatattcagacgcagggctttagcccggagtttgcgcttaagtttaaccaaaccgtgctgaaagagtcagagcgctttatcaatgagatgtcacatcgcatcgcgcgtgaccagcttgcctttgcagaaacggagatggaaaaggcacgccagcgtctggacgccagcaaagcggaattgctctcttatcaggacaacaacaacgttctggatccacaggcacaggcacaggcggcgagcacgttagtgaatacgctgatgggccagaagatccagatggaagcggacctgcggaacttgctgacgtatctgcgtgaggacgccccgcaagttgtgagtgcgcgtaatgcgattcagtcattgcaggcacaaattgacgaagaaaaaagcaaaatcactgcgccacagggtgacaagctaaaccgtatggcagtggattttgaagaaatcaaatcaaaagtagagttcaacaccgagctgtacaaactgaccctgacctccattgaaaagacccgtgtagaagcggctcgtaagctcaaggtgctgtcagtgatcagttcgccacagttgccgcaggaatcgtcttttccaaatatcccttatttgatcgcctgctggttactggtgtgctgcctgctgttcggcaccctgaaactgttgctggctgttattgaagatcaccgagactaa

SEQ ID NO: 263559 - DNA, 984 bp, Klebsiella pneumoniae
atgtctgaaagacatttacctgatgaccagagcagtactatcgatccatatctaattacctctgttcgccagactctggcagaacaaagcgcagcattacaaaacttgtctaaacaactggattccgggcagtaccagcgtgtccttaatttgataatgaactgtaaagggcacgttattctttcgggaatgggtaaatcagggcatgtcggtcgtaaaatgtcagcgacgctggcctctacgggtacgcctagtttctttattcatcctgcagaagctttccatggcgatctgggcatgattacgccttacgatcttctgatccttatttctgccagcggtgaaacggatgaaatcctcaagctagttccttcactgaaaaatttcggcaaccgaattatcgccattaccaataatggaaattccacgctggcgaaaaatgctgatgccgtgctggaactccacatggcgaatgaaacctgcccgaataatcttgcaccaacaacgtctaccacgctgacgatggcgatcggcgatgcgctggcgattgccatgatccaccaacgcaaatttatgccgaatgattttgcgcgctatcacccgggcggttcattaggtcgtcgcctgctgacccgcgttgctgatgtcatgcagcatgatgttcctgcggtacagctggatgcgtcatttaaaaccgtgattcaacgtatcaccagcggatgccagggaatggtgatggtagaagacgcagaaggtgggctagcgggcattatcaccgacggtgacctgcgtcgctttatggaaaaagaggattctctgacatccgccacggctgcgcagatgatgacacgtgaaccgctgacgctaccggaagacaccatgatcattgaagcggaagaaaaaatgcaaaagcaccgcgtctcaacgttattggtgaccaacaaggcaaataaagtcactggccttgtgcgcattttcgactaa

SEQ ID NO: 263560 - DNA, 528 bp, Klebsiella pneumoniae
atgatttttctcatgacgaaagattcttttcttttacagggcttttggcagttgaaagataatcacgaaatgataaaaatcaattccctgtcagagatcaaaaaagtaggcaataaacccttcaaggttatcattgatacctatcacaatcatatccttgatgaagaagcgattaaatttctggagaaattagatgccgagagaattattgttttggcaccttatcacatcagtaaactaaaagctaaagcgcctatttattttgtcagccgcaaagaaagtatcaaaaatcttcttgagattacttatggtaaacacttgccccataagaattcacaattatgtttttcacataatcagttcaaaattatgcaactgattctgaaaaataaaaatgaaagcaatatcacgtcgacgctcaatatttcgcaacaaacattaaagattcagaaattcaacattatgtacaagctgaaactaagacgtatgagcgacatcgtcaccctgggtatcacatcttatttttag

SEQ ID NO: 263561 - DNA, 279 bp, Klebsiella pneumoniae
atgagggatttacagaccagcggcatagtggggttgtcagccagtaaggtgggatacaggcatagtgatcgacatggtgaggtcaacgacaaaaaaaatgttgccgttctgccaacagttcctgccagcattcgggcaacgaagggttctactggtggatacacataccaggggaataaagtcgttttaacctctcctttagtaatcaccgggggtaatgaaatcagcatctgcatccctcgtcatgccagccatcaatttcagttgcttatgtcctga

SEQ ID NO: 263562 - DNA, 1158 bp, Klebsiella pneumoniae
atgaacagaagaagaaagctgttaataccgttgttattctgcggcgcgatgctcaccgcctgcgatgacaaatcggcggaaaacgccgccgccatgacgcctgaggtcggtgtcgtcacactctcccccggttcggtcaatgtattgagcgaattgcccggtagaaccgttccttatgaagttgccgagatacgtccccaggttggcggtattatcattaaacgcaactttatcgaaggcgataaagtgaaccagggcgattcgctgtatcagattgatcctgcacctttacaggccgagctgaactccgccaaaggcacgctggcgaaagcgctctctaccgccagcaatgcccgcatcacctttaaccgccaggcatcgttgctgaagaccaactacgttagccgtcaggattacgacaccgcgcgcacccagctgaatgaagcagaagccaatgtcaccgtcgccaaagcggctgttgaacaggcgacgatcaatttgcaatacgcgaatgtcacctcgccgattacgggcgtcagcgggaaatcgtcggtgaccgtcggcgcactcgttaccgctaatcaggcagattcgctggttaccgtacaacgtctggacccgatttatgtcgatctcacgcagtcggtgcaggatttcttgcgtatgaaagaagaggtcgccagtgggcaaatcaaacaggttcagggcagtacgccagtacagctcaatctggaaaatggtaaacgttacagccagaccggcacgctgaaattctccgacccgacggtggatgaaaccacgggctccgtgacgttacgggcgattttccccaacccaaatggtgacttgctgcctggcatgtacgttacggcattagtggatgaaggtagccgccagaatgtattactggtgccgcaggaaggcgtcacccacaacgcccagggtaaagcaacggcgctcattctggataaagacgatgtcgtgcagctacgcgaaatcgaagccagcaaagccatcggcgaccagtgggttgtcacctctggcttgcaggctggcgatcgggtgatcgtttccggtttgcaacgcattcgtccgggtatcaaagcacgagcaatttcctccagccaggaaaacgccagcaccgaatcgaaacaataa

SEQ ID NO: 263563 - DNA, 3114 bp, Klebsiella pneumoniae
atggctaactattttattgatcgcccggtttttgcctgggtacttgccattattatgatgcttgcaggcggtctggcgatcatgaacttaccggttgcgcagtatccgcagattgcgccaccgaccataaccgtcagcgcaacctatccaggtgccgatgcgcaaacggtagaagactcggtcactcaggtgattgagcaaaatatgaatgggcttgatggcctgatgtacatgtcttcaaccagtgatgcggcgggcaatgcctctatcactctgaccttcgagactgggacatcgcctgatatcgcacaggttcaggtgcaaaataaactgcagctcgctatgccttcattacctgaagcggtgcagcagcaggggattagcgtcgataagtcgagcagtaatatcctgatggtagcggcgtttatttctgataacggcagcctcaaccagtacgatatcgcggactatgtagcgtctaatatcaaagacccgctaagccgtaccgcgggcgttggtagcgtacagctctttggttccgagtacgccatgcgtatctggctggacccgcaaaaactcaataaatacaatctggtaccttccgatgttatttcccagattaaggtgcagaacaaccagatttctggtggtcaactgggtggcatgccacaggcggcagaccagcaactaaacgcctcgatcattgtgcagacgcgtctgcaaacgccggaagaatttggcaaaatcctgttgaaagttcagcaagatggttcgcaagtgctgctgcgtgatgtcgcccgcgtcgaacttggagcggaagactattccaccgtggcgcgctataacggcaaacctgctgccgggatcgccatcaaactggctgccggagcaaacgccctggatacctcgcgggcagtcaaagaggagctgaaccgcttatcagcctatttccccgcaagtctgaagacggtttatccttacgacaccacgccgtttatcgaaatttctattcaggaagtttttaaaacactggttgaggctatcatcctcgtcttcctggtcatgtatctgtttttgcagaatttccgtgccacaatcatcccgacgattgccgtaccggtggttattctcgggacgtttgcgatcttgtcggcggtcggtttcaccatcaacacgttaactatgttcgggatggtgctggcgatagggttactggtggatgacgccatcgtggtggtggagaacgtcgagcgtgtcattgcggaagataaactaccgccgaaggaagcgacgcataaatcgatggggcagatccaacgtgcgctggtcgggattgccgttgttctttccgcagtgtttatgccgatggcctttatgagcggtgcaaccggggagatctaccgccagttctccatcacgctgatctcctccatgctgctttcagtatttgtggcaatgagcctgacccctgccctgtgcgccaccattctgaaagccgcgccggaaggcggtcacaaacctaacgccctgttcgcacgcttcaacacgctgtttgaaaaatcaactcagcactataccgacagtacccgctcgctgttgcgttgtaccggtcgctacatggtggtctacctgctgatttgcgccgggatggcggtgctgttcctgcgcacgccgacctctttcttaccagaagaggatcagggggtatttatgaccaccgcgcagttaccttccggtgccaccatggttaacaccacgaaagtgctgcaacaggtgacggattattatctgactaaagagaaagataatgttcagtcggtatttaccgttggcggctttggcttcagcggccaggggcaaaacaacggcctggcgtttatcagtctcaagccgtggtctgaacgtgtcggtgaggaaaactcggttaccgcgatcattcagcgggcaatgattgcgttaagcagtatcaataaagccgtcgtcttcccgttcaacttacccgcggtggctgaactgggtaccgcgtcaggttttgatatggaactgctggacaacggtaacctggggcacgaaaaactaacccaggcgcgaaacgagctgttatcactggcagcgcaatcaccgaatcaagtcaccggtgtacgcccgaacggcctggaagatacgccgatgttcaaagtgaacgtcaacgccgcgaaagccgaggctatgggtgtggcgctgtctgatatcaaccagacaatttccaccgccttcggcagcagctacgtgaacgacttcctcaaccaggggcgggtgaaaaaagtgtatgtccaggcaggcacgccgttccgtatgttgccggataacatcaaccaatggtatgtacgcaacgcctctggcacgatggcaccgctttcggcctattcgtctaccgaatggacctatggttcaccgcgactggaacgctacaacggcatcccgtcaatggagattttaggtgaagcggcggccgggaaaagtaccggtgacgccatgaaatttatggcagacctggtcgctaaacttccggcaggcgtcggctactcatggaccggactgtcgtatcaggaagcgttatcctcaaatcaggctcccgcgctgtatgccatttcactggtcgtggtgttcctcgccctcgccgcactttatgagagctggtcaattccgttctcggtgatgttggttgtaccgttaggcgtcgttggcgcattactggccaccgatctacgcggcttaagtaatgacgtctacttccaggttggtttgctgaccaccatcgggctttccgccaagaacgccatcctgattgtcgaatttgccgttgagatgatgcagaaagaagggaaaacgccgatagaggcaatcatcgaagcggcgcggatgcgtttacgcccaatcctgatgacctctctggcctttattctcggcgtgctgccgctggttatcagtcatggtgccggttctggcgcgcaaaacgcggtaggtaccggcgtgatgggcgggatgtttgccgcaacagtgctggcaatttacttcgttccggtctttttcgttgtagtggaacatctctttgcccgctttaaaaaagcgtaa

SEQ ID NO: 263564 - DNA, 282 bp, Klebsiella pneumoniae
atgtttgggattattaagctgacaattcatacgattacgggaatgtgggtcagtattgtgttgtttaaattgatgacgaatggctggagtggtttctactttcagtgctgtgtactaagcctggtattcctgacggttagctggttgttgagtggtgaatggttagcgggaaagagtaaggctgaaccctcacgttcaaccttactctcatttacacgttacgcttttttaaagcgggcaaagagatgttccactacaacgaaaaagaccggaacgaagtaa

SEQ ID NO: 263565 - DNA, 729 bp, Klebsiella pneumoniae
atgactcatgtctgctcggtgatcctcgttcgtcgttcattcgatatttatcatgaacagcaaaaaatatcgttgcacaacgagagtatcctgttactggataaaaatttggcagacgattttgcgttttgttcaccggatacgcgacgactggatatcgatgagctgacagtttgccattacttacaaaatattcgtcagataccacgcaatttagggttacatagcaaagaccgtctgttaattaaccagtcaccccccatgccgctggtgacggcgatttttgatagtttcaatgactccggggtaaattcaccgatactgagcaaaatgctctatctttcctgtttatcgatgttttctcataagaaagaactgatccccttacttttcaatagtatcagtactgtttcaggaaaagttgaacgccttattagctttgatatcgccaaacgttggtatctgcgcgatatcgcggaaagaatgtataccagcgagagtctaatcaaaaaaaagttgcaggatgaaaatacctgtttcagtaaaatattactcgcctccaggatgtcgatggccagacgattactcgagttacgtcaaattcctctgcatactattgcggaaaaatgtggctatagcagtacatcgtactttataaacacatttcgacaatattatggtgtaacgccacatcagtttgcgcaacattcgccaggtaccttttcctga

SEQ ID NO: 263566 - DNA, 825 bp, Klebsiella pneumoniae
atgcaatcactacatgggaattgtctaattgcgtacgcaagacataaatatattctcaccatggttaatggtgaatatcgctattttaatggcggtgatctggtttttgcggatgcaagccaaattcaagtggataagtgtgttgagaatttcgtattagtttcaagagacacgctttcattatttctcccgatgctcaaggaggaggcattaaaacttcatgcacataaaaaagttccttcattactcgttcataactgtaccagagatattcctgtttttcaggaagttgcgcaactatcgcagaataagaatcttcgctatgcagaaatgctacgtaaaagggcattaatctttgcgttgttatctgtttttcttgaggatacgcagtttataccgttacttctgaacgtgttgcaaccgaatatgcgaacacgagtttgtacggtcatcaataataatatcgcccatgagtggacattagcccgaatcgctagcgaattgttgatgagtccaagcctgttaaagaaaaaattgcgcgaagaaggtacgtcatattcacagttgcttactgagtgtaggatgcagcgtgctttacaacttattgttatatatggtgtttcaattaagcgagttgcagtatcctgtggatatcacagcgtgtcgtatttcatttacgtttttcgaaattattatgggatgacgcccacagagtatcaggagcgatcggcgcaggaattaccgaactgtggctcggcggcaagtatggctgcgcaagggaatttttacggcactgaccgttctacggaaggaataagattatag

SEQ ID NO: 263567 - DNA, 606 bp, Klebsiella pneumoniae
atgaaattgttctacaaaccgggcgcctgctctctcgcttcccatatcaccctgcgtgagagcggaaaggattttacgctcgtcagtgtggatttaatgaaaaaacgtctcgaaaacggtgacgattactttgccgttaaccctaagggacaggtacctgcattgctgctggacgatggtactttgctgacggaaggcgtagcgattatgcagtatcttgccgacagcgtccccgaccgccagttgctggcaccggtaaacagtatttcccgctataaaaccatcgaatggctgaattacatcgccaccgagctgcataaaggcttcacacctctgtttcgccctgatacaccggaagagtacaaaccaacagttcgcgcgcagctggagaagaagctgcaatatgtgaacgatgctctgaaggatgagcactggatctgcgggcaacgatttacaattgctgatgcctatctgtttacggttctgcgctgggcatacgcggtgaaactgaatctggaagggttagagcacattgcggcatttatgcaacgtatggctgaacgtccggaagtacaagacgcgctgtcagcggaaggcttaaagtaa

SEQ ID NO: 263568 - DNA, 201 bp, Klebsiella pneumoniae
atgcaggttaattgtttttttaatagcgaaattttctattcattcgtgatcaagatcacgatgctgtggcaatgtaaaaacattgcaagaactaggttaaaatcatttaaatttacacacgcaacaaatattgacctacaaaacattacactggctatttttcagaaactggactatctcactaggaaaaacgctaaatag

SEQ ID NO: 263569 - DNA, 621 bp, Klebsiella pneumoniae
atgctgaaaactatccgaaaacacggcattacgttggcactatttgcagcgggttctacagggttaactgcggccatcaaccagatgaccaaaacgacgattgctgaacaggccagtctgcaacaaaaagcgttatttgatcaggtgctgccagccgaacgctataacaatgcgctggcacagagttgctatctggtaactgcgccagagttaggtaaaggtgagcatcgggtttacatcgccaaacaggatgacaaaccggtagccgccgttctggaaacaaccgcgccagatggctattccggtgcgattcagctgctggtgggagccgattttaacggcacggtacttggcacgcgcgtgacagagcaccacgaaacgccagggcttggcgataaaatcgaactgcgcctttctgactggatcacccattttgcgggtaaaaaaatcagtggtgcggatgatgcgcactgggcggtgaagaaagatggtggtgatttcgaccagttcaccggcgcgacgattactccgcgcgcggtggttaatgcggtaaaacgcgccggattgtacgctcagacgttaccgtcacaactttctcaacttcctgcctgtggagaataa

SEQ ID NO: 263570 - DNA, 1059 bp, Klebsiella pneumoniae
atggtattcagaatagctagctccccttatacccataaccagcgccagacatcgcgcattatgctgttggtgttgctcgcagccgtgccaggaatcgcagcgcaactgtggttttttggttggggtactctcgttcagatcctgttggcgtcggtcagtgctctgttagccgaagctctcgtactcaaactacgcaagcagtcggtagccgcaacgttgaaagataactcagcattgctgacaggcttattgctggcggtaagtattccccccctcgcgccatggtggatggtcgtactgggtacggtgtttgcggtgatcatcgctaaacagttgtatggcggtctggggcaaaacccgtttaatccggcaatgattggttatgtggtcttactgatctccttcccggtgcagatgaccagctggttaccgccacatgaaattgcggtcaacatccctggttttatcgacgccatacaggttattttcagcggacatacccccagtggtggtgatatgaacacgctacgcttaggtattgatggcattagtcaggcgacaccgttggatacatttaaaacctctgtccgtgccggtcattcggttgaacagattatgcaatatccgatctacagcggtattctggcgggcgctggttggcaatgggtaaatctcgcctggctggctggcggcgtgtggttgctatggcagaaagcgattcgctggcatattcccctcagcttcttagtaacgctggcgttatgcgcaacgttgggctggttgttctcaccagaaacactggcatcaccccaaattcatctgctgtctggtgcgactatgctcggcgcattctttattttgactgacccggttaccgcttctacgaccaatcgtggtcgtcttattttcggcgcgctggcgggcttattagtctggttgatccgcagtttcggcggctatcctgacggcgtggcttttgccgtcctgctggcgaacatcacggttcctctgatcgattactacacgcgtccgcgcgtctacggtcatcgcaaagggtaa

SEQ ID NO: 263571 - DNA, 1182 bp, Klebsiella pneumoniae
atgcgcaaccatcaaaagacgttcacgatgctgctggttctggtgctgattggtcttaatatgcgaccactgctcacctccgtcgggccactgctaccgcaattgcgccaggcaagcggaatgagctttagcgtggctgccctgttgaccgctctgccggtggttaccatgggcgggctggcgctggccggaagctggcttcatcagcatgtcagcgaacgtcgcagcgtcgccatcagtttgttactgattgccgtcggtgcattgatgcgtgagctttacccccaaagtgcgctgctgcttagcagcgcactgcttggtggagtggggatcggcatcattcaggcagtgatgccttcggtgattaaacggcggtttcagcagcgcacgccactggtgatggggctgtggtccgcggctctgatgggcggcggtggacttggtgccgccatgacgccatggttagttcaacatagcgaaacctggtatcaaacactcgcctggtgggcgctgcctgccgttgttgcgctctttgcctggtggtggcaaagcgcccgcgaggtcgcctcttctcacaagacaacaaccactccggttcgcgtggtatttactccccgcgcgtggacgctgggtgtttacttcggtctgattaacggcggttacgccagcctgattgcctggttacccgctttctatattgagattggtgccagcgcgcagtacagcggttccttgctggcattgatgacgcttgggcaagcagcaggggcattgctgatgcctgctatggctcgccatcaggatcggcgcaaacttttgatgctggcgctggcgttacaactggtggggttctgcggctttatctggctgccgctgcaattgccggtattgtgggcaatggtgtgtgggttaggtctgggcggcgcatttccgctctgtttgctgctggcgctcgatcactctgcgcaacccgctattgctggcaaactggtggcgtttatgcaggggatcggttttatcatcgccgggcttgccccgtggttttctggtgtgctgcgtagtatcagtggcaattacttgatggactgggcgtttcatgcgctgtgcgtcgttgggctgatgatcataaccctgcgttttgcaccagcacgttttccgcagctgtgggtcaaagaggcatga

SEQ ID NO: 263572 - DNA, 471 bp, Klebsiella pneumoniae
atgattcagtcgcaaattaaccgcaatattcgtcttgatcttgccgatgccattttgctcagcaaagctaaaaaagatctctcatttgccgagattgccgacggcaccggtctggcagaagcctttgtaaccgcggctttgctggggcagcaggcgcttcctgccgacgccgcccgcctggtcggagcgaagctggatctcgacgaagacgccattctactgttgcagatgattccactgcgtggctgcattgatgaacgtattccaaccgacccaacgatgtatcgtttctatgaaatgttgcaggtgtacggcacaaccctgaaagcgttggttcatgagaagtttggcgatggcattatcagcgcgattaacttcaaactcgacgttaagaaagtggcggacccggaaggtggcgaacgtgcggtcatcaccttagatggtaaatatctgccgaccaaaccgttctga

SEQ ID NO: 263573 - DNA, 660 bp, Klebsiella pneumoniae
gtgaaagagattattgatggattccttaaattccagcgcgaggcatttccgaagcgggaagccttgtttaaacagctggcgacacagcaaagcccgcgcacactttttatctcctgctccgacagccgtctggtccctgagctggtgacgcaacgtgagcctggcgatctgttcgttattcgcaacgcgggcaatatcgtcccttcctacgggccggaacccggtggcgtttctgcttcggtggagtacgccgtcgctgcgcttcgggtatctgacattgtgatttgcggtcattccaactgtggcgcaatgaccgctattgccagctgccagtgcatggaccatatgcctgccgtctctcactggctgcgttatgccgattcagcccgcgtcgttaatgaggcgcgcccgcatcccgatttaccgtcaaaagctgcggcgatggtacgtgaaaacgtcattgctcagttggctaatttgcaaactcatccatcggtgcgcctggcgctcgaagaggggcggatcgccctgcacggctgggtctacgacattgaaagcggcagcatcgcagcttttgacggcgcaacccgccagtttgtgccactggccgctaatcctcgcgtttgtgccataccgctacgccaaccgaccgcagcgtaa

SEQ ID NO: 263574 - DNA, 900 bp, Klebsiella pneumoniae
atgctctctcgacatatcaattattttcttgccgtggctgaacatggcagctttacccgtgccgccagtgcgttgcacgtctcccagcctgcgctttcccagcagattcgccagttagaggagagtttaggcgtgccgctgtttgaccgtagcgggcgaacgattcgtctcactgatgcaggagaagtctggcgacagtacgccagccgggcgttacaggaactgggggcgggtaaacgggcgattcatgatgttgccgatctgacgcgaggatcgctgcgtatcgccgtcactcccacctttacaagctactttatcggccctttaatggcggatttctatgcgcgctaccccggcatcacgctccagctacaggaaatgtcgcaggagaaaatcgaagatctgctttgtcgcgacgagttggacgttgggattgccttcgcgcctgtgcattcgccggagctggaggcaattcctttactgacagaaagtttagcgttagtcgtggcgcaacatcatccgctggctgcctgtgaacaggtggcgttgagtcgcttgcatgatgaaaaactggtcctgctcagcgcggaatttgccaccagagagcaaattgaccactactgcgagaaagcggggctacatccacaggtggtcattgaggcgaactcaattagcgcggttctggagctgattcgccgcacttccctttccacattgttgccagcagcgattgccacacaacatgacgggcttaaagctatatcccttgccccaccgttactggagagaacggcggttttattgcggcggaaaaatagctggcagacagccgccgcgaaggcatttttgcacatggcgttggaggaatgcgcggttgttggcgggaatgaatcacggtag

SEQ ID NO: 263575 - DNA, 1284 bp, Klebsiella pneumoniae
gtgtcgaataacgctttacagacaattattaacgcccggttacccggcaaagaggggctgtggcagattcatctgctggacggaaaaatcagcgccattgatgcgcaatccggggtgatgcccgtaactgaaaacagcctggatgccgaacaaggtttagttataccgccgtttgtggagccacatattcacctggacaccacgcaaaccgccggacaaccgaactggaatcagtctggcacgctgtttgaaggcattgaacgctgggccgagcgcaaagcgttattaacccatgacgatgtgaaacaacgcgcctggcaaacgctgaaatggcagattgccaacggcattcagcatgtgcgtacccatgtcgatgtttcggatgcaacgctgaccgcgctgaaagcaatgctggaagtgaagcaggaagtcgcgccgtggattgatctgcaaatcgtcgccttcccgcaggaagggattttgtcgtatcccaacggtgaagcgttgctggaagaggcgttacgcttaggggcagacgtagtgggggcgattccgcattttgaatttacccgtgaatatggcgtggagtcgctgcataaaaccttcgccctggcgcaaaaatacgaccgtctcatcgatgttcactgtgatgagattgatgacgaacagtcgcgctttgttgaaaccgttgctgccctggcgcaccgtgaaggcatgggcgcgcgagtcaccgccagccacactacggcaatgcactcctataacggggcgtatacctcgcgcctgttccgcttgctgaaaatgtccggtattaactttgtcgccaacccgctggtcaatattcatctgcaaggacgtttcgatacgtatccaaaacgtcgcggcatcacgcgcgttaaagagatgctggagtccggcattaacgtctgctttggtcacgatgatgtcttcgatccgtggtatccactgggaacggcgaatatgctgcaagtgctgcatatggggctgcatgtttgtcagttgatgggctacgggcagattaacgacggcctgaatttaatcacccaccatagcgccaggacgttgaatttgcaggattacggcattgccgccggaaacagcgccaacctgattatcctgcctgcagaaaatgggtttgatgcgctgcgccgtcaggttcctgtatgttattcggtacgtggcggtaaggtgattgccagcacacaaccggcacaaaccaccgtatatctggatcagccagaagccatcgattacaaacggtaa

SEQ ID NO: 263576 - DNA, 1260 bp, Klebsiella pneumoniae
gtgtcgcaagataacaactttagccaggggccagtcccgcagtcggcgcggaaaggggtattggcattgacgttcgtcatgctgggattaaccttcttttccgccagtatgtggaccggcggcactctcggaaccggtcttagctatcatgatttcttcctcgcagtcctcatcggtaatcttctcctcggtatttacacttcatttcttggttacattggcgcaaaaaccggcctgaccactcatcttcttgctcgcttctcttttggtgttaaaggctcatggctgccttcactgctgctgggcggcacccaggttggctggtttggcgttggcgtggcgatgtttgccattccggtgggcaaggcaaccgggctggatattaatttgctgattgccatttccggtttactgatgaccgtcaccgtcttctttggcatttcggcgctgacggttctttcggtgattgcggttccggctatcgcctgccttggcggttattccgtgtggctggccgttaacggcatgggcggcctggacgcattaaaagcggtcattcccgcacaaccgttagatttcaatgtcgcgctggcgctggttgtggggtcatttatcagtgcgggcacgctcaccgctgactttgtccggtttggtcgtaatgccaaactggcggtgctggtggcgatggtggcctttttcctcggcaactcgttgatgtttattttcggtgcagcgggcgcggcggcactggggatggcggatatctctgatgtgatgattgctcagggtctgctgctgcctgcgattgtggtgctggggctgaatatctggaccaccaacgataacgcgctctatgcgtcgggcttaggtttcgccaacattactggtatgtcgagcaaaaccctttcggtaatcaacggtattatcggtacggtctgcgcattatggctgtataacaattttgtcggctggctgaccttcctttcggcagctattcctccggtagggggcgtgatcatcgctgactatctgatgaaccgtcgccgctatgagcactttgcgaccacgcgtatgatgagtgtcaattgggtggcgattctggcggtcgccttggggattgccgcaggccactggttaccgggtattgttccggtcaacgcggtattaggtggcgcgctgagctatctgatccttaacccgattttgaatcgcaaaacgacggctgcaatgacgcatgtggaggctaacagtgtcgaataa

SEQ ID NO: 263577 - DNA, 816 bp, Klebsiella pneumoniae
gtgctctatctggctggagaaccgctggacgagccgaccgccagttgggtgagcaatacgctggatgtgccggtcatcgacaactactggcagaccgaatccggctggccgattatggcgattgctcgcggtctggacgacaggccgacgcgtctgggaagccccggcgtgccgatgtatggctataacgtgcagttgcttaatgaagtcaccggcgaaccgtgtggcgtcaacgagaaagggatgctggtggtggaagggccattgccgccggggtgtattcagaccatttggggcgacgacgaccgctttgtgaagacgtactggtcgctgttttcccgtccggtgtacgccacttttgactggggtatccgcgatgctgacggttatcactttattctcgggcgcactgacgatgtgattaacgttgccgggcatcggctggggacgcgcgagattgaagagagtatctccagtcatccgggcgttgccgaagtggcagtggttggggtgaaagatgcgctgaaagggcaggtggcggtggcgtttgtcattccgaaagagagcgacagtctggaagaccgagacgtggcgcactcgcaagagaaggcgattatggcgctggtggacagccagattggcaactttggtcgcccggcgcacgtctggtttgtctcgcaattgccgaaaacgcgatccggaaaaatgctgcgccgcacgatccaggcgatttgcgaaggacgcgatcctggggatctgacgaccattgatgatcctgcgtcgttggatcagatccgccaggcgatggaagagtag

SEQ ID NO: 263578 - DNA, 1659 bp, Klebsiella pneumoniae
atgattcttgagcgcgttgaaattgtgggttttcgcggtatcaaccgtttgtcgttgatgctggaacaaaacaacgtcctgattggggagaacgcgtggggtaaatccagcttgctggacgccttaaccctgctgctatcgccagaatcagatctctaccattttgagcgcgacgatttctggttcccgccgggagatatcaacgggcgagaacatcatctgcatattattttgaccttccgcgaatcgctgccaggccgacatcgggttcgccgctatcggccgctggaagcgtgctggacgccatgcaccgatggctatcaccgtattttttatcgtctggaaggggagagtgcggaagacggcagcgtgatgacactgcgcagttttctcgataaagacggacatccgattgatgtcgaggatattaacgaccaggcacgccatctggtgcgtttaatgccggtgctgcgcttgcgtgatgcccgttttatgcgccgtattcgtaacggcacggtgccaaatgtccctaatgtggaagtcaccgcgcgccagctcgatttcctcgcccgtgagttatcctcacatccgcaaaatctctctgatgggcagattcgtcagggactttccgcaatggtgcaactgcttgagcattatttctctgagcagggggccggacaggcgcgatatcgtttaatgcggcggcgggccagcaatgagcaacgaagctggcgctatctggatatcatcaaccggatgattgaccgacctggtgggcgctcgtatcgggttattttgctcggcctgtttgctactttattgcaggcaaaaggcacattgcgactggataaagacgcccgtccattgttgctgatcgaagatccagaaacccgtttacaccccattatgctttcagttgcctggcatctgttgaatcttctgccattgcagcgcattgccaccaccaactcgggtgagttgctttcgttaacgccggtagagcatgtttgccgactggtacgtgagtcctcgcgcgttgccgcctggcgtctggggccgagtggcttgagtaccgaagatagccgacgcatatcctttcacattcgttttaaccgtccgtcatcgctgtttgcacgctgctggctgctggtggaaggggaaacggaaacttgggttatcaatgaactggcgcgtcagtgcggacatcattttgatgccgaagggatcaaggtcattgagtttgcccagtccgggctaaagccactggttaaatttgcccggcgaatggggattgaatggcatgtactggtcgatggcgatgaagcagggaagaaatatgccgctacggtacgcagcctgttgaataacgatcgggaagccgaacgagaacatttaacggcgttaccggcgctggatatggaacattttatgtatcgccagggattttccgatgtgttccaccgcgtggcgcaaatcccggaaaatgtaccgatgaatctgcgcaaaattatctcgaaagcgatccatcgctcttccaaacccgatcttgccattgaagtggcaatggaggcaggacgtcgtggtgtggattccgtaccgacgctgctgaaaaaaatgttctcacgcgtgctgtggctggcgcgcggtcgcgcggattaa

SEQ ID NO: 263579 - DNA, 993 bp, Klebsiella pneumoniae
atggtgaaatcgacgtcatgtataaccattgatttcatgaatatgtcgcagctaactgaacggacctttacgccatctgaatctctcagcagcctgtcactttttcttagtctggcacgtggacagtgtcggccgggtaaattctggcatcgccgtagttttcgccagaaatttttgctgcgctcgttgattatgccgcgtttaagcgttgagtggatgaacgaactttcccactggcctaatctcaatgtgttgttaacgcgccagccgcgactgcctgtgcgtctgcatcgcccttaccttgcggcgaatcttagccgtaagcaattgctggaggcgttacgttaccattatgcgttactccgcgggtgtatgtcggcggaagaattcagcttatatttgaatacccccgggctgcaactggcgaagctggaaggcaaaaacggcgagcagttcacacttgagctgaccatgatgatctcaatggataaagaaggtgacagcacaatcctgttccgcaacagcgaaggtattcctctggcagagatcacgtttaccctgtgtgaatatcaggggaaaagaacaatgtttattggcggactgcaaggcgcaaaatgggaaattccacatcaggaaatccagaatgcgacgaaagcctgccacgggctatttcccaaacgccttgtgatggaagcagcctgtctgtttgcccaacgtttgcaggtagagcagattattgccgtcagcaatgaaacgcatatttaccgcagcctgcgttatcgcgataaagaaggcaagatccatgccgattacaacgctttctgggagtcggttggcggcgtatgtgatgctgaacgccattaccgccttccggcacagatagcacgaaaagagattgccgaaatcgccagtaaaaaacgggctgaataccgtcggcgctatgagatgctcgacgctattcagccacaaatggccacgatgtttcgcggttaa

SEQ ID NO: 263580 - DNA, 1116 bp, Klebsiella pneumoniae
atgaaaaagcggaaaaccgtgaagaagcgttacgttattgcgctggtgatagtcattgccgggctgattacgttatggagaattcttaacgcacccgtgccgacttatcagacgctgattgtgcgccccggtgatttacagcaaagcgtgctggcgaccggaaagctggacgcgctgcgtaaggttgatgtgggcgcgcaggtcagcggtcagttgaaaacgctgtcggtggcgattggcgataaagtaaaaaaagaccagcttttaggggttattgatcctgaacaggctgaaaaccagattaaggaggtggaagcaacgctgatggagctacgcgcgcagcggcagcaggcggaagcggagctgaaactggcgcgggtgacgtattcccgtcagcaacgtcttgcacaaacgcaagcggtttcacagcaggatcttgataccgccgcgacggagatggctgtgaaacaggcgcaaattggcaccattgacgcgcaaatcaagcgcaatcaggcctcactcgatacggctaaaaccaatctcgattacacccgcatcgttgccccgatggccggggaagtcacgcaaatcaccactctgcaaggccagacggtgattgccgcacaacaagcaccgaacattctgacgctggcagatatgagcaccatgctggtaaaagcgcaggtttctgaagcggatgtaatccacctgaagtcggggcaaaaagcctggtttacggtgcttggcgatccgctgacgcgctacgaggggcaaatcaaggatgtgctaccgacgccggaaaaggttaacgacgctattttctattacgcccgttttgaagtccccaaccccaatggtttgctgcggctggatatgaccgcgcaagtgcatattcagctcaccgatgtgaaaaatgtgctgacgatccctctgtcggcgttaggcgatccggttggcgataatcgttataaagtcaaattgttgcgtaatggtgaaacacgcgagcgtgaagtgacgattggcgcacgtaacgataccgatgttgagattgtcaaagggctggaagcgggcgatgaagtggtgattggtgaggccaaaccaggagctgcacaatga

SEQ ID NO: 263581 - DNA, 1947 bp, Klebsiella pneumoniae
atgacgcccttgctcgaattaaaggatattcgtcgcagctatcctgccggtgatgagcaggttgaggtgctgaagggcatcaccctcgatatttatgctggtgagatggtggcgattgtcggcgcttcgggttccggtaaatcgaccctgatgaatattctcggctgcctggataaggccaccagcggcacctatcgcgtagccggtcaggatgttgccacgctggacgccgatgcgctggcgcaactgcgtcgcgaacacttcggctttattttccagcgttaccatttgctttcgcatttaaccgccgagcagaacgttgaagtacccgccgtctatgccggtcttgagcggaaacagcggctgcttcgcgcccaggagttactgcaacgactggggctggaagaccgtacagagtattacccggcacagctttcgggggggcagcaacagcgcgtcagcatcgcgcgggcattgatgaacggcggtcaggtaattcttgccgatgaaccaaccggcgcactggacagccattctggcgaagaggtgatggcgatcctgcatcagctgcgcgatcgcgggcatacggtgattatcgttacccacgatccgcaggtcgctgctcaggccgagcgggtgatcgaaattcgcgacggcgaaattgtgcgcaatcctcccgccgttgaaaaagtgaatgttgctggcgggacggaacctgttgtcaacacggcctctggctggcggcaatttgtcagcggttttaacgaagcgctgacgatggcatggcgggcgctggcagcgaataaaatgcgtactttactgaccatgctggggattattatcggtattgcgtcggtggtttcaattgtcgtggtgggcgacgccgccaaacaaatggtgctggcggatattcgttctattggtacgaatactattgatgtctatcccgggaaagattttggcgatgacgatccgcaatatcagcaggcgctgaagtacgacgacttaatcgccatccaaaaacaaccgtgggtcgcctcagccacacctgccgtctcgcaaaacctgcgcctgcgttataacaatgttgatgttgctgccagtgccaatggcgtgagcggcgattattttaatgtctatggcatgaccttcagtgaagggaacacctttaatcaggagcagctgaacggtcgtgcgcaggtggtggtgctcgacagtaatactcgccgccagcttttcccccataaagcagatgtggttggcgaggtgattctggtcggcaatatgcccgccagagtcattggtgtggcggaagaaaaacagtcgatgtttggtagcagtaaagtgctgcgtgtctggctaccttacagcacgatgtccgggcgagttatgggccagtcgtggctgaactccattactgtcagggtgaaagaaggatttgacagcgccgaggcggaacagcaactcacgcgtttactttcactgcgccacggtaagaaggatttctttacctggaacatggacggcgtcttgaaaaccgttgaaaagaccacacgtactttacaactgtttctgacgctggtggcggtgatttcgctagtggtgggcggtattggtgtaatgaatattatgctggtgtcagtgaccgagcggacgcgggaaattggcattcgcatggctgtaggtgcgcgagcaagtgatgtgttgcaacagttcctgatcgaagcagtactggtttgcctggtcggtggcgcgttgggaataacactgtcactgttaattgctttcaccttacagcttttcttacccggctgggagattggtttttcaccgttggcgctgctgctggcgtttctctgctcgacggtcaccgggattttatttggctggttacccgcacgaaatgcggcacgactggatccagtagatgctctggcacgagagtaa

SEQ ID NO: 263582 - DNA, 906 bp, Klebsiella pneumoniae
atgagaaagataaaaatagggctggcgctgggatctggcgcggcgagaggttggtcgcatattggcgttattaatgcgctaaaaaaagtgggtattgaaattgatatcgttgcaggatgttcaattggttcgctggtgggcgctgcctatgcatgcgatcgactatctgcgctggaagattgggtgacctctttcagttattgggatgttttacgcctgatggatctctcctggcagcgcggtgggttactgcgcggcgagcgtgtcttcaatcaatatcgcgaaataatgccggaaacagagatcgaaaattgttcccgtcgcttcgcggctgttgccaccaatttaagtactgggcgcgaattatggtttactgaaggcgatctccatcttgctattcgtgcatcatgcagtattccaggactaatggcacccgttgcgcataacggctactggctggttgatggcgctgtagttaacccaattcctatttcgctcacgcgtgcattgggtgctgatattgtgatagcggtcgacctgcagcacgatgctcatttgatgcaacaagatctgctctcctttaatgttagtgaagaaaatagcgagaatggtgattctctgccgtggcatgcgcgtctgaaagaaaggttgggcagcataacgacacgtcgggcggtgacagcgccaacggcaacagagattatgaccacttctatccaagtgctggagaaccgccttaaaaggaaccgcatggcaggtgatccgcccgatattctgattcaacctgtttgcccgcaaatatctacgcttgatttccatcgcgcgcacgctgccattgcggctgggcagctggcagtggaaaagaaaatggatgaacttttgccgttggtacgcaccaacatttga

SEQ ID NO: 263583 - DNA, 1014 bp, Klebsiella pneumoniae
atgacgcagccattggtcggaaaacagattctcattgttgaagatgagcaggtatttcgctcgcttctggattcgtggttttcctcattgggagcgacaacggtactggcggctgatggggtggatgcccttgagttgctgggaggtttcactccagacctgatgatatgtgatatcgcgatgccacgaatgaacgggcttaaactgctggagcatatacgtaacagaggcgaccagacacctgttctggtgatatctgccactgaaaatatggcagatattgccaaagcgttacgtctgggcgttgaagatgttttgctgaaaccagttaaagatctgaatcgcttgcgcgagatggtttttgcctgtctctatcccagcatgtttaattcccgcgttgaggaagaggagaggctttttcgcgactgggatgcaatggttgataaccctgccgcagcggcgaaattattacaggaattgcaaccgccggttcagcaggtgatttcccattgccgggttaattatcgtcaattggttgccgcggacaaacccggcctggtgcttgatattgccgcactttcggaaaacgatctggcattttattgccttgatgtcacccgagctggacataatggcgtacttgctgccttgttattacgcgcattgtttaacggattattacaggaacagcttgcacatcaaaatcaacggttgccagagttgggcgcgttattgaagcaggtaaaccatttactccgtcaggccaatctaccggggcagtttccgctattagttggctattatcatcgcgaactgaaaaatctcattctggtttctgcgggtctgaatgcgacattaaatactggcgaacaccaggtgcaaatcagtaatggtgttccgttaggcactttaggtaacgcttatttgaatcaattgagccagcgatgcgatgcctggcaatgccaaatatggggaaccggtggtcggcttcgcttgatgttgtctgcagaatga

SEQ ID NO: 263584 - DNA, 957 bp, Klebsiella pneumoniae
atggatatccgtaaacgtatctacaagttcccgaaaatgggcgtgaaagcgaaaatgatcgctgtcaccaccacttctggtacaggttctgaagtcactccgtttgcggttgtaactgacgacgctactggtcagaaatatccgctggcagactatgcgctgaccccggatatggcgattgtcgatgccaacctggttatggacatgccgaagtccctgtgtgctttcggtggtctggacgcagtaactcacgccatggaagcttatgtttctgtactggcatctgagttctctgatggtcaggctctgcaggcactgaaactgctgaaagaatatctgccagcgtcctaccacgaagggtctaaaaatccggtagcgcgtgaacgtgttcacagtgcagcaactatcgcgggtatcgcgtttgcgaacgccttcctgggtgtatgtcactcaatggcgcacaaactgggttcccagttccatattccgcacggactggcaaacgccctgctgatttgtaacgttattcgctacaacgcgaacgacaacccgaccaagcagactgcattcagccagtatgaccgtccgcaagctcgccgtcgttatgctgaaattgctgaccacctgggtctgagcgcaccgggcgaccgtactgctgctaagatcgagaaactgctggcatggctggaaacgctgaaagctgaactgggtattccgaaatctatccgtgaagctggcgttcaggaagcagacttcctggcgaatgtggataaactgtctgaagatgcattcgatgaccagtgcaccggcgctaacccgcgttacccactgatctccgagctgaaacagattctgctggatacctactacggtcgtgattatgtagaaggtgaaactgcagcgaaaaaagaagccgctccggctaaagctgagaaaaaagcgaagaaatccgcttaa

SEQ ID NO: 263585 - DNA, 1437 bp, Klebsiella pneumoniae
atgcatggactggaaggaaactggacaccttatggcggaatgcaaattgcagaagattatcaagccttcaaccttggtattggtaaagatttaggactttttggtgccttttctttcgatatcacgcaggccaatacgacacttgcagatggcacccgtcacagcgggcaatcgattaaatccgtctacagcaaatccttctaccagacgggaaccaatatccaggtcgcaggatatcgctattctacgcaaggtttttataacttatccgacagtgcctacagtcgaatgagtggttacaccgtcaagcctcctaccggagacagcaatgagcagacacaatttattgattattttaatctgttctacagtaagcgtggtcaggaacaaataagcatctctcagcagcttggaaattacggtacgacatttttcagtgccagtcgccaaagttactggaacacgtcacgcagcgaccagcaaatatcatttggattaaatgtgccgtttggtgatattacgacttcgctgaattacagctattccaataatatatggcaaaacgatcgggatcatttacttgcttttacgcttaatgttcccttcagtcattggatgcgtacagacagtcagtcggcatttcgtaattcaaacgccagttacagtatgtcaaacgatttgaaaggcggcatgaccaatctatcgggggtttatggcactctgctgccggataataacctgaattatagcgttcaggtcggtaacacccacgggggtaatacatcgtctgccaccagtggttacagttctcttaattatcgtggagcttacggtaatactaatgtcggttacagtcggagtggtgacagcagccagatttattacggaatgagtggtgggattattgctcatgctgatggcatcacctttggtcagccgctgggcgacacaatggttctggttaaggctcctggcgctgataatgtcaaaatagagaaccagaccggaattcataccgactggcgtggctatgccatattaccatttgcgacagaatatagagaaaatcgtgtcgctcttaacgcgaattcccttgcagataatgttgaactggatgaaaccgttgtcactgtcatcccaactcacggtgctattgccagagcaacatttaatgcacaaatcggcgggaaagtattaatgacgttgaagtacggtaataagagcgttccattcggtgcaattgtcatacatggtgagaataaaaatggcagcattgtcgcggaaaacggtcaggtttatctgactggacttccacagtcagggaaattacaggtttcatggggcaaagataaaaactcaaactgtattgtcgagtacaagcttcctgaagtttctcctggtaccttactgaaccagcagacagcaatctgtcgctaa

SEQ ID NO: 263586 - DNA, 531 bp, Klebsiella pneumoniae
atgaaatacaataacattattttcctcggtttatgtctggggttaaccacctattctgctttatccgcagatagcgttattaaaattagcgggcgcgtcctcgattatggctgcacagtctcatcggattcgcttaattttaccgtagatctccaaaaaaacagtgccagacaatttccaacgaccggtagcacaagtccagccgtcccttttcagattacgttaagtgaatgcagtaaagagacaacgggggttcgggttgcatttaacggtattgaggatgcagaaaataatactctgttgaaactggatgaaggaagcaatacggcctccggtttgggtatagaaatactggacggaaatatgcgtccggtgaaattgaatgaccttcatgccgggatgcagtggatcccactgataccagaacagaacaatattttgccttactccgctcgtctgaagtcaactcagaagtccgtcaatccgggactggtgagggcttcggcaacctttacccttgaatttcaataa

SEQ ID NO: 263587 - DNA, 504 bp, Klebsiella pneumoniae
atgaaaagacttcacaagaggttcctgttagctacgttttgcgcgttattcacagtaactctccaggccgccgatgtcactatcactgttaatggtcgggtagtcgctaaaccctgcactattcaaaccaaagaagctaacgttaatctcggggatctttatacgcgcaatctgcaacaacctggttctgcatcaggctggcacaatattactttgtcattaaccgattgtccggttgaaacaagtgcagtgacggcaatcgtgacaggttcaactgacaatacgggttattacaaaaatgaaggtactgccgaaaatattcagatagagctaagggatgaccaggatgcgacgttaaaaaatggcgatagcaaaacggttattgttgatgagatcactcgtaatgcacagtttccacttaaggcaagagctatcacggtgaatggaaacgcaagccagggaacgatcgaggcgctaatcaatgtgatctacacctggcaataa

SEQ ID NO: 263588 - DNA, 915 bp, Klebsiella pneumoniae
atgggtaaaacaataagtatgaagcttctgttcggtatttatcttctattaatggcaggcaaagtttttgccttcagttgtaatgtcgatggcgggtcaagtattggagcaggtacaacctctgtttatgttaatctcgaccctgtaatacaaccgggccagaatctggttgtagacttgtctcagcacataagttgctggaatgattacggcggctggtacgacactgatcatataaacctggtacaaggctcagctttcgcaggctctctacagtcatataaaggatcgctgtactggaataatgtgacctaccccttcccgttgacgacaaatactaatgtattagatattggtgataagacaccgatgccattaccgttaaaactctatattaccccagtcggtgcggccggtggagttgtcataaaagccggggaagttattgcccgtattcatatgtataaaattgccacgttaggaagtggaaatccgcgtaattttacgtggaatattatttcaaataacagtgttgttatgccaacaggcggctgcaccgttgatagtcgtaatgtcaacgtgaatctcccggactttcctggaagcgcagaaataccccttggcgtatattgctcaagtgaacaaaagctctcattttatctttcgggtgctaccactgacagtgccagacaagtgtttgctaacacagcaccagatgcaacaaaagcatcgggagtgggtgtctctctgatgcgtaatggaaaaatactggctacgggagaaaacgtctccctggggacagtaaataaaagcaaagtacctctgggtttaagcgcaacctatggacaaacaggaaacaaggttgcagccggaaccgtccagtcagtcattggtgtcacttttatctatgaataa

SEQ ID NO: 263589 - DNA, 2280 bp, Klebsiella pneumoniae
atgaagaaaaaaattgaatcctaccagggagctgccggtggttggggtgctgttaaatccgtagcgaatgcagtacgtaagcagatggatatacgccaggatgttattgccatgtttgacatgaataagccagagggctttgactgtccgggttgtgcatggccagatcctaagcacagtgcgtcattcgacatttgtgaaaacggcgcaaaagcaatcgcctgggaagtcacggataagcaggtaaacgcctctttctttgctgagaatacggttcaatcattacttacctggggagaccacgagcttgaggctgcggggcgtctcacccagcctttgaaatatgatgccgtcagcgactgttacaagccattaagctggcaacaagctttcgacgaaattggcgaacgccttcaaagctatagtgatcccaatcaggttgaattctatacttcgggccgcacttccaatgaagctgcctttctttatcagctttttgcccgtgaatacgggagcaataacttccccgactgctccaacatgtgccatgaaccgaccagtgtgggtttggcagcgagtatcggtgtaggtaaagggaccgtgttgctggaagactttgagaaatgcgatttagtcatttgcattgggcataaccctggtacaaaccaccctcgcatgttgacttcgttgcgcgctttagtgaaacggggagcgaaaatgatcgccatcaatcctctacaggaacgtggcctggagcgatttaccgcaccgcaaaacccgtttgaaatgctgacgaactctgagactcagttggccagtgcctactataacgtgcgcattggtggtgatatggcgttgctcaaggggatgatgcgcctgttaattgagcgcgatgatgctgcaagcgccgcaggtcggccctcattgctggatgacgaatttattcaaacgcataccgtcggctttgacgagctacgccgtgacgtgctcaattccgagtggaaagatatcgaacgtatttctggattaagtcagactcaaatcgccgaactggctgatgcatatgccgctgccgaacgcaccattatctgttacggaatggggatcactcagcacgaacatggtacccagaatgtacagcaactggtcaatctgctgttgatgaaaggtaacattggcaagcctggtgcgggtatctgcccactacgaggtcactctaatgtacagggcgaccgaaccgtcggtatcaccgagaaaccgtctgcagagtttctggctcgcctgggtgagcgctatggtttcaccccacctcatgcacctggacatgctgcaattgccagcatgcaagcaatatgtacggggcaggctcgagcattgatctgcatggggggcaactttgctctggcaatgccagatcgggaagcgagcgctgtaccgttaacacaattagatctgacggtacacgtagccactaagcttaaccgctctcatctgctgaccgcacggcatagctatattctgccggttctgggacgcagcgagattgacatgcaaaaaagcggtgcgcaggcggtaaccgttgaggattcaatgtcgatgattcatgcctcgcgtggcgtgttaaaacccgccggtgtaatgctgaaatcagagtgtgcagtggtcgcgggaatcgcgcaggcagcactaccccagagcgtggtagcctgggagtatctggtggaagattatgatcgcattcgcaatgacattgaagctgtgctgccagagttcgccgactataaccagcgcatccgtcatcccggtggttttcacctgataaatgcagctgctgaaaggcgctggatgacgccgtcaggtaaggctaatttcattaccagtaaagggctgttagaagatccctcttcagcgtttaacagtaagctagtcatggcgacagtacgcagtcacgatcagtacaacacgacgatttatggtatggatgatcgctatcgaggggtattcggtcaacgagatgtggtctttatgagtgctaaacaagctaaaatttgccgtgtaaaaaacggcgaaagagttaatcttattgcgcttacgccagacggtaagcgaagctcacgccgcatggatagattaaaagtggtcatttaccctatggctgaccgctcactggtgacctattttccagaatcgaatcacatgctaacacttgataaccacgatccattaagtggcattcctggctataaaagtattccggttgaattagaaccatcaaattaa

SEQ ID NO: 263590 - DNA, 762 bp, Klebsiella pneumoniae
atgtcgctcgtttgttctgttatatttattcatcatgccttcaacgctaacattttagataaagattacgccttctctgacggcgagatcctgatggtagataacgctgttcgtacgcattttgaaccttatgagcggcatttcaaagaaatcggatttaatgaaaataccattaaaaaatatctacaatgcactaacatccagacagtgacggtgcctgttcctgcgaagtttttacgtgcttcaaatgtaccgactggattgcttaatgaaatgattgcttatctcaactcggaagaacgcaatcatcataatttttcagaacttttgcttttttcttgcctgtctatttttgccgcatgcaaaggtttcattacactattaactaacggtgtgctatccgtttctgggaaagtgagaaatattgtcaacatgaagctggcgcacccatggaagctgaaagatatttgtgactgcctgtacattagtgaaagcctgttgaagaaaaaactaaagcaagagcaaacgacattctcacagattcttttagatgccagaatgcagcacgcaaaaaatttgatacgcgtagaaggttcagtcaataaaattgccgaacaatgtggttatgcgagtacatcttattttatttatgcgttccgcaaacattttggcaacagtccaaagagagtttctaaggagtaccgttgtcaaaggcacacgggtatgaataagggcaacacgatgaatgctttagctatttga

SEQ ID NO: 263591 - DNA, 234 bp, Klebsiella pneumoniae
atgccgggttacacagagtatgtcctggctgaaggatctttctcatacgggcaggcggttgctgtcataacagcttaccgcaatgtgtttatccaggatgacccaggaatgcatttccgtcgggttatccgcaacgcggaaggtcagcgacgctggcgctgccggaattctgaacccgatgccggaaaggtgcttaatacgcggctcgccagtgacggtcttctcagacaataa

SEQ ID NO: 263592 - DNA, 462 bp, Klebsiella pneumoniae
atgattcacctgttcaaaacctgcatgattaccaccttcattctggggttaatgtggtctgccccactccgggcacaggatcaacgttacatcagtatacgcaatacagatacgatatggctcccgggaaatatttgtgcttaccagttccggctggataatggcggaaacgatgaaggatttggccccctcaccatcactctgcaactcaaagacaaatatggtcagacgctggtgaccagaaaaatggaaacggaagctttgggtgacagtaatgccacgcgaaccacagacgcatttctggaaacggagtgcgtggaaaatgtcgccacaaccgaaatcattaaagcaactgaagaaagtaacggccatcgtgtcagtctgccgttatcggttttcgatccccaggactaccatccactgctaattaccgtttccggaaaaacgttaactgatccctga

SEQ ID NO: 263593 - DNA, 2517 bp, Klebsiella pneumoniae
atgttacagatagtcggcgcgctgatcctgctgatagcaggatttgccattcttcgccttttgttcagagcattaatcagcacggcttctgcgctggcagggcttatattgctgtgtctgttcggcccggccttactggctggctatatcatcgaacgcataacccggttgttccatattcgctggctggcaggcgtatttctgacgattgccggaatgatcatcagcttcatgtggggacttgatggtaaacatatcgcgctggaggctcacacctttgactctgtgaaatttattctgaccaccgctctcgccggtggtctgctggctgttcccctgcagatcaaaaacattcagcagaacgggatcacaccagaagatatcagcaaggaaattaacgggtattactgctgtttttatactgcctttttccttatggcgtgttctgcatgcgcaccattgatcgcgttacagtacgatatttcaccgtcactgatgtggtggggcgggttgttgtactggctggctgcattagtgacgctgctatgggcggccagccaaatccaggcgctgaaaaaactgacctgtgccatcagccagacactggaagaacaaccggtgctcaacagtaaatcgtggctgaccagtttgcaaaacgattacagccttcctgactcactgacggagcgcatctggctgacgcttatttctcaacggatttcccggggagagctgagggaatttgaactggcagacggaaactggttactgaacaatgcctggtatgaaagaaacatggcagggtttaacgaacagttgaaagagaacctgtcattcacacctgatgaactgaaaacactcttccggaaccgcctgaatttatcaccggaagcgaatgacgattttctcgatcgttgcctggacggcggtgactggtatcccttttcagaaggtcgccgttttgtatcattccatcacgtggatgagcttcgtgtctgtgcctcctgcgggctgacagaagtacatcatgccccggaaaatcataagccggatccggagtggtactgctcctctctttgtcgcgaaacagaaacactgtgtcaggaaatttatgaacgcccctacaacagttttatttccgatgcaacggcgaatggtctgattctcatgaaactgccggaaacctggagtacaaatgagaaaatgtttgcttccggagggcagggacatgggtttgccgctgaacggggaaaccatattgtcgacagagtccgtctgaaaaacacacggatcctcggtgataataatgccagaaatggagcagacagactggtcagcggaacagaaatccagacgaaatattgttcaactgcagcccgtagcgtcggtgcggcattcgacgggcaaaacggacagtatcgttacatgggaaataatggccccatgcaactggaagtcccccgtgatcagtatgccggcgctgttgaaaccatgaggaataagatccgcgaaggtaaagtacccggtgtaaccgatcccgcagaagcgtcccggctgattcgtcggggacatctgacttatactcaggcccgtaatatcacccggttcgggaccatcgaatcggtcacttatgatattgccgagggttcggttgtcagtctggcggccggagggatcagttttgccctgacggcatcggtcttctggctcagcaccggcgatcgcgatgctgccctgcagacagctgctgtccaggcaggaaaaaccttcacccgcacactggctgtctacgtcacaacccagcaactccaccggctcagtgttgttcagggtatgctgaagcacattgatttttcgactgccagcccgactgtccgactggctcttcagaaggggaccggtgcaggaaatatcagtgccctgaacaaagtaatgaagggtacgctggtgacatctctggcactggtagctgtcacaaccggccctgacatgatcaaaatgttgcggggacggatctccggtgcgcagttcatcaggaatcttgccgtggcatcttccggtgtggcaggtggtgctgtcgggtcagtggcgggcggaatactgttcagtccactgggaccatttggtgcactgacagggcgtgtggttggcggtgttctggggggaatgattgcctccgctgtatcaggaaaaattgccggagcgctggttgaagaagatcgcgtcaaaattctggcaatgattcaggagcaggtgacatggcttgccggcagtttcctgctgaccggacatgagattgaaaatctgaacgagaatctggcccgtgttatcgatcagaatgctctggagatcatttttgccgccggtatacaacaacgggccgcgaccaatatgttaatcaaaccactggtggtcagtatcatcaggcaacgccccgtcatggaatatgaagcatcccatctcggcaatatggttaaccgactggaagaagcattacccccggagttaccggcataa

SEQ ID NO: 263594 - DNA, 792 bp, Klebsiella pneumoniae
atgaggtgtttgtgtcatgttttcagttggttaacgcaatgtaatcaggcatttcctctggcagagtgttcagaagaaaatccagttccataccgcgcgggcaacagagaccacggtgtcacggacggcacgcagaaccgtacgagccacagaggcaacacagacgctctccgccgtgtcaaatatccggtccaccgcaccggtaaactgttcacgggcctgagcgcggacagattccgtgcgcagctcgtcctgcaggcgggtcatcaggggactggcggcatggtcgggaagtgctgtcatgagcgcactgaccagcgtatccagttcccagccggtgcgggccgatacggcaacaaccggatgtacgggccggaacagccggaataccgcatctgttttctcacgaatgttctgttcctgtgcgggagaaggctgaatacctgccatatcccattcatggcagggctccgttttgtcggcctgcgtcaccacaaacagcacccgctgatgtccccggtgcaggatgtgtcgccagaaatactcatccacagacagggcacggtcatcggctttaatcagccacagtaccaggtcaagttcaggcagaatgtcacggtacagggcttcatactctgcatccctgtcccggctctcgcccaccccgggcaggtcagcgataactatgctgtaaccgtggccactcagacggaagcgctgcacttcccgggtaccggcgtgaacatcactgaccggggtgacctccccctgaaacagtgcattacagagtga

SEQ ID NO: 263595 - DNA, 960 bp, Klebsiella pneumoniae
atgcgggttttgatcgttaaaacatcgtcgatgggcgatgttctccatacgctgcccgcactcactgatgcccagcaggcaatcccagggattaagtttgactgggtggtggaagaagggttcgcacagattccttcctggcacgccgccgttgagcgagttattcctgtggcaatacgtcgctggcgtaaagcctggttctcggcccccataaaagctgaacgcaaagcgtttcgtgaagcgctacaagcagagaactatgacgcagttatcgacgctcaggggctggtaaaaagcgcggcgctggtgacgcgtctggcgcatggcgtaaagcatggcatggactggcaaaccgttcgagaaccgttagccagcctgttttacaatcgtaagcatcatattgcaaaacagcagcacgccgtagaacgcacccgcgaactgtttgccaaaagtttgggctatagcaaaccgcaaacccagggtgattatgctatcgcacaacatttcctgacgaacctgcctacagatgctggcgaatatgccgtatttcttcatgcgacgacccgtgatgataaacactggccggaagaacactggcgagaattgattggtttactggctgattcaggaatacggattaaacttccgtggggcgcgccgcatgaggaagaacgggcgaaacgactggcggaaggatttgcttatgttgaagtattgccgaagatgagtctggaaggcgttgcccgcgtactggccggggctaaatttgtagtgtcggtggatacggggttaagccatttaacggcggcactggatagaccgaatatcacggtttatggaccaaccgatccgggattaattggcggatatgggaagaatcaggtggtttgtagggctccgctaatgaatttaaataatttagaagcagcggctgtttataaaaaaatcacattaatttaa

SEQ ID NO: 263596 - DNA, 1035 bp, Klebsiella pneumoniae
atgatgaacagcaccaataaacttagtgttattattccgttatataatgcgggcgatgatttccgcacttgtatggaatctttaattacgcaaacctggactgctctggaaatcattattattaacgatggttcaacggataattctgttgaaatagcaaagcattacgcagaaaactatccgcacgttcgtttgttgcatcaggcgaatgctggcgcatcggtggcgcgtaatcgtgggatcgaggcggcgacgggcaaatatgtcgcttttgtcgatgctgacgatgaggtgtatcccaccatgtacgaaacgctgatgaccatggcgttagaggacgacctcgacgtggcgcagtgcaacgctgactggtgttttcgtgaaacgggagaaacctggcaatccatccccagcgatcgccttcgctcaaccggtgtattaaccggcccggactggctgcggatggggctttcttcccgccgttggactcacgttgtctggatgggggtttatcgccgcgatgttattgttaaaaataacattaaatttattgccggattacatcatcaggatattgtctggacaacagaattcatgtttaatgcgctgcgtgcgcgatataccgagcaatcattatataaatattatctgcataatacgtcagtgagtcggttgcatagacaagggaataaaaaccttaattatcaacgtcactatattaagattacccgcctgctggagaaattaaatcgaaattatgccgacaaaattacgatttatccggaatttcatcagcaaataacttacgaagcattgcgtgtttgccatgcggtgcgcaaagagccggatattcttacccgccaacggatgattgccgagatatttacttccggtatgtataagcgcctgattactaatgtgcgcagcgtgaaggtgggttaccaggcgttactgtggtctttccgcttatggcaatggcgcgacaaaacgcggtcgcaccatcgcattacgcgtagcgcctttaatttgcgctag

SEQ ID NO: 263597 - DNA, 960 bp, Klebsiella pneumoniae
ttgtttccatttcgtcgtaacgttcttgcatttgccgctctgttggcgctctcctcccccgtaattgctggcaaacttgccatcgtcattgatgattttgggtatcgcccgcacaacgaaaaccaggtgctggcgatgccttccgctatctccgtcgctgtattacccgattcaccacacgccagagagatggcgaccaaagcgcataacagcggtcacgaagtgttgattcatctaccgatggcaccactgagtaaacagccgctggagaaaaatacgctacgcccggagatgagcagcgacgaaattgagcgcattattcgtagtgcggtcaataacgtgccctatgccgtggggatcaacaaccacatgggcagcaagatgacctctaacctgtttggtatgcagaaagtgatgcaggcgctggagcgttacaatctttacttcctcgacagcgtaaccatcggtaatacccaagcgatgcgcgccgcacaaggcactggcgtgaaggtgatcaaacggaaagtgttcctcgacgattcgcaaaatgaagcggacatccgtgtgcagttcaatcgcgcaattgacctcgcgcgtcgcaacggttcaaccattgccattgggcatcctcacccttcaacggtacgcgtgctacaacagatggtttataacctgccgccagacattacgctggtgaaagccagcagcttgctgaatgaaccgcaggttgatatgtctacaccgccgaaaaatactgtgcccgacacaccgcgtaatccgttccgtggcgtgaagctctgcaaaccgaagaaaccgatagaacctgtttatgctaatcgcttctttgaagtattaagcgaaagcatcagccagagcacgctgatcgtttacttccagcatcagtggcaaggctggggcaaacagcccgaagcggcaaaacttaacgctagcgcaaattaa

SEQ ID NO: 263598 - DNA, 1677 bp, Klebsiella pneumoniae
atgctggttaataccagtaattataatgagggagtccaaaaaacaatgaccaacatcaccaagagaagtttagtagcagctggcgttctggctgcgcttatggcagggaatgtcgcgctggcagctgatgtacccgcaggcgtcacactggcggaaaaacaaacgctggtacgtaacaatggttcagaagttcagtcattagatccgcacaaaattgaaggtgttccggagtctaatatcagccgagacctgtttgaaggcttactggtcagcgatcttgacggccatccggcacctggcgtcgctgaatcctgggataataaagacgcgaaagtctggaccttccatttgcgtaaagatgcgaaatggtctgatggcacgccagtcacagcccaagactttgtgtatagctggcaacgttctgttgatccgaacaccgcttctccgtatgccagttatctgcaatatgggcatatcgccggtattgatgaaattcttgaagggaaaaaaccgattaccgatctcggcgtgaaagctattgatgatcacacattagaagtcaccttaagtgaacccgttccgtacttctataaattacttgttcacccgtcaacttcaccggtgccaaaagccgctatcgagaaattcggcgaaaaatggacccagcctggtaatatcgtcaccaacggtgcctataccttaaaagattgggtcgtaaacgaacgaatcgttcttgaacgcagcccgacctactggaacaacgcgaaaaccgttattaaccaggtaacctatttgcctattgcttctgaagttaccgatgtcaatcgctaccgtagtggtgaaatcgacatgacttataacaacatgccgatcgaattgttccagaagctgaaaaaagagatcccggacgaagttcacgttgatccatacctgtgcacttattattacgaaattaacaaccagaaaccgccatttaacgatgtacgtgtgcgtaccgcactgaaactgggtatggaccgcgatatcattgttaataaagtgaaagcgcagggcgacatgcccgcctatggttacactccaccgtatactgatggcgcaaaattgactcagccggaatggtttggctggagccaggaaaaacgtaacgaagaagcaaaaaaactgctggctgaagcgggttataccgcagacaaaccgttgaccatcaacctgttgtataacacctccgatctgcataaaaagctggcgattgcagcctcttcattgtggaagaaaaacattggtgtaaacgtcaaactggttaaccaggagtggaaaacgttcctcgacacccgtcaccagggcacttttgatgtggcccgtgcaggctggtgtgcagactacaacgaaccaacttccttcctgaacaccatgctgtcgaacagctcgatgaataccgcgcattataagagcccggcctttgacagcattatggcggaaacgctgaaagcgactgacgaggcgcagcgcacagctctgtacactaaagcagaacaacagctggataaggattcggccattgttcctgtttattactacgtgaatgcgcgtctggtgaaaccgtgggttggtggctataccggcaaagatccgctggataatacctacacccggaatatgtacattgtgaagcactaa

SEQ ID NO: 263599 - DNA, 297 bp, Klebsiella pneumoniae
atgcggttcttactcgccaatacattttgcaaaattgttaagcaattctcttttattgaccgtatcagaatctatagcttgcatccatgtcttaacaaacatcttttaattcaatcaaatagagattggttaagcatgtctctcttttctgattacagttccagtagtgaaatgcacaataatttaacaattgattattatttagcactttcctctaccaaaggcagtggaattactaatatcatttcaattattcttcagcaagcccaggattatgatgtggcgaaaataacatga

SEQ ID NO: 263600 - DNA, 156 bp, Klebsiella pneumoniae; identical to SEQ ID NO: 2910

SEQ ID NO: 263601 - DNA, 303 bp, Klebsiella pneumoniae
gtggtttttgatcactttatcttcgacgatacccatgccggattcggcaacggccattttcgcgagtgggattcgagcatctgcggcagccagagcggcggcgcggaagattttgtctacttgctcttgagtgaaactggcatattcacgctgggctttttttacacgctctacgagtgcgttaagttcagcgacattagtaacagccataatgctctcctgataatgttaaacttttttagtaaatcatctgctcgaatacgagagtatagtcagtgcggtgatgatttgcttaaccgatga

SEQ ID NO: 263602 - DNA, 750 bp, Klebsiella pneumoniae
atgaccgataccgcccatagctaccagtttctctgctttttctaccgcgtcttcgaaatctttagcgcggtacattgccagagtcggggacagtttttcatgtgcgaacggttcgctttcatcaacaacggtcacttcaccgatcagaatcttggtgttttctggtacagagaagcctgccagttcagcaattttataggctggctgaccaacgatagccgcgttcagcgcaccgtttttcaggataacgtcctgaacagctttcagctctttaccctgcaacagatagccgccatgggttgcgaaacgttcacgtactgcgtcataaacagagtcaacaacaacaacagactgttcagaagcacagattacgccgttgtcgaaggttttggacatcagcacagatgcaactgcacgtttgatatcagcagtttcatcgataacaacaggcgtgttacccgcgcctacaccgatagctggtttaccggagctgtatgcggctttaaccatgcccggaccaccagtcgcgaggatcaggttgatgtctgggtggtgcatcagtgcgttagacagttcaaccgaaggttgatcgatccagccgatcagatctttcggagcaccggcagcgatagcagcctgcagaacgatatcagctgctttgttggttgcatcttttgcacgtgggtgcggggagaagataatggcgttacgggtcttcaggctgatcagcgatttgaagatagcagttga

SEQ ID NO: 263603 - DNA, 1470 bp, Klebsiella pneumoniae; identical to SEQ ID NO: 5163

SEQ ID NO: 263604 - DNA, 2370 bp, Klebsiella pneumoniae
atgaaatttaaccacaatcttttatttatttcctcacaatatcttgatggcgacaacccttcgcagcaggtactggaagagcttcaaaccgaactcgcggaacgcggttttaaaattcatatcacgcaccagatctctgatggattaaaaatcatcgaaaaaagcccccaatacagcgggattggtttttactgggagccagacaatccgacctttgcagaagagctacagcactttatcagcatattccgcaaaagaaatgccacgacgccgctgataattttctcagaacagaatattaccgatcgtatcccactcgacgtcttaaaagaggtcagcgaatatgtttatctgttctctgaatccgcagccttcactgccaatcgactgtactccttagtccaccgctatgcggataagcttcttcctccctactttaaaacccttaaggactttaccgaggacggtgactattactgggactgcccggggcatatggggggaatggcctatctgaaacatcctgttggcattgagttcattaacttctttggcgaaaacatgatgcgcgctgatattggcgtggctaccgcggagatgggggattatctgatccacgccggaccgcctaaaaaatcggaagaaattgcggcccgactgtttggctctgattggaccttctacggtgtttccggctcatcggggtcgaaccgtattgtggcccaggctgcggttggcgcagatgaaattgccattattgaccgaaattgccacaagtcacttaatcatggcctgaccttgtctcaggcaaggccggtttacctgaaacctacccgcaacgcgtgggggctgattgggcctatcccgaccggacgcctgaagaaggccagtattgatgcgctggtggcaaacagccgactggcatctggtgcggtcagccagtccccgtcctacgccgtggtaaccaactgcacctatgatggcttctgttataacgtgaacgatgtagtcagacacctgggtgaaagcgcaccgcgcatccattttgatgaagcatggtatgcctatgcgcgtttccatccgctataccagagtcgctatgcaatggacgcggaggaaacgccaaatcgtccaaccctattcgccgtacagtccacccataaaatgctgccctcactctccatggcctcaatgattcatgtgaagaaaagcgatcgcgcgccgcttaatttcgatgactttaacgatgcctttatgatgcacggcacgacctcaccctactacccgatcattgcatcaattgatgtggcagtaagcatgatggagggtgaatccggttattcgcttgtgcaggagtcaattgaagaagcgattgccttccgtaaagccgtggtcagcgtcaagcgccagctccaggagcaggaaggtggtgacgcctggttcttcgatgtgcttcagccaaccgaagtgcaggacagcgattctgggcagcgatacagttttgaagaggcacccgtatcgctgctgagccacagcgccgactgctggtcgctgcgctccggtgagcgctggcacggttttgccgatgatgatctggtcgaaaccaacagtatgctcgatccagtaaaagtgaccctgacttgtccagggatcggcccgaagggagaataccagaaaaacggtattccgggatatttgctgacccgttttctcgatgaccgtcgcattgaaattgcccgtactggtgactacaccgtgctgatcctgttctccgtcggcatcaccaaaggcaaatggggaactctgattgaaagcctgctggcctttaaaaagcattacgacaatgacgatctggccacagatgctatcccgtcgctgaaagcgcattctccacactacgacacgctaaccctcaaggagctatgtcagataatgcatgaaaaaatggatgagctggagctgatgtcgcatatcaacgacgcggtaaacaccgatccggaaccagttatgaccccggcagaagcctatcagaaagtcgtacgctacaaaaccgagcatatccggctggatgattttagcggcagaattgccgccagcatgctcgtcccatatcccccaggcattcctgtactgatgccgggcgaacggatgccgcaaggtaacaagggcattattggctatctgcgcgccctgcaggaattcgataagcaattcccaggttttgaacatgagatccagggcgttaacgtcgatgaaaacggggacttctgggtcagagcgattgtggaagaagaacgcgatgggcagtcgctacccggccacataacctttaaacgccaggtctctggtattaaaaagggccgccagtag

SEQ ID NO: 263605 - DNA, 1500 bp, Klebsiella pneumoniae
atggcagagcaatcttcagatgtaaaaaatagtgacaatagcgccggaggacataagctggggcttatatccctcatcgctattgtcgttagctccatgctgggaggcggcgttttcagtctgccgcaaaacacggcggcctcttctgcactagggccagtaatcattgcatggattattgccgggatcggtatttattttatcgcaaactcctttcgcgtactatcagatctgcgcccggaccttcaggctggagtgtatatgtatgcccaggaaggttttggttcctttattggctttaacgtcgcctggggctactggctgatgaccgcatttggcaacgttgcctttgcggtaattttaatggatgcttttaatcagtttatgccgggggtttttacggatggtaataatctgaactccattatctgcggctcagtgctgatctggggctataattttcttgttctgtccgggacgaaagtggccggatttgttaacaccttgggaaccatcgccaagctcgtccctctgatcctattcgtattactgctgggtgtgctgatcgattattcggacctgtttaaaaacttttggggagaatcacccgcgatcctcagtggcaacggaaatgacgccgcaccagtatcgctgctgtctcagattctggcaccgatgaccgtaacgctctgggcctttattggcgtcgagggagcggttgttctatccggacgtgccaaaaataaacaggacgtagggaaagccacactgatcggctttctgctggcgctaattatttatatgttaatgtccattctgccgttcggtgtaatgcctcaggcagaactagcgcaggtcagtaacccctctaccgcaggcgtgctcgcccacgttgtcggtcagtggggcgactggctgatgagcgcggggctgattatttctgttctggccggctggcttgcctggaccatgctatgcgctgaaataccgatggtagcaggacagaaaggcgctttcccgcgcgcgtttgcccgaacgaacagtaaacaggcggccaatgtgtcactgtgggttagtagctttgtgatgcaggcggccatgttacttgtttatttttcaaataatgcttggaccaccatgtataatatcagtgcgctgatggttgttccggcctatattaccaccacgctgtatctgaccagtatttgcagaaacggaaaatatgatcagtatgcaaaaaaaggccgcaggctggctttgtccagcggtgttttaggctcgctattctgtctgtttattctttacgccagccagattgagtatgttgcattaattcctatcctgttgacctgtggtctgccggtctttatctggtcaagaaaagaaaaaaatgatggtcagccgatatttaccaaaaaagagctgatttatctgattatgctgttgctgtgcgatattatcgtcgttgccctgtttattggtggatatttaaaggtataa

SEQ ID NO: 263606 - DNA, 132 bp, Klebsiella pneumoniae; identical to SEQ ID NO: 9528

SEQ ID NO: 263607 - DNA, 801 bp, Klebsiella pneumoniae
atgacgcagtcggcggtaagtcaggcaattgctagcctcgaacaagaacttggtgtgaatatactgttacgcgatcgccgtaaagctatacaactgaccacagcaggtcatcgcattgtgcaacatctgcgcgccattaatcgggaagttaacgcagtaaaagagatagccgagcaggaaaagcagaaccctcaaagaacgctgagacttggttgtttccccagcgtctgcgcctgtatcttaccggttgtgattcgctactttgaaattcatcatccgaatataaaaattattccttttgaggaaaatagcacagcgattattgattcgcttcagaatgaatccattgatgccggttttgttcattttccggtgagcggaatgtactccgtgcccatttatcaggataaattcaccgtagtgttaccgcccgaccatgctctggcaaaaaacagcactattacagtggaagagttaatgggtgaaccattaattattagtaaaggacgctatgaattaagcattatggcactatttaaagaaaagaatattaccccacagataaaatatgaatttaatcacccggatacagcgatcagttttattcgacagggattaggcatcgccttattaccagagttaacgctgaaaaccattgcagatgaattgtgttccgttcctctcgaaccaaccttctatcgacagatttcgttgctggctaaagaaaagccggtagaaggcagtccactgtttttactacaaatgtgcacagaacaattagtggtgagtggaaaaatttga

SEQ ID NO: 263608 - DNA, 1191 bp, Klebsiella pneumoniae
atgaaagagaagttatggacgaaggatttttgggcaataaccatcatcagctttattattttcttcgtcttttatgttttactaacattgttgccaatttatatctctgaccgcttgcatgcctctcctgataaagccggtttattggtgactttatttttaattgccgccattgttattcgcccatttgccgggcaatgggtgggtaaatactcgaataaaactattctggtgctctcttctctggcctttttattggtcacagcgttgtatcctttttgccactcaattgaatcactgctttttattcgggtgcttcatggtattaccttcggggttatcactacggtaaaaggaacgatttccgcgcggctgatcccggcctcccgacgtggggagggcatcagttttttctctctggcaatggggctggcaatggtggtcgggccgtggattggtctgaatatggcgcgctgggaagcctttaatctggctttctggctatgcaccggcgtggcagcggtggggattattctgtcgctgattatgacagtgccgccggttatcagccatgctgatggttcaacgccgaaaatgggcttcgccgccatgttcgatcgcgcggcgttgccatttgcgatggtcaccttttttatgaccttttcgtatgccggggtttctgcttttctggcgctttatgcacgcgaacttaacctgatgtcggcagccagtaatttcctgctttgctacgctatcttcctgatgatctgccgtacctttaccggcaatgtctgcgacaaaaaaggaccgaaatatgtggtttacccttgccttgtgttctttacggtaggactggtggttctcggctacacccagggaagcataatgatggttgtttctggcgcattgattggtatcgggtatggttccgtgacgccagtttttcagacgcagattatcagttcagtggaaccgcataaaatcggtgtcgcaaactccctcttcttcaatgcgatggatgcaggcctggcgctgggagcctgtgtgatggggatgatggttgcacatactggctaccgaatgatttatctgctgggtgcactattagtggtagtggctggtggagtctatgcgctgcaaatgaagggtaaaagcggtgttgcgctagtagtggcaaaagaaattcattaa

SEQ ID NO: 263609 - DNA, 651 bp, Klebsiella pneumoniae; identical to SEQ ID NO: 9529

SEQ ID NO: 263610 - DNA, 255 bp, Klebsiella pneumoniae; identical to SEQ ID NO: 14736

SEQ ID NO: 263611 - DNA, 1623 bp, Klebsiella pneumoniae; identical to SEQ ID NO: 9735

SEQ ID NO: 263612 - DNA, 1068 bp, Klebsiella pneumoniae
atggataagagtaagcgccatctggcgtggtgggttgtcgggttactggcggtggccgctatcgtggcgtggtggctgttgcgcccagcgggtgtgccggaaggctttgccgtcagcaatgggcgcattgaagcgacggaagtggatatcgccagcaaaattgccgggcgtatcgacaccattctggtgaaagaaggccagtttgttcgcgaaggtgaagtgctggcgaagatggatactcgcgtgttgcaggaacagcgactggaagccatcgcgcaaatcaaagaagcacaaagcgccgttgccgccgcgcaggctttgctggagcaacgccaaagcgaaactcgtgccgcacagtcgctggtcaatcaacgccaggccgaactggactccgttgccaaacgtcatacgcgttcccgttcgctcgcccaacgaggggctatttctgcgcaacagctggatgacgatcgcgccgccgctgagagcgcccgagctgcgctggaatcagcaaaagcccaggtttcggcttctaaagccgctatagaagcggcacgcaccaatatcattcaggcgcaaacacgcgtcgaagccgcacaagccactgaacggcgcattgccgcagatatcgatgacagcgaactgaaagccccgcgtgacggacgcgtgcagtatcgggttgccgagccaggggaagtgctggcggcaggcggtcgggtgctgaatatggtcgatctgagcgacgtctatatgaccttcttcctgccaaccgaacaggcgggcacgctgaaactgggcggtgaagcccggctgatcctcgatgccgcgccagatctgcgtattcctgcaaccatcagttttgtcgccagcgtcgcccagttcacgccaaaaaccgtcgaaaccagcgatgagcggctgaaactgatgttccgcgtcaaagcgcgtatcccaccggaattactccagcagcatctggaatatgtcaaaaccggtttgccgggcgtagcgtgggtgcgggtgaatgaagaacttccgtggcctgacgacctggtggtgaggttgccgcaatga

SEQ ID NO: 263613 - DNA, 2736 bp, Klebsiella pneumoniae
atgacgcatctggaactggttcccgtcccgcctgtcgcgcaactggcgggcgtgagccagcattatggaaaaaccgttgcgctgaacaatatcactctcgatattccgacccgctgcatggttgggctgattggtccggatggcgtcgggaagtcgagtttattgtcattgatttccggtgctcgtgtcattgagcagggcaatgtgatcgtgctgggcggcgatatgcgcgacccgaagcatcgacgcgacgtttgcccgcgcatcgcctggatgccgcaggggctgggtaaaaacctctaccacaccttgtcggtgtatgaaaacgtcgattttttcgcccgcctgttcggtcacgacaaagcggagcgagaagtgcgaattaatgagctgctgaccagcaccgggttagcaccgtttcgtgatcgtccggcagggaaactctccggcgggatgaagcaaaaactggggctgtgctgtgcgttaatccacgacccggaactgttgattcttgatgagccaacaacgggggttgacccgctctcccgcgcccagttctgggatctgatcgacagtattcgccagcggcagagcaatatgagcgtgctggtcgccaccgcctacatggaagaggccgaacgcttcgactggctggtagcgatgaatgccggagaagtgctggcaaccggcagcgccgaagagctgcggcagcaaacgcaaagcgccacgctggaagaagcatttataaatctgttaccgcaagcgcaacgccaggcgcatcaggcggtagtgatcccaccatatcaacctgaaaacgcagagattgccatcgaagcgcgcgatctgaccatgcgttttggttccttcgttgccgttgatcacgtcaatttccgcattccacgcggggagatttttggttttcttggttcgaacggctgcggtaaatccaccaccatgaaaatgcttaccggattgctgcccgccagcgaaggtgaggcgtggctgttcgggcaaccggttgatccaaaagatatcgatactcgccgtcgggtaggctatatgtcgcaggcgttttcgctctataacgaactcaccgtgcggcaaaaccttgagttacatgcccgtttgtttcacatcccggaagcggaaattcccgcgcgagtggctgaaatgagcgagcgttttaagctcaacgacgttgaagatgttctgccggagtcattaccgctcggcattcgccagcggctttcgctggcggtggcggtgattcatcgcccggagatgttaatcctcgatgagcctacttctggtgtcgatccggtggcgagggatatgttctggcagttgatggtcgatctctcgcgtcaggacaaagtgactatcttcatctccacccactttatgaacgaagcggaacgttgcgaccgtatctcactgatgcacgccggaaaagtgctcgccagcggtacaccgcaggagttggttgagaaacgcggagccgccagtctggaagaggcatttatcgcctatttgcaggaagcggcagggcagagcagcgaagccgaagcgccgcccgtggtacacgacgccacccacgcgccgcgtcagggatttagtctgcgccgtctgtttagctacagccgtcgcgaagcactggaactgcgacgcgatccggtacgttcggcgctggcgctgatgggaacggtgatcctgatgctgataatgggttacggcatcagtatggatgtggaaaacctgcgctttgcggtgcttgaccgcgaccagaccgtcagtagccaggcgtggacgctcaatctctccggttcccgttactttatcgaacaaccaccgctcaccagttatgacgaactggatcgccggatgcgtgcgggcgatatcacggtggcgattgagatcccacccaatttcgggcgcgatatcgcgcgtggtacgcctgtggaactcggtgtctggatcgacggtgcgatgcccagtcgtgccgaaacggtaaaaggttacgtgcaggctatgcaccagagctggctacaggatgtggcgagccgacaatccacaccctccagccaaagcgggctgatgaacattgagacgcgctatcgctataacccggacgtaaaaagcctgccagcgattgttccggcggtgatcccgcttctgctgatgatgatcccgtcaatgctaagcgcccttagcgtggtgcgggaaaaagagttggggtcgattatcaacctttacgtgactcccaccacccgtagcgaatttttgcttggcaaacagctaccgtacatcgcgctggggatgctgaactttttcctgctctgcggcctgtcggtgtttgtgtttggcgtaccgcataaaggcagtttcctgacgctcaccctggcggcgctgctgtatatcatcatcgccaccggaatggggctgctgatctccacctttatgaaaagccagattgccgctattttcggtacggcgattatcacgttgatcccggcgacacagttttccgggatgattgatccggtagcttcgctggaaggtccaggacgctggatcggcgaggtttacccgaccagtcattttctgactattgcccgcgggacgttctcgaaggcgctggatttgactgatttgtggcaactttttatcccgttgctgatagccatcccgctggtgatgggcttaagcatcctgctgctgaaaaaacaggagggatga

SEQ ID NO: 263614 - DNA, 1125 bp, Klebsiella pneumoniae
atgcgccatttacgcaatatttttaatctgggtatcaaagagttgcgcagtttgctcggtgataaagcgatgctgacgctgattgtcttctcgtttacggtgtcggtgtattcgtcagcgaccgttacgccaggatcgttgaacctcgcgccgatcgccattgccgatatggatcaatcgcagttatcgaacaggatcgttaacagcttctatcgcccgtggtttttgccaccggagatgatcaccgccgatgagatggatgccgggctggacgccggacgctataccttcgcgataaatattccgcctaattttcagcgtgatgtcctcgccggacgccagccagatattcaggtgaacgtcgatgccacgcgcatgagccaggcatttaccggcaatgggtatatccagaatattatcaacggtgaagtgaacagctttgtcgcgcgctaccgtgataatagcgaaccgttggtatcgctggaaacccggatgcgctttaacccgaacctcgatcccgcgtggtttggcggggtgatggcgatcatcaacaacattactatgctggcgattgtattgaccggatcggcgctgatccgcgagcgtgaacacggcacggtggaacacttactggtgatgccgataacgccgtttgagatcatgatggcgaagatctggtcgatggggctggtggtgctggtggtatcgggattatcgctggtgctgatggtaaaaggcgtgctgggcgtaccgattgaaggctcgatcccgctgtttatgctgggcgtggcgctcagtctgtttgccaccacgtcaatcggcatttttatggggacgatagcgcgttcaatgccgcaactggggctgctggtgattctggtgctgctgccgctgcaaatgctttccggtggatccacgccgcgcgaaagtatgccgcagatggtgcaggacattatgctgaccatgccgacgacacactttgttagcctcgcgcaggccatcctctaccggggtgccggattcgaaatcgtctggccgcagttcctgacgctgatggcaattggcggcgcgtttttcaccatcgcactgctgcgatttaggaagacgattgggacaatggcgtaa

SEQ ID NO: 263615 - DNA, 417 bp, Klebsiella pneumoniae
atgtttggtgagtatacaaatcctgttaataaggggttggaaggattgacatgggatggaaataagcagaatctgtttgcagcaaaggagatgaaagatgtcataattaccagagctaatatgataagtaatgacatgggaattgacaaaatcatcgatccggtcgccaagtctttaaaggatgtatcaggattgcattatcatacaccaacatcttcatttttaattctttctcatgaatccccaaaaattatagaggttaataatgagggtagaattacagatagattgtatctggagtctggttggtccggtttgacagaaagtgtcccgcaggccgaagggataactctagattataatggttacttgtatatagtgagtgaaccgaatttgttctatcgttttgcgaaataa

SEQ ID NO: 263616 - DNA, 486 bp, Klebsiella pneumoniae
atgaaaaagaaacttattgcagctgcagttctgtttatgacggctaacatggcgaatgctgcaactctggataatacatcttccgtaaaagctgactttgaggttgtcggtggttgcactgtctctggaacatggactggtgagcaagtccctgctgctgtatatcagggctcagctaagcgtgtaggtgtacttggtatttcgttgtctggttgcactagccaagtttatttcgaagggaacgataaaaactcagaaggactgcctcaagccactgatcctaagggtaataaaatagttattattccatcattcgatgcattaaataatcttgtgtctaaagacgctacacttaatgtgttctatagcaaaaattccctgaatgatggtgacactctttctgttgaattagttaaccgtgatcagtggaatgctaaagctggtaaacatactatgactcttaatgtaggtacttactctatctaa

SEQ ID NO: 263617 - DNA, 417 bp, Klebsiella pneumoniae; identical to SEQ ID NO: 28193

SEQ ID NO: 263618 - DNA, 2553 bp, Klebsiella pneumoniae
atggaagaaagaaataataaatacgaactgtctgcgctgtatatcgctgttctttcatcattgcctttctttttttgtgcagatgttgcggccagaagctacacattcgagccatctatgttgaatgtagatgggaatgatattgatctttctatatttgaaagtggcgctcaattaccgggtacttactatgttgatattatgcttaatggtaagttggtagatacaaaggaaatggagttttctcgtgagcgtaataaagacggagagtttgttctttcttcatgtcttactcagagtatgttgaatcgttatggggttaaggtaggagactacccagaactttttgttaatagttctaatggtaaggtatgtggtgatttgtctgttattcctggtgcattctcatattttgacttttacaatcaacaactgaatttaagtataccgaatgtagcactatatccaaaatataaaggcattgcatcagaagaactttgggataatggaattaatgcatttctgatgaattaccaagctaatgcacaaataaaccaatatcgtaacaaaaaaaatcgagaagtcagttcttattgggccaggatcgagcctggtatgaatattggttcttggcgcataagaaatttgacaacttttactaaagaaaatggtaattctgaaaaaagagaaagcgtttacacatatgctgaacgtggtctcacatccataaaaagcaatctgctgataggtgagtcctatactaactctgatatatttgacagcatatctttcagggggataatgctccattcagatgagagtatggttccttatagcaagtatgcttttgcacctgtaatcagaggtattgcacagtctcaggctttgattgaggttcggcagaatggttatctcattcatactgttagtgtggctccgggggcttttgaaatctctaacctacctgtcacaggctcaggtggtgatttacaagtttccgttatagaaacaaatggtaaaaaccagtctttcaccgtcccttacactacacctgtgattgctttgcgggaaaactatctgaaatatagcttggttggcggtatgtatcgttcggcttattctggtgtggacaatactgctttgattcagatgaccgcaatgtatggtatgccatggaatctgacaacatttgtaggattccaaggctctgaacattacaattctgtcgcaacaggtgtcggattgtctatgggggatatgggggccgtatcgcttgatggaatatatgctcgaggacagaaagaaaaacagaataaagaagatggatattcatggagagtaagatacagtaaggtatttgatataacaggaactaattttattgctgctagtcatcagtactcttctgatggttatcagactctttctgatgtacttgatacttatggccatagcaattactcctacggaggttatgctaatcgctctatgcggaatagtctgacaataagtcagtcaatgggggaatgggggacctttagttttgggggggttagggatgaatatagaggaaatagatcgccacagaattctataaatgcgttatatagcaatagtatggaatggggaacattgtctcttaactggagtcagaataagataactgactcttcgagaagtgtgaaagataagaaagaaaatatcttcagcttttgggtgagtattcctctatacagattacttggaaatacgtctaacaatataaatgcaacaacacagatacagaaatatgataaccaaaaaatgcagtatgaatttggtatgaatggtcgtgcattcaacaggcagttgtactgggacattagtcaacgattggcaccaggaaacgaaaattataatgatgccagcagattaaaccttgagtggtatggtacttatggtcagattcgaggcggatacggttacagcgattctctcagacagatgaacgcaggaatatcaggaaccgccatcgttcacagtaatggagttacgtttggacagaaacagggtgggactattgcccttgttgaggcgcagggggtagacggagcggaagttattggatggcctggtgttaaaacagacttcagaggttatacagcattgggccatcttacaccatatcaggaaaacactgtttcattgaaccccgcttctttccctgaatatgcagaagtattgcagacagatacaaaagttatacctacaaaaggtgcggtggtttcggcaaggtttaaaacatctattggtaaaaaggcgttgtttaagttaacaagacacgatgggaaaaaagttccttttggtgctgtggtttcatcagcaacggcagatgataataagcgcgttgtagggattgtaaatgagtcaggtgaagtgtatatgtcaggcctgtctgaaaaaggacaactggatgtgaaatggaacagtcatggaagctgtaaggcagtttataagctttctgataataaaagcattgttaatatatataatgcatccttgacttgtatataa

SEQ ID NO: 263619 - DNA, 753 bp, Klebsiella pneumoniae; identical to SEQ ID NO: 8765

SEQ ID NO: 263620 - DNA, 1686 bp, Klebsiella pneumoniae
atgataaccattcccattacgtttcgtatgttgatagcaaagtatctctgtctgctgaagcccttttggctgcgtaagaataataaaacttcagtgctgttaatcattattatcctcgccatgatccttggcgtggttaaaattcaggtctggttaaacgactggaataatgattttttcaatgcgctaagccagaaagaaaccgataagctttggcagcttgtcctttggttccctgccctgctggggatctttgtattaatatccgtaaacaaaacatggttaattaaactgctgactattcgctggcgcgaatggttaacagattactaccttaatcggtggtttgcagataaaaactactacttcacgcagatctacggcgagcataaaaatacagataaccctgaccaacgtatcgctgaagacattctcttactgatcagcaaaacgctcagtctttcatttggcttcatccagtcacttagcatgctgatcacctttaccgttattctttggcaaagcgcgggtacgctctcattcactgttggtggaacagaatggaatatccaggggtatatggtctataccgttgtgctcattgtgatcggtggaactttatttactcataaggttggtaaacgtattcgtccgcttaatgtggaaaagcaacgtagcgaagcgacatttcgaactaatcttgtgcagcataataagcaggctgaactgattgcgctaagcaatgctgagtctctacaacgccaggagttgagcgacaattttcataccattaaagagaactggcatcgtttaatgaatcgtcagcgctggcttgattactggcagaatatttattcgcgctcgcttagcgttcttccctactttctgttattgccacagtttattagcggacagatcaatctgggcggactgatgaaatcgcgccaggcatttatgctggtatcgaacaatttaagctggtttatttataaatatgacgaacttgctgaactggctgcggttatcgatcgtttgtatgagttccatcaactcaccgaacagcgccctacgaataagcctaaaaattgccaacatgcggtacaagtggctgacgcgagtattcgtactcctgataataagatcatattagagaacctgaactttcatgtttcgccaggcaaatggctattactgaaaggttactctggtgcgggaaaaaccacactgcttaaaacattatcccactgctggccgtggttcaaaggtgatatttcttctcctgctgacagttggtatgtgtcacaaacaccgttaatcaaaaccggcttactgaaagagattatttgtaaagcacttcccctgcccgtagacgataaatcgttgagcgaaatactgcatcaggttggtctggggaaattggctgcgcgtattcatgaccacgatcgctggggagatattctttccagcggcgaaaaacaacgtatcgccctggcacgattaattttacgacgtccgaaatggatatttcttgacgaaactacctctcatcttgaggaacaagaggctatccgcttactgcgtttagtgcgtgaaaaactacccacaagcggcgtcattatggttacacatcaacccggtgtctggaacctggctgatgatatttgtgacattagcgcggttttataa

SEQ ID NO: 263621 - DNA, 2373 bp, Klebsiella pneumoniae
atgaagcgagttcttattcctggcgtcattttatgtggcgctgatgtggcgcaggccgtcgatgacaaaaacatgtacatgcatgtttttgaagagatgacggtctatgctcctgtccctgtacccgtaaacggcaacacgcattacaccagtgaaagcatcgagcgtttaccgaccgggaatggcaatatcagcgatctgctgagaaccaaccctgcggtacgcatggattcaacgcaaagtacctcattgaaccagggagatattcgccctgagaaaatctctattcacggtgcgtcgccctaccagaatgcctatttgattgacggtattagtgcaactaataacctgaacccagcgaatgagtccgatgccagtagtgcaaccaatattagcgggatgtcacaggggtattatcttgatgtcagcttactggacaatgtgacgctttatgacagttttgtgccggttgaatttggtcgcttcaatggcggggtaattgatgcaaagatcaaacgcttcaacgctgatgatagcagcgtgaaactgggttaccgcactacgcgttcggactggttaacatcgcatatcgatgagaataacaagagcgcatttaatcaaggctcttcaggaagtacttattactccccagattttaaaaagaacttttatactttgtcatttaatcaggaactcgctgataacttcggcgttaccgccggtttatcgcgccgccagtctgatatcacccgcgcggattatgtttcgaatgacggcattgtcgccggtcgggcacagtataaaaacgttatcgataccgcagtgagcaaatttacctggtttgccagtgaccgctttacccacgatttaaccttaaaatataccggctccagccgtgattataataccagcaccttcccggagtctgatcgcgaaatgggtaataaatcctatggtctggcatgggatatggatacgcagctcgcatgggccaaactgcgtactaccgttggttgggatcatattagtgattatacccgtcacgatcatgacatatggtacaccgaactttcatgtacatatggtgatatttcagggcgttgcacccgtggcggattaggacacatttcccaggctgtagataattacaccttcaaaacacgcctggactggcaaaaatacgccgtgggtaatgtttcgcatcaaccctacttcggcgcggaatacatctattccgatgcatggactgaacgccataaccagtctgaatcctatgtgattaatgctgcaggaaagaaaactaaccataccatttaccataaaggtaaaggcagtctgggaattgacaactacacgctgtatatggcggatcgcattagctggcggaatgtgtcgttaatgcccggtgtgcgatatgactatgacaactatctgtcaaaccacaatatctccccgcgatttatgacggaatgggatatttttgctgatcaaacctcaatgattactgccggttataaccgttactatggcgggaatattcttgatatgggattacgtgatatccgcaatagctggacggaatcggtatcaggcaataaaaccctgacgcgttatcaggatttgaaaacaccttataacgatgaactggcaatggggttgcagcagaaaatcggaaagaacgttattgcgcgtgcaaactatgtttatcgtgaagcgcatgatcaaatcagtaaaagcagtcgtaccgacagcgcgactaaaaccaccattactgaatataacaacgacggcaaaaccaaaacgcattcgttcaacctcagttttgaactggccgaacccctgcatatcagccaggtagatattaacccgcaaattgtctttagctatatcaagagcaagggcaacttgtcgttaaacaatggttatgaggagagcaataccggtgataaccgggtggtatataacggtaatctggtctcttacgatagcgttccagtggcggattttaataatccactaaagatctccttaaacatggatttcacgcatcaaccgagcgggttggtgtgggcgaatacgttgacctggcaagaagcgcgtaaagctcgcattatcctgggtaagacgaatgcgcaatacatcagcgaatattcagattacaagcagtatgttgacgagagactggatagcagcctgacctgggacacccgcttgtcctggacgccacaatttctgaaacaacaaaacctgacgatcagtgccgatattctcaatgtactggatagcaaaaccgctgttgatacaacgaataccggcgtggcgacctacgccagtggccgtactttctggcttgatgtcagcatgaaattttaa

SEQ ID NO: 263622 - DNA, 2784 bp, Klebsiella pneumoniae
atgagaaacctctgtttcttactgacgttagtggcaactctgttgctccccgggcgactgattgccgccgccttaccgcaggatgaaaagttaattaccgggcaactggacaatggcttgcgatatatgatttatccgcatgctcaaccaaaggatcaggtaaatttatggctgcaaattcataccggttcattgcaggaagaagacaatgagcgcggcgtggctcattttgtagaacatatgatgtttaacggcacaaaaacatggccgggtaataaagtcatcgaaacatttgagtcaatgggcctgcgctttggtcgcgatgttaatgcctataccagctatgacgaaacggtgtatcaggtaagtttgccgactacgcagaaacaaaatctgcaacaagtgatggcaatcttcagtgaatggagtaatgccgcaacctttgaaaaactcgaagtagacgctgaacgcggcgtaattactgaggaatggcgtgcccatcaggatgcgaaatggcgcacctctcaggcgcgccgccctttcctgcaggctaatacccgtaatttagaccgtgaacctatcggcctgatggatactgtcgctacggtcacaccggcacaattgcgccaattttatcaacgctggtatcaaccaaataatatgacctttatcgtggtcggcgatattgacagtaaagaagcgctggcgctgattaaggataatttaagtaagcttccggctaacaaagcagctgaaaatcgcgtctggccgacaaaagccgaaaaccacctgcgctttaatatcattaatgataaagaaaaccgggtgaacggcatcgcactctattatcgcctgccaatggtgcaagtgagcgatgagcaaagctttatcgaacaagctgaatggagcatgttggttcagctgttcaatcagcgtctgcaggaacgcatacagtcgggcgagttgaagactatttctggcggcactgcgcgcagcgttagaattgcacccgattatcagtcgctgtttttccgtgtaaatgcacgagacgataatatgcaggatgctgcgaatgcattaatggcagagttggcaactattgatcagcatggtttttctgctgaagaactcgatgatgtcaaatctacccgtctcacctggctgaaaaatgcggttgatcagcaagctgaacgtgatttacgtatgctgaccagtcgcctggcatccagctcattaaataatacgccgttcttgtcgccggaagagacatatcaactttcgaaacgtctgtggcagcaaattaccgtgcaaagtctggcggaaaaatggcagcagttaagaaagaaccaggatgcattttgggagcaaatggtaaacaatgaggttgctgccaaaaaagcattgtctcctgcggctatcctggcgctggaaaaagagtacgccaacaaaaagctggcggcttacatcttcccaggcagaaatttatcgttaacagtagacgctgacccacaggcggaaattagcagcaaagaaacgctggctgagaatctgacatcattaacactttccaatggtgccagggttattctggcaaaatctgcgggtgaagagcaaaagctacaaattactgccgtatctaataaaggcgatttaagtttccctgcgcagcaaaaatcacttatcgcgctggcaaataaagcagtaagcggaagcggcgttggtgaactctcctcttccagcctgaaacgctggagtgcggaaaactcggtaaccatgagcagtaaagtcagtggcatgaatacattgctctctgttagcgcgcgggctaataaccctgaacctggtttccagttgattaaccagcgaatcacccacagcacgattaacgataatatttgggcatcgctacaaaatgctcaaattcaggcgttgaaaacgctcgaccagcgtccagcggagaaattcgcccagcagatgtatgagacgcgctatgctgatgaccgcacgaaattactgcaagaaaatcagattgcacagtttactgccgcagatgcgctggctgccgatcgccagttgttttcatctccagcggatatcacgtttgtcattgtcggtaatgtcgcagaagacaaactcgtggcgttaattacgcgttacttaggatcaatcaaacactctgattcgccattagccgcaggtaaaccattaactcgcgcgacggacaacgcatcggttactgtaaaagaacaaaatgaacctttggcacaggtttcacagtggaagcgttatgattcccggacacctgtaaatctggagacgcgtatggcgctcgatgcttttaacgtcgcactggcaaaagatctacgcgttaatattcgtgaacaggcctctggggcatacagcgtttcttctcgcctctcggttgatcctcaggccaaagatatcagtcatttgctggcttttacttgtcaaccggaacgacatgatgaactgttaacgttagcgaatgaagtgatggttaagcgtctggctaaagggatcagtgagcaagaactgaacgaataccagcaaaacgttcagcgcagcctcgatatccaacagcgtagcgttcaacaattagcgaacaccattgtaaatagtcttattcaatatgacgatcctgcagcatggactgagcaggagcaattgttgaaacaaatgacggtagagaatgttaacactgccgttaaacaatatctttctcatccggtgaatacctataccggagtattgttgccaaaataa

SEQ ID NO: 263623 - DNA, 1539 bp, Klebsiella pneumoniae; identical to SEQ ID NO: 9715

SEQ ID NO: 263624 - DNA, 186 bp, Klebsiella pneumoniae; identical to SEQ ID NO: 9714

SEQ ID NO: 263625 - DNA, 411 bp, Klebsiella pneumoniae; identical to SEQ ID NO: 9713

SEQ ID NO: 263626 - DNA, 1965 bp, Klebsiella pneumoniae
atgaacatttcggaagtcgatctgcataaactgacggtcagcgatccgttcctcggtcagtaccaacaactggtccgcgacgtggtgattccttatcagtgggatgccttgaacgatcgtatcccagaagcggaacctagccatgcgattgaaaactttcgcattgccgcaggactgcaagacggtgaattttacgggatggtgtttcaggacagcgacgtcgccaaatggctggaagcggtagcctggtcgctgtgccagaagccggatgccgaactggaaaaaaccgctgacgaggtaatcgaactggtcgcttccgcccagtgcgaagatggctatctcaatacttactttacggtaaaagcgcccgaagaacgctggagcaatctggcggagtgtcatgaactttactgcgccggtcatctgattgaagccggagtcgccttcttccaggccacgggcaagcggcgcttgctggaggtcgtttgccgcctggccgatcatatcgacagcgtatttggtccaggtgaaagtaagttacacggttatcccggtcacccggaaattgaactggcactaatgcgcctgtatgaagtgactgaagagccgcgctacctggcgctgacgaactattttgtcgaacagcgtggtgcgcaaccgcactattacgaccaggaatatgaaaagcgcgggcagacctcgcactggcacacctacggcccggcgtggatggtgaaagacaaagcctacagccaggcgcatttgcccatcgcacagcagcaaaccgccattggtcacgcagtacgttttgtctacctgatgaccggcgtcgcgcatctcgcgcgtttaagtcacgatgaaagcaagcgtcaggactgcctgcggctgtggaacaatatggcccagcgtcagttatatattaccggcggcattggctcacaaagcagcggcgaagcgttcagcagcgattacgatctgccgaatgacacggtatacgccgaaagctgtgcttccatcggcctgatgatgttcgcccggcgaatgctggaaatggaaggcgacagtcaatatgccgatgtgatggagcgcgcactgtacaacaccgtgctcggcggcatggcgctggatggcaaacatttcttctatgtgaatccgctggaagtgcatccaaaaacgttaaaattcaaccatatctacgatcacgttaagccgatccgccagcgttggtttggttgcgcttgttgtccgccaaatatcgcccgcgtgctaacctcgattggtcattatctctacacgccgcgtgaagatgcgttgtatatcaacatctacgcaggaaacagcatggaagtgccggtagaaaatggcacgctgcgtctgcgggttagcggaaactatccgtggcaggaacaggtgacaattgcggttgaatcgccccagccggtgcgtcatacgctggctttacgtctgccggactggtgcatacagccgcagatcatattgaatggggaagaggtcgagcaggatattcgtaaagggtatttgcacattacccgcgaatggcaggagggcgacacgctgaatctgactttgccaatgccggtacgtcgcgtttacggtaaccctctggtgcgtcacgtcgccggaaaagtggcgattcagcgcggcccgctggtgtattgcctggaacaggccgacaacggcgagtcactgcataacctgtggctgcctaccgatgcgccatttacgacctttgacggcaagggattgttccgccataagatcttaatccaggcaccgggttaccggtgtgaacagagcaatccagaacaacaaccgttgtggcattacgactatgccccagccaaacgccagccgcaaactctgacatttatcccgtggtttagctgggctaaccggggtgaaggcgaaatgcggatctgggtgaatgaggaaaccagcgcatga

SEQ ID NO: 263627 - DNA, 1401 bp, Klebsiella pneumoniae
atgacctctacaccgattactaccgctgatatcgctaaaggtaaaattgacgatgcgttatctgtacgggaaaaaataggctacggcctgggtgacgcaggcggcaccgtaataacttgcctgatcatgaactttctcacctttttctacaccgacgtttttggcttaactccggcgctggtcggcacgctgtttattgcactgcgcgtgtttgatgccatctccgacccggtgatgggcgtcattgccgaccggacgcaaagtcgctgggggcgctttcgtccgtggcagttgtggattgccattcccatcggcattatcggcatcctgacgttcaccgtgccagatgccagcatgggagtaaaaatcgcctgggcgttcggcacttacctgctcctttcagtcggttataccgccatcaacgtgccgtactgcgcgctgatcaacaccatgaccacccgccacaatgaagtgatctcctgccagtcctggcgattcgttctctgcggcgtggcgggatttctggtttcggtaggcttaccgtggatggtagatctcttcggtcagggtaatgccgcgcgcggctatcaactgggcgtcggcgtattgtgcgccattgccgtggtgatgttcctgtgctgtttcttctgggttcgtgaacgggtgccactctccacaatggggaaatttaccctgcgcgaacatcttgccgggctgcgaaacaacgaccaactgctgctgatgctggtcatgtctttcctgctgattaacgtctttaatattcgcggcggtgggtatatgtacttcattacctacgtcttacaaggcagtacgggctacacgtcgctgttcttcaccatggtcaccttcgcctccattatcggctcggtgattgtcagcccattaacgcggcgtttcgataccgtcaaaatttactactacaccaacctgctcctcgctgcgctggcggtgttgatgtggttcctgccttctggcccggcttatcaaacgctgtggctggcggtgatcctcggtaatggcgtgattcttggcttcacattgccactgcacttctcattgatggcctttgccgatgactacggcgagtggaaaacccgcgtacgttcttccggcatgaacttcgccttcaatctgtttttcatcaagctggcctgggcctccagcgccgggatcatcagcctgctgtttatttttgtcgcctaccagccaggcgtggaaaaccagaccgccagttcgcttggcgggatcgcggcgatggaaacattgctgcctgcgctattccacctgctgctggcgatggcgatccgcttttgcaaactcaataaccctatgatgtcacgcatagctagcgacctgcgtcagcgtcatgtacagccttaa

SEQ ID NO: 263628 - DNA, 684 bp, Klebsiella pneumoniae
atgacggcaattgccccggttattaccattgatggcccaagcggtgcagggaaaggcaccttgtgtaaggctatggcggaagcgttgcaatggcatctgctggactcgggtgcaatttatcgcgtactggcactggcggcattacatcaccatgttgatgttgcatcggaagatgcgctcgtgccgctggcatcccatctggatgtacgttttgtgtcgaccaatggcaatctggaagtgatcctcgaaggggaagatgtcagcggcgaaattcgtactcaggaagtggcgaatgctgcttcacaagtcgcggcattcccacgcgttcgtgaagcattattgcgtcgccaacgcgcgtttcgcgaattaccaggcttgattgccgatggccgcgatatgggaacggtggtattccctgatgcgccagtgaaaattttccttgacgcctcctcggaagaacgtgcgcatcgccgcatgctacagttgcaggagaagggctttagtgttaactttgagcgccttttggccgagatcaaagaacgcgacgaccgcgatcgtaaccgagcggtagcgccactggttccggcagccgatgctttagtgttggattccaccaccttaagcattgagcaagtgattgaaaaagcgctacaatacgcgcgccagaaattggctctcgcataa

SEQ ID NO: 263629 - DNA, 765 bp, Klebsiella pneumoniae
atgaagaatactaaattactgctggcgattgcggcctctgcagcattactgacagggtgtcaaaatacccacggtattgataccaatatggctatcagctcaggtttaaatgcctataaagcagcaacgttaagcgatgctgatgcaaaagcgattgccaatcagggctgtgccgaaatggacagcggcaatcaagtcgcaagtaaatccagcaagtacggtaaacgtctggcaaaaatcgccaaagcattgggtaacaatattaatggcacgccggtcaactataaggtttatatgaccagcgacgtcaacgcatgggcgatggcgaacggctgtgttcgtgtctacagtggcctgatggacatgatgaacgacaacgaaattgaaggcgttctgggtcatgaactgggccacgtcgcgttgggtcactcgctggctgaaatgaaagcttcttatgcgatcgttgccgcacgtgatgcgatttccgctaccagcggtgcggcttcccagctttctcgctcacaattaggtgatatcgcagaaggcgcgatcaatgctaaatactcccgcgataaagagtccgaagcagatgatttctcctttgaactgttgaagaaacgtggcatcagcacccaggggctggttggcagctttgaaaaattggccagcctggatggcggtcgtacccagtccatgtttgactctcacccaccatcaacagagcgtgcgcaacacatccgtgatcgtatcgcctctggtaagtaa

SEQ ID NO: 263630 - DNA, 1284 bp, Klebsiella pneumoniae
atggaatccctgacgttacaacccatcgctcgtgtcgatggcactattaatctgcccggttccaagagcgtttctaaccgcgctttattgctggcggcattagcacacggcaaaacagtattaaccaatctgctggatagcgatgacgtgcgccatatgctgaatgcattagcagcgttaggggtaagctatacgctttcagctgatcgtacgcgttgcgaaattatcggtaacggcggtccattacacgcagaaggtgccctggagttgttcctcggaaacgccggaacggcaatgcgcccgctggcggcagctctttgtctgggtagcaatgatattgtgctgactggtgagccgcgtatgaaagagcgcccgattggtcatctggtggatgcgctgcgcctgggcggggcgaagatcacttacctggaacaagaaaattatccgccattgcgtttacagggcagctttactggcggcaacgttgacgttgatggctccgtttccagccagttcctcaccgcactattaatgactgcgcctcttgcgccggaagatacggttattcgtattaaaggcgatctggtttctaaaccttatatcgacatcacactcaatctgatgaagacgtttggtgttgaaattgaaaatcagcactatcaacaatttgtcgtaaaaggcgggcagtcttatcagtctccgggtacttatttggtcgaaggcgatgcatcttcggcttcttacttcctggcagcagcagcaatcaaaggcggcactgtaaaagtgaccggcattggacgcaacagtatgcagggtgatattcgctttgctgatgtgctggaaaaaatgggcgcgaccatttgctggggcgatgattatatttcctgcacgcggggtgaactgaacgctattgatatggatatgaaccatattcctgatgcggcgatgaccattgccacggcggcgttatttgcaaaaggcaccaccacgctgcgcaatatctataactggcgtgttaaagagaccgatcgcctgtttgcgatggcaacagaactgcgtaaagttggtgcggaagtagaagaggggcacgattacattcgtatcactccaccggaaaaactgaactttgccgagatcgcaacatacaatgatcaccggatggcgatgtgtttctcgctggtggcgttgtcagatacaccagtgacgattcttgatcccaaatgcacggccaaaacatttccggattatttcgagcagctggcgcggattagccaggcagcctga

SEQ ID NO: 263631 - DNA, 1089 bp, Klebsiella pneumoniae
atggctcaaatcttcaattttagttctggtccggcaatgctaccggcagaggtgcttaaacaggctcaacaggaactgcgtgactggaacggtcttggtacgtcggtgatggaagtgagtcaccggggcaaagagttcattcaggttgcagaggaagccgagaaggattttcgcgatcttcttaacatcccctccaactacaaagtattgttctgccatggcggcggtcgcggtcagtttgctgctgttccgctgaatattctcggtgataaaaccaccgcagattatgttgatgccggttactgggcggcaagtgccattaaagaagcgaaaaaatattgcacgcctaatgtcttcgacgccaaagtgactgttgatggtctgcgcgcggttaagccaatgcgcgaatggcaactctctgataatgctgcttatatgcattactgcccgaatgaaaccatcgacggtatcgctatcgacgaaacgccagacttcggcaaagatgtggtggtcgccgccgacttctcttcaaccattctttcccgtccgattgacgtcagccgttatggtgtaatttacgctggcgcgcagaaaaatatcggcccggctggcctgacaatcgtcatcgttcgtgaagatttgctgggcaaagcgaatatcgcgtgtccgtcgattctggattattccattctcaacgataacgactccatgtttaacacgccgccgacatttgcctggtatctgtctggtctggtctttaaatggctgaaagcgaacggcggtgtagctgcaatggataaaatcaatcagcaaaaagcagaactgctgtatggggtgattgataacagcgatttctaccgcaatgacgtggcgaaagctaaccgttcgcggatgaacgtgccgttccagttggcggacagtgcgcttgacaaattgttccttgaagagtcttttgctgctggccttcatgcgctgaaaggtcaccgtgtggtcggcggaatgcgcgcatctatttataacgccatgccgctggaaggcgttaaagcgctgacagacttcatggttgagttcgaacgccgtcacggctaa

SEQ ID NO: 263632 - DNA, 693 bp, Klebsiella pneumoniae; identical to SEQ ID NO: 9457

SEQ ID NO: 263633 - DNA, 453 bp, Klebsiella pneumoniae
atgatgactaaacaacgtcttatccagctcattcatattgcccgtaatgaactgggtatggatgaagacagctaccgccagatgttacaggggctgaccggtaaagcctcaaccaaaggaatggataccacacaactaaactgcgtgctggaatccatgaaaaggaaaggctttcgcgttaagcctgccggaaaagccagctccggtttaccgctggataaccatccgcagtccaggaaaatccgtgcgctatggcttgaaatggctgctgccggcattgttcgtgaccgttcagaaaatgcattagcgcggtggatcaagcgggaaacgggcatcagcgccctgcgctggctcaatactgaacaggcaagcagtgttattgagaaactgaagaagtggcagcacagagctgcgggagtaaaacatgagcgacctgaatcagtttcgaagtaa

SEQ ID NO: 263634 - DNA, 231 bp, Klebsiella pneumoniae
atgattacgttatcaggtaacagccggaaattaaaagcctgccgaatatctgccagatacctttttgcccgcgccttttttaagaacgtcaggccggggatcacaattggtgttattgccggacgcgaacaggttgaaaaatacatgtcaggtgcatggtggaataaagaccctgtcattgctgcccgtaatattcatatcagttggggggatattcagaatgacggctga

SEQ ID NO: 263635 - DNA, 684 bp, Klebsiella pneumoniae
atgacagaccaggataaacacattgagaaactgaaaaagttgctggcgctggccgcatccggcaacccgcacgaggccgctctggcactgcgccgagcccgtaaactgatggatgttcacggcatcacacattccgacattgctatgagtgatattgatgaaaccatcagtcattactggccgacaggcagtctccgtccaccgcgctacatgctgggcctgatgaacatcatccgcgaggcatttggtgttaactccatcattcaccccggcacgcatccgtctgtggggttctacggtaaccgggaacgagcggcactggctgcgtacacctgggaagtgctggtccgccaactgaaaaaggcgcgtcagcagtatatcagcgcacagaacaaaagaataaaaaacgccacccgtaccagccgtggaaaccagtttgctgaaggctgggtactggccgttatcagtgaaatacagtcctttgccctgaccgatgatgagcgtgaactgatgcaacagtggctggaacataaatacccgcaaacgcaaaccaccagggcgcgtaaaccgggaagaagccgcaatggcgacgcctcgcgctatgcggggtttcgtgaagggcagaacgtcagactgcaccgaccggtcagtgggcgggaacagcagaaactggaggccagatga

SEQ ID NO: 263636 - DNA, 216 bp, Klebsiella pneumoniae
atggctgacatactcagggaaatcaccgcatggacactgattcttactggcctggcgacatgcctcagtgcgggggcagccctggctgccctgctgatgcacataacaacacagtggttatgggaaaagcttaaagcagcatacagcctgaaagagctgtccgacgctgtccgggcatggaaacggcagaaaaataccggagatactgaacaatga

SEQ ID NO: 263637 - DNA, 297 bp, Klebsiella pneumoniae
atgacacggaacaccatactcacccgcaccgccctctaccgtctggccctgcagcgtttcggtccggatgcacaggccctgaaactgacagaagaggccgctgaactggcggccagtgctgcccgcaacctgaacggacagggcagcgaaagtgacctcgcggcagagctggcagacgtggaaatcatgacagagcaattgcgccttcaggggatggaccggctgattgacttccacaaacagaaaaaactggaacgccttgccgcacggctgggcgtgatttacacgaacgagtaa

SEQ ID NO: 263638 - DNA, 273 bp, Klebsiella pneumoniae
atgattaccccacaggaagcacgacagcgcacccgaacccttgttgaacactatgtcaacgagtgtgaatgccgcgacctcaccgatgtgaagcacgtcctgacggcgctaatcagcatgaccgctcaggccattgtggcgaccaacggaaaggcggctgccctgcaggtactggtgaacacactcacccacacggcagagcatgaggtgccgtaccggatggaaaccactgcagaaggcggcctgcacatcaccgtcagccggaagcactga

SEQ ID NO: 263639 - DNA, 195 bp, Klebsiella pneumoniae; identical to SEQ ID NO: 5829

SEQ ID NO: 263640 - DNA, 531 bp, Klebsiella pneumoniae
atggcaaaaagtacaaaaggtgcaaaacgtatcaaggccgcagcagcactctgggtgccggggacacgtgaagaggtcattgagggaatcagactgcttggtgacgcgcaacgtgaactggtcagggctgaaacagaaatgaatgacaccattggcgacatcactgcacgttatgccccgctcaccgagagcctgaaaaaacgcatggccgaactgcagtccggtattcagacatggtgtgaggcacaccgtgatgaactgaccggcaacgggaaggtgaagttcgctaacctcaccaccggcgaggtgcagtggcgaaaccgtccgccatcagtcagtatccgtggggcggataatgttattgaattactgagacgtctggggcttgagcgctttattcgtgtaaaagaggaaataaataaagacgctatcctgaatgaaaaagaggccgtgaaaaatattcccggtatttccattaaaagcgacattgaggatttttcaataattccttttgagcaggatgtgcagtaa

SEQ ID NO: 263641 - DNA, 270 bp, Klebsiella pneumoniae
atgaaatccaccacaggtatcaaccagcaaatcagcaaagtgcagtcagccattatggcgcttaaggcgacgaacacggatgtacaaagcatcaccatcaggggtaacaaacctgtcatccgcgtttcccggagtgcgcattgcatgcgcatgcttgagcagggaaaggcctgttatctgtataccggtcatgaccacaggggacatttccgtcagggcgttttcgaactgcacggctgtcgcgtcgtgtggccggaatctttgtggtaa

SEQ ID NO: 263642 - DNA, 480 bp, Klebsiella pneumoniae
atgcaaaaacgggcgatttatccgggtactttcgatcccattaccaatggtcatatcgatatcgtgacgcgcgccacgcaaatgttcgatcacgttattctggcgattgccgccagccccagtaaaaaaccgatgtttactctggaagagcgtgtggcgctggcacagcaggcaaccgcgcatctggggaacgtggaagtggtcgggtttagtgatttgatggcgaacttcgcccgtaatcaacacgctacggtgctgattcgtggcctgcgtgcggtggcggattttgaatatgaaatgcagctggcgcatatgaatcgccacttaatgccggaactggaaagtgtgtttctgatgccgtcgaaagagtggtcgtttatctcttcatcgttggtgaaagaggtggcgcgccatcagggcgatgtcacccatttcctgccggagaatgtccatcaggcgctgatggcgaagttagcgtag

SEQ ID NO: 263643 - DNA, 1278 bp, Klebsiella pneumoniae
atgctcgaattgctttacaccgcccttctctaccttattcagccgctgatctggatacggctctgggtgcgcggacgtaaggctccggcctatcgaaaacgctggggtgaacgttacggtttttaccgccatccgctaaaaccaggcggcattatgctgcactccgtctccgtcggtgaaactctggcggcaatcccgttggtgcgcgcgctgcgtcatcgttatcctgatttaccgattaccgttacaaccatgacgccaaccggttcggagcgcgtacaatcggctttcgggaaggatgttcagcacgtttatctgccgtatgacctgcccgatgcacttaatcgtttcctgaataaagtcgaccctaaactggtgttgattatggaaaccgaactatggcctaacctgattgcggcgctacataaacgtaaaattccgctggtgatcgctaacgcgcgactctctgcccgctcggccgcaggttacgccaaactgggtaaattcgtccgccgcttgctgcgtcgtattacactgattgctgcgcaaaatgaagaagatggcgcgcgttttgtggcgctgggcgcaaaaaataatcaggtgaccgttaccggtagcctgaaatttgatatttctgtaacgccgcaactggctgctaaagccgtgacgctgcgccgccagtgggcaccacaccgcccggtatggattgccaccagcactcacgaaggcgaagagagtgtggtgatcgccgcacatcaggcattgttacagcaattccctaatttattgctcatcctggtaccccgtcatccggaacgcttcccggatgcgattaaccttgtccgccaggctggactaagctatatcacacgctcttcaggggaagtcccttccaccagcacgcaggttgtggttggcgatacgatgggcgagctgatgttactgtacggcattgccgatctcgcctttgttggcggttcactggttgaacgtggtgggcataatccgctggaagctgccgcacacgctattccggtattgatggggccgcatacttttaactttaaagacatttgcgcgcggctggaacaggcaagcgggctgattaccgttaccgatgccactacgcttgcaaaagaggtttcctctttactcaccgatgccgattaccgtagtttctatggccgtcatgccgttgaagtactgtatcaaaaccagggcgcgctacagcgcctgcttcaactgctggaaccttacctgccaccgaaaacgcattga

SEQ ID NO: 263644 - DNA, 1059 bp, Klebsiella pneumoniae
gtggataagccatttcgaagaattttgctcattaagatgcgttttcatggggatatgttattaactactcccgtcattagttcgctgaaaaaaaattaccctgacgcaaaaatcgatgtgctgctttatcaggacaccatcccgatcctgtctgaaaatccagagattaacgcgctctacggcataaaaaataaaaaagcaaaagcctcagaaaaaatcgccaacttttttcatctcatcaaggtattacgtgccaataagtatgaccttatcgtcaatcttaccgatcaatggatggttgctatactggttcgcttattaaatgcccgtgtgaaaatttcccaggattatcatcatcggcagtctgctttttggcgtaaaagtttcacccatttggtgccgttgcagggtggaaatgtggtggaaagtaacttatccgtgctgacaccattgggacttgattcgttggtgaagcagacaaccatgagttacccgcctgcaagctggaaacgtatgcgtcgcgaacttgatcacgctggtgttggacaaaattatgtggttatccaacctacggcgcggcaaatcttcaaatgctgggacaacgccaagttttccgctgtgattgatgccttacatgctcgtggttatgaagtcgttctgacgtccggcccagataaagacgatctggtctgcgtcaatgaaattgcgcagggatgccagacgccaccagtaacggcgctggccggaaaggtgaccttcccggaacttggtgcgttaatcgatcatgcgcagctgtttattggcgttgattccgcaccggcgcatattgccgcagcagttaatacgccgctgatatcgctgtttggtgcgacagaccatattttctggcgtccctggtcaaataacatgattcaattctgggcgggagattaccgggaaatgccaacgcgcgatcagcgtgaccgaaatgagatgtatctttcggttattccggcggcagatgtcattgctgctgtcgataaattactgccctcctccacgacaggtacgtcgttatga

SEQ ID NO: 263645 - DNA, 1125 bp, Klebsiella pneumoniae
atgatcgttgctttttgtttatataaatattttccctttggcggtttgcagcgcgattttatgcgtattgctcagacagtcgccgcccgaggtcatcatgttcgggtttatacccagtcgtgggaaggcgaatgtcctgatgtatttgaactgatcaaagtgccggttaaatcgcataccaatcacgggcgcaatgcggagtattttgcctgggtgcaaaaacatttacgcgaacatcccgtcgataaagtcgttggattcaacaaaatgccggggctggacgtttattatgccgctgatgtttgttatgccgagaaagtagcgcaggaaaaaggctttttctatcgcctgacgtcacgttatcgccattatgccgcctttgagcgggcaaccttcgaacagggcaagccgacacagctgctgatgctgacagataagcaaatcgccgatttccagaaacattatcagactgaagtggagcgttttcatattctgccaccggggatttatcctgatcgtaaatatagccagcagccagccaatagccgtgaaatcttccgtaagaagaatggaataaccgaacaacaatatttattgttgcaggttggttcagacttcacgcgtaaaggtgtcgatcgttccattgaagcacttgcttcgttaccggattcgctgcgccacaacacattgctatatgttgttgggcaggataaaccgcgaaaatttgaggcgctggcagaaaaacgcggcgtgcgcagtaatgttcacttcttctcggggcgcaacgatgtctcggaattaatggcggcggcggatttattactgcatcctgcctaccaggaagccgcgggaattgtactgctggaagcgataactgcaggattaccggtactaacaacagccgtttgtggctatgcgcattatattgtcgacgccaattgcggcgaggctattgctgagccattccgccaggaaacattgaatgagattttacgcaaagcgttaacgcaatcttcattgcgccaggcctgggcggaaaatgcgcgacattatgctgatacacaagatttatacagtctgccagagaaagcggcggacatcataacgggtggtctggatggttga

SEQ ID NO: 263646 - DNA, 798 bp, Klebsiella pneumoniae
atggttgaacttaaagagccgtttgccacgttatggcgcggtaaagatccttttgaggaagttaaaaccttgcagggtgaggtatttcgtgaactggaaactcgccgcactctgcgctttgaaatggcgggcaaaagctattttctcaaatggcatcgcggcacgaccctgaaagagataatcaaaaatttactctcattgcggatgccagtattaggcgcagaccgcgaatggaatgcgattcatcgactgcgggatgtcggcgttgatactatgtatggggtggcattcggcgaaaaaggcattaatccgctcaccagaacctcgtttattataaccgaagatctgacaccaaccatcagtctggaagattactgtgctgactgggcgactaacccaccagatgttcgcgtaaagcgtatgcttattaagcgtgtcgcgacgatggtgcgcgatatgcatgctgcgggcattaaccaccgtgactgttatatctgtcatttcctgctgcacttgcctttttccggtaaggaagaggagttaaaaatttcagtaattgacctgcaccgggcgcagcttcgcacgcgcgttccacgtcgttggcgcgataaagatcttattggactttatttttcttcgatgaatattggcctgactcagcgggatatctggcggtttatgaaagtgtattttgtcgccccgcttaaagacattatcaagcaggaacaagggctgctgtcgcaagcagaagcaaaagccacaaaaatcagggaaagaacgattagaaaatcgttgtaa

SEQ ID NO: 263647 - DNA, 369 bp, Klebsiella pneumoniae
atgtggttacttgaccagtgggcagagcgtcatattactgaggcacaatccaaaggtgagtttgataatcttccgggaagtggcgagccattgattctggatgatgattcacacgtgccaccggaattacgtgcggggtatcgcttgctgaagaatgccggttgcttaccgccagaacttgagcagcggagggaagcaatacagcttctggatatcctcaaaggtatccgtcatgatgatccgcaatataaagaggttagtcgtcgattgtcattactggaattgaagctgcgacaagctggattgagtaccgattttttacgcggcgattatgctgacaagttgttggacaaaatcaacgataactag

SEQ ID NO: 263648 - DNA, 426 bp, Klebsiella pneumoniae
atgtatcgcattggtgagctggcaaaaatggcagaagtaacacccgacacgattcgttattacgaaaagcagcagatgatggagcatgaagtgcgcaccgaaggtgggtttcgcctgtataccgaaagcgctctccagcgattgaaatttatccgccatgccagacaacttggttttagtctggagtcgatccgcgagttgctgtcgatccgtatcgatcctgaacaccatacttgtcaggagtcaaaaggcattgtgcaggaaagattgcaggaagtcgaagcacggatagccgagttgcagagtatgcagcgttccttgcaacgccttaacgatgcctgttgtgggaccgcccatagcagtgtttattgctcgattcttgaagctcttgaacaaggggcgagtggcgttaagagtggctgttga

SEQ ID NO: 263649 - DNA, 219 bp, Klebsiella pneumoniae
atgagccgatatcagcatactaaagggcagataaaggataatgcgatagaagcattactacatgatcccttattccgacagcgcgtagagagaaataagaaagggaaaggcagttacatgcgaaaaggaaaacatggcaatcgggggaactgggaggccagtggcaagaaagtaaatcacttttttaccactggccttctgctttcaggcgcttgttaa

SEQ ID NO: 263650 - DNA, 1377 bp, Klebsiella pneumoniae
atgaaaattatcattctgggtgccggccaggttggcggcacactggcggaaaacctggttggcgagaacaacgatattactgttgtcgataccaacggtgagcgtctgcggaccttgcaggataaatttgacctgcgagtcgtgcaggggcatggctctcatccacgcgtattgcgggaggcaggtgccgacgacgccgatatgctggttgctgtaactagttcagatgaaaccaatatggttgcctgccaggtagcctactcacttttcaacacccctaatcgcatcgctcgtatccgctcaccagactacgtgcgcgatgccgataagctatttcattcagatgctgtaccgattgatcatctgatcgcaccagagcagttggttatcgataatatttaccgactgattgagtatcccggcgcattgcaggtggtgaacttcgctgagggtaaagtcagcctcgctgtggttaaagcctattatggcggcccgctgattggtaatgcactttcgaccatgcgcgaacatatgccacatatcgatactcgtgtggcagcaattttccgccacgatcgccccattcgtccgcaaggttcgaccattgttgaagctggtgatgaagtgttctttattgccgcttcacagcatatccgcgcggtgatgagtgaattacagcgactggaaaaaccgtataagcggatcatgctggttggtggcggtaatatcggtgcagggctggcgcgtcgtctggaaaaagattacagcgttaaactcatcgaacgtaatcagcaacgcgctgccgaactggcggaaaagttgcagaatacgatcgtcttttttggtgatgcgtcggatcaagaactgctggccgaagaacatatcgatcaagttgatctgtttattgccgtcaccaacgatgacgaggccaatatcatgtcagccatgctcgccaaacgtatgggtgcgaaaaaggtgatggtattgatccagcgtcgcgcttatgtggatctggttcaggggagcgtgatcgatattgcgatttcaccgcaacaagcaacgatttccgcgttgcttagccatgtgcgaaaagcagatattgttggtgtttcctcattgcgccgcggcgtagcagaagctattgaagccgttgctcacggtgatgaaagtacctcacgcgttgtcggcagagtcattgatgaaatcaagctaccgccaggaacgattattggagcggtggtacgtggaaacgacgtgatgattgccaatgacaatctgcgcattgagcaaggcgatcacgtaattatgttcctcacagataaaaagtttattaccgacgtcgaaagactcttccagccaagtcctttcttcttgtaa

SEQ ID NO: 263651 - DNA, 1290 bp, Klebsiella pneumoniae
atgaaaaaacaacgtaatttacgtagcatggcggcacaggccgttgaacaagtcgtcgagcaagggcaatcattaagcaacattctgccaccgctccagcaaaaagtttccgataaagacaaagcacttcttcaagagttgtgctttggcgtactgcgtacgctttcacagttagactggctgattaataagttaatggcccgtccgatgaccggcaaacagcgcactgtgcattacctgattatggttggtttgtatcaactgctttatacccgcattccacctcatgctgcgctggctgaaacggttgaaggtgctgtcgcaattaagcgtccgcaacttaaagggttgattaacggcgtattacgccagttccaacgtcagcaagaagagttattagccgagtttaatgccagtgatgcacgttatctgcatccttcctggttgctgaaacgtctgcaaaaagcgtatccagagcagtggcaatccatcgtagaagccaataaccagcgtccgccaatgtggctgcgcgttaatcgtacgcatcattcccgcgacagctggcttgcattgctggatgaagcaggaatgaaaggtttcccgcatgcggattaccctgatgctgtacggctggaaacacctgcacctgttcatgtgctaccaggttttgaagaaggatgggttaccgttcaggatgcatcagcacaaggttgcatggcctggcttgcgccacaaaacggtgaacacattctggatctttgcgctgcccccggcggtaaaacaacgcatatccttgaggtggcacccgaagcgcaggttgttgcggttgatatcgacgaacagcgcctctctcgggtttacgacaatttaaaacgccttggtatgaaggcgaccgtgaaacaaggtgatggccgttacccttctcaatggtgtggcgagcaacagtttgatcgcattttattagatgcgccttgttcagcaaccggtgtgattcgtcgccatccagatattaaatggttacgtcgcgatcgcgatatcccggaactcgcgcaattgcagtctgaaattctcgacgccatttggccgcatttaaaatccggtggaaccctggtctatgccacctgttcggtgttaccggaagagaatagcctgcagattaaagcctttttgcaacgtaccgctgatgccgaactttgcgaaacaggaacaccagaacaaccgggtaagcaaaatctgcctggtgccgaagagggcgacggcttcttttacgctaagctaatcaaaaagtga

SEQ ID NO: 263652 - DNA, 285 bp, Klebsiella pneumoniae
atggcaatgccacgtcttcctgatctggtgaataaaatgaattttcaggggcgtctggcaaccagtgcaatccaaattgcaagttttccagaatttcttccggttccgtcacaagaatcgcaccttgttttattaaccagtgaggcccttcgcttcccggattccctaatggacccggcaaggcaaaaacttcacgcccctgctcaagcgcacaacgtgctgtcaccagcgaaccactgcgcaaagccgcttccactaccagtacacctttacttagaccactga

SEQ ID NO: 263653 - DNA, 1116 bp, Klebsiella pneumoniae
atgaaaagaaaagttctggcaatgctggtcccggcgttattagttgctggcgcagcaaatgcggctgaaatttataataaaaatggcaataaagttgatttttacggcaagatggttggcgaacgcatctggtcaaatactgatgataataacagcgaaaacgaagatacctcctatgctcgtttcggtgttaaaggtgaaacccaaatcaccagcgaactgactggtttcggtcagtttgaatacaacctcgacgccagcaagcctgaaggtgaaaaccaagaaaaaacccgtttaaccttcgccggtttgaaatataacgagttaggatcatttgactatggccgtaactacggtgttgcttatgatgccgcagcttataccgatatgttagttgaatggggtggcgattcctgggcttccgctgacaacttcatgaacggtcgtaccaacggtgttgcaacctaccgtaactctgatttctttggcctggttgatggtcttgattttgcgattcagtaccaaggcaaaaacagcaaccgtagcactaagaaacaaaatggtgacggctatgcgttgtctgtagactataacatcaatggttttggtatcgttggtgcatatagcaaatctgatcgcaccaacgatcaagttgccgatggaaacggttcaaatgctgaactgtggtcattggctgcaaagtatgacgcgaacaatgtctacgcagctgtaatgtacggtgaaactcgtaatatgactccgggttctattgatacaggtgttgccgatcaagaaggcaatacaataatgcgtgatcaacttatcaatgaaacccagaactttgaagcggttgttcagtaccaattcgactttggtctgcgtccgtccttaggttatgtgtactctaaaggtaaagatatcaaaggtgtacctggacatagatatgttgacgctgaccgtgtgaactacattgaagttggtacctggtactacttcaataagaacatgaacgtttatactgcatacaaattcaacatgctggataaagatgacgccgccattactggcgcagcagctgatgaccagtttgcagttggtatcgtctaccagttctaa

SEQ ID NO: 263654 - DNA, 852 bp, Klebsiella pneumoniae; identical to SEQ ID NO: 20777

SEQ ID NO: 263655 - DNA, 1359 bp, Klebsiella pneumoniae
atgaaaagattatctataaccgtccgtttaaccttgctttttatatttctgctgtctgttgctggcgctggaattgtatggactctctataatggcctggcaagtgagttgaaatggcgcgatgatacaacactcattaaccggacagcgcagatcaagcagttgttaattgatggggtaaatccagatacattacctgtctattttaaccggatgatggatgttagtcaggatatcttgatcattcatggtgatggcatcaataaaattgttaaccggacaaatgtcagtgatgacatgttaaataacatacctgctagtgagacaatcagcgcagcaggcatttacagaagcattattaatgatacagagatagatgctttacgaattaacattgatgaagtttcgccatcattaacggttactgtggctaaattggcttcagccagacataatatgcttgaacagtataaaattaatagcattataatttgcattgtcgtcattatattgtgctcattattaagtccgttgttaatcagaacggggttgcgagagatcaaaaagttgagtggcgtaacggaagcgctgaattataacgatagccgagtgccggttgaggttaacgcattaccgagagaactaaaacctcttgggcaggcgttgaataaaatgcatcatgctttagtcaaagattttgagcgccttagtcaatttgctgacgatctcgctcatgaacttagaacgccaattaatgcattactgggtcagaatcaggttacgctcagtcaaaccagaagtatcgctgaatatcaaaaaacaattgccggaaacatcgaagagctggaaaatatttcgcggttaacagagaatatactgtttcttgccagggcagacaaaaacaatgttttggtgaaactggattcgctttctctcaataaggaagttgaaaatcttttggactatcttgaatatctttcagacgagaaagagatttgctttaaggtcaagtgcaatcaacaaatctttgcggataaaattttactgcaacgaatgttatcgaatcttattgttaacgccattcgatattcaccagaaaaatcgcgtattcatataaccagttttcttgatgccaacggttctcttaatattgatatcgccagtcctggaacgaaaattaatgagcctgaaaaactcttccgtagattttggcggggagataattcgcgtcattccgtaggtcagggacttggcctttctttagtcaaagcgattgccgaattacatggaggaagtgctacgtatcactatctcagtaagcataacgtgttccgaattacgttaccgcaaagaaattaa

SEQ ID NO: 263656 - DNA, 783 bp, Klebsiella pneumoniae
atgagttttgaggatagcgaaaaaacgtccagggtaaccttacagcagcattacaattttgtaatgaaccaggttgtttctataacatatgatttatggcatattattttcatgaagattctacttattgaagataatcaaaggacccaggaatgggtaacgcaggggctttccgaagcgggttatgtcattgatgccgtttctgatggcagagatgggctttatcttgcgctgaaggatgattatgcattgatcattctggatattatgcttccgggtatggatggctggcagatcttacaaacgttaagaacggcaaagcaaactcctgttatttgccttacagcaagggattctgtcgatgacagagtcagagggctggacagtggagcaaatgattatctggtaaaacctttttcattttctgagttgctggcaagggttcgggcacaattaaggcaacatcacgctttgaattcaacattagaaatcagtggcttaaaaatggactctgtcagtcaaagtgtgagcagggacaatatcagtattacactgacgcgcaaggagtttcagttactttggctactggcctccagagctggcgagattatacccagaacggttattgcgagtgaaatttggggaatcaactttgatagtgataccaatacggtggatgtcgccattcgcaggctccgcgcaaaagttgatgatccttttcctgaaaagctaatcgccacaatccgggggatgggctattcattcgtagcggtaaaaaaataa

SEQ ID NO: 263657 - DNA, 414 bp, Klebsiella pneumoniae
atgttaaagcgttatttagtactctcggtagcaacggcagcattttcattaccttctttggtttatgccgcacaacaaaacattcttagcgtgcacattttgaaccagcaaacaggaaaacccgctgccgacgtgacagtcactcttgaaaagaaagcggataacggctggttacaacttaataccgccaaaacagataaggatggacgaattaaggcactgtggcccgagcaaactgcgactactggcgattaccgtgtcgtatttaaaaccggggactatttcaagaaacaaaatcttgaaagtttcttccctgagatccccgttgaatttcatattaataaagtgaacgagcattatcatgtgcctttgttactcagccaatatgggtattcaacctatcgtggcagttaa

SEQ ID NO: 263658 - DNA, 1005 bp, Klebsiella pneumoniae
atgaaaaagaatcaatttttaaaagaatcagatgttacggccgagtcggtattctttatgaagcgtcggcaggtgttaaaagcactgggcatcagcgcagctgcattttctttgcctcacgctgcgcatgccgatctgcttagctggtttaaagggaacgatcgtccgcccgcccccgccggaaaaccgctggagttcagcaagcctgccgcctggcaaaataacctgccactgacgccagcagataaagtctccggttataacaacttctatgaattcgggctggataaagccgatcccgctgctaatgctggtagcctgaaaaccgatccatggacactgaaaatcagcggcgaagtggcaaaaccattgaccctcgatcatgatgatttaacccgtcgcttcccgctggaagagcgtatttatcgtatgcgctgcgtggaagcgtggtcgatggtggtgccgtggattggttttccgctacacaaattgctggcgcttgccgaacccaccagcaatgcgaaatatgtcgctttcgaaacgatttatgcgccggaacagatgccaggccagcaggaccgctttatcggcggcgggctgaaatatccttatgtcgaaggattgcgtctcgacgaagcaatgcatccgctcacactgatgaccgtaggtgtttatggcaaggcgttaccaccgcaaaatggcgcgccggtgcgactgattgtgccgtggaaatatggctttaaagggattaaatcgatcgtcagtattaagctgacccgcgagcgtccgccaaccacctggaatctggcagcgcctgacgaatacggtttttacgccaacgttaatccgcatgttgatcacccgcgctggtcacaggctaccgaacgatttattggttcaggcggcattctcgatgttcagcgccagccaacactactgtttaatggttacgccgaccaggtggcatcgctgtatcgtggcctggatttgcgggagaatttctaa

SEQ ID NO: 263659 - DNA, 636 bp, Klebsiella pneumoniae
atgcgcctgacagcaaaacaggtgatatggctgaaagtttgcctgcatcttgccggattgttgccgtttctctggctggtctgggcgatcaatcacggtggactaggtgccgatccggtgaaagatattcagcattttaccggtcgcactgcactgaaatttttgcttgcggccttgttaatcacacctctggcacgctacgcaaaacagccgttattgatacgcactcgccgcctgttaggcttatggtgctttgcctgggcgacactgcatttaaccagttacgcattgctggagttgggcgtgaataatctggcgttattaggtaaggagttaattacccggccttatttaacgttaggaattatcagctgggttattttgcttgctttagcgttcacttcaacccagtcgatgcagcgaaaactcggcaaacactggcaacagttgcataacttcgtctatcttgtcgcgatcctgaccccaatacattatctgtggtcagtgaagattatttcaccgcagccactcatctacgctgggctggctgtactgcttttagccttacggtataagaagttgctttcccttttcaaccggttacgcaagcaggcccacaacaaattatctctataa

SEQ ID NO: 263660 - DNA, 444 bp, Klebsiella pneumoniae
atgaaaacgatgttacgcattgcctgtcttgctgcacctgtaatgttgaatgtggcgcaggcgtccacactgcaaccgggtaacctgatcattggctctgacctgacttatccgccttataatttccttaagcaggacaaaccggcgggttttgatactgagtttattgagttaattgcctccccgttaaagctgaaaccggtcgttaaagacacgcgtttcgccagcctgatccttggcttaaaaagcaataagttcgatgttatcgcttcaacactctatgtcacgccggagcgcgcgcagcaggtggattttctgccttatatgaaaaccggcggctctttattggtgatagccggctcggctttccagccgcagaacccgaagacctgtgcggcaaacgggtggcatcaattaaaggcggagcctggattgcccgcctga

SEQ ID NO: 263661 - DNA, 477 bp, Klebsiella pneumoniae; identical to SEQ ID NO: 9550

SEQ ID NO: 263662 - DNA, 423 bp, Klebsiella pneumoniae; identical to SEQ ID NO: 9548

SEQ ID NO: 263663 - DNA, 858 bp, Klebsiella pneumoniae; identical to SEQ ID NO: 9547

SEQ ID NO: 263664 - DNA, 747 bp, Klebsiella pneumoniae; identical to SEQ ID NO: 9546

SEQ ID NO: 263665 - DNA, 762 bp, Klebsiella pneumoniae; identical to SEQ ID NO: 9545

SEQ ID NO: 263666 - DNA, 432 bp, Klebsiella pneumoniae; identical to SEQ ID NO: 9544

SEQ ID NO: 263667 - DNA, 222 bp, Klebsiella pneumoniae; identical to SEQ ID NO: 9543

SEQ ID NO: 263668 - DNA, 1155 bp, Klebsiella pneumoniae; identical to SEQ ID NO: 9542

SEQ ID NO: 263669 - DNA, 888 bp, Klebsiella pneumoniae
atgagcagaaggggtacacagtttagtaacgcaaaagttacaaacccaatgttaagaatccctttttccagtagtgacttgggtgcaatagtaaacgctggcggtggggcaaaggtattggttgatgtaacagccgaatatagacaagggctagtaagaaatttaacaaccagtaaacattatttagaatccaaactttcagagtaccctggaagcttgggtactttggttttcaaattaagagaccagggaatagccaaaacgcataggccgaacaaaattgctcaagaggctggattgcaaaatgccggtcatgccaaaatagatgaaatgttggttgctgctcatgccggctgttttgacgtattagagtcagtcattttacatcggaatattaaagcgattttggctaatctaagcgcgattgagcgcattgaaccttgggatgagaataggaaggttccaggaggcactgatggtttgtttgaatcatcaaacatccttgtacgactatttgagtacacaggtgaagatgcaacttacaacaactatgaaaacgttatttctatattagaacaacacggagttaaatatgatgagattagacaaaaatgtggtcttcccttattaaggataatggatttatccccaaatgatagatatatattagacattctcattgattacccgggtataagaacgttaattcctgaaccaaaatattcagcattcccggttagtgtaagtgattctgttggcattgaaacaaatagctttcccgtaccatcagaagaattacccattgttgctgtatttgacactggggtaagccccatcgcggcaacaattactccttgggtagtgagggtaatgactccaacttattga

SEQ ID NO: 263670 - DNA, 723 bp, Klebsiella pneumoniae; identical to SEQ ID NO: 32693

SEQ ID NO: 263671 - DNA, 756 bp, Klebsiella pneumoniae
atgaatcttaacagtattcccgcctttgatgacaattacatctgggttttgaatgatgaagcaggtcgctgcctgattgtcgatcccggagacgcagagccagtattaaacgccattgccgccaataactggcaaccggaggccatatttctcacccaccatcaccacgatcacgttggcggcgtaaaagaactggtgaaaaagtttccgcaaattgtggtgtatggtccacaagagacacaagataagggaacaacacaggtagtcaaagatggcgaaactgccttcgttttggggcatgaatttagtgtaattgccacaccgggtcacactttaggacacatctgttacttcagtaaaccttatctattttgcggcgacacgctgttttctggtgggtgtggtcggttgtttgaagggacaccatcacaaatgtatcaatcacttaaaaagttaagtgcgttacctgacgatacattggtatgttgtgctcatgaatataccttatcaaatatgaagtttgctttgagtattcttccgcacgatttgtccataaatgattattatcgtaaagttaaggagttacgggcaaaaaatcaaataacactacccgtaattctgaaaaatgagcggcaaattaatgtttttttaagaacagaagatattgatttaattaatgtaattaatgaagaaacattattgcaacaacctgaagaacgttttgcatggttaaggtcaaagaaagataggttctga

SEQ ID NO: 263672 - DNA, 1221 bp, Klebsiella pneumoniae
atggacgatgggacgtctatcgcgccagatggtgacttgtgggctttcattggcgacgagctaaagatgggaattccggaaaatgaccggattcgcgaacagaaacagaaatatttacgcaataagagctatctccacgatgtaactttacgggcagagccgtatatgtactggatagccgggcaagttaaaaaacgtaacatgcctatggaactggtactactacccatagtggagagcgcttttgatcctcacgcaacgtctggcgccaatgcagcaggcatctggcagatcattccgagcacggggcgcaattatggtttgaaacagacccgcaattatgacgcgcgtcgcgatgttgttgcttcaacaactgccgcgctgaacatgatgcagcgtctgaacaagatgtttgacggcgactggcttctgaccgtagcggcttataacagcggcgaaggtcgagtcatgaaggcaattaaaacgaacaaagcgcgtgggaaatccacggacttctggtcgttaccgttgccgcaggaaacgaagcagtacgtgcctaaaatgctggcattgagtgatattctcaaaaacagcaagcgttatggcgtacgtctgccaacgaccgatgaaagccgtgctctggcgcgtgtgcacctgagcagcccagttgaaatggcgaaggttgcagatatggcggggatttccgtcagcaagcttaagacattcaacgctggcgtgaaaggctccacgctgggcgcaagtggtccgcagtacgtgatggtgccaaagaagcatgcagatcaactgcgtgaatctctggcttcgggcgaaattgctgctgtacagtcgacgctggttgccgacaatacgccgcttaacagccgtgtttacaccgtacgctctggcgacacgctttcaagtatcgcttcacgtctcggcgttagcaccaaagatttgcagcagtggaacaaactgcgcggatctaagctgaagccaggccaaagcttgacgattggcgcaggtagtagcgcacagcggttggcaaacaacagcgatagcattacatatcgtgtgcgcaaaggcgattcgctttcaagcattgctaaacgccacggcgtgaacatcaaagatgtgatgcgctggaacagcgatactgcgaatctgcaaccaggcgataagctgacgttgtttgtgaaaaacaacaacatgccagattcctga

SEQ ID NO: 263673 - DNA, 771 bp, Klebsiella pneumoniae
atgacatcacaatcccaccatgaccacgtagaaaagcagtttagctctcaagctagcgaatatctgactagtaccgtacatgcatccggacgggatttacagcgcctggcggtgcgtctggctgattatcctgatgcaagtgtacttgatatgggctgcggagcagggcatgccagctttgtcgctgcgcagaacgtgagcgcggtggtggcgtatgacttatctgcccaaatgctggatgtcgtggcacaagctgccgaagcccggcaactgaaaaatatcaccacccgccagggttatgtcgaaagtctgccatttgccgataacgcatttgatattgttatcagccgttattctgcccatcactggcatgatgttggtgcagcactgcgagaagtgaataggatattgaaacctggcggtaggctgattgtgatggacgtaatgtctccggggcacccagtgcgcgacgtctggttacagacggtagaagcattacgcgatacctctcacgtacgaaactacgccagcggtgagtggttgacgttaatcaatgaagccaatctgatagttgataatttaattacagataagttaccgctggaattttcttcatgggtcgcgagaatgcgtacgccagaagcgttagtagacgctattcgcatttaccaacagagcgcatcgacagaggtgaaaacgtattttgccttgcagaatgatggctctttcaccagtgatatcatcattgtagaagcacataaagcagcataa

SEQ ID NO: 263674 - DNA, 780 bp, Klebsiella pneumoniae
atgcgctatgttgccggacaacctgcggaaaggatcttaccgccggggtcttttgcgagcatcggccaggcattaccacccggagaaccgttaagtaccgaagagcgtattcggatcctggtgtggaacatatacaaacagcaacgcgctgaatggttgtcggtattaaagaactacggcaaagatgcacatctggtgttattgcaggaagcgcagacaacgccagagttagtacagtttgcgaccgctaactatcttgccgccgatcaggtacccgctttcgtgctgccacaacatccttctggcgtaatgaccctttcggcggcacatccagtgtattgctgcccgttacgtgaacgagaacccattttgcgtctggcgaagtcggcactggtgacggtctatccattacctgacacccgcctgttgatggtggttaatatacacgccgtcaacttcagtctgggcgtggatgtttatagtaagcagttacttcctattggcgatcagatagctcatcacagcggcccggtcattatggcgggagatttcaatgcctggagccgtagaaggatgaacgcgttatatcgctttgcgcgggaaatgtcgctgcgccaggtgcgttttaccgacgatcagcgccgtcgggcgtttggtcgcccgctcgattttgttttttaccgtggtctgaacgtcagcgaagcttctgtactggttacgcgcgcttccgatcacaatccgctactcgttgaattcagtcccggcaagcctgataaataa

SEQ ID NO: 263675 - DNA, 804 bp, Klebsiella pneumoniae
atggctatccctgcatttggtttaggtactttccgtctcaaagacgacgttgttatttcatctgtgaaaacggcgcttgaacttggttatcgcgcaattgataccgcacaaatctatgataacgaagctgccgtaggtcaggcgattgcagaaagtggcgtgccacgtcatgaactctacatcaccactaaaatctggattgaaaatctcagcaaagacaaattgatcccgagtctgcaagagagcctgcaaaaattgcgtactgattatgttgatctgacgctaatccactggccgtcaccaaacgatgaagtctctgttgaagagtttatgcaggcgctgctggaagccaaaaaacaagggctgacgcgtgagatcggtatttccaacttcacgatcccattgatggaaaaagcgattgctgctgttggtgctgaaaacatcgctactaaccagattgaactctctccttatctgcaaaaccgtaaagtggttgcctgggctaaacagcacggcatccatattacttcctatatgacgctggcgtatggtaaggccctgaaagatgaggttattgctcgtatcgcagctaaacacaatgcgactccggcacaagtgattctggcgtgggctatgggggaaggttactcagtaattccttcttctactaaacgtaaaaacctggaaagtaatcttaaggcacaaaatttacagcttgatgccgaagataaaaaagcgatcgccgcactggattgcaacgaccgcctggttagcccggaaggtctggctcctgaatgggattaa

SEQ ID NO: 263676 - DNA, 1848 bp, Klebsiella pneumoniae
atgccaattcaggtcttaccgccacaactggcgaaccagattgccgcaggtgaggtggtcgagcgacctgcgtcggtagtcaaagaactggtggaaaacagcctcgatgcaggtgcgacgcgtatcgatattgatatcgaacgcggtggggcgaaacttatccgcattcgtgataacggctgcggtatcaaaaaagatgagctggcgctggcgctggctcgtcatgccaccagtaaaatcgcctctctggacgatctcgaagccattatcagcctgggctttcgcggtgaggcgctggcgagtatcagttcggtttcccgcctgacgctcacttcacgtaccgcagaacagcaggaagcctggcaggcctatgccgaagggcgcgatatggacgtgacggtaaaaccggcggcgcatcctgtgggaacgacgctggaggtgctggatctgttctacaacactccggcgcggcgcaaattcctgcgcactgagaaaaccgaatttaaccatatcgatgagatcatccgccgcattgcgctggcgcgtttcgacgtcacgatcaacctgtcgcataacggtaaaattgtgcgtcagtaccgcgcagtgccggaaggcgggcaaaaagaacggcgcttaggcgcgatttgcggtaccgcttttctcgaacaagcgctggcgattgaatggcaacacggcgatcttacgctgcgcggctgggtggcagatccgaatcacaccacgcccgcactggcggaaattcagtattgctatgtgaatggtcgcatgatgcgcgatcgcctgatcaatcacgcgatccgccaggcctgtgaagacaaactgggggccgatcagcaaccggcatttgtgctgtatctggagatcgacccacatcaggtggacgtcaatgtgcaccctgccaaacacgaagtgcgtttccatcagtcgcgtctggtgcatgattttatctatcagggcgtgctgagcgtgctacaacagcaactggaaacgccgctaccgctggacgatgaaccacaacctgcaccgcgcgccatcccggaaaaccgcgtggcggcggggcgcaatcattttgctgaaccggcagttcgtgagccagtagctccgcgttacactcctgcgcccgcctcaggcagtcgtccggctgccccctggccgaatgcgcagccaggttaccagaaacagcaaggtgaagtgtatcgccagcttttgcaaacgcccgcgccgatgcaaaaaccaaaagcgccagaaccgcaggaacctgcacttgcggcgaacagtcagagttttggtcgggtactgactatcgtccattccgactgtgcgttgctggagcgcggcggcaacatttcacttttagccttgccagtggcagaacgttggctgcgtcaggcgcaactgacgccgggtgaagcgccagtttgcgcccagccgctgctgattccgttgcggctaaaagtttctggcgaagaaaaatcggcattagaaaaagcgcagtctgccctggcggaattgggtattgatttccagtcagatgcacagcatgtgaccatcagggccgtgcctttacccttacgccaacaaaatttacaaatcttgattcctgaactgataggctacctggcgaagcagtccgtattcgaacctggcaatattgcgcagtggattgcacgaaatctgatgagcgaacatgcgcagtggtcaatggcgcaggccataactctgctggcggacgtggaacggttatgtccgcaacttgtgaaaacgccgccgggtggtctgttacaatctgttgatttacatccggcgataaaagccctgaaagatgagtga

SEQ ID NO: 263677 - DNA, 1338 bp, Klebsiella pneumoniae
atgatgtatcgcatcagaaattggttggtagcgacgttgctgctgctgtgcgcgcaggtgggtgccgcgacgctctctgatattcaggtttctaacggcaaccaacaggcgcggataacgttgagttttattggcgatcctgattatgcgtttagccatcaaagcaaacgcaccgtggcgctcgatatcaaacaaacgggggtaattcaggggctgccgttgttgtttagcggcaataatctggtgaaggcgattcgctccggaacgcctaaagatgcacaaacgctacggctggtggtcgatcttaccgaaaacggtaaaaccgaagcggtgaagcggcagaatggcagcaattacactgtcgtctttacgattaacgccgatgtgccgccaccgcctcctccgccgcctgtggttgcgaaacgcgttgaaacgcctgcggttgtcgcaccgcgcgtcagcgaaccggcgcgcaatccgtttaaaacggaaagtaaccgcactacaggtgttatcagcagtaatacggtaacgcgtccggcagcgcgtgcgacggctaacactggcgataaaattatcatcgctattgatgcaggacacggcggtcaggaccctggcgctatcggccccggcggtacgcgggagaaaaatgtcaccatcgccatcgcacgtaaattgcgtactttgctcaatgacgatccaatgtttaaaggcgttttaacccgtgacggggattactttatctcggtgatggggcgcagcgatgtggcacgtaagcaaaacgccaatttcctcgtgtcgattcacgctgatgccgcaccgaaccgcagtgcgactggcgcttccgtatgggtgctctcaaaccgtcgtgcaaacagcgagatggcaagctggctggaacagcatgagaaacagtcggagctgctgggcggagcgggcgatgtgctggcgaacagtcagtctgatccctatttaagccaggcggtgctggatttacagttcggtcattcccagcgtgtagggtatgatgtagcgaccagtatgatcagccagttgcaacgcattggcgaaatacataaacgtcgaccagaacacgccagccttggcgttctgcgttcgccggatatcccatcagtactggtcgaaaccggttttatcagcaacaacagcgaagaacgtttgctggcgagcgacgattaccaacaacagctggcagaagccatttacaaaggcctgcgtaattatttccttgcgcatccgatgcaatctgcgccgcagggtacagcggcacaaactgccagtacggtgacgacgccagatcgcacgctgccaaactaa

SEQ ID NO: 263678 - DNA, 462 bp, Klebsiella pneumoniae
atgatgaatcgagtaattccgctccctgatgagcaggcaacattagacctgggcgagcgggtagcgaaagcctgcgatggcgcaaccgtaatctatctgtatggcgatttaggcgcaggtaaaaccacctttagtcggggctttttacaggctttgggccatcagggtaatgtcaaaagccccacttatacgctggtcgaaccctatacgctcgacaatttaatggtttatcactttgatttgtaccgccttgccgatcccgaggagctggagtttatggggatccgcgattattttgccaacgatgccatctgcctggtggagtggccacaacaaggtacaggtgttcttcctgacccggatgtcgaaatacacattgattatcaggcacaaggccgtgaggcgcgcgtgagtgcggtttcctctgcgggtgaattgttgctggcgcgtttagccggttaa

SEQ ID NO: 263679 - DNA, 1533 bp, Klebsiella pneumoniae
atgaagaaaaaccccgtaagtataccacacaccgtctggtacgccgacgatatccgccgcggagaacgcgaggcggcagatgcgctgggactcacactctatgagctgatgcttcgcgctggcgaagccgcattccaggtgtgtcgcacggcttatcctgacgcccgccactggctggtgctgtgcggtcatggtaataacggcggcgatggctacgtggtcgcgcgactggccaaagcggtcggtattgaggtcacgctgctggcccaggaaagtgacaaaccgttgccggaagaggccgcgctgtcacgcgaagcatggttaaacgcgggaggcgagatccatgcttcgaatactgtctggcccgaatcggtagatctgattgttgatgcgctgctcggtaccggcttgcagcaagcaccccgcgaatccattagccagttaatcgaccacgctaatacccatcctgcgccgattgtggcggttgatatcccttccgggctgctggctgaaactggcgctacgccaggcgcggtgatcaacgccgatcacaccatcacttttattgcgctgaaaccaggcttgctcactggaaaagcgcgggatgttaccggacaactgcattttgactcactggggctggatagctggctggcaggtcaggagacgaaaattcagcggttttcggcagaacaactttctcactggctgaaaccgcgtcgcccgacatcgcataaaggcgatcacgggagagtggtgattattggcggcgatcacggcacggcgggagctattcgtatgacgggggaagcggcactgcgtgctggtgctggtttagttcgagtattgacccgcagtgaaaacattgcgccgctactgactgcacgaccagaattgatggtgcatgaactgactatggactctcttaccgaaagcctggaatgggccgatgtgctggtgattggtcccggactgggccagcaagagtgggggaaaaaagccctgcaaaaagttgagaattttcgcaaaccgatgttgtgggatgccgatgcattgaacctactggcaatcaatcccgataagcgtcacaatcgcgtgatcacgccgcatcctggcgaggccgcacggttgttaggctgttccgtcgctgaaattgaaagtgaccgcttacattgcgctaaacgtctggtacaacgttatggcggcgtagcggtgctgaaaggtgccggaaccgtggtcgccgcccatcctgacgctttaggcattattgatgccgggaatgcaggcatggcgagcggcggcatgggcgatgtgctctctggtattattggcgcattgcttgggcaaaaactgtcgccgtatgatgcagcctgtgcgggctgcgtcgcgcacggtgcggcagctgacgtattggcggcgcgttttggaacgcgcgggatgctggcaaccgatctcttttccacgctacagcgtattgttaacccggaagtgactgataaaaaccatgatgaatcgagtaattccgctccctga

SEQ ID NO: 263680 - DNA, 1140 bp, Klebsiella pneumoniae
atgtcagagcccctcgatctcaatcagttagcgcaaaaaattaaacagtgggggctggaactgggctttcagcaggtaggtattaccgataccgatctcagcgcgtccgagcccaaactgcaagcatggctggacaaacaataccacggcgaaatggactggatggcgcgtcacggtatgctgcgtgctcgtcctcacgaattattgcccggtacgctgcgcgtgatcagcgtgcggatgaattaccttcctgctaacgccgcatttgccagcacgctgaaaaatcccaaactcggctatgttagccgttatgcgctgggccgtgactatcacaagcttctgcgcaaccgactcaaaaagctgggcgagatgattcagcaacattgtgtttcgctgaattttagaccgtttgtcgattctgcgcctattctcgagcgcccgttagctgaaaaagcaggacttggctggacaggtaagcactcacttatcctcaatcgcgaggccggttcattcttctttttaggcgaattgctggtcgatattcctctgcccgtggatcaaccagtcgaggaaggatgcggtaaatgcgtggcctgtatgacgatttgcccgaccggagccatcgtcgagccatataccgtcgatgctcgccgctgtatctcttatctcaccatcgaactggagggggcgatcccggaagagttgcgaccgttaatgggaaaccgtatttacggttgcgatgactgccagcttatctgcccgtggaatcgctattcgcaactcactacagaagacgatttcagcccgcgtaagccgctacacgcaccggaactcattgagttattcgcctggagcgaagagaagtttttaaaagtcacggaaggatcggcgattcgccgtataggtcacctgcgctggctgcgtaatatcgccgtggcattaggcaatgccccctgggatgaaacgattctggcggcgctggagagtcgcaaaggtgagcacccacttcttgatgagcacatagcgtgggcgattgcgcagcaaatagagagacgaaatgcgtgcatagtcgaagtgcaattgccgaaaaaacagcgtctggttcgggtgattgaaaaagggttaccgcgtgacgcctga

SEQ ID NO: 263681 - DNA, 1128 bp, Klebsiella pneumoniae
atgcaaagcattaccccaacatcgcaatacctgaaggcgctcaatgaaggcagccatcaacccgacgacgttcaaaaagaggccgtcagccgcctggaaattatttatcaggaactcatcaatagcacgcctccagcccccaggacgagtgggctaatggcgcgggtcggtaaactgtggggtaaacgcgaagacacaaagcatacgccagtgcgtggcttatatatgtggggcggtgtaggacgcgggaaaacctggctgatggaccttttctatcaaagcctgccgggagagcggaaacagcgtctgcactttcaccgttttatgctgcgggtacatgaagagctaactgctttgcaggggcagaccgatccgctggaaattattgccgatcgctttaaagcagaaactgacgtgctctgttttgacgaattttttgtttctgatattaccgatgccatgctacttggcggtctgatgaaagccctgttcgcccgcggtattaccctggtagcgacgtcaaatattccgccggacgaactttatcgaaatggcctacaacgtgcgcgttttttgcctgcaatcgatgccattaaacagtattgtgatgtaatgaacgtggacgctggtgttgattatcgactgcgtacactcactcaggcgcatctgtggctttcgcccctcaacgatgaaacccgggcgcaaatggataaactatggttggcgctggcgggggcgaaacgagaaaattcaccgacgttagaaatcaaccatcggccattggcgacaatgggcgtcgagaaccagacgctggcggtctcttttactacgctgtgcgtcgacgcccgcagtcagcatgactatattgcgctctcacgcctctttcacacagtcatgttgtttgatgtaccacttatgacgcggttgatggagagcgaagcgcggcgctttattgcgctggtggatgagttttacgagcgccatgtcaaattagtggtgagtgcagaagtgccgctgtatgaaatttatcagggcgatcggctgaagtttgagttccagcgttgcctgtcacgtctgcaagagatgcaaagcgaagagtatctgaagcgcgagcatttggcgggttaa

SEQ ID NO: 263682 - DNA, 1368 bp, Klebsiella pneumoniae
atgaaaaaacaaacccagctgttgagtgcattagcgttaagtgtcgggttaactctctcggcgtcatttcaggccgtcgcgtcgattccaggccaggttgccgatcaggcccccctccccagtctggctccaatgctggaaaaagtgcttccggcagtggtgagcgtacgagtggaaggaacggccagtcagggacagaaaatcccggaagaattcaaaaagttttttggtgatgatttaccggatcaacctgcacaacccttcgaaggtttaggctccggtgtcatcatcaacgccagtaaaggctatgtgctgactaacaaccatgtgattaatcaggcacagaaaatcagtattcagctcaatgatgggcgcgagtttgatgcaaaactgattggtagcgatgaccagagcgatatcgccctgttgcaaattcaaaacccgagcaaattaacgcaaatcgctattgccgactccgataaattgcgcgtcggtgattttgccgtggcggtcggtaacccatttggccttgggcaaaccgccacctctggcattgtgtcagcattaggccgcagtgggttgaatcttgaaggtctggaaaactttatccagacagatgcttccattaaccgcggtaactccggcggtgcactgttaaatcttaacggtgagttaattggcatcaacacggcaatccttgcgcctggtggcgggagcgtcgggattggatttgccatccccagtaatatggcgcgaacactggcgcagcagcttatcgactttggtgaaatcaaacgcggtctgttaggcatcaaaggcacagagatgagtgccgatatcgccaaagccttcaaccttgacgtgcagcgtggcgcgtttgtcagcgaagtgttgccaggttctggctcggcgaaagcgggcgtcaaagcgggcgatattattaccagcctcaacggcaaaccgctgaatagctttgctgagttgcgctctcgtatcgcaaccaccgagccgggcacgaaagtgaagcttggcctgctgcgtaacggcaaaccactggaagtagaagtgacgcttgataccagcacctcttcgtcggccagcgctgaaatgatcacgccagcgcttgaaggtgcaacgttgagcgatggtcagctaaaagatggcggcaaaggtattaagatcgatgaggttgtcaaaggaagcccagctgctcaggctggcttgcaaaaagacgatgtgatcattggcgtcaaccgcgatcgggtgaactcgattgctgaaatgcgtaaagtgctggcggcaaaaccggccatcatcgccctgcaaattgtacgcggcaatgaaagcatctatctgctgatgcgttaa

SEQ ID NO: 263683 - DNA, 1068 bp, Klebsiella pneumoniae
atgtttgtgaagctcttacgttccgttgcgattggattaattgtcggcgctattctgctggttgccatgccttcgctgcgcagccttaacccgctttccactccgcaatttgacagtaccgatgagacgcctgccagctataatctggcggttcgccgcgccgcgccagcggtggttaacgtttacaaccgtggtttgaacaccaactctcacaaccagcttgagatccgcaccctgggatccggtgtaatcatggatcaacgcggttatatcatcaccaataaacacgtcatcaacgacgccgatcagatcatcgtcgccttacaggatggacgtgtatttgaagcattgctggtgggatctgactctctaaccgatctggcggtacttaaaattaatgccactggcggtttacctaccattccaatcaatgcacgtcgcgtaccgcacattggcgacgtggtactggcgatcggtaacccgtacaacctcgggcagaccattacccaggggattattagtgccacgggtcgaatcggtctgaacccgaccgggcggcaaaacttcctgcaaacagatgcttccattaaccacggtaactctggcggcgcgctggtgaactcgctgggcgaactgatgggcattaacacgctgtcgtttgataagagtaacgatggcgaaacgccggaaggtatcggctttgcgattcctttccagttagcaaccaaaattatggataaactgatccgcgatggtcgcgtgatccgcggctacattggtatcggcggacgtgagatcgcaccactgcacgcgcagggcggtggtatagatcaactgcaagggatcgtggttaatgaagtgtcacctgacggcccggcggcgaatgcgggtattcaggtcaatgatttgattatttcggtggataacaaaccggccatctctgctctggagacgatggatcaggtggcggaaattcgccctggctcggtgatcccggttgtagtgatgcgtgatgataagcagttaacgctgcaggtcaccattcaggaatatccggcaaccaattaa

SEQ ID NO: 263684 - DNA, 939 bp, Klebsiella pneumoniae
atgaaagtcgcagtcctcggcgctgctggcggtattggccaggcgcttgcactactgttaaaaacccaactgccttcaggttcagaactctctctgtatgatatcgctccagtgactcccggtgtggctgtcgatctgagccatatccctactgctgtgaaaatcaaaggtttttctggtgaagatgcgactccggcgctggaaggcgcagatgtcgttcttatctctgcaggtgtagcgcgtaaaccgggtatggatcgttccgacctgtttaacgttaacgccggcatcgtgaaaaacctggtacagcaagttgcgaaaacctgcccgaaagcgtgcattggtattatcactaacccggttaacaccacagttgcgattgctgctgaagtgctgaaaaaagccggtgtttatgacaaaaacaaactgttcggcgttaccacgctggatatcattcgttccaacacctttgttgcggaactgaaaggcaaacagccaggcgaagttgaagtgccggttattggcggtcactctggtgttaccattctgccgctgctgtcacaggttcctggcgttagctttaccgagcaggaagtggctgatctgaccaaacgtatccagaacgcgggtactgaggtggttgaagcgaaagccggtggcgggtctgcaaccctgtctatgggccaggcagctgcacgttttggcctgtctctggttcgcgcactgcaaggtgaacaaggcgttgtcgaatgtgcctacgttgaaggtgacggtcagtacgcacgtttcttctctcaaccgctgctgctgggtaaaaacggcgtggaagagcgtaaatctatcggcactctgagcgcatttgaaaagaacgcgctggaaggtatgctggatacgctgaagaaagatatcgccctgggcgaagagttcgttaataagtaa

SEQ ID NO: 263685 - DNA, 471 bp, Klebsiella pneumoniae
atgcgaagctcggctaagcaagaagaactagttaaagcatttaaagcattacttaaagaagagaaatttagctcccagggcgaaatcgtcgccgcgttgcaggagcaaggctttgacaatattaatcagtctaaagtctcgcggatgttgaccaagtttggtgctgtacgtacacgcaatgccaaaatggaaatggtttactgcctgccagctgaactgggtgtaccaactacctccagtccattgaagaatctggtgctggatatcgactacaacgatgcagttgtcgtgattcataccagccctggcgcggcgcagttaattgctcgcctgctggactcactgggcaaagcagaaggtattctgggcaccatcgctggcgatgacaccatctttactacccctgctaacggtttcaccgtcaaagacctgtacgaagcgattttagagctgttcgaccaggagctttaa

SEQ ID NO: 263686 - DNA, 1137 bp, Klebsiella pneumoniae
atggatctattgattgttttaacttacgtggcgctggcgtgggcggtctttaaaatcttccgcattccggtgaatcagtggacgctggcgacggcggcgctgggaggcgtgtttctggtgagtggtttgattttgttgatgaactacaaccacccttacacttttaccgcgcaaaaggcagtgatagcgatccccatcacgccacaggtgacgggaattgttactgaagtcactgacaagaataatcagcttattcaaaagggcgaggtgctttttaaactcgacccggttcgttaccaggcgcgagttgacagacttcaggctgacctgatgacggcgacgcataatataaagacgctgcgcgcgcagctctctgaagcgcaggccaacaccacccaggtttcagcggagcgcgaccgtctgtttaaaaattatcaacgttatctgaaaggcagccaggcggcggtgaatccgttctcggaacgtgacatcgacgatgcgcggcaaaacttcctcgcgcaggacgcgctggtgaaaggctcggtggcggagcaggcgcagatccagagccagctcgacagtatggttaacggcgagcaatcgcagattgtgagcttaagagcgcaacttactgaagcaaaatataaccttgagcagactgtcattcgcgcgccgagcaatggctacgttactcaggtactgatccgcccaggtacatacgcagctgccttgccgttgcgtccggtgatggttttcatccccgagcaaaaacggcaaattgtcgcccaatttcggcaaaactcgctgttacgtctgaaacccggcgatgatgcggaagtggtgtttaacgcgctacctgggcaggtgttccacggcaaactgactagcattttacctgtcgtgccaggcggttcttatcaggcgcagggggtattgcaatcattaacggtcgtgcccggcacggacggtgtgctgggaaccattgaactggaccctaacgatgatatcgatgccttacccgacggcatctacgcccaggtggcggtttactccgaccatttcagccatgtttcggtgatgcggaaagtgctgctaagaatgaccagctggatgcattatctttatttggatcattga

SEQ ID NO: 263687 - DNA, 363 bp, Klebsiella pneumoniae
atgtttctaaactatttcgcgttgggagtgctgatcttcgtctttctggtgattttttatggaatcatcgcgatacatgacatcccttatctgattgccaaaaagcgcaaccatccccatgccgacgctattcatacggcgggctgggtgagcctgtttactctacatgttatctggccgttcctgtggatctgggcgacgctctatcaaccggagcgcggctggggcatgcagtcacatgttgcgtcgcaagagaaagcgactgacccggaaatcgccgcactttctgaccgaatttcccggctggagcatcaactcgccgccgagaaaaagactgactattccacgttcccggagatctaa

SEQ ID NO: 263688 - DNA, 1914 bp, Klebsiella pneumoniae
atgtcatccgatattaagatcaaagtgcaaagctttggtcgtttcctcagcaacatggtgatgccaaatatcggcgcgtttatcgcgtggggtatcatcaccgcgttatttattccaacagggtggttaccgaacgagacgctggcgaagctggtcgggccgatgatcacttatctcctgccgctgctgatcggttataccggtggtaagctggtaggcggcgaacgtggcggcgtagtcggtgccattaccaccatgggcgttatcgtcggcgcagacatgccgatgttcctaggttctatgattgcaggtccgctgggcggctggtgcattaagcacttcgaccgctgggtagacggtaagatcaaatccggttttgagatgctggtgaataacttctccgcaggcatcatcgggatgatcctcgctattctggcattcctcggcattggcccgattgttgaagccctgtccaaaatgctggctgcgggcgttaacttcatggttgtccatgacatgctgccgctggcgtctatctttgttgaaccggcgaaaatcctgttcctcaacaacgccattaaccacggtatcttctcgccgctgggcattcagcagtcccatgaactgggtaaatccatcttcttcctgattgaagctaacccaggtccgggtatgggcgtgctgctggcgtacatgttctttggtcgtggtagcgctaaacagtctgcgggcggtgcggcaatcatccacttcctgggcggtatccacgaaatctacttcccgtatgtgctgatgaatccgcgtctgattctggccgttatcctcggtggtatgactggcgtgttcacgctgactatcctgggcggtggtctggtttctccggcatctccgggttctatccttgctgtactggcgatgacaccaaaaggtgcatacttcgctaacatcgcgggtgtgtgtgcggcgatggctgtctccttcgttgtctctgccattctgctgaaaaccagcaaagtgaaagaagaagatgatattgaagcagcaactcgtcgtatgcaggacatgaaagctgagtctaaaggcgcgtctccgctgtctgcgggcgatgtgactaacgacctgagccacgtacgtaaaatcatcgttgcctgtgatgccggtatgggttccagtgcgatgggcgcaggtgtgctgcgtaagaaaattcaggatgcaggtctgtcgcagatttcggtcactaacagcgcgatcaacaacctgccgccagatgtggacctggtcatcactcaccgtgacctgaccgaacgcgctatgcgccaggttccgcaggcacagcatatttcgctgaccaacttcctcgacagcggcctgtacaccagcctgaccgaacgtctggttgctgcccagcgccatactgaaaacgaagtgaaagtgaaagacagtctgaaagacagctttgatgattccagtgctaacctgttcaagctaggcgcggagaacatcttcctcggtcgtaaagcggccaccaaagaagaagcgattcgttttgctggcgagcagctggtgaaaggcggttacgttgagccggaatacgttcaggcgatgctggatcgtgaaaaactgaccccgacttatctgggtgagtccatcgcggtaccgcacggtacggttgaagcgaaagatcgcgtactgaaaacgggcgtggtgttctgccagtacccggaaggcgtgcgcttcggtgaagaagaagatgacattgcccgtctggtgattggtattgctgcccgtaacaacgagcacattcaggttatcaccagcctgaccaatgcactggatgatgagtctgtcatcgagcgtctggcacacaccaccagcgtggatgaagtgctggaactgctggcaggtcgtaagtaa

SEQ ID NO: 263689 - DNA, 1149 bp, Klebsiella pneumoniae
atgaaagcattacattttggcgcaggtaatatcggtcgtggctttatcggtaaactgctggcagacgcgggtatccaactgacgtttgccgatgtcaatcaggtggtacttgatgccctgaatgcccgtcatagctatcaggttcatgtggtcggtgaaaccgagcaggtagataccgtttccggcgtcaatgccgtcagcagcattggtgatgatgtcgttgatctgattgctcaggttgatttagtcactaccgccgttggtccggttgtgctggaacgtattgccccggcaatcgccaaagggctggtgaaacgtaaagaacaaggtaatgaatccccgctgaacatcatcgcttgtgaaaacatggtacgcggcaccacgcagctgaaaggccatgtgatgaacgccctgccggaagatgccaaagcgtgggtagaagaacacgttggctttgtcgattccgccgttgaccgcatcgtgccgccttcggcttctgcaaccaacgatccgctggaagtgacggtagaaacattcagcgaatggattgttgataaaacgcagttcaaaggcgcgctgccgaacatcccaggcatggagttaaccgacaacctaatggcatttgtcgaacgtaaactcttcaccctgaacacgggtcatgctataaccgcgtacctcggaaaactggccggtcatcagaccattcgtgatgcgattctcgacgagaaaatccgcgcggtggtaaaaggtgcgatggaagaaagcggtgcggtactgatcaagcgctacggctttgacgcggacaaacatgcggcgtacatccagaaaatcctcggtcgtttcgagaacccgtatctgaaagatgatgtagagcgcgtaggccgtcagccgctgcgtaaactgagtgctggcgaccgtctgatcaagccactgctcggaacgctggaatatggtctgccacataaaaacctgattgaaggtattgccgctgcaatgcacttccgcagtgaagatgatccgcaggctcaggaactggcagcgctgattgccgacaaaggcccacaagccgcgctggcacagatttccggtcttgatgccaacagcgaggttgtatccgaggcagtaaccgcttataaagcaatgcaataa

SEQ ID NO: 263690 - DNA, 588 bp, Klebsiella pneumoniae
atggtggaccaggcgcaggataccctgcgcccgaataacagattgtcagatatgcaggcaacaatggaacaaacccaggcctttgaaaaccgtgtgcttgagcgtctgaatgctggcaaaaccgtgcgaagctttctgatcaccgccgtcgagcttttgaccgaggcggtaaatcttctggtgcttcaggtattccgcaaagacgattacgcggtgaagtatgctgtagaaccgttactcgacggcgacggtccgctgggcgatctttctgtgcgtttaaaactcatttacgggttgggtgtcattaaccgccaggaatacgaagatgcggaactgctgatggcattgcgtgaagagctaaatcacgacggcaacgagtacgcgtttaccgacgacgaaatccttggaccctttggtgaactgcattgcgtggcggcgttaccaccgccgccacagtttgaacctgcagactccagtttgtatgcaatgcaaattcagcgttaccaacaggctgtgcgatcaacaatggtcctttcactgacagagctgatttccaaaatcagcttaaaaaaagccttccaaaagtaa

SEQ ID NO: 263691 - DNA, 210 bp, Klebsiella pneumoniae; identical to SEQ ID NO: 28880

SEQ ID NO: 263692 - DNA, 129 bp, Klebsiella pneumoniae; identical to SEQ ID NO: 9607

SEQ ID NO: 263693 - DNA, 219 bp, Klebsiella pneumoniae
atgggcagaattttactcaatttatcgaatgagttgtttaagcaacttgatgatctcgaggtgcagcgtaatcttcctcgtgcggagctattacgggaagcggtagatcaatacctggtaaatcaatcgcaaacagcaagagccagtgcttttggcatctggcaagggagtgaggaagatggtgtcgaataccagcgtaagctgcgcgaggaatggtaa

SEQ ID NO: 263694 - DNA, 219 bp, Klebsiella pneumoniae
atggcgatgaatacggtttttcttcatttatcagaagaggcaattaaacggctgaacaagcttaggggctggcgtaaggtttcacgatctgcaattttacgcgaagcggtagagcaatatctggaacgtcagcaattcccggtgcgtaaagcaaagggaggcaggcaaaagggggaggtagttggtgttgatgatcagtgtaaggagcataaggaatga

SEQ ID NO: 263695 - DNA, 279 bp, Klebsiella pneumoniae
atgtccacgcttaatacgcgtaaagatagggatcgtaatggtaaagcgaagctgcataatcattcagggatcccaacacttacaggtaaatggcgtcacccttcaatggattgttgggtaaactacagtacaccgggcgatcatgaatggaagcggctctatactacgcttcgccgtcgcgcagatgatcgacgccaatgtcatcgggtaatgcagggggatgatccagaaggaatcgtctggttcccggactgttatccacaaatttactactactaa

SEQ ID NO: 263696 - DNA, 222 bp, Klebsiella pneumoniae; identical to SEQ ID NO: 9606

SEQ ID NO: 263697 - DNA, 291 bp, Klebsiella pneumoniae
atggataaggcactttttgagcggttgactcacagcatggcccagatgaatgaaattattgaaggaacgcgacacccttcacggacttttgaagttgatgctatgaaaatcaaagaaatacgccgcgcttcagggttgtcacaatctaaatttgccgaacttatttccgtaagcgtagacacgttgcgtaactgggagcaggggcgacgttcaccgactgggcctgcaaaggctttgctgcgagcgattgccaatgatccgcaacatgtgctgcaggcacttaaccgttag

SEQ ID NO: 263698 - DNA, 312 bp, Klebsiella pneumoniae
atgctcttcatcgaaacggaaatttttactgaagatgttcaaaaactgctgaccgacgatgaattcagtcgttttcagtttttcctggccttgaatcctgactatggtgaggtaatacctgaaactggtgggttaagaaaggttcgatgggtgtcaggaggaaaggggaaacgtgctggtgtcagggttatttactttcatcaggttaaacattatgagatcagattactgcttatttatcgtaagggtattaaagatgatctgtctccccaggaaaaagcaatgctccggttgttaaatacgaggtggtaa

SEQ ID NO: 263699 - DNA, 909 bp, Klebsiella pneumoniae
atggcactggaaaaaggaattgcagagttagtcgaagagtttatcgctgcgggtcgcccctcatcgcgtcaacaaagtattgcgcagcgcagggagggctatatcgccagcgctgtccttgcgggtgagacagaaacgcgggtagatattcagactatcgaacttgaagggatgatcttacgaatagtgtcaccgctgaatgccccgacattactcccgacgataatttattactacggtggctgttttgttagcggcgggttcgcaactcacgacaaccagctgcgccagttagcctattacgggcaatatcgggttattgccgtccagtatcggctggcaccggaacagactttccccgccgcccatgatgatgcgcaacgaggtgcagaattagtctggcaacacgccgaacgactcggcgttgataaacaacggataactcttgccggtgacagtgcgggcggacatctggcgctggtaactgctttgcgattaaagcgtgctggcgagtggcaaccggcacaactcatcttaatttatcccatgcttgatgcgactgcgcatttcgaaagctacatacgcaatggtcacgattacatcatcacacgcgacactttactgagcggctttgagatgtatctgccaggcattgaacgcaggcatcctgaagccagccctctttggcgcgatgatttcaatggcttgccacctgtacatatcattaccgctgaatacgacccactttgcgatgaaggtgaagcgttgtatcaccgcatgacagggcaaggagtgcaatgcacctgccaacgctaccttggcgttatccacggattttttcagttaggtggtatcagtgaggctgcgcgatcggcgctgcgggatgtggcctggagagcgggaaggtaa

SEQ ID NO: 263700 - DNA, 1815 bp, Klebsiella pneumoniae; identical to SEQ ID NO: 9605

SEQ ID NO: 263701 - DNA, 390 bp, Klebsiella pneumoniae
atgcgcacgacgaacgatttaatgtctaaatataaagatcttaaaggcattatgtcatttggttcacaaggaccaattggtgcggggcgtgctattgataagcggaagaaaaatgacgcaatttgcgtttttggaaccttcactccaggtcagggaattaagctactcgaaaaaggcgctattgatgggggatatatttcaaaccctatgattgcgggtaaggtttttgtccaggttgcgacggcaatgatgaacggtgaacctattaaagacggtgtaaaaatcggtgatatgggcgagatcaaggttaataacaacactatttatagtgataatccagaaaagctcgatcttgaaaatacacgacatttagtgaagttaggcttgtaa

SEQ ID NO: 263702 - DNA, 1518 bp, Klebsiella pneumoniae; identical to SEQ ID NO: 9670

SEQ ID NO: 263703 - DNA, 993 bp, Klebsiella pneumoniae; identical to SEQ ID NO: 9669

SEQ ID NO: 263704 - DNA, 1047 bp, Klebsiella pneumoniae; identical to SEQ ID NO: 9668

SEQ ID NO: 263705 - DNA, 864 bp, Klebsiella pneumoniae; identical to SEQ ID NO: 9667

SEQ ID NO: 263706 - DNA, 1479 bp, Klebsiella pneumoniae; identical to SEQ ID NO: 9666

SEQ ID NO: 263707 - DNA, 2073 bp, Klebsiella pneumoniae
atgattgtcacgggcaacaccgccgccgacaccaccgattctgccgccggtgccggtttcaaaacgaacgatatagatgtcggcccgctgggaacgaaatcctggatcgaaacaccatattccagcaccactgttactaaagagatgattgaaaatcagcaggcgcaaagcgtcagcgagatgctgaaatactctcccagtacgcaaatgcaggcgcgcggtggaatggatgtcgggcgtccgcaaagtcgggggatgcagggcagcgtggtggccaacagccgtctggacgggctgaatatcgtttcaacaaccgcgtttccggtggaaatgcttgagcgcatggatgtgcttaacagtttgaccggcgcgctgtacggcccggcgagcccagcagggcagtttaatttcgtggcgaagcgcccaaccgaagagacgctgcgtaaagtgacgctgggctatcaaagccgcagtgcgtttaccggccatgccgatctgggtggccattttgatgaaaacaaacggtttggctatcgcgtgaacctgcttgatcaggaaggggaaggcaatgtggatgacagcacgctgcgtcgcaaactcgtttccgttgcgctcgactggaatattcagccgggcactcagctacagctcgacgccagccattacgaatttatccagaaaggctatgtcggtagctttaactatgggccgaacgtcaaactgccgtctgcgccgaatccgaaggacaaaaatctggcgctcagcactgcgggcaacgacctcactaccgataccatcagcactcgcctgatccactactttaacgacgactggtccatgaacgctggcgtgggctggcagcaggctgaccgcgcgatgcgtagtgtttccagtaaaatactcaacaatcagggcgatatctctcgttcgatgaaggattccaccgctgccggacgttttcgcgtcctgagcaacaccgccgggctgaatggtcatattgataccggctctatctgccacgatctgtcactttctaccacgggatatgtctggtcgctttatagtgccaaaggaacaggttccagctatagctggggtacaacaaatatgtatcacccggatgcgatagatgagcagggcgatggcaaaatccgcaccggcgggccgcgataccgctccagcgtaaatactcagcagagcgttacgctcggcgatacggtgacatttacgccgcagtggtcggcaatgttctatctcagccagagctggctgcagactaaaaactacgataagcacggtaatcaaacgaaccaggttgatgaaaatggtttaagtccgaacgccgcgctgatgtataaaattacccctaacacaatggcctacgttagctatgccgattcgctggagcagggcggtaccgcaccgacggatgagagcgtaaaaaatgccggtcaaacgctaaacccgtatcgcagcaagcagtatgaagtggggctaaaatcggacatcggcgagatgaatctaggcgccgcgctgttccgactggaacgtccgtttgcctatcttgatacggataacgtgtataaagagcagggtaaccaggttaacaacggccttgagttaaccgctgccgggaatgtgtggcaggggctgaatatttacagcggcgtgaccttcctcgacccgaaactgaaagatacggcgaatgcctcaaccagcaataaacaggttgtcggcgtgccgaaagtgcaggccaatctgttggcggaatacagtttgccgtccataccggaatgggtttacagcgctaacgtccattatacgggcaaacgcgcggcgaacgataccaacacctcttacgccagcagctataccacatgggatttgggaacgcgttacaccacgaaagtgagcaacgtcccaaccactttccgcgtggtggtaaacaacgtgtttgataaacattactgggcttctatcttcccatcgggtaccgatggcgataacggttccccaagtgcgtttatcggcggcggccgcgaagtgcgtgcatccgtcaccttcgatttctga

SEQ ID NO: 263708 - DNA, 990 bp, Klebsiella pneumoniae; identical to SEQ ID NO: 5088

SEQ ID NO: 263709 - DNA, 258 bp, Klebsiella pneumoniae; identical to SEQ ID NO: 5085

SEQ ID NO: 263710 - DNA, 213 bp, Klebsiella pneumoniae
gtggatgaactgaaaagtgcccgggagcaacaaaaaaggcgtgatgaacgtgctgatggttccgttccgctgaaactgtccggaaaaatccacaaacagcctgaaagtattgcccgaagtcgtggtgccctcccaaaaaaactgttgaatgaaatgattgagctggcgtaccaggattttgtggcaaatgagcagcacaagacactgagttaa

SEQ ID NO: 263711 - DNA, 462 bp, Klebsiella pneumoniae; identical to SEQ ID NO: 8065

SEQ ID NO: 263712 - DNA, 297 bp, Klebsiella pneumoniae; identical to SEQ ID NO: 8064

SEQ ID NO: 263713 - DNA, 393 bp, Klebsiella pneumoniae
atggcaaaagtatttacaccagaagagcgggaagaagtgaaggcgcgcattgtggaattcgtgcgcctgagcggacgagaaacttttcgacaactggcagataaaacgggtgtcagtaagaccgctattcgtcgtttatctggtgcgcttgcggccagtggtgatgtctggctctctggttgcggggtatttccatcagagcaggtgtatcgcgtatggcgtaagacaccggagaaggctgctgacccgacactgattcgaaagttacctgacggagaaatacgtcgttacaacagacggcagaacataatttgtcgtgagtgccgccagagcgaagttatgcagcgtgtgctggcgttctatcggggaaactttcaggaggtgatggagtga

SEQ ID NO: 263714 - DNA, 771 bp, Klebsiella pneumoniae; identical to SEQ ID NO: 17370

SEQ ID NO: 263715 - DNA, 747 bp, Klebsiella pneumoniae
atgaaaaacattgcggcagttggggttcttgaacgtattcgcagacttgcaccacagggggcggttccaccgtaccggacggtggaggaggggggggggtggcaacttgctgaaggacgaaaacgcagcgaggagattaaccgccagaatcgccagttgcgggtggaaaaaatcctgaatcgttcgggcatccagcctctgcacagcaaatgctcgtttgcaaattatcaggtgcagaacgacgggcaaaaatacgcgctgagccaggccaaatccatagctgacgaactgatgaccgggtgcacgaattttgtgttcagcggtaaaaccggcaccgggaaaaatcaccttgcagcggcgatgggcaaccggctgatggtgaaggggcgcagcgtgattatcgtcaccgtgtctgacgtcatgagcgtgttgcatgacagctacgacaacggcaaatccggggaaaaatttttacaggagctttgcggggttgatttgctggtcctggatgaaataggcgttcagcgggagacgaaaaacgagcaggtggtattgcaccagataattgatcgccggacagcatcactgtgcagtgtcgggatgttaacaaacctgaatcatgccgcaatgagtacgcttcttggtgagaggattatggaccgcatgaccatgaacggtggtcgatgggtgacgtttaactgggatagctggcgtccaaatgtcagcaatatgagggttgtgaagtaa

SEQ ID NO: 263716 - DNA, 963 bp, Klebsiella pneumoniae
atgagcagcaagcttcatggtcttgtctgggaagggtgcgccttcaccggcatgatcttatccagggtggcggttatggcccgtcttgcagactacagcaatgacgagggtgtgtcatggcctgccattgaaactatccggcgtcagatcggtgcaagaagtgaatccacagtgaaatcggctattgcagaactggcgaaagagggctggctgacgaaggaagagcgtaaggtcggtgggcgtaatgtaagcaatatctatcggcttaatgtggaaaaactcgaagcagctgcggcggcggcgcgtgagtcatataaaccgaaaagaaaaattagcccggcaaaaaatgacccgttaacagttgacccgtcaaatattgacccctcaacggttgacccgtcaaattttgatggatcaactgttgataaaaaactgccgattaggggggcgatgattgaccccgatccgtcagtattaaaacctgatccgtcagataaaagatcttcttgtccggacgcttcgcaaccggacccgcagacggctgaacaggattttttaacccgacaccctgacgcggttgtgttcagtgcgaaaaaacgccagtggggaagtcaggaagatttggtgtgcgcacagtggatctggggacgaatcgtgagtctttacgagcaggcggccagctatgatggcgagatcactagaccgaaagaacccaactggacagcatgggccaatgacgttcgcacaatgcggatgctggatggcagaactcacagacaaatttgtgaaatgtttgggcgtctccagcgggattcgttctgggtaaaaaacatcatgagtccggcaaaactccgggaaaaatgggatgaactggttatccgcctggggcgttcgcctgcgcagcgttgcgtgaatcacatttctgaaccggacactgaaataccgccgggattcagggggtga

SEQ ID NO: 263717 - DNA, 426 bp, Klebsiella pneumoniae; identical to SEQ ID NO: 6052

SEQ ID NO: 263718 - DNA, 192 bp, Klebsiella pneumoniae; identical to SEQ ID NO: 20331

SEQ ID NO: 263719 - DNA, 153 bp, Klebsiella pneumoniae
atggatacgctcaatcttggcaacaacgaatctctggtatgcggtgtgttccctaaccaggacggcaccttcaccgcgatgacgtataccaaaagtaaaacgtttaaaaccgcagctggtgcgcatcgctggttagcaagaaacactgactga

SEQ ID NO: 263720 - DNA, 339 bp, Klebsiella pneumoniae
atggaatttaaagatttacctccttcaatccaggagattgcagcacacacacttcgtcatcgtctgaacgaacttgaattggaatcggtaacaaaaaaagacactgataatatggctcgcaatgtgcgcgatgcgtttactgggctgttttcagatacagctttaaatatccatggcacagaggatacagcaaaacaatttgcagaaaaagaagtggaagatcccagttcaaagagccagaaacagccaaacaaccatgaaattaacgaactgcttctggcaacaggcttcataaatattaacgaatatgaacgccgtaaaaaaatgttatctgattaa

SEQ ID NO: 263721 - DNA, 195 bp, Klebsiella pneumoniae
atgtcagagcaggagttaaaacttggtgcatgttattgtgttctcaaggagctggtacacatgcttccatctactcagtatcaacagttagttggcaatttaaatcagcgaatcgaagctatgttaaaatctgatggttttaataacgtagaaacgctgatgctaaaaagatatcttgatggattaatcagataa

SEQ ID NO: 263722 - DNA, 714 bp, Klebsiella pneumoniae
gtgaacgaagcggaaagccaggcgcgtgccattgtcgatcaggcgcgtaacggcgctgatttcggtaagctggcgattgctcattctgccgaccagcaggcactgaacggcggccagatgggctggggccgtattcaggagttgccggggatcttcgcccaggcattaagcaccgcgaagaaaggcgacattgttggcccaattcgttccggcgttggcttccatattctgaaagttaacgacctgcgcggcgaaagcaaaaatatctcggtgaccgaagttcatgctcgccatattctgctgaaaccgtcgccgatcatgactgacgaacaggcccgcgtgaaactggaacagattgctgccgatatcaagagtggtaaaacgacttttgctgccgcagcgaaagagttctctcaggatccaggctctgctaaccaaggcggtgatctcggttgggctacaccagatattttcgatccggccttccgtgacgccctgacccgcctgaacaaaggtcaaatgagtgcaccggttcactcttcattcggctggcatttaatcgaactgctggatacccgtaatgtcgataaaaccgacgcggcacagaaagatcgtgcgtaccgcatgctgatgaaccgtaagttctcggaagaagcagcaagctggatgcaggaacaacgtgccagcgcctacgttaaaatcctgagcaactaa

SEQ ID NO: 263723 - DNA, 990 bp, Klebsiella pneumoniae
atggttaaaacccaacgtgttgtgatcactcccggcgagcccgccgggattggcccggacttagttgtccagcttgcacagcgtgagtggccggtcgaactggttgtttgtgccgatgccactctccttaccgaccgggcagcgatgctcggtttgccgctcaccctccgcccttattcccccacctcccctgcacaaccgcaaactgcgggcacattaacgctacttcctgtcgcgctacgtgaatctgtcactgcggggcagttagcggttgaaaatgggcattatgtggtggagacgctggcgcgagcgtgtgatggctgtctgaacggtgaatttgctgcgctgatcacaggccccgtgcataaaggcgtcattaacgacgcaggcattccgtttaccggtcataccgagtttttcgaagagcgttcgcaggcgaaaaaagtggtgatgatgctggcgaccgaagaacttcgcgtggcgctggcaacgacgcatttaccgctgcgcgatatcgcagatgctatcacccctgcgcttttgcacgaagtgattgctattttgcatcacgatttgcggaccaaatttggtattgccgaaccgcgcattctggtctgcgggctgaatccgcacgcgggcgaaggcggtcatatgggtacggaagagatagacaccattattccggtgctcgacaagctgcgggcgcaggggatgaaactcaacgggccgctgcctgccgataccctgtttcagccgaaatatctcgataacgccgacgccgtgctggcgatgtaccacgatcagggtcttcccgtgctaaaataccagggcttcgggcgcggtgtgaacattacgctgggcctgccctttattcgcacatcagtggaccacggcaccgcgcttgaattggcgggacgtggcgaagccgatgtcggcagttttattacggcgcttaatctcgccatcaaaatgattgttaacacccaatga

SEQ ID NO: 263724 - DNA, 378 bp, Klebsiella pneumoniae
atgatcaattcgccccgagtgtgtattcaggttcaaagcgtctacattgaggcacaatcttcacctgataatgaacgttacgtttttgcttataccgtaaccatacgcaatctggggcgagcgccagtgcagttgttggggcgttactggctgatcaccaatggcaatggccgtgaaaccgaagtccagggcgaaggagtggttggcgtccagccacttatcgcgcctggcgaagagtaccagtacaccagcggtgcaatcattgaaaccccgctgggcaccatgcagggtcactacgaaatgatcgatgaaaatggcgtccctttcagcatcgacattcccgtattccgactcgccgttcccacactcattcattaa

SEQ ID NO: 263725 - DNA, 189 bp, Klebsiella pneumoniae
atgcaatttacggtataccgcagtcgcggcaggaacgccgcgtttccctttgttatcgatgttaccagcgacattattggtgagattaatcgccgtattgttattccattaacacctattgaacgatttatccgtattcgccctccagaacggcttaacacaatccttttactggtagacggctcatga

SEQ ID NO: 263726 - DNA, 234 bp, Klebsiella pneumoniae; identical to SEQ ID NO: 2782

SEQ ID NO: 263727 - DNA, 1413 bp, Klebsiella pneumoniae
gtgctgctgttccaggatatcgcggcgatcccgctggtggcgatgatcccgctactggcggcgagcagtgcctcgacgacgatgggcgcatttgctctctcggcgttaaaagtggcgggtgcgctggtgctggtggtactgctggggcgctatgtcacgcgtccggcgctgcgctttgtcgcccgctctggcttgcgggaagtgtttagtgccgtggcgttattcctcgtgtttggctttggtttgctgctggaagaggttggcttgtcgatggcgatgggcgcgtttctggcgggcgtactgctggcaagctcggaatatcgtcatgcgctggaaagcgatatcgaaccctttaaaggtttgctgctggggctgtttttcattggcgttggcatgtcgatagactttggcacgctgattgaaaacccattgcgtattgtcattctgctgctcggtttcctcatcatcaaaatcgccatgctgtggctgattgcccgaccgttgcaggtgccaaataaacagcgtcgctggtttgcggtgttgttagggcagggtagtgagtttgcctttgtggtatttggtgcggcgcagatggcgaatgtgctggagccggagtgggcgaaatcgctgaccctggcggtggcgctgtcgatggcggcaacgccgattctgctggtgatcctcaatcgccttgagcaatcttctagtgaagaggcgcgtgaagccgatgagatcgacgaagaacagccgcgggtaatcatcgccggattcggtcgttttgggcagatcaccggacgtttactgctctccagcggggtgaaaatggtggtgctcgatcacgatccggaccatatcgaaaccttgcgtaaatttggtatgaaagtgttttacggcgatgccacgcggatggatttactggaatctgcgggagcggcgaaagcggaagtgctgattaacgccatcgacgatccgcaaaccaacctgcaactgacggagatggtgaaagaacatttcccgcatttgcagattattgcccgcgcccgcgatgtcgaccactacattcgtttgcgtcaggcaggcgttgaaaagccggagcgtgaaaccttcgaaggtgcgctgaaaaccgggcgtctggcactggaaagtttaggtctggggccgtatgaagcgcgagaacgtgccgatgtgttccgccgctttaatattcagatggtggaagagatggcaatggttgagaacgacaccaaagcccgcgcggcggtctataaacgcaccagcgcgatgttaagtgagatcattaccgaggaccgcgaacatctgtcattaattcaacgacatggctggcagggaaccgaagaaggtaaacataccggcaacatggcggatgaaccggaaacgaaaccctcatcctaa

SEQ ID NO: 263728 - DNA, 411 bp, Klebsiella pneumoniae; identical to SEQ ID NO: 7734

SEQ ID NO: 263729 - DNA, 678 bp, Klebsiella pneumoniae; identical to SEQ ID NO: 5094

SEQ ID NO: 263730 - DNA, 1071 bp, Klebsiella pneumoniae; identical to SEQ ID NO: 5093

SEQ ID NO: 263731 - DNA, 906 bp, Klebsiella pneumoniae
gtgacttcaccatttattcaacaaattgctgataaccgggtatgtcaggtactcacctgtcttcctgaaaaatttgtggttgatttcgcaaacggaatcgatgttgcacaggagcatatccgcacggccggagagcgcacgttcttccggcgtttaaaagagggactgaccggcgaaggcgctgcacggcagaatgccatcaatgcttcggttgcacagggccttgaggcgtccctgcgctggctgacggagctgacaacgtcacttgccaccacaaactacgcgattacccgggtaaacgacagggtcagttcactggtcagtgatactgccaggctggcgcattattccgcagatacacgggagcagttactcatcctggccgatcaggttcaccataaactgaatcatcttgaagaaaaactccaccgtgttgaccaggttcagcgggcgcagttacatcttgagcagatattctcatggtggagcgccgggcgatatgcgtcattttcccctgccggacgttgttatgtggcgcttgaagagcttcgctggggcgcgattggtgatgtgatacgtcagggcgaaacaggccaggttaaccagctactggatattctcagacataaagcattaacgcagatggcacaggagagtggcggtagtgcaaccgtgcgtctgaacactctggactggcttggtggtcagggccgggagcaggcagataacgagtggcatgacgcgattaactggctgggagactggtgcagtgaagagcagcatccggtgatctggtcaaccacgcaggctgcagaacacttaccggttcgcatgcctcgcctctgctctgcagaacgcctctctgaaagtatggtcgatgaaatatttcagaagggggctggatga

SEQ ID NO: 263732 - DNA, 2385 bp, Klebsiella pneumoniae
atgcacgaaaagaacatcgccctgctttgtgatgaagccgaccgacttttgcaactgaacattaatctgctccggcaaatggttgaggagccagatgtgttatctgacagtaagaacgaaaaaagactgctttttgataaacagaaagcactgaaaagaattgaggagctggagggcgaacaaatcaaaaccgcccgcagggagatggtgctggctgttgtcggcacgatgaaagcaggtaaatcaaccaccatcaacgccattgtggggcaggaaattctgcctaaccgtaaccgccccatgacctctgtaccgacgctcatccgccacgttcccggaaaaactgagccggttctccatctggaacatattcagcctgtccgcaatttattaatcacactgcaggaaaaactcgccaccccggcaggacagcaggtcgcacagaccctgcagcaaaccggggatacccgcgaactgctggatattctgacggatgatggctggctcaaaaatgaataccacggggaggaggaaatctttaccggactggcatcgttaaacgatctggttcgtcttgctgcggcaatggggagtgaatttccttttgatgaatacgcagaagtgcagaaactgccggtgatcgacgtggaattcagccatctggtggggatggatgaatgccagggaacactcacactgctggatacccccggccctaatgaagccggacaaccgcagatggaagtgatgatgcgggatcaactgcagaaagcctctgcggtgctggcggtgatggactacacccagatgaactcgaaagccgatgaggaggttcgtaaagagcttaatgccattgctgatgtgtctgtcggccgcctgtttgtgctggtcaataaatttgatgaaaaagaccgtaatggcgatggggctgatgcagtctgtcagaaggtaccggcaatgctgaacagcgatgtgctgcccgcctcccgcgtttatcccggatcctcacgccaggcatacctggctaaccgtgcgcttcatgagttacggaaaaacggaacccttcctgttgatgaagcctgggtcgatgattttgtcagggaagccttcggtcgcatgaaaaaagattacgtctgtaaagacagcgaactggcaactgaaggggcgacagacctgtgggaaggctcacttatcgatcaactgataacggaagtcatactgagttcacactccagagctgcggcactggcggttgattctgccgccgcaaaactgatgcagaatgcagaaaatatcagtgaatacctgtcgttacgccatcaggggctgatgcaaagtattcagtcactgcaggcgcatatcaccagcctgcttgaggatatccgggaaatagcagactgtcaggagcaggtgaccgctgatgtcagaatggccatggaggagatcgatgccagaacccgggaattactgacgggggtctgcacctcactggaagaggagctgaatgactatttcagaagcggtaaacgcaaagaacagcaaatgctggaggaagaaaattcagcgcagccccgggagagaaacgcattcgctttctttctcgatattttcggaaccggaaatcagcatgacaggatgcgggactttgatcccgacagccccgaaataaaattcagtgatcgcagggaagcccttgaactgatgacgcaaatcgaatcgaccgtgaccagcctgcaccgtgaggctgaagcacagttccggcctgagctggagaaaatcgtcagcgggattgaaacaggttttcgtggcacggccctgtacgccacagaaaacattgccggtcgcatcaatacccgcctggaggatgagggctttaccgtaaaaatcagttttccggcagtcagtcagttacaaacccggctcgcggtaaaaacaaatctgagtgcgcttatggaggaaagaacggagaccgtcacccgtcgccgtcggcagagtggtttatggggaaagatttgtggagcgtttggcaccagtgactggggctgggaaacctataaagaggatgtgagccgcagtgttatcaatatcaacaccgtcaggaaggaagttatgtcactgacccgggcatatttcggggagctgcaggcatccattgagcaggatattaaccagcccgtccgccaggaaatcgatgcctttttctgcgcattcagggagaaagttgaacaactgcgtaacacgctgattcagagctctgaagatcataaacgcgatcagcaggcacaggaacggcttaccaggagacttcaggcattaaatgaaagggttcctgagctcattactgacagtaaggcgctgagggaagagctggagacaatgctgtga

SEQ ID NO: 263733 - DNA, 2103 bp, Klebsiella pneumoniae
atgaagattttttccgtccgacagaccgttttgcccgcactgcttgtcctttcccccgttgtttttgccgctgatgaacagaccatgattgtcagtgccgcaccgcaggtggtttcagaactggataccccagcagccgtgagcgtggtggatggcgaggagatgcgcctggcaacaccgcgcattaacttgtccgaatcactgaccagcgtgcctggtttgcaggtacaaaaccggcagaactatgcgcaagatttacagctgtcgattcgcggatttggctcccgctccacttacggaattcgcggtattcgcctgtatgtggacggtattcccgccaccatgcccgacggacaagggcaaacatccaacatcgatttaagcagtgtacaaaatgtggaagtgctgcgcggccccttctctgctctgtatggcaacgcgtctggcggtgtaatgaatgtcatcacccagaccggacaacagccaccaaccattgaagccagtagttactacggcagttttggcagctggcgctatgggctgaaagcaacaggcgcaatgggcgacggcactcagcctggcgatgtcgattacaccgtctcaaccacgcgctttacgacccacggctatcgtgatcatagtggcgcacagaaaaatttagccaatgccaaactgggcgtacgcattgatgacgccagcaaattaagcctgattttcaatagtgtggatatcaaagcagatgacccaggtgggctaaccgaagcagaatggaaggcgaatccgcaacaagcgccacgcgctgaacagtacgacacgcgaaaaaccatcaagcaaactcaggctgggttgcgctatgaacgtagcctgagcgcacaagatgatatgagtgtgatgatgtatgccggggagcgagaaacgacccagtaccagtcaatcccgatggcaccacaacttaacccgtcgcatgcgggcggcgtgattactctgcaacgccattatcaggggatagacagccgctggacacaccgtggcgagctgggcgttccgctcacgttcactaccggcctgaactacgaaaacatgagtgaaaatcgcaaaggctacaataacttccgcctgaatagcggcgtgccggaatacgggcaaaaaggtgagttgcgccgtgacgaacgcaatctgatgtggaacgtcgatccctatttgcagacacagtggcagctgagcgaaaaactgtcgctggatgctggcgtgcgctacagctccgtatggtttgattccaacgaccattacgttacttcgggtaacggcgatgacagcggtgatgccagttatcacaaatggctacctgccggttcgttaaaatatgcaatgaccgatgcctggaatatctatctggcagccgggcgaggttttgaaacgccgacgattaatgagctgtcttatcgtgctgacggtcaaagcggtatgaactttggtttaaaaccatccaccaacgatacaattgagatcggcagtaaaacgcgtattggtgatgggctgcttagtctcgcattgttccagaccgacaccgatgatgaaattgtagtcgatagcagtagcggtgggcgtacgacttacaaaaatgccggaaagacccgtcgtcaaggcgctgagctggcatgggatcaacgtttcgcgggagattttcgtgtaaaagcgtcctggacctggctcgatgcgacctatcgcagcaatgtttgcaatgaacaggattgtaacggtaatcggatgccagggatcgcccgtaatatgggctttgcgtcgataggttatgtaccggaggatggctggtatgcaggtacggaagcgcgttatatgggcgatattatggcagatgatgaaaatacggccaaagcgccgtcttatactctcgtcggcttattcaccgggtataaatacaattaccacaatttaactgtggatttatttggtcgtgtcgataatttattcgataaagaatacgttggttctgtcattgtcaatgagtcaaacgggcgatattacgaacctgcgcccgggcgaaattatggtgtcggcatgaatattgcatggcgatttgagtaa

SEQ ID NO: 263734 - DNA, 1062 bp, Klebsiella pneumoniae
atgcatttacgtcatctgttttcatcgcgcctgcgtggttcattactgttaggttcattgcttgttgcttcatcattcagtacgcaggctgcagaagaaatgctgcgtaaagcggtaggtaaaggtgcctacgaaatggcttatagccagcaggagaacgcgctgtggctcgccacttcgcaaagccgcaaactggataaaggcggcgtggtttatcgtcttgatccggttactctggaagtgacgcaggcgatccataacgatctcaagccgtttggtgccaccatcaataacacgactcagacgttgtggtttggtaacactgtaaacagcgcggtcacggcgatagatgccaaaacgggcgaagtgaaaggccgtctggtgctggatgatcgtaagcgcacggaagaggtgcgcccgctgcaaccgcgtgagctggtagctgatgatgccacgaacaccgtttacatcagtggtattggtaaagagagcgtgatttgggtcgttgatggcgagaatatcaaactgaaaaccgccatccagaacaccggtaaaatgagtaccggtctggcgctggatagcaaaggcaaacgtctttacaccactaacgctgacggcgaattgattaccatcgacaccgccgacaataaaatcctcagccgtaaaaagctgctggatgacggcaaagagcacttctttatcaacattagccttgataccgccaggcagcgtgcatttatcaccgattctaaagccgcagaagtgttagtggtcgatacccgtaatggcaatattctggcgaaggttgcggcaccggaatcactggctgtgctgtttaacccggcgcgtaatgaagcctacgtaacgcatcgtcaggcaggtaaagtcagtgtgattgacgcgaaaagctataaagtggtgaaaacgttcgatacgccgactcatccgaacagcctggcgctgtctgccgatggtaaaacgctgtatgtcagtgtgaaacaaaaatccactaaacagcaggaagcaacccagccggatgatgtgattcgtattgcgctgtaa

SEQ ID NO: 263735 - DNA, 1500 bp, Klebsiella pneumoniae
atgagtaaacacgacaccgacacttcagatcaacacgccgcgaaacgccgctggcttaatgcccacgaagaggggtatcacaaagcgatgggcaatcgccaggtacagatgatcgccattggcggcgcgattggtacgggtttgtttttaggcgcgggagcccgactgcaaatggcggggccagcactggcactggtctatttgatctgcggcctgttttcattttttattctgcgtgcattgggtgagctggtgttacaccgcccttccagtggcagttttgtctcttatgcccgtgagtttttaggagagaaagccgcttacgttgcaggctggatgtacttcatcaactgggcgatgacggggattgtcgatattaccgccgtcgctctgtatatgcattactggggtgcgtttggcggcgtgccgcagtgggtctttgcgctcgctgcgctgaccatcgttggcaccatgaatatgatcggtgtgaaatggtttgccgagatggagttctggtttgcgcttattaaagtgctcgccattgttacctttttggtcgtgggtacagtgttcctcggtagtggtcagccgctggatggcaacaccactggttttcatttaattaccgataacggcggcttcttcccccacggtttgctgcctgcgctggtgttgattcagggcgtagtgtttgcttttgcctccattgaaatggtgggtacagctgccggagaatgtaaagatccgcagaccatggtgcctaaagccattaacagtgtgatttggcgtattggcctgttttacgtcggctccgtggtgttgctggttatgttattgccgtggagcgcatatcaggcggggcaaagtccgttcgtgacgtttttctctaaactgggtgtgccatatatcggcagcattatgaacattgtggtgctgaccgctgccctctccagcctgaactcaggtctgtactgcaccggacgtattctgcgctcaatggcgatgggcggttccgcaccgagttttatggcgaaaatgagtcgtcagcatgtgccgtatgccgggattctggcgacactggttgtgtatgtcgtcggcgtattcctcaactatctggtgccgtcgcgcgtatttgagattgtgttgaacttcgcgtcgctgggaatcatcgcctcatgggcgtttatcatcgtgtgccagatgcgcctgcgtaaagcgattaaagaaggcaaagccgcggatgtcagttttaaactgcctggcgcgcccttcacttcctggctgacattactgtttttgctgagcgtcctggtgctgatggcgttcgattacccgaacgggacttataccatcgcggcgctgccgattatcggtattctgctggttataggctggtttggtgtgcgcaaacgcgttgctgaaattcacagcactgcgccagtcgtcgaggaagatgaagaacaacaggaaattgtgtttaagcctgaaacggcgagttaa

SEQ ID NO: 263736 - DNA, 429 bp, Klebsiella pneumoniae
atgattaaggtgtatggcgtacccggatggggctctacaatcagtgagctgatgctaacactggctgatattccttatcagttcgttgatgtcagtggttttgaccacgagggaacctcacgcgagttattgaaaaccctgaacccgttgtgtcagattccgacactggcgctggaaaatgacgagattatgacggagacagcggcgattgcattgatggttctcgatcgtcgcccggaccttgcgccaccggttgggcgcgccgaacgtcagcagtttcaacggctattggtctggctggttgctaatgtctatccaacattcactttcgccgattaccctgagcgttgggctcctgacgcacccgaacagttaaagaagaatgttattgaatatcgaaaatcgttttatatctggttgaattcgtag

SEQ ID NO: 263737 - DNA, 1341 bp, Klebsiella pneumoniae
atgagccagaaaaccctgtttacaaagtctgctctcgcagtcgcagtggcacttatctccacccaggcctggtcggcaggctttcagttaaacgaattttcttcctctggcctgggccgggcttattcaggggaaggtgcaattgccgatgatgcaggtaacgttagccgtaaccccgcattgattaccatgtttgaccgcccgacattttctgcgggtgcggtttatattgatccggatgtagatattaccggacattctgatttaaccggtcagagtgcaaatgctaaaaatatcgcaccgacagcgtgggtacctaacctgcactttgtcgcgcctatcaacgatcagtttggttggggagcgtcaataacttccaactacggcctggctacggaatttaccgacaactacgctgctggtatctatggcggtaaaaccgatctgcagacaatcaaccttaaccttagcggggcttatcgccttaacaatagctggagttttggtcttggttttgatgcggtttacgccaaagcaaaaattgagcgttacgccggttcgctggggcctatgttgtctcagcagttgattgcccggggtgtacccgcttcattaaccaatggtattaatactccggactctcaaattgcccatctgaaaggtgacgaatggggcttcggctggaacgcgggtattctttatgaactggataaagataaccgttggggcctgacatatcgttcagaagttaaaatcgacttcgaaggggattacaaaagttccattaacccaaatctgaacaatattttgggtagcatgggcttaccgtatggcacgatgggtgcaacacaaaatggctccctgacgctcaacctgcctgagatgtgggagatttctggttataaccgtgttgcgccgcagtgggcaattcactacagcatggcctataccagttggagccagttccaggagttgaaagcgaaaggcgatagtggccagactctgttctataaagatgaaggattccgtgacgcatatcgtatcgcgttgggcacaacctactattacgataaaaactggaccttccgtaccggtatcgcctatgacgatagcccagttccggcagataaacgttctatttccattcctgaccaggatcgcttgtggttaagtgctgggttaacctacgcatttaatgaagatgcatccattgacgttggcgcatcttatatgcatggtcagaaagtgaagtttactgaaggtgaaggaccggcagcttattccttcgagtctgaaggtaaagcctggctgttcggtactaactttaactacgcgttctga

SEQ ID NO: 263738 - DNA, 285 bp, Klebsiella pneumoniae
atgagtaaatgtagtgctgatgaaaccccggtttgctgctgtatggatgttggcaccattatggacaactccgactgcaccgcgtcttacagccgcgtgtttgcaaaccgcgcagaagcagaacaaacgctggcggcgctgactgaaaaagcccgtagcgtggaatccgaaccgtgcaaaatcaccccgactttcactgaagagtctgacggtgtgcgcctggatatcgatttcacttttgcctgcgaagctgaaatgctgatcttccagctgggtctgcgttaa

SEQ ID NO: 263739 - DNA, 1311 bp, Klebsiella pneumoniae
atgggtcaggttttaccgctggttacccgccagggcgatcgtatcgccattgttagcggtttacgtacgccttttgcccgccaggcgacggcttttcatggcattcccgcggttgatttagggaagatggtggtaggcgaattgctggcacgcagcgagatccccgccgaagtgattgaacaactggtttttggtcaggtcgtacaaatgccggaagcccccaacattgcgcgtgaaattgttctcggtactggaatgaatgtgcataccgatgcttacagcgtcagccgcgcttgcgctaccagtttccaggcgattgcaaacgtcgcagaaagcctaatggcgggaactattcgcgcggggattgccggtggggccgattcctcttccgtattgccaattggcgtcagtaaaaaactggcgcgcgtgctggttgatgtcaacaaagctcgaaccatgagccagcgcctgaaactcttctctcgcctgcgtttgcgcgacttaatgccggtgcctccggcagtggcggaatactctactggcttgcggatgggcgacaccgctgaacaaatggcgaaaacctacggtattactcgcgaacagcaagatgcattagcgcaccgttcgcatcagcgagccgctcaggcgtggtcagacggtaaactcaaagaagaggtgatgactgcctttatccctccttataaacaaccgcttgtcgaagacaacaatattcgcggtaattcctcgcttgctgattacgcaaagttgcgtccggcgtttgatcgtaaacacgggacggtaacggcagcaaacagtacgccgctgaccgatggcgcagcggcggtgatcctgatgaccgaatcgcgggcgaaagaattagggctggtaccgctggggtatctgcgcagttacgcatttactgcgatagatgtctggcaggacatgttgctcggtccggcctggtcaacgccgctggcgctggaacgtgccggtttgacaatgagcgatctgacattgatcgatatgcacgaagcctttgcagctcagacactggcgaatattcagttgctgggtagcgaacgttttgctcgtgatgtactggggcgtgcacatgccactggcgaagtggacgatagcaaatttaacgtgcttggcggttcgattgcttacgggcatcccttcgcggcgaccggcgcgcggatgattacccagacattgcatgaacttcggcgtcgcggcggtggatttggattagtgaccgcctgtgctgcgggtgggcttggcgcggcaatggttgtggaggcggaataa

SEQ ID NO: 263740 - DNA, 651 bp, Klebsiella pneumoniae
atgtttaatgaagtccatagtattcatggtcatacattattgttgatcaccaaaccttctttgcaggcgacagctctcttgcagcaccttaaacaatcgctggcaattacaggaaaattacataatattcaacgttctctggacgatatatcttcaggctctattattcttctggatatgatggaagcggataaaaagcttatccattattggcaggatactttgagcaggaaaaacaacaatatcaaaatattgttgctaaatacgcctgaagattacccgtaccgcgacattgaaaactggcctcatatcaacggcgttttttatgccatggaggatcaagaacgtgttgtcaatgggttgcaaggcgtcctgcgcggcgaatgctactttacgcaaaagcttgccagttacctgattacgcattcaggtaactatcgttataacagcacggaatcagccctccttactcatcgggaaaaagagatcctgaataagctgcgtatcggcgcgtctaataacgagatcgctcgttcgttgttcatcagcgaaaatacggttaaaacgcatctttataatcttttcaagaagatagccgtaaaaaaccggacacaagcggtttcctgggcaaacgataacctcaggcgataa

SEQ ID NO: 263741 - DNA, 390 bp, Klebsiella pneumoniae
atgaaacgttatttacgctggattgtggcggcagaatttctgttcgccgcagggaatcttcacgccgttgaggtagaagtcccgggattgttaactgaccatactgtttcatctattggccatgatttttaccgagcctttagtgataaatgggaaagtgactatacgggtaacttaacgattaatgaaaggcccagtgcacgatggggaagctggatcactataacggtcaatcaggacgttattttccagacttttttattcccgttgaaaagagacttcgaaaaaactgtcgtctttgcactgattcaaactgaagaagcactaaatcgtcgccagataaatcaggcgttattaagtacgggcgatttggcgcatgatgaattctaa

SEQ ID NO: 263742 - DNA, 417 bp, Klebsiella pneumoniae
atgcgtgtcaaacatgcagtagttctactcatgcttatttcgccattaagttgggctggaaccatgacttttcagttccgtaatccaaactttggtggtaacccaaataatggcgcttttttattaaatagcgcccaggcacaaaactcgtataaagatccgagctataacgatgactatggtattgaaacaccctcagcgttagataactttactcaggccatccagtcacaaattttaggtgggctactgtcgaatattaataccggtaaaccgggccgcatggtgaccaacgattatattgttgatattgctaaccgcgatggtcaattgcagttgaacgtgacagatcgtaaaaccggacaaacctcgaccatccaggtttcgggtttacaaaataactcaaccgatttttaa

SEQ ID NO: 263743 - DNA, 834 bp, Klebsiella pneumoniae
atgcagcgcttatttcttttggttgccgtcatgttactgagcggatgcttaaccgccccgcctaaagaagccgccagaccgacattaatgcctcgtgctcagagctacaaagatttgacccatctgccagcgccgacgggtaagatctttgtttcggtatacaacattcaggacgaaaccgggcaatttaaaccctacccggcaagtaacttctccactgctgttccgcaaagcgccacggcaatgctggtcacggcattgaaagattctcgctggtttataccgctggagcgccagggcttacaaaacctgcttaacgagcgcaagattattcgtgcggcacaagaaaacggtacggttgccattaataaccgaatcccgctgcagtctttaacggcggcaaatatcatggttgaaggttcgattatcggttatgaaagcaacgttaaatcgggcggtgttggggcaagatattttgggatcggtgccgacacgcaataccagctcgatcagattgccgtgaacctgcgcgtcgtcaatgtgagtaccggtgagatcctctcctcggtgaacaccagtaagacgatactttcctatgaagttcaggcgggggtcttccgctttattgactaccagcgcttgctggaaggggaagtaggttacacctcgaacgaacccgttatgctgtgcctgatgtcggctatcgaaacaggcgtcattttcctgattaatgatggtatcgaccgcggtctttgggatttgcagaacaaagcagaacggcagaatgacattctggtgaaataccgccatatgtcggttccaccggaatcctga

SEQ ID NO: 263744 - DNA, 522 bp, Klebsiella pneumoniae
atggccgcgttttctgctatcatgcgcggcatgaacatacttctctctattgcaatcacaacaggcattctctccggtatctggggatgggtggctgtttccctgggcttactaagctgggcgggcttcctgggctgtacggcctactttgcctgcccgcaaggtgggctgaaagggctggcgatctccgctgcaaccctgcttagtggcgtggtgtgggcgatggtcattatttacggtagtgcactggcaccacatctggaaattctcggttatgtcataaccggtattgtcgcgtttctgatgtgtattcaggccaaacagctgctgttttcatttgttccgggaacgtttataggcgcatgcgcgacgtttgccgggcagggtgactggaaactggtgttaccttcgctggcgctcgggttgatatttggttacgcaatgaaaaacagcggcctttggctggcggtgcgtagtacgaagaccgctcaccgtgagcaggaaatcaaaaataaagcgtga

SEQ ID NO: 263745 - DNA, 555 bp, Klebsiella pneumoniae
atgaacgagttttctatcctctgtcgtgtgctgggttcgctctattaccgccaaccgcaagatcctttactggtgccgctgtttaccctgattcgtgaggggaaactggctgcgaactggccactggagcaggatgagttactgacgcgtttacagaaaagctgtgatatggcgcaagtctctgccgattacaatgcgttgtttatcggcgatgaatgtgctgtgccgccatatcgtagcgcatgggttgagggcgcgacggaagcggaagtgcgcgcttttctttccgaacgggggatgccattagcggatacgccagccgatcacatcggcacattgctgctcgcggcttcctggctggaagatcagtcaacggaagatgagagcgaagcactggaaacactgttcagtgagtatctgttaccctggtgtggtgcgttccttggcaaagtggaggcccatgcaactacgcctttctggcgcaccatggcaccgctaacccgcgatgctattagtgcaatgtgggacgagctggaagaagattctgaagagtaa

SEQ ID NO: 263746 - DNA, 738 bp, Klebsiella pneumoniae
atgtatcccgtcgaccttcatatgcataccgttgccagcacgcatgcatatagcacattgagtgattacattgcccaggccaaacaaaagggcattaaactttttgcgatcaccgatcatggcccggatatggaagatgcgccgcatcactggcacttcattaacatgcgtatctggccgcgagtggttgatggggttgggatcctgcgcggcatcgaagctaacattaaaaatgttgacggtgaaatcgactgcagtggcaaaatgtttgattcgctggatctgattattgccggttttcatgagccggtgtttgcgccgcatgacaaagcgactaatacgcaagcgatgatcgccactatcgccagcggcaatgtgcatataataagccatcccggaaatccgaaatatgaaatagatgttaaagccgttgctgaagcagctgcgaaacatcaggtggcgctggaaatcaataattcctcatttttacactcacgtaagggcagtgaagacaactgtcgggcggtagccgcagcggtacgtgacgctggaggttgggtggcattaggctcggattctcacaccgcgtttaccatgggtgaatttgaagagtgtcttaaaatcctcgacgcggtagattttccgccagagcgcattttgaatgtttctccgcggcgcttactgaacttccttgaatctcgcggtatggcaccgattgcggaatttgcagacctttaa

SEQ ID NO: 263747 - DNA, 939 bp, Klebsiella pneumoniae
atggatatcatcttttatcacccaacgttcgatacccaatggtggattgaggcactgcgcaaagctattcctcaggcaagagtcagagcatggaaaagcggagataatgactctgctgattatgctttagtctggcatcctccagttgaaatgctggcagggcgcgatcttaaagcggtgttcgcactcggggccggtgttgattctattttgagcaagctacaggcacaccctgaaatgctgaagccttctgttccactttttcgcctggaagataccggtatgggcgagcaaatgcaggaatatgctgtcagtcaggtgctgcattggtttcgacgttttgacgattatcgcatccagcaaaatagttcgcattggcaaccgcttcctgaatatcatcgggaagattttaccatcggcattttgggcgcaggcgtactgggcagtaaagttgcacagagtctgcaaacctggcgcttcccgctgcgttgctggagtcgaacccgtaaatcgtggcctggcgtgcaaagttttgccggacgggaagaactttctgcatttctgagccaatgccgggtattgattaatctgttaccgaatacccctgaaaccgtcggcattattaatcaacaattactcgaaaaattaccggatggcgcgtatctcctcaacctggcgcgtggtgttcatgtcgtggaagatgacctgctcgcggcgctggatagcgggaaagttaaaggcgcaatgttggatgtttttaatcgcgaacccttaccgccggaaagtccgctctggctacatcctcgcgtggcgataacaccacatgtcgccgcgattacccgtcccgctgaagctgtggagtacatttctcgcaccattgcccagctcgaaaaaggggagagggtctgcgggcaagtcgaccgcgcacgcggctactaa

SEQ ID NO: 263748 - DNA, 243 bp, Klebsiella pneumoniae
atggacactcgttttgttcaggcccataaagaggcgcgctgggcgctggggctgacccttttgtatctggcggtatggttagtagccgcttacttacctggcgttgcccccggttttaccggctttccgcgctggtttgagatggcctgcatcctgacgccgctgctgtttattggactgtgctgggcgatggtgaaatttatctatcgcgatatcccactggaggatgacgatgcagcttga

SEQ ID NO: 263749 - DNA, 1452 bp, Klebsiella pneumoniae
atgcagcttgaagtgattctaccgctggtcgcctatctggtggtggtgttcggtatctctgtttatgcgatgcgtaaacggagcacaggcaccttccttaatgagtatttcctcggcagccgctctatgggcggtattgtgctggcgatgacgctcaccgcgacctatatcagtgccagttcgtttatcggcgggcctggcgctgcttataaatacggcctgggttgggtattgctggcgatgattcagcttcctgcggtctggctttcgctcggtattctcggcaagaagttcgcgattcttgcgcgccgctacaatgcggtgacgctgaacgatatgctatttgcccgctaccagagtcgtctgctggtgtggctggcgagtttaagtttgctggttgcgttcgttggtgcgatgaccgtgcagtttatcggcggtgcgcgtctgctggaaaccgcggcgggtattccttatgaaacaggtttgctgatttttggcatcagcattgcgctctacaccgccttcggcggctttcgcgccagcgtgctgaacgacaccatgcaagggctggtgatgctgattggcaccattgtgctgcttattggcgtggtccatgctgctggcggcttaagcaatgcggtagagacgctgcaaaccatcgatccgcaactggttacgccacaaggcgctgacgatattctgtcgcctgcgtttatgacgtcgttctgggtgctggtgtgttttggcgtgattggcctgccacatactgcggtgcgctgtatctcttataaagacagcaaagccgtacatcgggggatcatcatcggtacgattgtggtcgcaatcctgatgttcggtatgcacctggccggagcgttaggtcgggcggtgatccccgatctcaccgtaccggacctggtgatcccgacgttaatggtaaaagtgttgccaccgtttgctgccgggatcttcctggctgcacctatggctgcgatcatgtcgacgatcaatgcccagttgctgcaaagttccgctacgatcattaaagatctctatttgaatatccgtccggatcaaatgcaaaacgagacgcgtctgaagcggatgtcggcggtaattacgttagttctcggtgcgttgctgctgcttgccgcctggaagccgccagaaatgatcatctggctgaatttgctggccttcggtgggctggaagccgttttcctgtggccgctggtactgggtctttactgggaacgcgccaacgccaaaggcgcgctaagtgcgatgattgttggcggcgtactgtatgccgtactcgcgacgctgaatattcagtacctgggcttccaccctatcgtgccctcgttactactaagtttgctggctttcctggtcggaaaccgtttcggtacatccgtcccgcaagctaccgttttgactactgataaataa

SEQ ID NO: 263750 - DNA, 510 bp, Klebsiella pneumoniae
gtgagcgaaattaattaccaggcactgcgtgaggtggcggaacgtgcaattccagcaatggaacgcctgttaatgttgccagctgatgatgacttgttaagtgaacaggaacttaaagattacggtgtggatattgatgcgctcaacgccttcaaatttctgaccggaccagaaaccgtgctggcactgctggatgaacgggaaagaaacctgcaatacatcaaaagccgcgatcaggagaacgaggatattgcgctaacggtagggaagctgcgcgttgagcttgaagcagaaaaacagcgggcaaaagttctatttatggaaaatgctcggcttaagtcaggcatagccggtctgatacacctcggtattcgatatgcagatgttgaggtcatgaaaattgctggagatgcccagctttctaccccatgcactgacagcatcataaacagcattgcaacaggcattcgcatcaaaggagaggagcatggaaataaaaccagaggatga

SEQ ID NO: 263751 - DNA, 507 bp, Klebsiella pneumoniae
atgagcatcagaacctacgcagtgaattgcaatgacgcatggctaaacaccgaaggtgatgacatctccggctcatacgttaagtacaaagaccatcaggaagtggttgccgctcttgaggccaagtgcgcggcgctggcagcggagaatgcgggaataaagtctgcaattccagaatcacgggatattgaagatgacaatgacaatatggatgacgtatctctcgcggaagacttcgggttcaatcatgcaatagaacggatgaggagacagatacctgaaacaccaaccactgatgctttcctggctgaagtccgggcgcagggggtggatgctgctatagaagctgcaaaaaatctggtggcccaagaatatgagtataaggatttcaaagcggcgcagagtgattgctgtatgtaccctggttcagacctggtagggaaggttgaaatgactgagtggttagttgactttgctgcccagcttcgcaaaggaggcaaccagtga

SEQ ID NO: 263752 - DNA, 267 bp, Klebsiella pneumoniae
gtgagtgaatcaaaatgcagggttaatggcaatcagatagaaccatgtgcggcactggcaaaatcccttgagcatgatgctgaatacacgacgcgaaaaggtctgctgatatacaaaatctggaatgagagtttaactcgcggccctgatttggtgatgttgcgttccggtgaattttctaaatcaccagttcgggtttcattttgcccgttctgtggtgaaagtctgaaaacgtgggaagcggaggcaaccagtgagcaaaattaa

SEQ ID NO: 263753 - DNA, 426 bp, Klebsiella pneumoniae
gtggcaaaagtatttacacaagaagagcgggaaaaaattaagaggcaggttgttgaactcgtgcgccagagcgggcgcgagacgttacgacaactggaagcgaaaacaggtgcgacaagatatctgatgagtgttctcgccagagagctggttgccagtggcgatgtatacaattctggctacgggttattcccgtctgaacaggatcgtaaggactggcaaaacgcccgcaaaaaactctcaagggcaaagctgaagaaaaaaacacctgtggttgatccggaccttatctggtcattacctgacggagaaatacgtcgctacgacagtcgcctaaacataatctgtcgcgagtgccggaagagcgaagttatgcagcgcgtgctggcgttttatcaggggaattttcaggaggtggtgcggtga

SEQ ID NO: 263754 - DNA, 1071 bp, Klebsiella pneumoniae
atggctaacgcctggctcagattatggcatgacatgccaaatgaccctaagtggcgaacaattgccagggtgtcagggcagccaattgcaacagtgatggcagtgtatatccacctattggtaagcgcgtcacgaaatgtcacgcgaggtcacattgatgtcacgacagaagatttggcaagtgcgctcgacgtgacagaagaggtaattgattcgattttgctgacgatgcaggggcgggtacttgatggtgatttaatcactggatgggaaaaacgccaggtgctgaaagaggacaacggcaatatttcgcaaaccgcaaaatctcctgcagagcgcaagagggcgcagcgagagagggaaagaaagcgggaacaaaatggcgattgtcacggcgcgtcacgaaatgtcacgcacatgtcacgacgagtcacgacagataaagatacagataaagatacagatcaagaagatcaaaacactatggtccatggcgtaaaaaacgccacgaaccaggcaggggatgttcagaccgtcaatcctggtcagccagcaggcacgacaccggaagccgattcagcgtatgcgctgaaagccgattcgggcgctgtgcagcaggtgatgaccgcaaggccggagcaatcacaccaactgcagcagcctgaagtcgattccgccattcagcgggaagccgatcgggtagtcccggaaaacaccgggcagcctgtgggacgagtggattatccggatgtgttcgaacaggtctggcgggaatacccgttgcgtgctggggcaaacccgaagaaatccgctttcagtgcttggaaggccagattacgcgagggggtgtcaccagaggccatgctggatggcgtgaggcgttacgcaagatacctggcggctaccgggaaaacgggaacggaatttgttcagcgagcgacgacgttttttggaccggaccggaattttgaaaacccctggctgctcccggtaagcggcacgaacaaccagcgttgtgtgaatcatatttctgaaccggataccgaaattccaccgggcttcagggggtaa

SEQ ID NO: 263755 - DNA, 426 bp, Klebsiella pneumoniae
atgaaaatcaaacatgaacatatccgcatggcgatgaatgcttgggcgcatccggacggcgaaaaagtaccggctgcgaaaattaccaaagcgtatttcgagctgggaatgacgttcccggaactgtatgacgacagccatccggaagccctggctcgcaatactcagaaaattttccgctgggtggagaaagacacccctgatgcggttaaaaaaattcaggcgttgttaccagctatcgaaaaagcaatgccacctctgctggtggcccgaatgcgcagccatagctcagcctattttcgggaactagtggagacgcgggcacgactggtgagagacgctgatgattttgtcgcagtggcgatcgctggtttcaaccagatgaatcgtggtggccctgcaggaaatattgtggctgtgcattga

SEQ ID NO: 263756 - DNA, 228 bp, Klebsiella pneumoniae
atgcgagttgatgaacttgttcagttttttggctctgttcagagggtcgctgatttttatgggataacccgcgaagctatttacatgtggcgtaagcgccccggtgaaatagttccgaaagggagggctgcggaagctgctgcatactccaagggaaaattatctttgaacccagagctttacaaaaagaaggataccacccgggacaaaaggaagagtgattcatga

SEQ ID NO: 263757 - DNA, 645 bp, Klebsiella pneumoniae
atggaaagccttggcatcaggcttaagaaactcagaaaagataagggactcacccaagtagaactgggtaagctttcaggcgtgactggggttactatagggtactgggagaaagatctaaacgaacccggcagcaaagctctaagtaagttagcccaggcattaggaactactgagtcctatctcctgtatggagtatcgtctcctgaactatcttttgtgcagagcaatccaggcaccaagatcccctacttttcgtggggtgacgcgatttctttcctaatcttagaaggagagaaaacaatgggaaatgtcgataggatcaccacattctttgatgtagtggaaggtgattttgccgtttcaatgcctgatgacactatgcataacccctcagggtcgccaagtatcccggttggtgccactgtgatcctaagaccaggagagagttataaaaatggcagtatcgtcgctgtaatagttccagatccacttacaaatgaaccgtctatgactataaaaaaattagttattgatggaaaacttgtgtatttaagccctctcaatccgcgctatcaatcatccttgcttacgccagagtgtaaaattgttgccgtagcaaaaggtgtgcagttcaacctataa

SEQ ID NO: 263758 - DNA, 237 bp, Klebsiella pneumoniae; identical to SEQ ID NO: 6072

SEQ ID NO: 263759 - DNA, 129 bp, Klebsiella pneumoniae; identical to SEQ ID NO: 7749

SEQ ID NO: 263760 - DNA, 219 bp, Klebsiella pneumoniae
atgcagaaacgagaacccgtcatcatcgcgccagactataccgatgatgaactttatgagtggatgcgccagaaaattaatgcagcgcaggatctgaaatgggccaatgaagccagggctaagcaggctgaaaatctgtccgctctggagcaggatatcaccaggctggaaaaagcagcggcattaagcattgccagaatgattacatacccgcgttaa

SEQ ID NO: 263761 - DNA, 1350 bp, Klebsiella pneumoniae
atggtgtcttcattgatatcaggcgctcattttttaaatgacaatcatccatggattcctgatacaaaatctaaaatccatgatgtttgtgccttagatgaaaatggatcttatatatcagatttaattctgaggctagcagatgctgtaaataaaagaccagatataaaagtctggaatttgtctttgggaggcggaccatgtaatgagcagacgtttagtgattttgcgatggagttagatcggctcagcgataaatttggtattttgtttgtagttgctgcaggtaattatgtagatgaacctatacgtacatggccaaatcctgatccgcttggaggtgctgatttaatttcctctcctggagagtcagtccgagcactaacagttggttcagtttctcatatggaagctaatgatgctttaagtgaaattggaacaccgacaccatatactcgtcgtggccctgggcctgtatttactccaaagccagatataatccatgctggcggtggggttcatagaccttggaatgtaggagcaagcagtttaaaggtcgtagggccagataataggctttgctctaattttggtactagttttgctgctccaattgtggcaagtttagctgcgcatacatggcagagaatagccactaatacagactttaatgtttcaccatcattgattaaagcattattaattcattccgctcaattatcttctcctgattactcgccaagtgaaagacgctatttgggagcgggaattcctaatgaagttattgagaccttatatgatagtgatgataggtttactctgattttccaaacattcttggttcctggggtgaggtggagaaaggataactatcccataccatcggcacttattcaaaatggaaaatttaaaggtgagattgtaattactgctgcatatgcaccaccactgaaccctaatgccggcagtgaatatgttcgcgcgaacgtagagctaagttttggcttaattgagaataatactataaaaggaaaagtgcctatggaaggagaaaacggtcaatctggatatgagagagctcaaattgagcatggtggaaagtggtcaccagtaaaaattcatcgcaaggcatttaataaaggaattacttcgggtaactgggctcttcaggctaaaacaacgttgagagcgaatgaaccggccttaatggagcctttacctgtaactattgtagtaactttaaaatcattagatggaaacacacaagtttatgctgatggcgtaagagctttaaatgctaataactgggctcactatccattgcctgctcgtgtgccagtttccgtataa

SEQ ID NO: 263762 - DNA, 174 bp, Klebsiella pneumoniae; identical to SEQ ID NO: 9540

SEQ ID NO: 263763 - DNA, 600 bp, Klebsiella pneumoniae; identical to SEQ ID NO: 9539

SEQ ID NO: 263764 - DNA, 291 bp, Klebsiella pneumoniae; identical to SEQ ID NO: 9538

SEQ ID NO: 263765 - DNA, 543 bp, Klebsiella pneumoniae; identical to SEQ ID NO: 9537

SEQ ID NO: 263766 - DNA, 216 bp, Klebsiella pneumoniae; identical to SEQ ID NO: 9536

SEQ ID NO: 263767 - DNA, 426 bp, Klebsiella pneumoniae
atgacctgtggttttgaagatcaatccatcgacactggacgatttgtactgtctcgtatcaataatgaaaattatcagtttcatcatataagatttgactgtatccagggtgagcaaggtgaattagtttttgaacctagtgatgttgaatattactttgagccagtgacgatacaggattcaggaaccagcatattaaaaaatgatttagaaaacagtgaggacggtgcgggtcaaataggctttcaactctccaatgatggtacgcatgaaatgcagtatggtaaaagcaattactactcttttcagcatccccatgaaggaagtaatcagattcctctatttattcgcccgcgtacatatggaaataatgtctcaagcgggcaaataatgagccgagtcaaaatcgtggtaatgtacaactaa

SEQ ID NO: 263768 - DNA, 1167 bp, Klebsiella pneumoniae
gtgaaacatctgcatcgattctttagcagtgatgcctcgggaggcattattcttatcattgccgctatcctggcgatgattatggccaacagcggcgcaaccagtggatggtatcacgactttctggagacgccggttcagctccgggttggttcactcgaaatcaacaaaaacatgctgttatggataaatgacgcgctgatggcggtatttttcctgttagtcggtctggaagttaaacgtgaactgatacaaggatcgctagccagcttacgccaggctgcatttccagttatcgccgctattggtgggatgattgtgccggcattgctctatctggcctttaactatgccgatccgattacccgcgaagggtgggcgatcccggcggctactgacattgcttttgcacttggtgtgctggcgctgttgggaagtcgtgttccgttagcactgaagatctttttgatggctctggctattatcgacgatcttggggccatcattatcatcgcattgttctacactaatgacttatcgatggcctctcttggtgtcgcggctgtagcaattgcggtactcgcggtattgaatctgtgtggtgtacgccgcacgggcgtttatattctggttggcgtggtgttgtggactgcggtgttgaaatcgggggttcacgcaaccctggcgggggtaattgtcggcttctttattcctttgaaagagaagcatgggcgttctccagcgaagcgactggagcatgtgttgcacccgtgggtggcgtatctgattttaccgctgtttgcatttgctaatgctggcgtttcactgcaaggcgtcacgctggatggcttgacctccattctaccattggggatcatcgctggcttgctgattggcaaaccgctggggattagtctgttctgctggttggcgctgcgtttgaaactggcgcatctgcctgagggaacgacttatcagcaaattatggcggtggggatcctgtgcggtatcggttttactatgtctatctttattgccagcctggcctttggtagcgtagatccagaactgattaactgggcgaaactcggtatcctggtcggttctatctcttcggcggtaattggatacagctggttacgcgttcgtttgcgtccatcagtttga

SEQ ID NO: 263769 - DNA, 210 bp, Klebsiella pneumoniae
atgctgaacacatgtagagtgcctcttactgaccgtaaggtcaaggagaagagagcaatgaagcagcataaggcgatgattgtcgccctgatcgtcatctgtatcaccgccgtagtggcggcgctggtaacgagaaaagacctctgtgaggttcacatccgaactggccagacggaggttgctgttttcacggcttacgaatccgagtaa

SEQ ID NO: 263770 - DNA, 255 bp, Klebsiella pneumoniae
atggaacaaaaaacattatcagctaaaccccgcaggtcattttcaaatgagtttaaacttcaaatggttaaactggctttacaaccaagggggtctgttgcccgtattgcccgggagcatgatatcaatgataatcttctgttcaaatggctcaggctctcgctgatcaaagggcgtatatcacggcgtcttccgttaacgaactcttctggcattggcgttgaattattacctgtggagatgacgctgggatga

SEQ ID NO: 263771 - DNA, 1257 bp, Klebsiella pneumoniae
atggatttctttcgttttttgatgagcgatgtactttccgaacccgcagtgctggtcggtttaatcgccctgattggcctgattgcacagaaaaaaccggtaaccgaatgcattaaaggtaccgtcaagaccattatggggtttgtgattttaggcgcaggggcgagtttagttgtgtcgtcactgggtgacttcgcaaacattttccagcatgcctttggtattcagggtgtcgtgccgaataatgaagccattgtttccgtagcgcagaaaagcttcgggaaagaaatggcgatgattatgttctttgcgatggttatcaacattatgattgcccgtttcacaccgtggaaatttatcttcctgaccggtcatcacacgttgtttatgtcgatgatggtagcggtaattctggcaacagcaggcatgaccggcattacgcttatagccgttggctctttggttgttggcgtggcaatggtctttttcccggctattgcgcatccgtacatgaagaaagtgaccggttctgatgacgtcgccatcggccacttctcaacattatcttatgtattggccggtttcatcggcagcaagtttggtaataaagagcactcgactgaagacatgaatgtgccgaaaagtctgctgttcttgcgcgacacgccggttgctatctcttttaccatgagcataattttcctggtgacgtgcctatttgcgggtgcagatgcggtgaaagagcttagcggtggtaaaaactggttcatgttctctatcatgcaatccattaccttcgcagctggcgtgtacatcattctgcagggtgtgcgcatggtgattgcggagattgtcccggcattcaaaggtatttcagacaagctggttccgaatgccagacctgctctcgattgcccggtcgtcttcccttacgcacctaacgctgtactggttggtttcctgagtagctttgctgcaggtttaatcggtatgttcacgttgtatctgctgaacatgatcgtgattattcctggtgtggtgccgcacttcttcgtaggtgcagctgcaggggtattcggtaatgcaacgggtggacgtcgtggtgcgattttgggtgccttcgctcaaggcttgcttattaccttcctgccagtattcttattgccggtgctgggtgatattggttttgctaacaccaccttcagtgatgctgactttggcgcactgggtattttgttagggattatcgttcgctaa

SEQ ID NO: 263772 - DNA, 288 bp, Klebsiella pneumoniae; identical to SEQ ID NO: 4031

SEQ ID NO: 263773 - DNA, 444 bp, Klebsiella pneumoniae; identical to SEQ ID NO: 4032

SEQ ID NO: 263774 - DNA, 1032 bp, Klebsiella pneumoniae; identical to SEQ ID NO: 4033

SEQ ID NO: 263775 - DNA, 2190 bp, Klebsiella pneumoniae
atgtttgtggagcataacctgataaaaaatatcaagatattcacactagcgtttacgctcaccgtggtacttattcagctatcccgttttatttcgccacttgccattatccattccagttatatctttctggcgtggatgccactgtgcgtaatgctgtcaatcttgtttatctttggctggcgcggtgtcgttcccgttttatgcgggatgttttgcaccaatctgtggaactttcatctatcttttttacagaccgcggtcatgctcggcagccagacgtttgttgtgttgtgtgcctgcgcaatattacgctggcagctggggacgcgttggcgttatggattgaccagccgatatgtctggcaacgtcttttctggcttggtttggtgacgccgatcggcatcaaatgcagcatgtatcttgtggggagcttttttgatttcccgctaaagatatccacctttttcggcgatgcggatgccattttcacagtcgttgatttactaagccttttcaccgctgtgctgatttacaacatgcttttctactatctcactcgcatgattgtaagtccccactttgcgcagatattgtggcgcagggatatcgctccgtcgttgagcaaagagaaacgcgcatttaccttaagctggctggcagctcttagcgtgctgctacttctgatgtgcacaccgtatgagaatgactttattgccggttacctggtacctgttttctttatcatctttaccctcggtgtcggtaagcttcgctatccgtttttaaatctcacctgggctgtttcaacgctttgcctgctgaattacaaccagaactttttgcaaggggtactaaccgaatattcgctggcatttattctcgcggtgctgatttcctttagtgtttgcctgctctatatggtgcgcatttatcatcgcagtgaatggcttaatcgccgctggcatttgcaggcgctgaccgatccgttaacgctcctacccaactttcgtgcgttagaacaagcgccggagcaagaggcgggcaagagtttttgctgcctgcgcattgataatcttgagtttatgagtcgtcattacggcttaatgatgcgcgttcactgtatccgatcaatttaccgtacgctgctgccgttgatgcaggaaaacgaaaagttgtatcaattgccgggtagtgaactgctgttagtgctgagtggaccggaaacggaagggcgactccagcatatggttaacatcctgaatagtcggcaaattcactggaataataccgggctggatatgggctatggtgctgcctgggggcgttttgatggaaatcaggaaaccctgcaacccttgttggggcagttaagctggctggcggagcaatcctgcgcacatcaccatgtgctggcgctggatagccgagaggagatggtttccgggcagaccactaaacaggtgctattgctgaataccattcgtacggcgttagatcagggtgatttgctgctctacgcccagccaattcgcaacaaagagggtgaaggttatgatgaaatcctcgcgcgactgaaatatgacggcggcattatgaccccggataagtttctgccccttattgctcagtttaaccttagcgcgcgttttgatttgcaagtgctggaatccttgttgaagtggctggcaacacatccttgcgacaaaaaaggcccgcgcttttcagtcaatttaatgccgctcacgctgctgcaaaagaatattgccgggcggattattcgtctgtttaagcgttataacatctccccgcaggcggtcattcttgagatcaccgaggagcaggcgttttctaacgcagaaagcagcatgtacaacatcgagcagctgcataagtttggtttccggattgcgattgatgactttggcaccggctatgccaactacgaacggttaaagcgtttgcaggctgatatcatcaaaattgatggcgtctttgtgaaagatattgtcacgaatacgctggatgcgatgattgtgagatcaattaccgatctggcgaaagcgaagtcattgagtgtggtcgcggagtttgtcgagacgcaacagcagcaggcgctattgcataagctcggggtgcaatatctgcaagggtatttgattggtcgcccgcagccattagctgattaa

SEQ ID NO: 263776 - DNA, 1203 bp, Klebsiella pneumoniae
atggaccgcgtccttcattttgtactggcacttgccgttgttgcgattctcgcactgctggtaagcagcgaccgcaaaaaaattcgtatccgttatgttattcaactgcttgttatcgaagtgttactggcgtggttcttcctgaactccgacgttggtttaggcttcgtgaaaggcttctccgaaatgttcgaaaaactgctcggatttgccaacgaagggactaacttcgtctttggtagcatgaatgatcaaggcctggcattcttcttcctgaaagtgctgtgcccaatcgtctttatctctgcattgatcggtattctccagcacattcgcgtgttgccggtgattatccgcgcaattggtttcctgctctccaaagtcaacggcatgggcaaactggaatcctttaacgccgtcagctccctgattctgggtcagtctgaaaactttattgcctataaagacatcctcggcaaaatctcccgcaatcgtatgtacaccatggcagcaacggcgatgtccaccgtgtcgatgtccatcgttggtgcatacatgaccatgctggaaccgaaatacgtcgttgcggcactggtactgaacatgttcagcacctttatcgtgctgtcgctgatcaacccttaccgtgttgatgccagtgaagaaaacatccagatgtccaacctgcacgaaggccagagcttcttcgaaatgctgggtgaatacattctggcaggtttcaaagtcgccattatcgttgccgcgatgctgatcggctttatcgccctgatcgccgcgctgaacgcactgtttgccaccgtgactggctggtttggctacagcatctccttccagggcatcctgggctacatcttctatccgattgcatgggtgatgggtgttccttccagtgaagcactgcaagtgggcagtatcatggcgaccaaactggtttccaacgagttcgttgcgatgatggatctgcagaaaattgcctctacactctctccgcgtgctgaaggcatcatctctgtgttcctggtttccttcgctaacttctcttcaatcgggattatcgcaggtgcagttaaaggcctgaatgaagagcaaggtaacgtggtttctcgcttcggtctgaagctggtttacggctctaccctggtgagtgtgctgtctgcgtcaatcgcagcactggtgctgtaa

SEQ ID NO: 263777 - DNA, 1230 bp, Klebsiella pneumoniae
atgtctaatatttggtcaaaagaagaaactctgtggagtttcgcgctctacggcacagccgttggtgcaggcacgctcttccttcctattcagttaggttcggcaggggctgtggtcctgtttattactgctctggtcgcctggcctttaacatattggccacataaagccttatgccagttcatcctctcatcaaaaacatcagcaggtgaagggataacgggcgcggtaacacactactatggcaagaagattggtaatctgattaccacgctgtacttcatcgccttttttgtcgtcgtgttgatatatgccgtggcaattaccaactcacttacggaacagctggcaaagcatatggttattgatcttcgcatccgtatgttggtgagtctgggtgttgtattaatcctgaatctcatttttctgatgggacgccatgccactattcgggtaatgggatttttggtattcccattgattgcctatttcttatttctttctatttacctggtcggtagttggcaacctgatctattaactacccaggtagagttcaatcagaatacccttcaccagatatggatatcgattcccgtgatggttttcgcctttagccatacgcccattatttctacgtttgccatagacagacgtgaaaaatatggcgaacatgctatggataaatgcaaaaaaattatgaaagtcgcttatctcatcatctgcataagtgtactgttctttgtctttagctgcctgctttctattccaccttcgtatattgaagcggctaaagaagaaggggttaccattttatcggcgctttctatgctgccgaacgccccagcatggttgtcaatttccgggattattgtcgcagtagttgcgatgtcgaaatcattcctgggtacgtactttggcgttattgaaggtgccacagaggtcgtcaaaacaacactacagcaggttggtgtaaagaaaagtcgtgcatttaaccgcgcactatcaattatgttggtatcgctgattaccttcattgtttgttgcattaacccgaacgcgatttcgatgatttacgcgatcagcggcccgctcattgccatgatacttttcatcatgcctacgctgtcaacgtatctcatcccggcgcttaaaccctggcgttccatcggaaatctgattacgctgatcgtgggtatcctgtgcgtatcggtaatgttctttagctaa

SEQ ID NO: 263778 - DNA, 1182 bp, Klebsiella pneumoniae; identical to SEQ ID NO: 9899

SEQ ID NO: 263779 - DNA, 837 bp, Klebsiella pneumoniae
gtggacgtaagacagagcatccacagtgcgcatgcaaaaacgctggatacccaggggctgcgcaatgaatttttggttgaaaaggtatttgtcgccgatgagtacaccatggtttacagccacattgaccgtataattgttggcggcattatgccggtaactaaaacggtttccgttggcggggaagttggtaaacaactcggcgtaagctatttcctggaacgtcgcgagttaggtgttatcaatattggcggtgccggtacgattactgtcgatggtcaatgctatgaaatcggtcaccgcgacgccctgtatgttggtaaaggtgcaaaagaagttgtctttgccagtattgataccgccactccggcgaagttttattacaattgcgcacccgcgcatacgacgtatcccaccaaaaaagtcacaccggacgaagtatctccagtcacgttaggcgataacctcaccagtaaccgtcgcacgattaacaaatattttgtcccggatgtactggaaacctgccaattgagtatggggctgacggagctggctccgggtaacttgtggaacaccatgccgtgtcacacccacgagcgccggatggaagtttatttctatttcaatatggatgatgacgcctgcgttttccacatgatggggcagccgcaagaaacgcgtcatattgtgatgcataacgagcaggcggtgatctccccgagctggtcgatccattccggtgtcggaaccaaagcttatacctttatctggggcatggtcggtgaaaaccaggtctttgatgatatggaccatgtggccgttaaagatttgcgctag

SEQ ID NO: 263780 - DNA, 762 bp, Klebsiella pneumoniae
atgattttaagtgcattttctctcgaaggtaaagttgcggtcgtcactggttgtgatactggactgggtcaggggatggcgttggggctggcgcaagcgggctgtgacattgttggcattaacatcgttgaaccgactgaaaccatcaagcaggtcacggcgctggggcgtcgttttttaagcctgaccgccgatctgcgaaagattgatggcattccagcactgctggatcgcgcggtagctgagtttggtcatattgatatcctggtgaataacgccggattgattcggcgcgaagatgctctcgagttcagcgaaaaagactgggacgatgtcatgaacctgaatatcaagagcgtattcttcatgtctcaggcagcggcgaaacactttatcgcgcaaggcaatggcggcaagattatcaatatcgcgtcaatgctctccttccagggcgggatccgtgtgccttcttataccgcatcaaaaagcggcgtgatgggcgtgacgcgattgatggcgaatgaatgggctaaacacaacattaatgttaatgcgatagctccgggttacatggcaaccaacaatactcaacaactacgggcagatgaacaacgtagcgcggaaattctcgaccgcattccagctggccgttggggactgccgagtgacctgatggggccggtagtgttccttgcctccagcgcttcagattatgtgaatggttataccattgccgtggatggcggttggctggctcgttaa

SEQ ID NO: 263781 - DNA, 1053 bp, Klebsiella pneumoniae
ttgagtaaaaataaactctccaaaggccagcagcgccgcgtgaacgccaatcaccagcgtcgtcttaaaacgtctaaggagaagcccgactacgacgacaatctgtttggcgagcctgatgaaggtatcgtcatcagccgctttggtatgcacgctgatgtggaatccgccgatggcgacgttcaccgctgcaatattcgccgtaccatccgttcgctggtgaccggcgaccgcgtagtctggcgtccgggtaaaccggcggcggaaggcgtaaatgtcaaagggatcgtggaagcggtgcatgagcgcacctcggtgttgacgcgcccggacttctacgacggcgtgaaacctattgccgccaacatcgaccagattgttattgtctccgccattttgccggagctgtcgctcaatattatcgaccgttacctggtggcctgcgaaaccttgctgattgagccgattattgtgctcaacaagatagacctgctggacgacgaaggcatggagttcgtcaacgaacagatggatatctaccgcaacattggttatcgcgtattgatggtttccagtcatactcaggatgggctgaaaccgctggaagaggcgttgaccggacgcatcagcatttttgccgggcagtctggcgttggcaaatccagcctgcttaacacgttgctggggctgcaaaaagagatcctgaccaacgatgtttctgacaactcgggtctcggtcagcacaccacgaccgccgctcggctgtatcacttcccgcacggcggtgatgtgattgactcccctggtgtgcgtgagttcggcctctggcacctggagccggaacaaatcactcagggctttgtcgaattccatgactacttaggtctgtgtaaatatcgcgattgcaaacacgataccgatccgggctgcgctatccgggaagcggttgaggaagggaaaatcgcggaaacccgtttcgaaaactatcaccgtattctggaaagcatggcgcaggtaaaaacgcgtaaaaacttttctgatacggatgactga

SEQ ID NO: 263782 - DNA, 309 bp, Klebsiella pneumoniae; identical to SEQ ID NO: 11990

SEQ ID NO: 263783 - DNA, 417 bp, Klebsiella pneumoniae; identical to SEQ ID NO: 11988

SEQ ID NO: 263784 - DNA, 894 bp, Klebsiella pneumoniae; identical to SEQ ID NO: 11987

SEQ ID NO: 263785 - DNA, 438 bp, Klebsiella pneumoniae; identical to SEQ ID NO: 11986

SEQ ID NO: 263786 - DNA, 768 bp, Klebsiella pneumoniae
atgaaaatgcagacattacccatcgtgccgtggattggtggcaaacgccgccttgcaaaacacattctgccgctgtttccggcgcatgaatgttatgtggagccgttttgtggggcagcagcgctctattttcttaagacacccggcaagatcgaagtcatcaatgatatcaacggtgaactggtgaatctgtaccgggtggtaaagcatcacctggaagaatttgtccgccagttcaaatgggcgctggtcagccgtcagatctacaaatggctgcagatcaccccggaagaaacactgacggatatccagcgtgcggcacggttctactacctccagaagcaggcgtttggtggcaaggtggcagagcatagtttcggcacctccaccacatccccgccacgcttcaacctgctgcgtattgaggaagagctctcagcggcacacctgcgactttccagaacggtgatagaacacatggactggcaacagtgcattgagcgttatgaccgtccgcacacgctgttctactgcgacccaccgtacctgggtacggaaggctatggtgtggattttcctgaagggaactactcgcggttggcagagctggcccgttgcatcagaggaaagatgattatatcggtcaacgatatcccggaaatgcggcaggtttttaacggtctgaacattcactgtgtgaaggtcaactacagtcttgcaggaaagggaacactacggcgcgaacttattgtaagtaatttagagtag

SEQ ID NO: 263787 - DNA, 216 bp, Klebsiella pneumoniae; identical to SEQ ID NO: 7238

SEQ ID NO: 263788 - DNA, 402 bp, Klebsiella pneumoniae; identical to SEQ ID NO: 7239

SEQ ID NO: 263789 - DNA, 477 bp, Klebsiella pneumoniae
atgcaagctattccgatgaccttacgcggcgctgaaaaattacgcgaagagctggattttctgaaatctgtgcgccgtcctgaaatcattgctgctatcgcggaagcgcgtgagcatggcgacctgaaagaaaacgccgaataccacgcagctcgtgaacagcagggcttctgcgaaggccgtatcaaagacatcgaagccaagctgtcgaacgcgcaggtgattgatgtcaccaaaatgcccaacaatgggcgcgttatttttggtgctaccgtaacggtgctgaatctcgattctgacgaagaacagacttatcgcatcgttggcgatgacgaagctgactttaaacaaaacctgatttctgtaaactcgcctattgctcgtggcctgatcggcaaagaagaagatgatgttgtggtcatcaaaacgccgggcggcgaagtagaatttgaagtaattaaggtggaatacctgtaa

SEQ ID NO: 263790 - DNA, 1434 bp, Klebsiella pneumoniae
atgcgattttccagatttatcatcggattgaccagctgtatagcgttcagtgttcaggccgcaaatgttgatgagtacattactcaactccccgctggtgccaaccttgccctgatggtgcaaaaagtcggcgcgtcggcccccgctattgattaccacagtcagcagatggcgctgcccgccagtacgcagaaagttattactgcgctggcggcgttgattcaactcggccccgattttcgttttaccacgacgcttgaaaccaaaggtaatgtggaaaacggcgtacttaagggtgacttagtggcgcgatttggtgccgatccgacgttaaaacgtcaggatattcgcaatatggtcgcgactttgaaaaaatctggcgtcaaccaaatcgatggcaatgtgttgatagatacctccattttcgccagccacgataaagcccccggctggccatggaatgacatgacacaatgctttagcgctccgcctgccgccgccatagttgaccgcaactgtttctccgtctcgctctacagtgccccaaaacctggtgatatggcttttatacgcgtggcatcttattaccccgttacgatgttcagccaggtacgcaccctcccccgtggttctgccgaagcgcaatattgcgagctggatgtggtgccaggcgacctgaaccgctttacgctgaccggatgcctgccacaacgttctgagccgctcccgttggcttttgccgtgcaggatggagccagctatgccggtgcaattctgaaagatgagttaaaacaggcaggtatcacctggagcggaacactgctgcgtcagacgcaggttaacgaccccggaacggtagttgccagtaaacagtcggccccgctgcacgatctgcttaagattatgctgaaaaagtcggacaacatgattgccgatacggttttccgcatgatcggccatgcgcgcttcaatgtgcctggaacatggcgggccgggtcggacgccgtgcgtcagatcctgcgccagcaagccggtgtcgatattggtaacaccattattgccgatggttcagggctttcgcggcataacctgattgcccccgccaccatgatgcaggtgctgcaatacatagcccaacacgacaatgaacttaactttatctctatgctgccgctggcgggctatgacggctctttgcagtaccgtgcaggtctgcatcaggcgggcgtggatggaaaagtctcagcgaaaaccggttcgttgcagggggtatataacctggcgggattcattaccacagcgagcgggcaacgaatggcgtttgtgcaatatctttctggctatgcagtagaaccggcggatcagcgtaatcgccgtattccgttagtgcgttttgaaagccgtttgtataaagatatttatcagaacaattag

SEQ ID NO: 263791 - DNA, 966 bp, Klebsiella pneumoniae
atgaagcagcaggcaggcattggcattcttttggcgctcaccacagcaatttgctggggggcgttgccaatcgcaatgaagcaggtgctggaggtgatggaacctccgacaatcgtgttttaccgtttcttgatggcgagtattggccttggtgccattcttgcggtgaagaagaggttgccgccattacgcgtgtttcgtaagccacgctggttgattttgttggcagtggcgaccgccgggctgtttggtaacttcatcctgttcagctcatccttgcaatacctgagtccgaccgcttcgcaggtgattgggcaactctcgccagttggcatgatggttgccagcgtatttatcctgaaagagaaaatgcgcagcactcaggttgtaggggcattgatgctcctgagcggtctggtgatgttttttaacaccagtctggttgagatatttacaaagctcaccgattacacctggggagttatctttggggtcggtgcggcgacggtttgggtgagttatggcgtggcgcaaaaggttttattgcgtcggctggcctcaccgcagatcctgtttttactgtacactttatgtacaattgcgctcttccctctggcaaagcctggagtgatagcgcagcttagccactggcagctcgcatgtttaattttttgcggactgaataccttggtaggatatggcgccctggcggaagcgatggctcgctggcaggcagcgcaggtgagcgcgatcatcacgctcaccccactgtttacgctgtttttttcagatcttttatcactggcctggcccgatttcttcgccagaccgatgttaaaccttttaggttatctcggtgcgtttgtcgtggttgcgggcgcgatgtattccgccattggtcatcgtatttggggcggattacgtaagcatacaacggtggtatcgcaaccccgcgcaggcgaatga

SEQ ID NO: 263792 - DNA, 345 bp, Klebsiella pneumoniae
atgtgtataagagacagaaataaagactttaaaatttctctcaaagatccgagctgtattaatggttccaataaagcaacgtttgagtggtattctccagctcttggcgataccggcattggcaaccagtcaggcaccgcaactggttcttatgtagaattgaaagccaaatctggtgtaactaacaatccttctcgtattgatgctattactgcactgaacaacagcgttgattttaccgttactcaggcagtgatgggctttgaatatacagctacgcttcatgctgacaatactccgggctcttttgaaactgctgcttcctacaccgttgtgtatgagtaa

SEQ ID NO: 263793 - DNA, 2409 bp, Klebsiella pneumoniae; identical to SEQ ID NO: 9916

SEQ ID NO: 263794 - DNA, 693 bp, Klebsiella pneumoniae; identical to SEQ ID NO: 9915

SEQ ID NO: 263795 - DNA, 522 bp, Klebsiella pneumoniae; identical to SEQ ID NO: 9914

SEQ ID NO: 263796 - DNA, 306 bp, Klebsiella pneumoniae
atgtttattcaccggtttaaaggtaaaaatataaagttagtcattgagttgactgaacaataccccctattagttacggacacaacagcctctctttttaataaaatcaaaagattaggtgtttgcatagccttggatgattttggagtaggttataatagctataattgtatacgcaacattcccttagatattattaaaatcgacaaatcttacatccatgacatgcgcagaaatgatgtgtcaaaatacattatagctgtctcttatacacatctgacgctgccgacgatctactctgtgtag

SEQ ID NO: 263797 - DNA, 768 bp, Klebsiella pneumoniae
atgctgcaaatctctcatctttacgccgattatggcggcaaaccggcactggaagatatcaacctgacgctggaaagctgtgagctactggtggtgctggggccgtccggctgcggcaaaaccaccttgctgaatctgattgccggttttgtgccttatcagcatggcagcattcaactggcgggtaagtgcattgagggaccgggcgcagagcggggcgtggtttttcagaatgaagggctgttgccgtggcgtaatgtggtagacaacgtggcgttcggcctgcaactggcaggtgtagagaaagtacagcgcctggaaatcgcgcaccagatgctgaaaaaagtggggctggaaggcgcagaaaaacgctatatctggcagctttccggcggtcaacgtcagcgggtagggattgcccgcgcgctggcggcgaatccccagctgttattactcgacgaaccgtttggcgcgctggacgccttcacccgcgatcagatgcaaactctgctgctgaaactctggcaggagacgggcaagcaggtgctgttgattacccacgatatagaagaagcggtgtttatggcgactgaactggttctgctttcacccggccctggccgcgtgctggagcggctgccgctcaactttgctcgccgctttgttgcgggagagtcgagccgcagcatcaagtccgatccacaattcatcaccatgcgcgaatatgttttaagccgcgtatttgagcaacgggaggcgttctcatga

SEQ ID NO: 263798 - DNA, 852 bp, Klebsiella pneumoniae; identical to SEQ ID NO: 31849

SEQ ID NO: 263799 - DNA, 258 bp, Klebsiella pneumoniae; identical to SEQ ID NO: 9938

SEQ ID NO: 263800 - DNA, 294 bp, Klebsiella pneumoniae; identical to SEQ ID NO: 9939

SEQ ID NO: 263801 - DNA, 771 bp, Klebsiella pneumoniae
atgcagttgttcctcaaccagatgagcaatgcacttcaacaggattcatctttgttagagtcaaaggaacacaccatagatattcaagaaaaaacgaataagtttgtgcagcattttcagcgggtattatttgataaaaatggaaggtcatcagagtttctacttaatttttatgagtgttgctataagtttttaccaagagcgcagcctcaagataaaatcgatagctataattcagcactgcaagctttttccatcttttgttcatctacgttgacacataataatgtagggtttaatttcaaattatttccagaagtcaagctgtctggaggagagcttgaaacggtattcaaatacaaaaatggtaattttgtctgggagatagccagaattaaaattactctcccaaaagaagagggtggtttatataatttacgtggattggattttaagggatgcttcttttctggacagaacttcagtaactatgatattcaatatgtgaactggggaacgtcattgtttgatcttgatactccatgtatttttaatgcgcctgcttacaacaagagtaatgaaaaatcattagaacgcgtcagcgaaaacggtttaagtggagtcttgtctgatcgtaataaaaaaataaaactaatcacgggtgtggcaccattcgatgatattttatttatggatgatgactttgatgataactcccctgatgatggtcccgttgagaatagtcctgttgtgaatagtccccttgtatga

SEQ ID NO: 263802 - DNA, 1845 bp, Klebsiella pneumoniae
atgattattgcgactgccggacacgttgaccacggcaaaacaaccttattgcaggcgattactggcgtaaatgccgaccgtctgccggaagaaaaaaagcgcggcatgaccatcgatctcggttatgcctactggccgcagccggatggtcgcgtgcctggttttatcgacgtacccggtcatgaaaagtttctttccaacatgctggcgggcgttggtggtatcgatcacgcgctgttggtggtggcgtgcgatgacggcgtgatggctcagactcgtgagcatctggcgattttgcagctgaccggtaacccgatgctgacagtggcgctgaccaaagccgatcgcgtggacgaagcgcgtgttgatgaggttgaacgccaggtaaaggaggtgctgcgggaatacggttttgctgaggcaaaactgtttatcaccgcagcaaccgaaggtcggggaattgatgccctgcgcgagcatttgcttcagttaccagaacgtgaacacgccagccaacatagtttccgcctcgcgatcgaccgtgcatttaccgtaaaaggtgccgggctggtcgtcaccggtacggcgttaagcggggaagtgaaggtaggcgattcactctggctgactggtgtaaataaaccgatgcgtgtacgtgcgctgcatgcacaaaaccagccaacagaaaccgcccatgccgggcagcgtatcgcgcttaacatcgcgggtgatgcggaaaaagagcagattaaccgtggcgactggctgcttaccgatgcgccgccggagccgttcacacgggtgattgtcgagcttcaaacccatacaccgctgacccagtggcagccgctgcatattcaccacgccgccagccacgtcacgggacgcgtttcgctgctggaagataaccttgccgagctggtattcgacacgccgctgtggctggcggataacgatcgcttagtgctgcgcgatatctcggcccgcaacacgctggcgggggcgcgtgtggtgatgcttaacccgccgcgtcgcggtaagcgtaagccggaatatctgcaatggctggcgtctcttgcacgagcgcagagcgatgccgatgcgttatctgttcatctggaacgcggagcggttaaccttgcagatttcgcctgggcacggcagctcaacggcgaagggatgcgcgaactgctgcaacagcctggctatattcaggctggttatagcttgttgaatgcgccggttgccgcccgctggcagcggaaaattctcgacacattagcgacttatcatgagcaacatcgcgatgaacctggtcctgggcgcgaacgtctgcgacgtatggcgttgccaatggaagatgaagcgctggtactgttgctgattgaaaagatgcgcgaaagcggcgacatcctcagtcatcacggctggctgcatctgccggatcacaaagcgggcttcagcgaagagcagcaggccatctggcaaaaagcagagccactgtttggtgacgaaccgtggtgggtgcgagacctggcaaaagagacgggaaccgacgagcaggcaatgcgtctgacgctacgtcaggcggcgcagcaggggataattaccgcgatcgttaaagatcgttattaccgtaacgatcggattgtcgagtttgccaatatgatccgcgatctcgatcaggaatgtggttcaacctgcgcggcggatttccgcgatcgcttaggcgtaggccgaaagctggcaattcagattttggaatattttgaccgcattggctttacgcgtcgtcgtggaaatgatcatttattgcgcgacgcattattatttccggaaaaataa

SEQ ID NO: 263803 - DNA, 1392 bp, Klebsiella pneumoniae
atgacaaccgaaacgcgttccctctatagtcaacttccggctattgatcgcttattgcgcgatagctccttcctttctttgcgtgatacttatggtcacacccgcgtggtggaattgctgcgtcagatgcttgacgaagcgcgagaagtgattcgtgacagccagacgctgcccgcatggtgtgaaaactgggcgcaagaagtcgatgcccgactgacgaaggaggcgcagagcgcgctgcgtccggtgatcaacctgacgggaaccgtgctgcataccaatcttgggcgagctttacaggcagaagccgcagtggaagccgttgcgcaggctatgcgttcgccagtgaccctcgagtacgatctggacgacgccggacgcggacatcgcgatcgggcgctggcgcagctgctgtgccgcattacgggagcggaagatgcctgtatcgttaataacaatgcggcggcggtgttattgatgttggcggccactgccagcgggaaagaggtggtggtatctcgcggcgaactggtggagattggcggcgcgtttcgtattcctgatgtcatgcgtcaggcaggctgcaccctacacgaagtggggaccaccaaccgcacgcacgctaatgattatcgtcaggcggtgaatgaaaataccgcgctgttgatgaaagtacataccagtaactacagcattcagggattcaccaaagcgatagatgaagcggaactggtggcgctcggcaaagagctggatgttcccgtagtgactgatttaggcagtggctcgctggttgatcttagccagtacggtttgccgaaagagccaatgccgcaggagttgattgcggcgggtgtcagtctggtgagcttctccggcgacaagttgttaggcgggccgcaggcaggaattattgttggtaaaaaagagatgatcgcccgcctgcaaagccacccgctgaagcgtgcattacgcgcggataaaatgaccctcgcggcgctggaagccacgttgcgtctttatttacaccctgaagcactgagtgaaaaattaccgaccctgcgcctgcttacccgcagcgcagaggtcattcaaatccaggcacaacgtttacaggccccccttgccgcacattacggcgcggagtttgcggtacaggttatgccatgtctttcgcagattggcagtggttcgctgccggttgatcgcctgccgagcgcggcattaacgtttacaccccatgatggacgcggtagccaccttgagtcattagccgcccgctggcgtgaattgccagtgccggtgattggtcgtatttatgacggacgattgtggctggatttacgctgccttgaaaatgagcaacggtttttggagatgttgttgaaatga

SEQ ID NO: 263804 - DNA, 609 bp, Klebsiella pneumoniae; identical to SEQ ID NO: 9717

SEQ ID NO: 263805 - DNA, 744 bp, Klebsiella pneumoniae; identical to SEQ ID NO: 18933

SEQ ID NO: 263806 - DNA, 570 bp, Klebsiella pneumoniae
atgcagccggtactccgtccgccgtcctgccgcatccgtctgcgccttcagcctccccgcctcatcatactcgctgcgggtgatgctcccgtcggcatgctccttcttcaccacacgcttcaggccacccccgccttccgtgtacagcacctcccgccggttcaggctgtccgtgatggtcacgcggtcctgcccgtactcaaagcggtagtccagcccctccgggttgacctgctccgtcacccgaccggtatcatcataccggtagcggctctccggcctccccgcataatggtgcgccaccatccgcccggcgtgctccgcatcataagtaaacccgcgcacctgcgtcccgctgcggtcatacaccgcccgcagttctccgctggccgtgtacgtatagcgcgccagcggcgcagtcggctgttcatccgggtatgccgggtcgtgtgtcagccacaccgcctccagccggataccgttatcggcaccgtattctgtaccggcgggcagcgtatcggggaaaacctgagaagaggaaacagaacggggaccggctggagaagataa

SEQ ID NO: 263807 - DNA, 1413 bp, Klebsiella pneumoniae
gtgccgcgccttcgcctgttcaccattctctgtttcgattctgatgagcggcgtgaagctccccggctggtataccgtctggatacgcgtggtgccggtctgtaccgtcgtcagcctgtcaccgtcccacccgtaccaggtctcctccggtttacgcgacagcgacatccaccccgtcaggtcacgctcccgccgccacacccgtttccccgtccggcggcccagcgggtcatagaggtagcggctctccacctgtggctcgccgtgctgtatccgcgtgtagaacaccaggcggtgctggctgtcgtaatggtagtggtgcgtccgctcgtcgtgcatccgtatcaccccttccgggatacggtccgtcttctccgccagcctgccgtattcatcgtagcggtagacatagtgcgcatcttccgtgatgcggttatccggccacgccgtgaaggtgctgtccgggtgcagttccgggtccggcagccggtttcctgccgggtccgtcgcatacgggatatcgatatccaggttcgccgccgtggtgtgaacgcccgtcagtcttcccgtgtcgctgtaacggtacttccggctctcctgcgggccgctgatgcgcaccagttgcccgttatcgttccacgtatactcacggtcaagctgcggaaggttcaggtgcctgctccggagctgccctgtgagggtgtacgccgtggcctgttcgtaccccgctgtactgcccgccccgccgaagctgcgggccgtctcacggtgcagccggtcccgcgtgtactcgaccagcggcgttccgcccagcttcatccccgcaagataaccgctgccatacgtcagccactccaccggcggcagaccgtccggctcctgacgggtcgccagcccctgttcgctgtagacgtgcctcgtctcatgctcccacagcatctcccccgtctcctggttctccaccgtctgccgttcgcccgtcaggcggcctttatcgtcatagccgtagtggaccgccacacggtggccttcgctcaggtggctgatttctgtcagccagccgtggtcgtcatactgccactgctccgccgggtcgccgttcaccgtccggtgcgtgatgcgcccggcgtcatcgtagtaccactgcgtgacctgcccctcatcctcgctgcggatgagctgccctgtggcgctgtaccggtaacgctgcgtcctgccgtcaaagccgcgctgctccgtcagcctgtccaccgggtcataccggaacgtggactggctgccgttctcgttggtcagcacggtgatgcgcccggcagcgtcataccccatgctgcgcgtcagaccgccttccgtcacactcaccggacgcccgcgtttatcatattcgatggtgctgcgtttaccgtccggtga

SEQ ID NO: 263808 - DNA, 384 bp, Klebsiella pneumoniae
atgccgaaagccgatcccgctcagcacgcctccggccaccgggccgatcaccgctcccagttcaccgcataccgcaaacagcgcaaaccactcggcgcgactgcgtttcccgttggcctggctgtgggtaccggcccgcgccagcagggcctctatcgacggggagaacagggcgccgccgacgccggtcaggcaggcgccgaggataatgggccacagcgacgccccgcacgccagcaggagaaaaccggcgacgcgaacgacgcagccggcgagaatgatcgccttagcgccatagcggtcggccagcgtcccgccgaggataaacatgccctgttgggagaaggtacgcagcccgagaatcaggccgataagtccgcctga

SEQ ID NO: 263809 - DNA, 498 bp, Klebsiella pneumoniae
atggtggacgcctttgcgccagccgcgctttgtcgcgtttattctcgcctacagctcatggctgttgagctacaaccaactgtacctcgccctgccggtggagatccaacgttccggcggccgcgagcaggatctggcgccgctctttatgctggcctcgctgttgattatcaccctccagctccctctcgcccgcttcgcccggcgaatgggcgccgtgcgcatcctgccggtgggctttctgctgctgtcggcttcctttgccagcgtggcgttattcgccaccgccccacccgccgaaggttggctgcggttaatgccggcggctggttttgtcacgctgctcaccctcggccagatgctgttagtgcccgcagccaaggatctgatcccgctgttcgccgaggagtcgacgctgggcgcccactacggagcgctcgccaccgcaggagggtgcgcggtgttagccgggaatttactgctcggtcatttacttga

SEQ ID NO: 263810 - DNA, 2412 bp, Klebsiella pneumoniae
atgaccaaccactgggtggatatcaaaaacgctaacgtcgtaatggtgatgggcggtaacgctgctgaagcgcatcccgtcggtttccgctgggcgatggaagcgaaaaacaacaacgatgcaaccttgatcgttgtcgatccccgttttacgcgtaccgcttctgtagcggatatttacgcacctattcgttccggtacggacattacgttcctgtctggcgttttgcgctacctgatcgaaaacaacaaaatcaacgccgaatacgttaagcattacaccaacgccagtctgctggtgcgtgatgattttgctttcgaagacggtctgttcagcggctacgacgctgaaaaacgtcaatacgataaatcgtcctggaactatcagttcgatgaaaacggctatgcgaaacgcgatgaaacactgactcatccgcgctgtgtgtggaacttgctgaaagagcacgtttcccgctacacgccggacgtagtagaaaacatctgtggtacgccaaaagccgacttcctgaaagtgtgtgaagtgctggcctccaccagcgcaccggatcgcacaaccaccttcctttacgcgctgggctggacgcagcacaccgtgggtgcgcagaacatccgtactatggcgatgatccagttactgctcggtaacatgggtatggccggtggcggcgtgaacgcattgcgtggtcactccaacattcaggggctgaccgacttaggcctgctctctaccagcctgccgggttatctgacgctgccgtcagaaaaacaggttgatttgcagtcgtatctggaagcgaacacgccgaaagcgacgctggctgatcaggtgaactactggagcaactatccgaagttcttcgttagcctgatgaaatctttctacggcgatgctgcgcagaaagagaacaactggggctacgactggctgcccaagtgggaccagacctacgacgtcatcaagtatttcaacatgatggatgaaggcaaagtcaccggttatttctgccagggctttaacccggttgcgtccttcccggacaaaaacaaagtggtaagctgcctgagcaagctgaagtatatggtggttatcgatccgctggtgactgaaacttctaccttctggcagaaccacggcgagtcgaacgatgtcgatcctgcgtctattcagactgaagtattccgtctgccttcgacctgctttgctgaggaagatggttctattgctaactccggtcgctggttgcagtggcactggaaaggtcaggacgcgccgggcgaagcgcgtaacgacggcgaaattctggcgggtatctaccatcatctgcgcgagctgtaccaggccgaaggtggtaaaggcgtagaaccgctgatgaagatgagctggaactacaagcagccgcacgaaccgcaatctgacgaagtagctaaagagaacaacggctatgcgctggaagatctctatgatgctaatggtgtgctgattgcgaagaaagggcagttgctgagtagctttgcgcatctgcgtgatgacggtacaaccgcatcttcttgctggatctacaccggtagctggacagagcagggcaaccagatggctaaccgcgataactccgacccgtccggtctggggaatacgctgggatgggcctgggcgtggccgctcaaccgtcgcgtactctacaaccgtgcttcggcggatatcaacggtaaaccgtgggatccgaaacggatgctgatccagtggaacggcagcaagtggacgggtaacgatattccggacttcggcaatgccgcgccaggtacaccaaccggaccgtttatcatgcagccggaagggatgggacgcctgtttgccatcaacaaaatggcggaaggtccgttcccggaacactacgagccaatcgaaacgccgctgggcactaacccgctgcatccgaatgtggtgtctaacccggttgttcgtctgtatgaacaagacgcgctgcggatgggtaaaaaagagcagttcccgtatgtgggtacgacctatcgtctgaccgagcacttccacacctggaccaagcacgcgttgctcaacgcaattgctcagccggaacagtttgtggaaatcagcgaaacgctggcggcggcgaaaggcattaataatggcgatcgtgtcactgtctcaagcaagcgtggatttatccgcgcggtggcggtggtaacgcgccgtctgaaaccgctgaatgtaaacggtcagcaggttgaaacggtgggtattccaatccactggggctttgagggtgtcgcgcgtaaaggttatatcgctaacactctgacgccgaatgtcggtgatgcaaactcgcaaacgccggaatataaagcgttcttagtcaacatcgagaaggcgtaa

SEQ ID NO: 263811 - DNA, 885 bp, Klebsiella pneumoniae
atggctatggaaacgcaggacattatcaaaaggtccgcaactaactccatcacgccgccttctcaggtgcgtgattacaaagcagaagtcgcgaaacttatcgacgtttccacctgtatcggttgtaaagcctgtcaggtggcgtgttcggagtggaacgacatccgtgatgaagtggggcactgcgtcggggtttacgataaccccgccgatctgagcgccaagtcctggacggtgatgcgctttagcgaaaccgaacagaacggcaagctggagtggctgatccgtaaagacggctgtatgcactgtgaagatccgggctgcctgaaggcgtgcccgtctgctggtgcaatcattcagtacgctaacgggattgtcgatttccagtcggaaaactgcatcggctgtggttactgcattgccgggtgtccgtttaatattccgcgcctcaacaaagaggataaccgggtatataaatgcacgctctgcgtcgatcgcgtcagcgtcggccaggaaccggcttgtgtgaaaacctgtccgaccggggctatccacttcggcaccaagaaggagatgctggagctggcggaacagcgcgtggcgaaactgaaagcgcgtggttacgaacatgctggcgtctacaacccggaaggggtcggtggtacgcacgttatgtacgtgctgcatcacgccgatcagccggagctgtatcacggtctgccgaaagatccgaagatcgacacctcggtaagcctgtggaaaggcgcgctgaaaccgctggcagcggctggctttattgccacttttgccgggttgattttccactacatcggtattggcccgaataaggaagtggacgatgacgaggaggatcatcatgagtaa

SEQ ID NO: 263812 - DNA, 654 bp, Klebsiella pneumoniae
atgagtaagtcgaaaatgattgtgcgcaccaaatttattgatcgcgcctgtcactggaccgtggtgatttgcttcttcctggtggcgctgtccgggatttcgttcttcttcccgacgctgcaatggctgacgcaaaccttcggtacgccgcagatgggacgcattttgcacccgttcttcggcattgcgattttcgtcgcgctgatgtttatgtttgtgcgttttgtgcatcacaacatcccggataagaaagatattccgtggctgttgaacattgtcgaagtattaaaaggcaatgagcacaaagtggcggatgtcggtaagtacaacgccgggcaaaagatgatgttctggtcgatcatgagcatgattttcgtgctgctggtgaccggggtgattatctggcgtccgtactttgcgcagtacttcccgatacaggttgtccgttatagcctgctgatccacgcggctgcgggtatcatcctgatccacgccatcctgatccatatgtatatggcattctgggtgaaaggatcgattaaagggatgatcgaaggaaaggtgagccgtcgctgggcgaagaaacaccatccgcgctggtatcgtgaaatcgagaaggcagaagcgaaaaaagagagtgaagaagggatataa

SEQ ID NO: 263813 - DNA, 1050 bp, Klebsiella pneumoniae
atggttattcgcggcatgacgattagtttgccatggtttgcttttatcaatgtcagttttgcattgataattttgctgcgccgtgttctgtttaatgaccttactccaccctggttaaatgaaaaaagccttatacattctattgatatatctgcaacgggtattctgctgatttgcagtggtttactactcatccctcggcaaaaaacattacctatccaggtgctattagttgccctgagcctgctatggtcatggtgtagttatcactttattgcgtactggacgctgcagtttgcttatccactatgtgtattattaatgcttagtggcgttgtcgcactttatttccataccccatcattgctcgcatttgtcattcccttatggttcaccactccaatagcgagtcttatgcttaatcaacagatcaatattcattttgctgttgtatggtgtattttttcactggcgctatatggtgggcgactcattttgttacgttggtttgaagaagcatgggtacaaaacagttataacaaccagttaattaatcgccttgatgcattagcacatcgtgatcctttaactgggatagcaaaccgacgtgcaatgaacagtatcttacacgacgcgatggataacggcgggtcatttgctcttattatgctggatgtcgatttttttaaacgttacaacgacacttacgggcatcctgctggggatcgttgtctaatacaagttgccgacgctctacagcgttcaactcgccagtcggaggatgttgttgtccgttatggtggcgaagagtttgccatcatactttttaatgcaacattgccggaagcagagacggtagcagccagagtgaagcaagaacttaaactggcagctatcccacatcaggcatctgctgttaatgcatttgttacggttagtcaggggattacctgttctgctcccgcaaaaacggctgaacaaattatttcagatgccgacgctgcgttataccgggcgaaagaaagtgggcgaaatcgatgggctttataa

SEQ ID NO: 263814 - DNA, 1977 bp, Klebsiella pneumoniae; identical to SEQ ID NO: 9854

SEQ ID NO: 263815 - DNA, 921 bp, Klebsiella pneumoniae
atggacattgcagttattggttccaatatggtggatctcattacttacactaatcagatgcctaaagaaggagaaactctggaagcacctgccttcaaaatcggatgtggtgggaaaggtgctaatcaagcggtggcggcggctaaattgaattcaaaagtcctgatgctgactaaagtaggtgatgatatttttgcggataatactattcgtaatctcgaatcatggggaattaataccacttatgttgagaaggtcccctgtaccagcagtggtgttgcaccgatctttgttaatgccaactcgagcaatagtatattaataattaagggagcgaataaatttctttccccggaagatatcgatcgagctgcagaagatctgaaaaaatgcaaattgatcgttttacaactggaagttcaactggaaacagtttaccacgcgattgagtttggtaagaaaaatggtattgaagtgttattaaatccggctccggcattgcgtgagttagatatgtcttatgcctgcaaatgtgatttctttatcccgaatgaaacagaactggaaatattaaccggcatgtcggttgatacttatgatcatattcgtttggctgcgcgttcgttagttgataaagggctgaacaatattattgttaccatgagcgaaaaaggcgcattatggatgacccgtgatcaggaagtccatgttcctgcattcaaagtaaatgctgttgatactagtggcgctggtgacgcatttattggttgcttttcccattattatgttcaaagcggtgatgttgaagccgctttgaaaaaagccgctctctttgccgctttcagcgtcacagggaaaggtacgcaatcatcttatccgagtattgaacaatttaatgaatttttaaccttaaacgaataa

SEQ ID NO: 263816 - DNA, 1317 bp, Klebsiella pneumoniae
atgaacgataaaaacatcattcagatgcctgatgggtatctgaataagactcccttgttccagtttattttgttatcgtgtttattcccgctatggggatgcgcagctgcattaaatgacatattaatcactcaattcaaaagtgtattttcgctaagtaactttgcttcagcattggtgcagagcgcattttatggaggttattttttaattgcaataccagcatcccttgtgattaaaaagaccagttataaggtggcaattttaattggcctgacgctgtatattggtggttgtacactttttttccctgcctcgcatatggcaacctacactatgttccttgcagctatttttgcgattgcgattggcctgagtttccttgaaactgcagcgaacacatacagttcaatgatcggtccaaaagcctatgccacattgcggctcaatatcagccagaccttttatccgattggtgctgcgtctggtattttattgggcaaatatctggttttctccgagggggaaagccttgaaaagcagatgtcaggaatgaacgccgagcaaattcacaactttaaggtgctgatgttagagaacacccttgaaccgtataagtatatgattatgattctggttgtggtcatggtgttgttccttttaacccgcttcccaacctgtaaagtggcacagacaagtcaccataaacgcccgtcagcaatggatacgctgcgctatctggctagaaatccgcgctttcgtcgcggtattgtggcgcagttcctttatgtgggtatgcaggtcgcagtatggtcatttaccatccgtctggcgctggagttgggcgatatcaacgaacgtgatgcttcaaacttcatggtctatagctttgcctgcttctttattggcaagtttatagccaacatccttatgacgcgttttaatccggaaaaagtattgattctctattccgttataggggcgctgttcctggcatatgttgcactggctccaagtttcagcgcggtctatgtcgccgtcctggtaagtgttttgtttggcccttgctgggcgacgatctatgcaggaacactggatacagttgataacgaacatacagaaatggcaggagcagtcattgttatggctattgtcggtgccgcggtggttccggcaattcagggatatattgcagatatgttccactcactacagctttcattcctggtttctatgctctgctttgtctatgtcggagtctacttctggcgtgaaagcaaagtacgtaccgcactggctgaagtcacagcgtcctga

SEQ ID NO: 263817 - DNA, 1014 bp, Klebsiella pneumoniae; identical to SEQ ID NO: 29370

SEQ ID NO: 263818 - DNA, 252 bp, Klebsiella pneumoniae; identical to SEQ ID NO: 2348

SEQ ID NO: 263819 - DNA, 621 bp, Klebsiella pneumoniae
gtgacgtgccatgccgccgtaggtatcaacgataattttacgaccagtcagaccgcagtcacccatcgggccaccgataacaaaacgaccggtcgggttgatgaagaatttggtggcagaagtcagccattcagccggcagaatcggcttgatgatctcttccattaccgcttcttgcagcgatttctggtcgatttcttcagagtgctgagtggaaagcacgacagcatcgataccaacgattttgccgtcgtcatactggaaagtcacctggcttttcgcgtccgggcgcagccacggcagagtgccgtttttacgcacttcagcctgacgctgtaccagacggtgtgcataggtgataggcgctggcatcagcacgtcggtttcattggttgcgtagccaaacatcagaccctggtcacccgcgccctgttccagcggatcggcacggtcaacgccctggttgatgtcaggagactgtttgccgatagcgctcagaaccgcacaggagttagcgtcaaagcccatgtcggaatgtacatagccaatttcgcgaacggtgttacgggtgatctcttcgatgtctacccaggcgctggtggtgatttcgccgccaactaa

SEQ ID NO: 263820 - DNA, 1449 bp, Klebsiella pneumoniae
gtgcttgatctgaccatcaacacccgtggtggtgatgttgagcaagctctgctgcctgcttacccgaaagagctgaactctacccagccgttccagctgctggaaacttcaccgcagtttatttatcaggcacagagcggtctgaccggtcgtgatggcccggataatccggctaacggcccgcgtccgctgtataacgttgaaaaagacgcttatgtgctggctgaaggtcaaaacgaactgcaggtgccgatgacgtataccgacgcggcaggcaacacgtttaccaaaacgtttgtcctgaaacgtggtgattacgctgtcaacgtcaactacaacgtgcagaacgctggcgagaaaccgctggagatctccacctttggtcagttgaagcaatccatcactctgccaccgcatctcgataccggaagcagcaacttcgcactgcacaccttccgtggcgcggcgtactccacgcctgacgagaagtacgagaaatacaagttcgataccattgccgataacgaaaacctgaacatctcttcgaaaggtggttgggtggcaatgctgcaacagtatttcgcgacggcgtggatcccgcataacgacggtaccaataacttctataccgctaatctgggtaacggcatcgccgctatcggctacaagtctcaaccggtactggttcagcctggtcagactggcgcgatgaacagcaccctgtgggttggcccggaaatccaggacaaaatggcagctgttgctccgcacctggatctgaccgttgattacggttggttgtggttcatctctcagccgctgttcaaactgctgaaatggatccatagctttgtgggtaactggggcttctccattatcatcatcacctttatcgttcgtggcatcatgtacccgctgaccaaagcgcagtacacctccatggcgaagatgcgtatgctgcagccgaagattcaggcaatgcgtgagcgtctgggcgatgacaaacagcgtatcagtcaggaaatgatggcgctgtacaaagctgagaaggttaacccgctgggcggctgcttcccgctgctgatccagatgccaatcttcctggcgttgtactacatgctgatgggttccgttgaattgcgtcaggcaccgtttgcactgtggatccacgacctgtctgcacaggacccgtactacatcctgccgatcctgatgggcgtaacgatgttcttcattcagaagatgtcgccgaccaccgtgaccgacccgatgcagcagaagatcatgacctttatgccggtcatcttcaccgtgttcttcctgtggttcccgtcaggtctggtgctgtactatatcgtcagcaacctggtaaccattattcagcagcagctgatttaccgtggtctggaaaaacgtggcctgcatagccgcgagaagaaaaaatcctga

SEQ ID NO: 263821 - DNA, 1365 bp, Klebsiella pneumoniae
atgagcgataatgacactatcgtagcccaggccacgcctccgggacgtggcggcgttggcatcctgcgcatctccggcctcaaagcccgtgaagttgccgaaaccgtgctgggtaaactgcctaagccgcgctacgccgattatcttccgtttaaagacgccgacggcagcgtgctcgatcaggggattgcgctatggttccctggcccgaactcgttcaccggcgaagatgtgcttgaactgcagggtcatggcggtccggtgatcctcgacctgctgttaaaacgcattctgaccattcccggcctgcggattgcccgccctggtgagttttccgaacgcgcgtttcttaacgataaactcgacttagcccaggctgaggcgattgcggatcttatcgacgccagctcggaacaggcggcccgttcggcgctaaactcgctgcaaggcgcattctccgcacgggtcaaccatctggtggaagccctcacccacttgcgcatttacgtcgaagcggcaattgatttccctgatgaagagatcgatttcctctccgacggcaaaattgaagcccagctcaatgacgtaattgccgatcttgatgcagtgcgtgctgaagcacgtcagggtagtttgttgcgcgaagggatgaaagtagtgattgctggacgtcctaacgccggtaaatcgagcctgttaaacgcgctggcgggccgtgaagcggcaatcgtaaccgatatcgccggaaccacgcgtgacgtgctgcgtgagcatatccacattgacggaatgccgctgcatatcatcgataccgccggactacgtgaagccagtgacgaagtagaacgtattggtatcgagcgcgcgtggcaggaaattgaacaggccgaccgcgtgctgtttatggtcgatggcaccacgacagacgccgttgatccggcagagatctggccggaatttatcgcccgtctgcccgcgaaactgccgatcaccgtggtgcgcaataaagccgatatcaccggcgaaacgctgggaatgagtgaagtgaacggtcatgcgttgattcgtctctcggcaaggactggcgaaggcgtggacgtgctgcgtaaccatctcaaacagagcatgggctttgacaccaacatggaaggcggcttcctggcgcgtcgtcgtcacctacaggcgctggaacaagcggcggagcatctgcaacagggcaaagcacaactgttgggtgcatgggcaggtgaattgctggcggaagagctgcgcctggcgcagcagaacttaagcgagatcaccggggagtttacctctgacgacctgctggggcggattttctccagcttctgtattggtaagtaa

SEQ ID NO: 263822 - DNA, 639 bp, Klebsiella pneumoniae
atgtttaaaaatgaaataaataaagaagatatattgaaactgatggcagcaagagaatgggcgggggagtcagacaaatggacgaaggcatcaggcttatattctgcgatagtgaaagggtatacggagattgttgccgcctggatggagacagctgatgtgatagccagccattatgaaaatgataaagatgtggtgagagaactactgtcgctgagcagaaataatgccgtctgctctttgcatattgcaagctttaagaaaatgagtaaacaggtcattgacgtatatctgaatgcggcgattcgcctggcgttgcaacacgggttcactttcgatgaaattgtggagcagtttacccgtgactttgatggcaagccattctctcatgtggtaaataacggggatgatatacatatgggactctggctgaaaatattcaaaattgtggttggtgaaaatgaaaattaccttaaagatgtgatgatgcagctggaagaaaagaataatgaaggtaaatctgtaataagtcaggcaaatggcaatcctgtacttaaagaactattctggaaagcagtagacgaatttaactttccgcaagaggagcttaataggttaaagcaatatcgttctctgtaa

SEQ ID NO: 263823 - DNA, 261 bp, Klebsiella pneumoniae; identical to SEQ ID NO: 6099

SEQ ID NO: 263824 - DNA, 252 bp, Klebsiella pneumoniae
atggagagttatattaagtctatcaaatacttctgttttgtattggcagtaggctataccaagatcagttttcctcgggaaatggtgatgaatactggcttttctgataccaatttctttttccagatctgcgtaactgaaccccaaaaatccgcgttgctggatcagagtatccgttatgcgaagtatattctcataagtagacacggctttacctgttatgtattaaagggactattatacatattttag

SEQ ID NO: 263825 - DNA, 282 bp, Klebsiella pneumoniae
atgtgcggtatttatgccatgctatccgacagccatcagttttctcctgaattacaggaggctgtaagtcaactggcacatcaggagatacagatgattaaagatattatcacctccgggcagaatagtggagagttcaaaacagttcttcttccggatgagctcgccgttatagtctgttctacactaaagggggcactgatgttaaatcgacttccaccacatgatacctattcaggaaccgttaacgctttaattaaaatgcttgatacccgtacttaa

SEQ ID NO: 263826 - DNA, 429 bp, Klebsiella pneumoniae; identical to SEQ ID NO: 7597

SEQ ID NO: 263827 - DNA, 543 bp, Klebsiella pneumoniae
atggcgaaatcagcactgttcacggtgcgtaataatgagtcctgcccaaagtgcggggctgaactggttattcgatccgggaaacacggtccgtttcttggatgctcacagtatccggcgtgtgactacgtccgtcctctgaaatcttcagcggatggacatatcgtcaaagttctggaggggcaggtttgccctgcatgtggcgcaaatctggtattacgccagggacgctttggtatgtttattggttgcagtaactaccctgaatgcgaacataccgaacttatcgataaaccggacgaaacagcaattacatgcccccaatgccggacgggccatctggtccagcgccgctcccgttatggcaaaacgtttcactcctgtgatcgctacccggagtgtcaatttgccattaacttcaaacccatagctggagaatgccctgagtgtcattatccgctactcatcgaaaagaaaaccgcgcagggtgtaaaacacttttgtgccagtaaacaatgtggaaagccggtttcggcggaataa

SEQ ID NO: 263828 - DNA, 573 bp, Klebsiella pneumoniae
gtgaataataacctgcaaggagacgctatcgcagctgcgatagatgtcctcaatgaagaacgtgtcatcgcctatccaacggaagccgttttcggtgtcgggtgcgatcctgatagcgaaacagcagtgatgcgactgttggagttaaaacagcgtccggttgataaggggctgattctaatcgccgcaaattacgagcagcttaaaccctatattgatgacaccatgctgactgacgcgcagcgtgaaactatattttctcgctggccaggtcctgtcacctttgtttttcccgcgcctgcgacaacaccgcgctggttgacgggccgctttgattcgcttgctgtacgagtcaccgaccatccgttggtggttgctttgtgccaggcttatggtaaaccgctggtttctaccagtgccaacttgagtggattgccaccttgtcgaacagtagacgaagttcgcgcacaatttggcgcggcgttcccggttgtgcctggtgcaacgggggggcgtttaaatccttcagaaatccgcgatgccctgacgggtgaactgtttcgacaggggtaa

SEQ ID NO: 263829 - DNA, 819 bp, Klebsiella pneumoniae
atggaaacctatgctgtttttggtaatccgatagcccacagcaaatcgccattcattcatcagcaatttgctcagcaactgaatattgaacatccctatgggcgcgtgttggcacccatcaatgatttcatcaacacactgaacgctttctttcgtgctggtagtaaaggtgcgaatgtgacggtaccttttaaagaagaggcttttgccagagcggatgagcttactgaacgggcagcgttggctggtgctgttaataccctcaagcggttagaagatggacgcctgctgggtgacaataccgatggtataggtttgttaagcgatctggaacgtctgtcttttatccgtcctggtttacgtattctgctcattggcgctggtggagcatctcgcggcgtactactgccactcctttccctggactgtgcggtgacaatcactaatcggacggtatctcgcgcagaagagttgactaaattgtttgcgcacactggcagtattcaggcgttgggtatggacgaactggaaggtcatgagtttgatctcattattaatgcaacatccagtggcatcagtggtgatattccggcgatcccgtcatcgctcattcatccaggcatttattgctatgacatgttctatcagaaaggaaaaactccttttctggcatggtgtgagcagcgaggctcaaagcgtaatgctgatggtttaggaatgctggtggcacaggcggctcatgccttccttctttggcatggcgttctgcctgatgtagaaccggtcatcaaactattgcaacaggagttgtcagcgtga

SEQ ID NO: 263830 - DNA, 258 bp, Klebsiella pneumoniae
gtgaatcaggccatccagtttccggatagggaagagtgggacgagaataaaagatgtgtatgttttcccgctctcgtgaatggtatgcaactgacatgtgcgatctctggcgagagtctggcgtatcgctttactggagatacgccagaacagtggttagcgagttttcgtcagcatcgctgggacctggaagaagaagcggaaaacttaattcaggaacaaagtgaagatgatcaaggttgggtctggttaccttga

SEQ ID NO: 263831 - DNA, 555 bp, Klebsiella pneumoniae
atgtctgatgttttacgcccataccgcgatctttttccacaaatcggtcagcgcgtaatgatcgacgatagcagcgtcgtgattggtgacgttcgtctggctgatgatgtggggatctggccgctcgttgtgattcgtggagatgtacattatgtacagatcggagcacgcaccaatatccaggatggcagtatgttgcatgtcactcataaatcctcgtacaacccagatggcaacccattaaccattggcgaagatgtcactgttggtcacaaggtgatgctccacggctgcaccattggcaatcgagttttggttgggatgggctcaattttacttgatggcgcaatagtagaagatgatgtgatgattggtgcgggtagcctggtcccacaaaataaacggctggagagcggatatctgtatctcggtagccccgtcaaacagatccgcccgttaagtgatgaagagaaggctgggttacgctattccgcaaataactacgtgaaatggaaggacgaatatctggatcaaggtaaccagacccaaccttga

SEQ ID NO: 263832 - DNA, 1818 bp, Klebsiella pneumoniae
atgatgttaaatgcatggcacctgccggtgcccccatttgttaaacaaagcaaagatcaactgctcattacgctgtggctgacgggcgaagacccaccgcagcgcattatgctgcgtacagaacacgacaacgaagaaacgtcagtagcgatgcataagcagcgcagtcagccgcagcctggcgttaccgcatggcgggcggcgatcgatctctccagcgggcaaccccggcggcgttatagtttcaaattgctgtggcacgatcgccagcgttggtttacaccgcagggcttcagccgaatgccgccagcacgactggagcagtttgccgtcgatgtcccggatatcggcccacaatgggctgcggatcagattttttatcagatcttccctgatcgtttcgcccgtagtcttcctcgtgaagctgaacaggatcatgtttattaccatcacgcagccggacaagagatcatattgcgtgactgggatgaaccggtcacggcgcaggcgggcggatcaacgttctatggcggcgatctggacggtatcagcgaaaaactgccgtatctgaaaaagctcggcgtgacggcgctgtatctcaatccggtgtttaaagctcccagcgtacataaatacgataccgaggattatcgccatgtcgatccgcagtttggcggtgatggggcgttgttgcgtttgcgacacaatacgcagcagctgggaatgcggctggtgctggacggcgtgtttaaccacagtggcgattcccatgcctggtttgacagacacaatcgcgggacgggtggtgcttgtcacaaccccgaatcgccctggcgcgactggtactcgtttagtgacgatggcacggcgctcgactggctgggctatgccagcttgccgaagctggattatcagtcggaaagtctggtgaatgaaatttatcgcggggaagacagtattgtccgccactggctgaaagcgccgtggaatatggacggctggcggctggatgtggtgcatatgctgggggaagcgggtggggcgcgcaataatttgcagcacgtagccgggatcaccgaagcggcgaaagaaacccagccggaagcgtatatagttggagagcattttggcgatgcacggcaatggttacaggccgatgtggaagatgccgccatgaactatcgcggcttcacattcccgttgtggggatttcttgccaataccgacatctcttatgatccgcagcaaattgacgcccaaacctgtatggcctggatggataattaccgcgccggactttctcatcaacagcaactgcgtatgtttaatcagctcgatagccacgatactgcgcgatttaaaacgctgctcggtcgggatattgcgcgcctgccgctggcggtggtctggttgttcacctggcctggtgtaccgtgcatttattacggtgatgaagtgggactggatggtaaaaacgatccgttttgccgtaagccgttcccctggcaggtggaaaagcaggatacggcgttattcgcgttgtaccagcgaatgattgcgctgcgtaagaaaagtcaggcgctgcgtcgtggcggctgtcaggtgctgtatgcggaagataacgtggtggtatttgtccgcgtgctgaatcagcagcgtatactggtggcaatcaaccgtggcgaggcctgtgaagtggtgctacccgcgtcaccgtttcttaatgtcgtgcaatggcaacgcaaagaaggccatgggcaactgacagacgggattctggctttgcctgccatttcggctacggtgtggatgaactaa

SEQ ID NO: 263833 - DNA, 1374 bp, Klebsiella pneumoniae
atggaaagtaagaacaagctaaagcgtgggctaagtacccgccacatacgctttatggcactgggttcagcaattggcaccgggttgttttacggttcggcagacgccatcaaaatggccggtccgagcgtgttgttggcctatattatcggtggtgtcgcggcgtatatcattatgcgcgcgctgggggaaatgtcggtacataacccggccgccagctctttctcgcgttatgcgcaggaaaacctcggcccgctggctggttacattactggctggacctactgctttgaaatccttattgtcgccatcgccgatgtgaccgcttttggtatctatatgggtgtctggttcccgacggtgccgcactggatttgggtactgagcgtggtgctgatcatttgcgccgtaaacctgatgagcgtgaaggtattcggtgagctggagttctggttctcgttctttaaagtcgccaccatcatcatcatgattgtcgccggtttcggcatcatcatctgggggattggcaacggcgggcaaccgaccggtattcataacctgtggagcaacggcggcttcttcagtaacggctggcttggtatggtgatgtcgttgcaaatggtgatgtttgcttacggtgggatcgaaattatcgggattaccgccggtgaagcgaaagatcctgagaaatctattccgcgcgcgattaactccgtgccgatgcgtattctggtgttctacgtcggtacgctgttcgtcattatgtctatctacccgtggaatcaggttggcactgccggtagcccgttcgtactgacgttccagcatatggggattacctttgccgccagcatccttaactttgttgtgctgaccgcttcgctttcggcaattaacagtgacgtatttggcgtaggccgtatgctccatggtatggcagagcagggcagcgcgccaaaaattttcagcaaaacgtcgcgtcgtggtattccgtgggtcacggtgctggtgatgactaccgcgctattgtttgcggtatatctgaactacatcatgccggaaaacgtcttcctggtgatcgcttcgctggcgaccttcgccacggtgtgggtgtggattatgatcctgctgtcgcaaatcgccttccgtcgccgtttaccgccagaagaagttaaggcgctgaaatttaaagtaccgggtggggtagcaacgaccatcggcggtttgattttcctgctctttattatcgggttgattggttatcaccctgatacgcgtatctcgctgtatgtcggtttcgcgtggattgttgtgctgttgattggctggatgtttaagcgccgccatgatcgtcagctggctgaaaaccactaa

SEQ ID NO: 263834 - DNA, 888 bp, Klebsiella pneumoniae; identical to SEQ ID NO: 9928

SEQ ID NO: 263835 - DNA, 1059 bp, Klebsiella pneumoniae; identical to SEQ ID NO: 9929

SEQ ID NO: 263836 - DNA, 1155 bp, Klebsiella pneumoniae
atgtccactgtaagtctcaaacaattatacggaaaaacgcatgcatactggagcggcgtattcgccatgacgctttgcgtgtttgtgctgatcgcttctgagtttatgccagtcagcctgcttacgctcattgcccatgatttgcacgttaccgaagggctggcagggcaaggaattgctgtctctggtgcgctggcggtgcttaccagtctgactatctcccgtattaccggagacctgaatcgaaaatatcttctgctggggctgacggccttaatggccatatcgggaatagttatcaccatagcacctgactatccggtttatatgctggggagggccctgattggtatcgtcattggagggttctggtcaatgtcggctgcaaccgccattcggctcgtgccgaagcagcatgtcccccgcgcactggcaatttttaacggcggaaacgcactggccaccgttgtggcagcgccacttggtagctatctggggacaaccatcggctggcgtggggcctttttatgtctggtcccccttgcgatagctgcgttcatctggcaatgggtcagtctgcctccgatggaaagtgataaaacacaaaagccacagagatctgtgcttcgcctgttcagcgttgccatcgtaccaacgggactgctggcctgcggactcttctttatgggacagtttgctttatttacctacgtgcgcccctttctggagagcgtcaccagagtgggaccttctgatctttctctgattttgctcgcaataggtgtagcaggttttgtcggcacaatgatcgtctcaacattcctgaacaccatattttataagaccttaataatgatcccgttgcttatggcagcgattaccggtgcgttactgctggtcggacaccatatctgggctgttgccgttttactcagcctgtgggggctacttgcgacagctgcgccaacggggtggtggacatggatagcacgcgcgttacccgaagatgcagagacggggggaggcctcatggttgcagtgattcagttatctattgcacttggttcaacggctggaggtctggtattcgacagtctgggatggagaagtgcttttggtttaagtggtttgttacttctggcgtacgctctttaa

SEQ ID NO: 263837 - DNA, 678 bp, Klebsiella pneumoniae
atgaataccagaactctttttcccctgcttttcactgttgcatccttctccgcctccgccggtaactgggctgtcaaaaacggctggtgccagaccatgacggaagatggtcaggcgctggtaatgctgaaaaatggcacgattggtattaccggcctgatgcagggatgcccgaatggcgtacagacgctcctgggcagccgtatcagtattaacggtaacctgatccccacatcacaaatgtgtaatcagcagacgggattcagggctgttgaggtggaagccgaacaggcgtcggaaatggtcaaaaaagccgttcactccatagcagagcgtgatgtgtccgttttacaggcatttggtgtacgaatggaattcacccgcggtgatatgctgaaggtctgtccgaaatttgtcacatcacttgccgttttttccccgaaacagacgaccactattaataaagactccgtactgcaggctgcccgacaggcatacgcccggaaatacgacgaggaaacaacagaaaccgctgattttggctcttacgaagtaaaaggcaataaggttgagtttgaagtattcaatcctgaagaccgtgcgtacgacaaagtgaccgtcacggttggtgctgacggtaatgccaccagtgccagcgttgaatttatcggaaaatag

SEQ ID NO: 263838 - DNA, 681 bp, Klebsiella pneumoniae
atgtctgatgatcgttcccggcatgatcgtctggcggttcgcttatcactcattatcagccgactgatggccggagaatctctgtcactaaagacactgtcagatgaatttggcgttacagaacgtactttacagcgcgattttcatcagcgtctggttcacctggatttagagtacagaaatggcaggtacagcctcagacgacagagcagcccgtgtgcgatccctgaaatgctttcttttatacagaataccgggatcgcacggatacttccgctccggaacggacgactgataacctgtcttaccgacaaccaggagccctctccctgccttatctggctgccggcgccggatatcactgcaacgttccccgagtgtttctcgcaactcatcctggcaataaaacagtgtatccacatctcgctgatgactgagcgatggtatacgtcactggagccctgccggctcatttattacagcggaagctggtatctgatcgcgttacagaagggaaaactgcaggtctttcccctggcagatatcaaatcagtcagcctgacatcagaacggtttgaacggagaggccacatccacaatctggtcgctgaagagcgttttatctccgccctgccacatttctctttcatccataaacttatcaacacctttaacctgtga

SEQ ID NO: 263839 - DNA, 135 bp, Klebsiella pneumoniae; identical to SEQ ID NO: 9866

SEQ ID NO: 263840 - DNA, 885 bp, Klebsiella pneumoniae; identical to SEQ ID NO: 9865

SEQ ID NO: 263841 - DNA, 1029 bp, Klebsiella pneumoniae
atgaaccactccttaaaaccctggaacacatttggcattgatcataatgctcagcacattgtatgtgccgaagacgaacaacaactactcaatgcctggcagcatgcaaccgcagaagggcaacccgttcttattctgggtgaaggaagtaatgtactttttctgaaagactatcgcggcacggtgatcatcaaccggatcaaaggtatcgaaattcatgatgaacttgatgcgtggtatttacatgtaggagccggagaaaactggcatcgcctggtaaaatacactttgcaggaaggtatgccaggtctggaaaatctggcgttaattcctggttgtgtcggctcatcacctatccagaatattggtgcttatggcgtagaattacagcgagtttgcgcttatgttgattgtgttgaactggcgacaggcaagcaagtgcgcttaactgccaaagagtgccgttttggctatcgcgacagtatttttaaacatgaataccaggaccgcttcgccattgtagccgtaggtctgcgtctgccaaaagagtggcaacctgtactaacgtatggtgacttaactcgtctggatcctacaacagtaacgccacagcaagtatttgatgcggtgtgtcatatgcgcaccaccaaacttcctgacccaaaagtgaatggcaatgccggtagtttcttcaaaaaccctgttgtatctgccgaaacggctaaagcattactgtcacaatttccaacagcaccaaattacccccaggcggatggttcagtaaaactggcagcaggttggcttatcgatcagtgccagctaaaagggatgcaaatgggtggggctgcggtgcaccgtcaacaggcgttagttctcattaatgaagacaatgcaaaaagcgaagatgtggtgcaactggcacaccatgtaagacaaaaagtgggtgaaaaatttaatgtctggcttgagcctgaagtccgctttattggtgcatcaggtgaagtgagcgcagtggagacaatttcatga

SEQ ID NO: 263842 - DNA, 963 bp, Klebsiella pneumoniae
atgaaggataacaccgtgccactgaaattgatcgccctattagcgaacggtgaatttcactctggcgagcagttgggtgaaacgctgggaatgagccgggcggctattaataaacacattcagacactgcgtgactggggcgttgatgtatttactgttccgggtaaaggatacagcttgcccgagccaatccagttacttaatgctgaacagatattgagtcagctggatgacggcagtgtagccgtgctgccagttattgactccacgaatcagtatctcctggaccgcatcggagagcttaaatctggcgatgcctgtgttgcagaataccagcaggctggccgtggtcgccgggggcggaaatggttttcgccttttggcgcaaacttatatttgtcgatgttctggcgtctggagcaaggcccggcggcggcgattggtttaagtctggttatcggtatcgtgatggcggaagtattacgcaagctgggtgcagataaagttcgtgttaaatggcctaatgacctctatctgcaggatcgcaagctggcaggcattcttgtggagctgactggcaaaaccggcgatgcggcgcaaatagtcattggtgcagggatcaacatggcaatgcgtcgtgttgaagagagtgtcgttaatcaagggtggatcacgctgcaggaagccgggatcaatctcgatcgtaatacgttggcggccatgctcatacgtgaattacgcgcggcgctggaactcttcgagcaagaaggattggcaccttatctttcgcgctgggaaaagctggataattttattaatcgcccagtgaaacttatcattggtgataaagaaatatttggcatttcacgcggaatagacaaacagggcgctttattgcttgagcaggatggaataataaaaccctggatgggcggtgaaatatccctgcgtagtgcggaataa

SEQ ID NO: 263843 - DNA, 615 bp, Klebsiella pneumoniae
gtgctcttcgtagcggttgccgcagatcgccccggccagcatcacatcctgacgaatgcccagcggcgcattggtgtccggcacaaagcgcaggccgctctcaaagatgcgcacccggctctgctgacggttctggttgtagaccacggtgcccagcaggccggtccacagcgacaggcgcatcgccgacatttcgctggagatcgggcttggcaggataagcgcctcttccccggcgtggatcagctgctggactttcgggtcgacgaagctgtaggtgatcacttcctgatagcctttgtcgttcagcagcgttttcacgcgcttcagcgacaggtccgcttcgcggtgggttcccatgatcagacccgcctgcaccggctcgtcaggaatgttgttgtagccgtaaacgcgagccacttcttcaaccagatcttcttcgatctccatgtcgaaacgccagctcggcgcaaccgcctgccattcgccctcgccaaccgtcacttcgcagccgaggcgctgcagaatgtcggtgacctgcgcgtcgtcgatatggtggccaatcaggcgatccagcttgctgcgacgcagcgtaatggtggcgcgtgttggtag

SEQ ID NO: 263844 - DNA, 798 bp, Klebsiella pneumoniae
gtgcaggccatgacggcgcgcgcggccggtaatggacagcgggctgaagaacgcgcattccagcagcacgttctgggtttcgtcgttaacgccggagtgttccccgccgaagatcccccccatcgccagcgctttgttatggtctgcaatgaccagcgtgtcgctgtcgagctttgcttcagagccatcgagcaggaccagggtttccccttctttcgccatgcgcaccacgatcccgccttcaatacggtcgcggtcaaaggcgtgcatcggctggcccagctcaagcagcacatagttggtcacgtcaaccaccgcgtcgatggagcggatcccgcagcggcgcagcttctctttcatccacagcggcgtcggcgctttgacgttgatacctttcaccacgcgccccagatagcgcgggcaagcctgcggcgcgtcaacctgaatcggcagcacgtcgtcaatcgtcgcggcaaccggcgtgatttccggcgcgttcagcggcgctttgttcaggacagcgacatcgcgcgccacgccaatgatgcccaggcagtcggcgcggtttggcgtgacgctgatttcgatgatgttatcgtcaagcttgaggtattcgcgaatatcggtgccgatgggcgcatctgccggcagctcgatgataccgctatggtcgtcggaaatacccagctcggagaaggagcacagcatcccctcagacggctcgccgcgcagcttcgcggccttgattttgaaatcgcccggcagcacggcgccgatggtggctaccgcgacctttag

SEQ ID NO: 263845 - DNA, 984 bp, Klebsiella pneumoniae
atgtcacatctcgcagagctggttgccagtgccaaggcagccattaacgaggcatcagatgttgctgcgctggacaacgtccgcgtggaatacctgggtaaaaaagggcatctgaccctgcaaatgaccaccctgcgtgagctgccgccggaagagcgtccggcagccggtgcggtcatcaacgaggcgaaagagcaggtgcagcaggcgctgaacgcgcgtaaagctgaactggaaggcgcagcgctgaatgcgcgtctggccgcagagaccattgacgtctcgctgccgggtcgccgcattgaaaacggcggcctgcatccggttactcgcaccatcgaccgtattgaaagtttcttcggtgagctcggctttaccgtggcgacgggcccggaaatcgaagacgattaccacaacttcgatgcgctgaatattccgggtcaccatccggcgcgcgctgaccacgacactttctggttcgatgccactcgcctgctgcgtacgcagacctccggcgtgcagatccgcaccatggaaaaccagcagccgcctatccgtattatcgcgccgggccgcgtctatcgtaacgactacgatcagacccacaccccgatgttccatcagatggaaggtctgatcgttgataaaaatatcagcttcaccaacctgaaagggacgctgcacgacttcctgaacaacttctttgaagaagatctgcaggtccgcttccgtccgtcctacttcccgttcaccgaaccgtctgcggaagttgacgtaatgggtaaaaacggcaaatggctggaagtgctgggctgcgggatggtgcacccgaacgtgctgcgtaacgtgggtatcgatccggaagtctactccggcttcgccttcggcatgggcatggagcgtctgaccatgctgcgctatggcgtcaccgatctgcgcgcgttcttcgaaaacgatctgcgtttcctcaaacagtttaaataa

SEQ ID NO: 263846 - DNA, 162 bp, Klebsiella pneumoniae
atgcagtgccggattcgcttctgcacggaactcaacctcattcagtttaccggtcaggtcgagaacggattccagatcgcctttcaaatcatagaaatcaacggtctcttttgccaggttccagtgctcttcgtaacggttaccgcaaatcacaccggctaa

SEQ ID NO: 263847 - DNA, 354 bp, Klebsiella pneumoniae
atggatcatctgctgcactttcggatcaacgaagctgtaggtgatcacttcctgatagcctttgtcgttgagcagcgttttcacgcgcttgagcgacagatctgcttcgcggtgagtacccataatcaggcttgcctgcaccggctcatcagggatgttgttgtagccgtaaacacgcgcgacttcttcgaccagatcttcttcaatctccatgtcgaaacgccagctcggcgcaactgcctgccattcgtctttgccttcggtcacttcgcagccgagacgacgcagaatatcagttacctgctcatcggcaatatgatggccgatcaggcgatccagtttgctgcgacgtaa

SEQ ID NO: 263848 - DNA, 552 bp, Klebsiella pneumoniae
atgcaggccatgacgacgagcacgaccggtgatagacagcgggctgaagaaagcgcattccagcaggacgttttgcgtttcgtcattcacgccagagtgttcgccaccaaagatgccgcccatcgccagcgccttgttgtggtcggcgatgacaagggtgtcagcattcagcttcgcttcagtgccatcaagcagcaccagcgtttcgccctctttcgccatccgcaccacaatgccgccttcaatgcgatctttatcgaaagcgtgcatcggctggcccagttcaagcagtacatagttggtgacgtcaacgactgcatcgatagatcggatcccgcaacgacgcagtttttctttcatccacagcggagttggcgctttaacgttaatgccttttaccacacggccaagatagcgcgggcaggcttccggcgcttcgactgtaatcggcagcgtgtcgtcgatggtcgcaccaaccggaacgatttccggttcaaccagcggcagctggttcagcacggcaacatcacgcgccacgccgataatgcctaa

SEQ ID NO: 263849 - DNA, 372 bp, Klebsiella pneumoniae
gtgatcgtcagaaattcccagctcagaaaaggagcacagcatcccttcagacggttcgccacgcagtttcgccgctttaattttgaaatcgcccggcagaacagcaccaatggtcgctaccgccacacgcaggccctgacggcagtttggcgcaccgcagacgatgtccagcaggcgatcgccgccgacattcacttttgtcacacgcagtttgtcagcgttcggatgctgcgcacactcaaccacttcaccaacgaccacgccgtggaagctaccggcaaccggttctacaccgtcaacttccaggcccgccatagtgatttgatttgccagcgcatcgctatcaatcgccgggttcacccattcgcgtaa

SEQ ID NO: 263850 - DNA, 261 bp, Klebsiella pneumoniae; identical to SEQ ID NO: 8723

SEQ ID NO: 263851 - DNA, 309 bp, Klebsiella pneumoniae
atgagtaaagtaaatatttccagttctgggacccgcatcctacgtgtactcaaagctctacgcggtcatgctctgaacggtgtttctaacggtgaactggcatcagccctgggggagtccccagcgaatatcaatcgagcacttaatacccttattgaagagggactggccatgaaattagagaacggacgtttcgcaccgggaatccagttactacagatcgccatggctcacagtcacgagatggcgcgtgcacaggatcgtattaacgaaatcaaccaacgagttatttcaggtagtcgtttgtaa

SEQ ID NO: 263852 - DNA, 189 bp, Klebsiella pneumoniae; identical to SEQ ID NO: 5822

SEQ ID NO: 263853 - DNA, 462 bp, Klebsiella pneumoniae; identical to SEQ ID NO: 5821

SEQ ID NO: 263854 - DNA, 987 bp, Klebsiella pneumoniae
atgagtaaagagaagcaaacagttaacggggatgtgggtaacgttgtcagcggtgatgttaccattcataactattctgctgacatacttccttcggcccagcaaccaatttcgttgctgcaaaaacgcgatttacacagattgatggatgaattggttgatctgggggaaagtaagcgcgagctatggatgacgatccacacgaaacttaataccaaaacagttaatgaaatgactgcggctgattatcatggtgcggttgagatccttcagagatatgcacaacagatccagaatatgaaggactgtaatcttctggtcagcaaaataatggcgcttactgaccctgggtatcgtcttgaccgtgacagatactgtctgaagcatttcggtacaacccatcttaaaggcctagacaaagagcagttgcaggctgtgtttggttattttgatgatctgctgaatattcgtgatgagagtaaaactctatcacctccatcggaaagcggtgcaaaatcagtcgcaactgtaccaaccagaagccggaagcctcatgtagtagtgttggggggagtgttagttcttgtagcaatatttttcgtgggaatgattgtgttcgctggtaaatggggaaatgccaaagcagtagcttctactgaaaccagcgtttttaacattaaaaccaacaataaaataatagaagattccatccccgcactgcgcagcatgtttccagggttaaataagtactcagatgatttccattcggtttcaagctacaagcaaaaaacgggctggcatacccttaaatttactgtatcagcaaaggcatccgtccccgaaaattatagtgttaagggcaaggtttgttacattaacataagccctgatggtagttatgctcgggttttgactgctccatgtcgttcactgctacttgatcagcaaagcactcctgacagtaaataccgttttattcttaaatag

SEQ ID NO: 263855 - DNA, 582 bp, Klebsiella pneumoniae
atggcagggattcaggttatcgcaggaagttttcctaaagggtgggcaagcatggggttcggtaccatcgtgtttgccaaaaaaccaaaacaaggctttcctgaaaatattgtattaaatctgaaagaagagcttttatcgattgaacttgcggatagtgaagaggaaagccgtataggtaaggcggcaggcgcaggtttgcttggtggattaatctttggtggtgcagggttggtcattggaggtttgcttggtgcggcggacaagacgaaaaaaactatcacttttaaggcaatgtttacgggaaataggttacttctggctaaaacagattcaaaaacttttgtaaaacttcagtcaattgctgctgataatgcccataacgcatctgtaatcaacatgaagcaaactaataggggcgatgtttcttctcgtaaacaactaacagaaaatccacagcagcaagacttacctgcgcccgctacaacagtaaaaatgactgccaaagataagttagaatcggctcttgggctgggaatcatcgttatagctgtttgggcaataatacacttctttttttag

SEQ ID NO: 263856 - DNA, 672 bp, Klebsiella pneumoniae
atgcagtacccgattaacgagatgttccagaccctgcaaggtgagggttactttaccggcgtccccgccatttttattcgtttacagggatgcccggttggctgtgcctggtgcgacaccaaacacacctgggaaaagcttgaggatcgggaagtctcccttttcagcattctggcgaagaccaaagagagtgataagtggggggcggcgagcagtgaagacttgctggctgtcattggtcgccagggatacaccgcgcggcatgtggtgattacgggtggtgagccttgcattcatgatttgctgccactgactgacctgctcgaaaagaacggttttagctgccagatagaaaccagcggtactcatgaagtgcgttgtacgccgaatacctgggtcaccgtgtcgccaaagctaaatatgcgtggtggttatgaagtattgtcgcaagccctggagcgagctaacgaaatcaaacacccagttggacgcgtacgtgatatcgaagcactggatgaattgcttgcgacgctgaccgatgataaaccgcgagtcattgcactgcagccgattagccaaaaggatgatgccacacgtttgtgcattgaaacctgcattgcgcgtaattggcgtttgtcgatgcaaacacataaatatttaaatattgcctga

SEQ ID NO: 263857 - DNA, 2244 bp, Klebsiella pneumoniae
gtggagatcagtgtcaccagccagacggcgggcaccagtacagtcaccgccagcatcaacaacagcagccagagccagaacgtcacctttgtacctggtgatgcatcgcaactcacttcaatcgttgaaacaaataagtcgaactatacggttggagagacaatcaccatcacggtaacgctccgggatgcgttcgataatctggtaaccggtgcagcttcacagttagccgctgatggtgtgctgacggtggctggcactgacccgtcagaaatgggaagctgggttgaatcaggtggcgtgtataccacaacccgaatggcgacgattgccagtaccaatcagcacgccaacctgcaattgcagacgtggagtgatggcgtaacgtcagatcgctatgacatccagtccggttctccggcgcaagccacatcaactatcgctacggataaaaacgcctacaccgctggcgacactataaccgtcgccgtgacgctgaaagacgcgcacggtaacctggttgaagggggcgagtccttactgtctggtgataacgtaatagtggaaggagccgtacgttcaggaggatggtctgaaaacgccggtgtttatactgctacatggtcggcgcaaatggcgggagactctcaccacgcgacgctgaagttgtctgaatggggcagcagtaaacaatcagagagttattccatccacagcggtgctccggtgcaggcaaattctgctatcaggacagataaatcggcatatatcgccggggagccattaaccgtcacaataacgttgcgggatgagtttggtaaccctgctttagggctgacatcagaagtcatcgagtcttatattgatagtttcgcggtaggcggcgcaactcccgattctatgcggtgggtcgagcagaataatggtgaatataccattgtctggacagcatgggttgccgacgaaaatctggttgccagtctgaaattaaaaacatgggcaacggagattaagtcctcgctatacgggatacaaccaggtgcagcggcaaaaactcaatcaacgattgtcgcggacaaaacgatatatatcgctggggatagcataacggtgaccgttgttcttaaagatgcccagggtaactttattactgatggtgttgttcagcttaatgaggaaaacgtacaagtcaggaatgcggatcctatccagggcaataattgggtttacaacggcaatgggcaatatcaaagacagtatatggcgcattttgcggaagcgaatttgaatgcgcaactgaagatggctggttggagcgatgccaattattcaaacaattacactattaaaccaggtgaagtgagtccgcttggttcacagcttcgtatacgagaagttttagtagtggaaggggcggatttacctgtcagtgctttattagttgatgattttggaaatccggtggataacggtctggatttgctggatgatgcagtgtacttacaaaatgtagaaaaaaaagaaggggaaaaatggagatatgtgggtgatggaatatatgaacgtacatatatggcctaccaagaaggagaaaatttaacttcatttatggagattaaaggttggcgtatatacggacaaccatcctataccatccttccttttgtggaagtcgagttactgagtgttaatggtgtaaaattcagggcgacagatggttttccagaaacagggtttgatggtgcaaaattcacgctgttactaacccataatatgaaaaatacggattataattggacggctgggatttatggaattaatgttgacagtaatggagaagtaacattatctgtgctgataagaagtgaagttactattactgggaaacccaagaatggtaaagggaatgatgttgtatttaaattcaagattaaaaaatggtttactagtttaggtgctaccagtagtaatacctgggatatcataaatacttcatgtagttatggtcaaatgccgtcatctttagaattagcgcagcggccaagcggtggggtagtaccgcgaaaagtaggtacgttgtggggcgaatatggtaatttaaaaacttatgggaacgcttttagcggtacggattattggacaagcactcagctcatgggagtacacgagaaatttaatcctgaaactggtatatcagagcttgggacaggaaagtcttctggcttgtgcgtagagtattattaa

SEQ ID NO: 263858 - DNA, 930 bp, Klebsiella pneumoniae
  misc_feature (251)..(260): n is a, c, g, or t
atgtatatgaatggcagaatggaaatgtatcgttatacaccagagagtttgaaacgagcattagtaatatttagagattgtgtgagtacgcaaccgcaaaataccttgccctactgttgcctggcggaatgccatatatcattagccctccttggactcagtgaacaaaaacaagcaataactacggcagtaacctccattgaaaaggctcttgaaattaacccttcaaattctcaggcattgggtttacnnnnnnnnnngggtttaatcagtgggctaaaagatgaacattcagtgtctaatgtgctatttaagcaagcacatttactcaaacctaattcgccagacgtttattattatcagtctctgctatgttttttgaacggtgaccttgcaagagcatttaatctaatagaaaaaagtattgctcttgaacccaataaaatgggtataagcattcttaaattaattatactttattacacatcccccctcgataacgcgatatcttttgcattaaatcttaacagtcaaaacacctgtaataatccaattattacctctattctggctatgttcatggcactgaaaggacataatgacaaagccaaaagtttattgcttaaacttgagcctgaacatggtcttgattacacctgtgttaactcgctttatacgaaatttctgatctatggcgcatctataaaaaatgacattatgaagttactggcaaatattaacaccaacaaaatcaatggtgtgattttgccgttgatttacactgtgtatggtaaaaaagaatatgaaaagcgctggcaacaattaattaaagacaatgatttatggtcaaatgttttgcttcatgacccccgtttgctcagtgtaaaaaatgaatttaatactatcggtgtgatgcgtacttctgcgtaa

SEQ ID NO: 263859 - DNA, 1683 bp, Klebsiella pneumoniae
atgaagtctgcattaaagaaaagtgtcgtaagtacctcgatatctttgatactggcatctggtatggctgcatttgctgctcatgcggcagatgatgtaaagctgaaagcaaccaaaacaaacgtcgctttctcagactttacgccgactgaatacagtaccaaaggaaagccaaatattatcgtactgaccatggatgatcttggttatggacaacttccttttgataagggatcttttgacccaaaaacaatggaaaatcgtgaagttgtcgatacctacaaaatagggatagataaagccattgaagctgcacaaaaatcaacgccgacgctcctttcattaatggatgaaggcgtacgttttactaacggctatgtggcgcacggtgtttccggcccctcccgcgccgcaataatgaccggtcgagcgcccgcccgctttggtgtctattccaataccgatgctcaggatggtattccgctaacagaaactttcttgcctgaattattccagaatcatggttattacactgcagcagtaggtaaatggcacttgtcaaaaatcagtaatgtgccagtaccggaagataaacaaacgcgtgactatcatgacaacttcaccacctattctgcggaagaatggcaacctcaaaaccgtggctttgattactttatgggattccacgctgcaggaacggcatattacaactccccttcactgttcaaaaatcgtgaacgcgtccccgcaaaaggttatatcagcgatcagttaaccgatgaggcaattggcgttgttgatcgtgccaaaacacttgaccagccttttatgctttacctggcttataatgctccgcacctgccaaatgataatcctgcaccggagcaatatcagaagcaatttaataccggtagtcaaacggcagataactactacgcttccgtttattctgttgatcagggtgtaaaacgcattctcgaacaactgaagaaaaacggacagtatgacaatactattattctctttacctccgataatggtgcggttatcgatggtcctctgccgctgaacggggcgcaaaaaggctataagagtcagacctatcctggcggtactcacaccccaatgtttatgtggtggaaaggaaaacttcaacccggtaattatgacaagctgatttccgcaatggatttctacccgacagctcttgatgcagccgatatcagcattccaaaagaccttaagctggatggcgtttccttgctgccctggttgcaagataagaaacaaggcgagccacataaaaatctgacctggataacctcttattctcactggtttgatgaggaaaatattccattctgggataattaccacaaatttgtccgtcatcagtcagacgattacccgcataaccccaacaccgaggacttaagccaattctcttatacggtgagaaataacgattattcgctagtctatacagtagaaaacaatcagttaggtctatacaaactgacggatctacagcaaaaagataaccttgccgccgccaatccgcaggtcgttaaagagatgcaaggcgtggtaagagagtttatcgacagcagccaaccaccgcttagcgaggtaaatcaggagaagtttaacaatatcaagaaagcactaagcgaagcgaaataa

SEQ ID NO: 263860 - DNA, 1158 bp, Klebsiella pneumoniae
atgcacgttacagccaagccctccagttttcaatgtaatctcaaatgtgattactgtttttaccttgaaaaagagtcgcagtttactcatgaaaaatggatggatgacagcactctgaaagagttcatcaaacaatatatcgcagcgtctggcaatcaggtctattttacctggcaaggcggtgaacccactctggctggcctggattttttccgtaaagttattcactatcaacaacgctatgcaggccaaaaacgtatttttaatgcattacaaacgaatggcattttattgaataatgaatggtgtgcctttctcaaagaacatgagtttctggttggtatctcgatcgatggaccccaggagctacatgaccgttacagacgcagtaattctggtaacggtacttttgcaaaagtgatagcagccatcgagcgtctgaaatcatatcaagtagagtttaatacgttaaccgtcattaataacgttaatgtccattaccctcttgaggtttatcattttttaaaatctatcggcagtaaacatatgcaatttatcgaattgctcgaaaccgggacgccgaatattgatttcagtggtcatagtgagaacacattccgtatcattgatttttctgtgcctcctacggcttatggcaagtttatgtcgaccatttttatgcaatgggttaaaaacgatgtgggtgaaattttcatccgtcagtttgaaagttttgtcagccgttttttggggaatgggcataccagttgtattttccaggagtcctgcaaggataatctggttgttgaaagtaatggagacatttacgaatgcgaccattttgtctatccacagtacaaaattggaaacattaataaatctgaacttaaaacgatgaacagtgtacaactgacagcgcaaaaaaaacggatttcagcgaaatgtcagcaatgtgcatataaacctatctgcaatggcggttgccctaagcatcgtattactaaagtaaacaatgagactgtttcctatttttgcgaaggttataaaatccttttttcaaccatggtaccttatatgaacgccatggtggagttagccaagaacagagtaccgctttaccacattatggatgttgcaaaacaaatggagaataattaa

SEQ ID NO: 263861 - DNA, 207 bp, Klebsiella pneumoniae
atggttcatcaacattacggaacgcagaccgttaatcgaggtgcggtcatgccaggaatgctggtcaaacacaaagatggtacctggactgcatcagctaatttacgcggacggctttatctgcatcgcggcatcgagcgcacttatacccgtgatttgctcgtggaagtttttctcgacggacgcggtaacggcctgaatcgctaa

SEQ ID NO: 263862 - DNA, 231 bp, Klebsiella pneumoniae; identical to SEQ ID NO: 7374

SEQ ID NO: 263863 - DNA, 540 bp, Klebsiella pneumoniae
atgcaaccacttacataccaacagactagcggatttagcccgactgcggtgataaatcgttctcaaacaaaacaggtgccaggccacgaaaaaatccgtgatgccgtccgcgcttggtctgctgaagataatcaggatgtagttgccgcactcattgtgaatgagtatcgagcacagggcggcggcaccatcgattttcctgatgatgtcagtcgtgcacgccagaagctgttccgcttcctcgataacaaattcgattctgaaaaataccgaaataacgtgcgtgaactgaccccggcaattctggcggtactaccgctggaatatcgcggccacctggttgagcaggatagcttcatggctcggctggctgaaatggaaaaggaactcagtgaggcaaagcaggcggtcattctcaacgcaccacgccaccagaaactgaaggagatgagtgaaggcattgtgtcgatgtttcgagtggacccggatctggctggtccattgatggcgatggtcaccaccatgctgggggcaatatga

SEQ ID NO: 263864 - DNA, 243 bp, Klebsiella pneumoniae
atgctgattgccgccagggttctccttgtgtggatgttcagcgcctcccatttcctccggatcattttcctgaacttcaacctgattctcttcatcgaatgtttcctggtatgttgcgtcgcccatcaccgcgccacaatcagggcagttgtcgccaccgctctgaccacaggcggtgcagactttttccggttcctgttgcgctactggtttggattgtttcgtttctggctcgttttgtaa

SEQ ID NO: 263865 - DNA, 192 bp, Klebsiella pneumoniae; identical to SEQ ID NO: 9355

SEQ ID NO: 263866 - DNA, 189 bp, Klebsiella pneumoniae; identical to SEQ ID NO: 20596

SEQ ID NO: 263867 - DNA, 1386 bp, Klebsiella pneumoniae
atgggttttccctatctctcctttgaaaaaatccagatagccggatgcatcatcactcggctggccaacagcctccacaaatgccgatttgccaacggtgttcacactgcggatgtaaaaataataatcacggcccggtttgatattgatactggcggctatccagtacagcgccgtgccaagatagcgggctgtggtttcaacctgcctgatatcggtaatccgcgtttccgagaaccagaactcaaactgtaccgtcggatcataaacggcaagatggggcgtggcagttatctgaaaatagcccggcgtcagctcaatccgcgacggcgctgccggtgcggcaatccggaacgataccgacgccggatcgccctgctgcccccacgcatttaccgcccggactgtcagcctgtagttccctggcgccagttgcgtgaagcggtatgtggtttccgtcgtccgggccgtgctgaccagccgctcactgccgtcatccgctgccacggtcaggcgaagcataaagctcacgcccttcaccaccttcggcgtgtcccagcgcgccagtacctgatattccccgctgtctgcggtgacttcggcagtcaggtgctgcaccgctggcggcgtgacaccattcaccgtgccactctggtcgccgtcaaagtgcgccccgttatccacgatggcctctttttccggcacatgctgcacagcggtgatggcatacgtaccgtcatcgttctcccggatactcacacagcggaacaggcgctggcgcagcatcggcagcttcagcccccatacgctgtattcggcaacgccgtcaggaacccggctcacttttaccttcacgccgtcggtgacggactggacctccacgctcaccggattaccctgcccgtcaaccaggcttatcagcgtggtaccggaggatggcagcgtgatttcacggtcgagcgtcagcgtccgggtctggctgttcaccgccagcacacgaccaccgatgctgataccggcatagtcatcatcacagatttcaatgacatcgcccggtacatggcgaagcccttcggcacccacgctgaagtccacggtctgcgtttccagcagttccgttttaatcagccacagcccggcgcggtgcgcctgcccccggctggtacagccaaaggcatccatcttcgtgacgttacgaccgtaacggagaatggcctgcgtgtcctccacaagctctgtcgccgtctcccagccgttatccgggtcaatccagttcacctcaacggcattatggcggtccttcagggcgctgaagctgtagcggaacggtgcgccatcatccggcatcaccacattactgtggttataggtccacaccttatctga

SEQ ID NO: 263868 - DNA, 300 bp, Klebsiella pneumoniae; identical to SEQ ID NO: 15770

SEQ ID NO: 263869 - DNA, 228 bp, Klebsiella pneumoniae; identical to SEQ ID NO: 9910

SEQ ID NO: 263870 - DNA, 708 bp, Klebsiella pneumoniae; identical to SEQ ID NO: 9909

SEQ ID NO: 263871 - DNA, 2205 bp, Klebsiella pneumoniae
atgaccgtcgagcacttgttactggcgctgctcagtaacccatctgcccgggaggcgctggaagcgtgttctgtggatttggttgcgctccgtcaggaactggaagcctttattgaacaaaccacacccgttctgcctgccagtgaagaggagcgcgacacacagccgacgctgagttttcagcgtgtgctgcaacgtgcggtcttccatgtccagtcctccggtcgcaatgaggttaccggtgcaaacgttctggtcgctatctttagcgaacaggagtcgcaggcggcatatctgttgcgtaaacatgaagtcagccgtctcgatgtggtgaactttatctctcatggcacgcgtaaagacgagccgacacagtcttctgatcctggcagccagccaaacagcgaagaacaagctggtggggaggaacgtatggagaatttcacgacgaacctgaatcagcttgcgcgcgtgggcggaatcgacccactgattggtcgtgagaaggagctggagcgtgctattcaggttctctgccgtcgccgtaaaaacaacccgctgctggtgggggaatctggtgtcggtaaaaccgcgattgcggaaggtcttgcctggcgaattgttcagggtgatgtgccggaagtgatggctgactgtacgatttactctctcgatatcggttctctgttagcgggcacaaaatatcgcggcgactttgaaaaacgttttaaagcgttgctcaagcagctggagcaggacactaacagcatcctgtttattgatgagatccacaccattatcggtgcgggtgcagcgtctggtggtcaggtcgatgcggctaacctgatcaaaccgttgctctccagcggtaaaattcgcgtaattggttcgacaacctatcaggagttcagcaacattttcgagaaagaccgtgctttggcgcgtcgcttccagaaaattgatattactgaaccgtcgatcgaagaaactgttcaaatcatcaacggcctgaaaccgaagtatgaagcgcaccacgatgtgcgttataccgcaaaagcggtgcgtgcagcggtagagctggcggtgaaatacattaacgatcgtcatctgccggataaagccattgacgtcatcgacgaagcgggcgctcgcgcacgcctgatgccggtaagcaaacgcaagaaaaccgttaatgtggcggatattgagtccgtggtggcccgtattgcacgcattccagagaagagtgtttctcagagtgaccgcgataccctgaaaaacctcggcgatcgcctgaaaatgctggtcttcggtcaggataaagccattgaggcgctgactgaagccattaagatggcgcgtgcaggtttaggtcacgaacataaaccggtcggttcgttcctgtttgccggccctaccggggtcgggaaaacagaggtgacggtacagctttcgaaagctttgggcattgagcttctgcgctttgatatgtccgagtatatggaacgccataccgtcagccgtctgattggtgcgcctccgggatacgttggttttgatcagggcggtttgctgactgatgcggtcatcaagcatccacatgcggtgctgctgctggacgaaatcgagaaagcgcacccggacgtgttcaatattctgttgcaggtgatggacaacggtacgctgaccgataacaacggacgcaaagcggacttccgtaacgtggtattggtgatgaccaccaacgctggggtacgagaaactgagcgcaaatcgattggtcttatccaccaggacaacagcaccgatgcgatggaagagatcaagaagatctttacgccggagtttcgtaaccgtctcgacaacattatctggttcgatcatctctccaccgacgtgatccatcaggtagtggataaattcatcgtcgagttgcaggttcagttggatcagaaaggtgtttctctggaagtgagccaggaagcgcgtaactggctggccgagaaaggttacgaccgggcaatgggcgcacgtccgatggcgcgtgtcatccaggacaacctgaaaaaaccgctcgccaacgaactgttgtttggttcgctggtggacggcggtcaggtgacggttgcgctggataaagagaaaaatgagctgacttatggattccagagtgcacaaaagcacaaggcggaagcagcgcattaa

SEQ ID NO: 263872 - DNA, 1131 bp, Klebsiella pneumoniae
atgtcaggctcccttattccgaacgcccaccgcgcccatcccgcacataccagcaacggatctggaggtaacgtgcgggtattacttcgacctgttctggtaccggaactcgggctggtgatcgttaagccgggccgtgaatccatgccagtatttcataaccctcgagtgctggtggagccggaaccgaaaagcatgcgcggtctgccgtccggagtcgtccctgccgttcgccagccgctggcggaggataaatcattactgccatttttcagcgatgagcgggtgattcgtgctgctggcggcgctggggcactgtctgactggctgttgcgtcatgtcaaatcctgccagtggcctcatggtgactatcatcacagtgaaatcgtcatacatcgttatggtaccggcgcgatggtgttgtgctggcactgcgacaaccagttgcgtgaccagacatccgaatcactcgagcaacttgctcatcaaaacctgtcagcatggatgattgacgtcatcggtcacgcaataagcggtacgcaggagcgtgaattatcgctggctgaattatcctggtgggcggtccgcaatcaggtggcggacgcgctaccggaagcggtattacgtcgttcgctggggttgcgtgcggaaaaaatccgctcaatgtaccgtgaaagcgacatcgtaccgggagagcagaccgccaccagcatactgaagcagcgcacaaaaaatattgcgctaccgcctcacatccaccagcaacagaacccaccacaggaagagacggtggtcagcattgccgttgatccggagtcaccggctcagtatctccagcgccagaaaccacaacgggaagagatgcccgtatacacgcgctgggtaaaaacgcagaaatgcatgtcgtgtggcaatcaggcagatgatccgcatcacatcattggtcatggactgggtgggatggggacaaaggctgatgatttgtttgttattccgctgtgccgtaaatgtcataacgaactgcacgccggggtaaaagattttgaagaaaaacacggcagccagctgttgttgctgattcgttttttaatgcacgcgagaaattcgggtgtcctgaagtggaaagcatga

SEQ ID NO: 263873 - DNA, 1368 bp, Klebsiella pneumoniae
atgttcggcataattatatctgtcatcgtattaattacgatgggctatttgatcctgaaaaactacaaacctcaggtggtgctggctgccgcaggtatcttcctgatgatgtgcggtgtctggttagggttcggtggtgtgctcgatcccgccaaaagcagcggctacttgatcgtcgatatttataatgaaatcctgcgcatgctgtccaaccgcattgccggattggggctgtcgattatggcagtgggcggttatgcccgctatatggagcgcataggggcaagtcgcgcgatggtgagcttgttaagccgcccgttaaaactcattcgctcgccgtatattattctgtcggcaacttacgtcatcggccaaatcatggcgcagtttattaccagcgcctccggtctgggtatgttgctgatggtcaccttatttccgacgctggtgagtctgggagtaagtcgcctctctgcggtggcggttatcgcaaccacgatgtccattgagtgggggattctggaaacgaactccatttttgctgcccaggtcgcaggaatgaaaattgccacttacttcttccactaccagcttccggtcgcctcttgcgtcattatctcggtggcgatctcccactttttcgtgcaacgcgctttcgacaaaaaagataaaaatatcaatcacgaacaggcagagcaaaaagctctcgataatgtcccgccgctctattacgccattttaccggtgatgccgttaatcctgatgctcggctcgctgttccttgcccacgtcgggctgatgcagtcagaactgcatctggtggtggtgatgttactgagtttgacggtgacgatgtttgttgagttcttccgcaagcataacttgcgcgaaacaatggatgatgtgcaggcgttttttgacggcatgggtacgcagtttgccaacgtggtaacgctggtggtcgcgggtgaaatatttgcgaaaggcttaacgacgattggcactgtcgatgcggttatcaggggtgcggagcattctggtctgggcggtattggcgtgatgattattatggcgctggtcattgccatttgtgccattgtgatgggctcaggcaatgcgccgtttatgtcatttgccagtcttattccgaatatcgcagccggactacatgtgccagcggttgtaatgattatgccgatgcattttgccacgacgctagcgcgcgctgtttcgccgattactgcggtggtggtcgttacgtcaggaattgcaggcgtttcgccttttgcggtagtgaagcggacagcgatccccatggcagtcggtttcgtggtgaatatgattgccacaatcacgctattttattaa

SEQ ID NO: 263874 - DNA, 195 bp, Klebsiella pneumoniae
atgctaaaacagcaagatatgacagaaacggcgaaagttgtttttaatgaattaagcatcgaaccggcaacagtcggggagattgcacaaaacacatatctttcacgcgaacgctgtcagttaatactgacccagttggttatggcggggctggcagattaccagttcggctgttacagacgccttcagcaatga

SEQ ID NO: 263875 - DNA, 216 bp, Klebsiella pneumoniae; identical to SEQ ID NO: 9961

SEQ ID NO: 263876 - DNA, 192 bp, Klebsiella pneumoniae; identical to SEQ ID NO: 261823

SEQ ID NO: 263877 - DNA, 183 bp, Klebsiella pneumoniae; identical to SEQ ID NO: 9962

SEQ ID NO: 263878 - DNA, 681 bp, Klebsiella pneumoniae; identical to SEQ ID NO: 261825

SEQ ID NO: 263879 - DNA, 786 bp, Klebsiella pneumoniae; identical to SEQ ID NO: 261826

SEQ ID NO: 263880 - DNA, 297 bp, Klebsiella pneumoniae; identical to SEQ ID NO: 10015

SEQ ID NO: 263881 - DNA, 144 bp, Klebsiella pneumoniae
atggatcaaacacttatggctatccagactaaattcactatcgccacttttattggcgatgaaaagatgtttcgtgaagccgtcgacgcttataaaaaatggatattaatactgaaactgagatcaagcaaaagcattcactaa

SEQ ID NO: 263882 - DNA, 294 bp, Klebsiella pneumoniae
atgacagaggaaaaacttcaccagattaataatttctggtcagactctgaataccgactcaataaacacggctctgtattaaatgctgtattaatcatgctggcgcaacatgctctgcttatagcaatttcaagcgacttaaatgcatatggtgttgtgtatgagttcgactggaatgatggaaatggtcaggaaggatggcctccaatggatggtagcgaaggaataagaattaccgatatcgatacatcaggaatatttgattcagatgatatgactatcaaggccgcctga

SEQ ID NO: 263883 - DNA, 201 bp, Klebsiella pneumoniae
atgactacgactattgataaaaatcaatggtgtggacaattcaagcgatgcaatggatgcaagctgcaatcggaatgcatggttaagcctgaagaaatgtttcctgtaatggaagatgggaaatatgtcgataaatgggcaatacgagcgacggcaatgattgccagagaacttggtaaacagaacaacaaagctgcctga

SEQ ID NO: 263884 - DNA, 582 bp, Klebsiella pneumoniae; identical to SEQ ID NO: 9906

SEQ ID NO: 263885 - DNA, 216 bp, Klebsiella pneumoniae
atgatgttttcctcatgtgaaatggctttggtggtgatgcgccagatgctgatcttctggttgctgtcgttactgctgcaattcacatcaccccaaacccatctcgtttggtatctgttcgcgctttgtcagcgcatcatcgaagttaaagagcctgccaatctgttccgtttggctgccagcgtcctgctgatggcgatgataatgaaccaatag

SEQ ID NO: 263886 - DNA, 1044 bp, Klebsiella pneumoniae
atgactggcaaattacgctttgaagtgaacgataaccagggctgtttcatatttccggaaacctggtttggctcgttgctggatgagtttgaagaactgattgatgcatacgatgcggatgaaatcagcgaaacaagttacatcaacaaactcaggcgccttgcccgacaggagaatgactttattgatgtacacgctcacttggcatacgtatttctggagcagaatgccccgcgtaaggcgctgaatgctgcccttaaagggctggcaattggcaatcgtcttatccctgaaggtttcagtggcagaatcatctggatacatcctgacaaccgaccttttcttcgtgccctctatgcggcaatcctggcaaatgcacatttacagcgtcatcaggatgccatcatgctcattgaaaaaatactggattacaatcccgaagataatcatggtgcacgctggctactgggaccggaactgttacgcactggcgctcatgaacaggcacgccatatactgcaggaacatgcagatgaattttcaccttactggtatgaactcggccttctgcattttcttaatggggaactggtaaaagctgcaactgcatttcgtcgcggctttgcggcaaatacttacatcgcagaaatactgtgcggaaatctgcatccatttccacttgctgtatggcataacttttcaggcggtccggatactgccgaagattattatgccacataccacccgttatgggggcaatatccggaagcattgctgtttgtaaactggctctataatcattcctctgtgctgcatgaacgggcagaaatcattaaatgcgccgaaatgctgatgcaggaagatgatttcgaaatatgcgaaagtattttaagacagcaggagaagttgcgtgaaagaattgatgagacgctttctgagaaaattgtacagaaatgcagaaatatgaatggtgaatatgtctggccctggatattgccgttttcagcggcaggcatgaaacatactggcatacagtatcagtag

SEQ ID NO: 263887 - DNA, 279 bp, Klebsiella pneumoniae
atggggtatgacacaaccaaggaagtctgtggccatggattccgggcgatggcgtgcagtgcattgattgaatccggcttatggtcaagagatgcggttgaacgtcagatgagtcatcaggagcgcaacggagtacgtgccgcgtatattcataaagcagaacatctggaagaacgtcggcttatgctgcaatggtgggcagattttctggatgcaaacagggaggagtgtatcagtccgtttgaatatgcaaaagttaacaatccactgaaaaggtga

SEQ ID NO: 263888 - DNA, 582 bp, Klebsiella pneumoniae
atgccagtaatccaggacgttccgagaaatcatcgtgatgacttacctattgcaattctggccgccggaatggttaatgaaaatgatctgatcttctttgataatggccaggagataccgctcgttataagcatgatcccggatgcaatcaccttcactggcatctgttactcacatcgtgtctttgttgcgttgaatgaaaaacctaatgtgacagcaatactttgtggtggtacgtatcgtgccagaagtgatgctttttacgatgccagtaactcttcgccattagactctctcaatccgcgaaaaatatttatttccgccagcggtgtacatgatcactttggcgtcagctggtttaatcccgaagatcttgccactaagcgtaaagcgatggcccgtggactacggaaaattttgctcgcccgccacgccttgtttgatgaagtagcctctgccagcctcgcaccgctctctgcatttgatgttctgattagcgatcgtccgttaccggcagattatgttacgcactgccggaatgcttctgtaaagatcattacacctgattcagaagacgaatga

SEQ ID NO: 263889 - DNA, 192 bp, Klebsiella pneumoniae
atgttgactacaacaagccacgacagcgtatttctgcgtgccgataattccctgatcgacatgaactatatcaccagtttcaccggtatgaccgacaaatggttttacaagttgatcagtgaaggccatttccctaaacccatcaaactggggcgcagcagccgcaggtataaaagcgaagtgtcacagtag

SEQ ID NO: 263890 - DNA, 1152 bp, Klebsiella pneumoniae
ttggatatagatataataaatggaaagctttcccaattcccacaggaagataaaattctctttgaggatatagtaaaaaataacaacatagttaacatccgtattttgatgcgtattttggacacagttacgccattatatgaatacgttaaatcatatcctcatctttcttggcgaataccatcaacaattcttttaaactcaatatgctctttcttcattttattatttttgcataatcactctcttgaggatcttctcaaggacaaagatccaacttttttattaaacaccgagaaatcaagtgatagtgagagagtgctatggttagcattgaataattacaaaataaaacctgagattaaaaggtattatagcggacaagcttcattaaatgacatattggatgttttgttttatgaagcaaaacggcttactatgagagaaattgcaatatcagcacgtccagaattacatgagataaatgaaaaggaactttcaaatacacttgtcgacttaatttgccgtaagattgactgtaatttctatgaatggataaaagcgtttcagaattatgagtatttaaccacacataaatacctaccaaaatcaccaattataactctaaagtttgtcacttcgattctgaacggattcactgacaatgaagttgcagaatgctttgagctatactcacttgatagaaaaaatagcttaaatagtggttttgaagatagcaaattgctgtactcaatttcattttaccgttatgaaagcacgatcaaaatgcgtgaactcaacactattaagttgcaattagaattgaatggctgggcatcattcaatgctaaccaattaaccactttagatccattcggaaattataagccgcttgaagtacttggtgtatcatttgtaacaaaatgcgttttaaagaattgggcagttaatgatattgagcaatttagttctttcttgcgtagcaactatcaaatcagcaacataaaacaattcgccactaatgaaaaaaacaaacttatttatcttagtcaaaaacttgatattttttgcctttcctataaagaaagctttaaatttggagccatatacgatctaaacagaacagttaaaattgccattaacaaattatga

SEQ ID NO: 263891 - DNA, 294 bp, Klebsiella pneumoniae; identical to SEQ ID NO: 15953

SEQ ID NO: 263892 - DNA, 156 bp, Klebsiella pneumoniae
atggcagcgcttgtggtaacctggtttaatccggtgaaagaggcgttttacatgcatctgccagcatccggaaaaaccaaaaaagtggcgctggttgactgtatgcgtaaattgctgaccatcctgaacgcaatgctcagaaagaacgaagagtga

SEQ ID NO: 263893 - DNA, 423 bp, Klebsiella pneumoniae
atgaaactggccctgacgctggaagccgacagcattaacgtgcaggcactgaacatggggcgcattgtcgttgacgtcgatggtgttaatctcgctgaactgtttaataaagtcgcggaaaatggttattcactccgcgtggtggatgagcgtgtcactaccgaaacaccggcgacctctgccagccctcatcagttgccggaagacaatacagtgatacagagcgtaatgccattagccacagaaacggcgctggatattctgattgtgtggctgcaggacaatatcgactgcgaatcggggattatcttcgacaacgatgaggataaaacggattcggcagcactgttgccctgtattgaacaggcgagggaggatatccgtaccctgcgccaactgcagcttctgcaccagaaccagtga

SEQ ID NO: 263894 - DNA, 237 bp, Klebsiella pneumoniae
gtgattgagcagcatattgaggcaggcatttcactgtgtgatgcagtgaactttctcgtggaaaaatacgtactggtacgaactgaccagccgggattcagcgcaggagcctcgtcgcagttaatcaacagcattgatattctccgggctcgccgggcaacaggtctgatgacccgcagcaactacagaacggtaaataacattacccgggggaagcatccggaggcgaaacaatga

SEQ ID NO: 263895 - DNA, 1101 bp, Klebsiella pneumoniae
atgaaattaaaaatagttgcggtggttgtaactggtttgttagctgcgaacgtagcacacgctgccgaagtctataacaaggatggtaataaactagacctttatggcaaggttaccgctctacgttattttactgatgataagcgtgacgatggtgataaaacttatgcccgtctcggctttaaaggagaaacgcaaatcaatgatcaaatgattggttttggtcactgggaatatgattttaaaggctataacgatgaagccaacggctcgcgcggtaacaagacccgtctggcctatgcaggtttaaaaattagtgaatttggctctctggactatggtcgtaactacggtgtcggctatgacattggttcatggaccgatatgttgccagaatttggtggcgatacctggagtcagaaagatgtcttcatgacataccgtactaccggtgtggcaacctatcgcaactacgatttcttcggcttaattgaaggtctgaactttgccgcgcaatatcaaggcaaaaatgaacgcactgacaatggtcatctttatggtgctgactacacgcgtgccaatggtgacggtttcggtatctcctcaacttatgtttatgatggctttggtatcggtgcggtgtataccaaatccgatcggacaaatgcgcaggaaagagccgctgctaatcctctcaatgcctccggtaagaatgcagaactgtgggctacaggtataaaatatgatgccaacaacatctactttgcagctaattacgctgaaacattaaacatgaccacctatggcgatggttatatctctaacaaagcacaaagttttgaagtagtggcacaatatcaattcgacttcggcttgcgcccatcactcgcttacctgaaatcgaaaggcagagatctgggccgctacggcgaccaggacatgattgagtatatcgacgttggtgcgacgtatttcttcaacaaaaatatgtcgacctatgttgattataaaatcaacctgattgatgaaagcgactttacccgtgccgtagatattcgcaccgataacatcgtcgcaacgggaattacctatcagttctaa

SEQ ID NO: 263896 - DNA, 651 bp, Klebsiella pneumoniae; identical to SEQ ID NO: 7677

SEQ ID NO: 263897 - DNA, 288 bp, Klebsiella pneumoniae
atggatataacacctttccttcatgcactttgtgctgtggctgcgcagacactggttggtctttttaccggaaactgggcttacggggcgatagccggttgtgcgttcttcattgcgcgtgaacacacccaggcagaatatcgctggattgaaatgtttgggcatggcaagcggattaacatgccgtggtggggcggttttgatccgcgcgcgtgggatgtggcaagcctgatggattttgctgtgccggtggtggcgtgtctgctgatctggatgttgatccgttaa

SEQ ID NO: 263898 - DNA, 1041 bp, Klebsiella pneumoniae
atggctacatcgacagtaattcctgatgacatcaaaacgctaaaatccgacgttagcaaattaaaaaacgatcaaggaagctacgcaacaaaatcatatgtagacagcaaagatgaaaccgttggtgactggtctgcttcatggtatcagcaggtattgccaactagcggagctatatttgggagaaaactccgctcaactcacaggacggcaggtgttgaggatgcatattgcgaactatacctcaaaaaatggatagacagtccaggtaacgcaatggcgcgccttaacctgaacgataacgggacaaacatttgctgggactttaccaacctttatggcggtacgatgatttttcccggtgacagcggatacctcaaaatgggtaactgccttatgtcatacagcaagcgtggaagtaacgcgcttattaaatttgattacaccgacacattacagatcaaatatgccaatcatgggtcaaccatgacattaaacacacagggaaccgcttatgctggtgttactgctcaattgtggggcaactccagccgtcctgttgtttatgaagtcggtgttgatggtggcgcttatatgttctatgcgcagaaaaataccgataacacctatatgttaagcgttaatggtgcatgtcatgccaccgcatttaaccagcattccgaccgggatctgaaagacaacattcaggtgatcgataatgcaaccgaccgcatccgtaaaatgaacggctatacatacacgcttaaagaaaacggtatgccctatgctggtgtcattgcacaggaagctctggaagcaatcccagaagttgtaggttccgtaatgaaatatcaggacggtgcgagcggatcggaaggtgaagaaggtgaacgttattacacagtagattattctggtgttactggcttgcttgttcaggtagccagagagtcagacgacagaataacagcactggaagaagaaaacgcagaattaagacaaagattatctgcaattgatgcggcgcttgcgtctaaataa

SEQ ID NO: 263899 - DNA, 294 bp, Klebsiella pneumoniae; identical to SEQ ID NO: 9597

SEQ ID NO: 263900 - DNA, 414 bp, Klebsiella pneumoniae; identical to SEQ ID NO: 9598

SEQ ID NO: 263901 - DNA, 249 bp, Klebsiella pneumoniae
atgaataattcaatccccgagagatttatttttcaatgtgctttgtttaaaaatctcgagagggaggtgctcatgacgcacgggtatgttgatagtcatattattgatcaggctttacgcttgcgtttaaaagatgaaactagtgtgattctttctgatctctatctgcaaatcttgcagtacattgaaatgcataagactacactaacggatatcattattaatgacagggaatcagtgctctcttag

SEQ ID NO: 263902 - DNA, 1524 bp, Klebsiella pneumoniae
atgcgcaatacactcatacccatcttcattgcgatatgcttgtttataaccggtgtcactattttgaacatccagctctggtattccgcaaaagcagagtacctggcgggagcaagatatgcagccaacaatatcaatcatatacttgaagaagcgtcacaggcgactcaaacggcggttaacattgccgggaaggaatgcgacctcgaggagcaatatcagcttggcactgaagcagctctgaaacctcacctgcgcacaatcatcattctcaaacagggaacggtctggtgtacatccttaccggggaatcgggtcctactgtctcgtattcctgttttcccggacagtaatttactgctggctccggcaatcgacaccgttaatagattacctatcctgctctatcagagccaatttgcagatacgcgcattttggttacgataagtgatcagcatattcgcggggcgcttaatgtacccttgaaaggggtaaggtatgtattacgcgtggcagatgacattattggacctacgggtgatgtgatgacgcttaatggacactatccctataccgagaaggttcactccacaaaatatcatttcactattatctttaacccgccgccactctttagcttctacagacttatcgataaaggctttgggattttgatatttattctgttaatcgcctgcgccgctgccttcctgcttgataggtatttcaataaaagcgcaacgcctgaagagatcctgcgacgggctataaataatggggagatcgtcccattttaccaacctgtggtaaatggtcgggaagggacattgcggggagttgaggtgttagcccgctggaaacaacctcacggtggatatatatcacccgcggcatttattccacttgctgaaaaatccggattaatcgttccgcttacgcaaagcctgatgaatcaggttgccagacagatgaacgctatcgcgagtaaactgccggaaggttttcatattgggattaattttagcgcctcgcatattatttcgccgacatttgtcgacgagtgcttaaattaccgtgacagttttacccgtcgcgatttaaacctcgttctggaagttaccgagcgtgagccattaaatgttgatgaaagtctggttcagcggttgaacattctgcatgaaaatggttttgtcatcgcgctggatgatttcggtactggctactcagggctttcttatctgcatgacctgcatattgattatatcaaaattgatcacagtttcgttggccgcgtaaacgcagacccagaatcaactcggattctggattgtgtattggatctggcgcgtaaactttcgatcagtatcgtcgctgaaggtgtcgaaacgaaagaacaacttgactatctgaatcaaaataatatcacatttcagcagggttattatttctataaaccggtaacatacatcgacctggtcaaaattatcctttctaaaccgaaggtgaaggttgtggttgagtaa

SEQ ID NO: 263903 - DNA, 567 bp, Klebsiella pneumoniae
atgaatatcactgctactgttcttcttgcgtttggtatgtcgatggatgcatttgctgcatcaatcggtaaaggtgccaccctccataaaccgaaattttctgaagcgttgcgaaccggccttatttttggtgccgtcgaaaccctgacgccgctgatcggctggggaatgggcatgttagccagccggtttgtccttgaatggaatcactggattgcgtttgtgctgctgatattcctcggcgggcgaatgattattgagggttttcgtggcgcagatgatgaagatgaagagccgcgccgtcggcacggtttctggctactggtaaccaccgcgattgccaccagcctggatgccatggctgtgggtgttggtcttgctttccttcaggtcaacattatcgcgaccgcattggccattggttgtgcaaccttgattatgtcgacattagggatgatggttggtcgctttatcggctcaattattgggaaaaaagcggaaattctcggcgggctggtgctgatcggcatcggcgtccagatcctctggacgcacttccacggttaa

SEQ ID NO: 263904 - DNA, 810 bp, Klebsiella pneumoniae
atgtcgttttcctgtccactttgccatcagcctctttcgcgtgaaaaaaacagctatatatgtccccagcgacatcagtttgatatggcgaaagaagggtatgtcaatctgctgcccgttcagcataaacggtctcgtgatccgggcgacagcgcggaaatgatgcaagcacgccgcgcattcttagatgccggacattatcagccactgcgtgatgcaattgtcgcccaactgcaggaacggcttgatgaaaaggccacggcggtgctggatattggctgtggtgaagggtattacacacacgcatttgccgatgcgttgcccgaaatcaccacgtttggcctggatgtctcgaaggtagcgataaaagcggcggcgaaacgctatccgcaggtcactttttgtgttgcttccagccaccgtttgccgttttccgataccagtatggacgccataatacgtatttacgcgccgtgtaaagcagaagaattagcgcgagtagtgaagcctggcggttgggtcattactgccacgccgggaccgcgacatttgatggagctgaaggggctgatttacaatgaagtacatcttcatgcacctcatgcagaacaactggaaggttttacattacagcagagtgctgagttgtgttatccgatgcgtcttcgcggtgatgaagccgtcgcattattgcagatgacgccgtttgcctggcgtgcgaagccagaagtctggcaaacactggcagcaaaagaagtgttcgactgccagacggactttaatattcacctctggcagcgttcttattaa

SEQ ID NO: 263905 - DNA, 210 bp, Klebsiella pneumoniae
atggcaaagattaaaggtcaggttaagtggttcaacgagtctaaaggttttggcttcattactccggctgatggcagcaaagacgtgttcgtacacttctctgctatccagggtaatggtttcaaaactctggctgaaggtcagaacgttgagttcgaaattcaggacggtcagaaaggtccggcagctgttaacgtaacagctatctga

SEQ ID NO: 263906 - DNA, 744 bp, Klebsiella pneumoniae
atgtcaaatacataccagaaaagaaaggcaagtaaagagtatggtttatataatcaatgtaagaaactaaatgatgatgaattatttcgcttacttgatgatcacaattccttgaaaaggatttcatctgccagagtattacagttaagaggtggtcaagacgctgttagattggcaattgagttctgctctgataaaaattatatccgtagagatatcggagcatttatactcgggcaaataaaaatttgcaaaaaatgcaaagataatgtgtttaatattttgaacaatatggcattgaatgataagagcgcttgcgttcgagctacggcaatcgagtcaacggctcagcgatgcaagaaaaacccaatttattcacctaaaatagtagaacaatctcaaattactgcttttgataaatcgactaatgtcagacgtgctacagcatttgctatttctgttatcaatgataaagcaacaattccactattgattaatctgttaaaagatccaaatggagatgtcagaaactgggccgcatttgcaataaatatcaataaatatgataatagtgatattagggattgttttgtggagatgcttcaggataaaaatgaggaagtccgtattgaagcaataatcggactttcctacagaaaagataaaagggttttatctgttttatgcgatgagttaaaaaaaatactgtttatgatgatatcattgaagctgcgggtgaattag

SEQ ID NO: 263907 - DNA, 267 bp, Klebsiella pneumoniae; identical to SEQ ID NO: 9740

SEQ ID NO: 263908 - DNA, 366 bp, Klebsiella pneumoniae; identical to SEQ ID NO: 9741

SEQ ID NO: 263909 - DNA, 303 bp, Klebsiella pneumoniae; identical to SEQ ID NO: 9936

SEQ ID NO: 263910 - DNA, 333 bp, Klebsiella pneumoniae
atgaacccttatatttatcttggtggtgcaatacttgcagaggtcattggtacaaccttaatgaagttttcagaaggttttacacggttatggccatctgttggtacaattatttgttattgtgcatcattctggttattagctcagacgctggcttatattcctacagggattgcttatgctatctggtcaggagtcggtattgtcctgattagcttactgtcatggggacttttcgaccaacggctggacctgccagctattataggcatgatgttgatttgtgccggtgtgttggttattaatttattgtcacgaagcacaccacattaa

SEQ ID NO: 263911 - DNA, 336 bp, Klebsiella pneumoniae
gtgaccggttttttcccacaggacacggtccatcatgaacggacctttaacttcctgatactggtactctttcagtttagaacgaacaaacacttccagttcacggaagatggtccagccatcgttgtgccagaataccatacccggtgcttcttcctgcatatggtacaggtcgagctgtttaccgattttacggtggtcgcgtttcgcggcttcttccaggcgctgcaggtaagcgttaagcgcttttttgtctgcccacgccgtaccgtaaatacgttgcaacattttgttgttgctgtcgccacgccagtaagcccctgccgttttcattag

SEQ ID NO: 263912 - DNA, 252 bp, Klebsiella pneumoniae
atgatggcagaaacgcatgttcggtacgtgcggaccgcggcacatatcgacatattcttcatggaagtacagacctggcttgtcatcatgggcgatgttttcgtcaagaatggagactttgtagctctccccacggttggcgaaagtttcacgcgcttcgtgccagctgactttcttcttaatgacgtcgtagtttttctcagcaagctcatgcatccgcttctcgagtgcttcgacatcttcctgggttaa

SEQ ID NO: 263913 - DNA, 903 bp, Klebsiella pneumoniae
gtggtcaaccatttcctgcgcttcttgttcggtgatcttgccagctttcaggtcacgttcgatgtacacatccaggaaggtggaggtacgaccgaaggacattgcagcaccgttctgagacttaacagcagccaggtagccgaagtaagtccactggatagcttcctgagcgttggtagccggaccagagatgtcgtagccgtatttcgcagccatttctttcatctgacccagagcgcggtgctgttcagcgatttcttcgcgcagacggatagtctgttccaggtttacgccgttttccagatcagcctgcagagaggtgaactgtgcaagtttatctttcatcaggtagtcgataccgtacagcgcaacgcgacggtagtcaccgatgatacgaccacggccataagcatctggcagaccggtcagaacaccggatttacggcaacgcaggatgtccggagtgtaaacgtcgaacacgccctggttgtgagttttacggtattcagtgaagatttttttgatcatcgggtccagttcgcggttgtacgctttgcaggaaccttcgatcattttgataccaccgaacgggataagagcacgtttcagcggagcttcagtctgcagaccaacaactttttccaacgctttgttgatgtagccagcgtcgtgagaggtgatggtggaagcaacagcggtgtcaaagtcaactggcgcgtgagtgcggttttccagtttaacgccttccattactttgtcccacagggtggtggtcgcttcagtagcgccagccaggaaggactcgtcaccctcgtacggagtgtagtttttctgaatgaagtcacggacgtttacttcattctgccagtcacctttggtaaaaccttcccaggctgtggctaa

SEQ ID NO: 263914 - DNA, 501 bp, Klebsiella pneumoniae; identical to SEQ ID NO: 5312

SEQ ID NO: 263915 - DNA, 240 bp, Klebsiella pneumoniae
atgcaaagtatgagttgcagagggaatggcctggataattcgccgatggaaagagtctttcgcagccttaaaaatgaatggcttccgaaaggtggttatggtgattttatccatgcggtacgtgatataaaccagtggattaatggttattacaacgtttatcgacctcacacgaacaacgatggtttaccgccttgcttacatgaagaaaagtggaaacaggttattccggtatcctga

SEQ ID NO: 263916 - DNA, 909 bp, Klebsiella pneumoniae
gtgacgctaccggcggagctgtcggtgatgctggggaggctggagcgggaactgcgcgcgggtgcggtgagtgcggagagtgaggcatggcttcagcagtgcgggctgacggcggaacagatgaaaaaccagatggaggcggaatacatcccggagaggacacttcatctttaccactgcgaccaccgggggctgccgcaggcgctcatcagcccggaaggggaaacggcgtggcagggggagtatgacgagtggggaaacctgctgggcgaaaccagcgcgcagcaactgcaacagccgtaccgtctgccggggcagcagtatgatgaggagtcggggctgtactataaccgcaaccggtactatgacccgttgcaggggcggtatatcacccaggatcccattgggctaagaggtgcatggaacctgtatcagtatccattgaatccaactactaagatagatccgttgggtctctccggagaagattccatagagcagtcaggtccatcttggttgattgctgaccccatggataaatacagacaacaggcagtgatgggtttaacaaaattgtgggatgatacctttagtcaagagaagactaaatgtttacctacgacacctgaaaacatcaggatggttgtggccaacagtcccttgttgacagtacaacaaaaagtctcagtacccgtagtagctcactacgtacaaatgctggaagatggtagtggagcaccaccggttgatatggatgggaatgtgattgttaatggtaatcacaggatggttgcgggtctgttatgtgataaacttcctcctgagcggccaggtacgcgtccattatcggcaccactatatccgtttagccaaatttttccggagttagatgattgggggaatagatga

SEQ ID NO: 263917 - DNA, 486 bp, Klebsiella pneumoniae; identical to SEQ ID NO: 9956

SEQ ID NO: 263918 - DNA, 279 bp, Klebsiella pneumoniae; identical to SEQ ID NO: 4619

SEQ ID NO: 263919 - DNA, 1257 bp, Klebsiella pneumoniae
atgattacgggctattctccgggttataaaaaagtgaagattggcgataatgtggttcaggttgccagtgataaacaggttaatttcagtcgcgcatcaacggcaacatatatcaacaaatctggcgaactgaaaacggcggaaattaatgagccgcgatttgagtgtgatggcctgcttattgagggacaaagaacgaacttcttccagaacagtacagacccttcgaagtggaataagtcaacttcactggacgttacagaaacaggcacagatagtttcgggtttaattatggtcggtttgtcgtacaggattcgattgttggtacaagtaaagcgcataccattatcggactgtattcgagtaccggaggggttgatacttcaggggacgaaaagcatgtaactatatcctgtcgggtaaaaagtgaagttgataatatcgccgttcgtattttatttgaacattatgatggggaggtaaggacatcaataggagcagcaaacctgaaccttaccacccgcataattagcaagacaggtcagacaagccgtgttacagcaaggtctgttaaggatgatgcaactggctggatattttttgaggctacattaaaagcagatacaacagaaaatacggttggtggttttgtccagtattctccggatacagggcagatggttacatcaggggattatctcgatgtaaccactccacagattgaggctggtacaggcgcatcatcttttattgttacggggacggcaccggcaacgcgggcaagcgatatggtgacagtcccaatcaagaataacctttataatcttccttttacggttctttgtgaggtacataagaactggtataaaacgccaaatgtagcgccgcgtgtttttgataccggcggtcatcaaaccggagcggggatcgtaatggggtttggttcatcaggtgggtacgacggttttccgtattgcgatataggtggttcagaccgacgaataaatgaaaatgccgggctggaaaaaatgcttattggtatgcgggtaaagtccgaacggtccacatgtgtagtcagtaacggtaagttaagcagcgaaactaaaaccaaatgggaatatatccggagtacagcaaccattcgcattggtggacaaactacagcaggattacgccatttatttgggcatgtgaggaattttcgtctctggcataaagagctaacagatgcgcagcttggggaggttgtggagtga

SEQ ID NO: 263920 - DNA, 255 bp, Klebsiella pneumoniae
atggaaaaaaataatgaagtcattcagactcatccgctcgtagggtgggacatcagcaccgttgatagctatgatgcgctgatgttgcgtttgcactaccagaccccaaataagtccgagcaggaagggactgaagttggtcagacgctctggttaaccactgatgttgccagacaatttatttcgatattagaagcaggaatcgccaaaattgaatccggtgatttcccggtaaacgagtatcggcgtcattaa

SEQ ID NO: 263921 - DNA, 1119 bp, Klebsiella pneumoniae
atgaaatacgatctcatcattattggcagcggttccgtaggcgctgccgccgggtattatgcaacccgcgccggtttaaacgtgctaatgaccgacgcccatatgccaccgcatcaacacggcagccaccacggcgatacgcgattaattcgccatgcttatggtgaaggcgaaaagtatgtcccgctggttctccgcgcgcaaacgctgtgggatgaactctcccgccacaacgaagaagatcccatttttgtacgctctggcgtcattaaccttggcccggctgattccacatttctcgccaacgtcgcccacagcgccgaacaatggcaactcaacgttgaaaagctcgatgcgcaagggattatggcccgctggccggaaatacgcgtcccggacaactacatcggcttatttgagactgattccggttttttgcgcagcgaactggcgattaaaacctggatccaactggcgaaggaagcgggctgtgcgcagctgttcaactgcccggtcaccgcaattcgtcatgacgatgatggcgtaactattgaaacggctgacggtgagtatcaggcgaaaaaagcgattgtctgcgcgggaacatgggtaaaagacctgctcccggagctgcctgtccagcccgtacgcaaagtatttgcctggtatcaggccgatggtcgctatagcgtgaagaataaattcccggcgtttaccggtgaactgcccaatggcgatcaatattatggttttccggcagaaaacgacgcgttgaagattggcaaacataacggaggccaggttatccattcagcggatgaacgtgttccgtttgcggaagtggtcagcgatggttcggaagccttcccgttcttgcgcaatgtcttgccgggtatcggttgctgcctgtacggcgctgcctgcacctatgataattcgcctgacgaagattttattatcgatactctacccggccacgataatacactgctcattaccggtctgagcgggcacggttttaaatttgcgtcagttttaggggaaatagctgccgattttgcgcaagacaaaaaaagcgattttgatttgacgccattcaggctttcccgcttccaataa

SEQ ID NO: 263922 - DNA, 615 bp, Klebsiella pneumoniae
atgagtaacactgcagttctggatgaaaacggtatcgccactgtagcgggcgatatcactgtatatcactatgacgaggaaacccgggaatacacctcatcctctgtggagtatctcgcccttggggtgggtactccggcacattcgtgcgccgatgcaccgccggaggcaatttcgggttacgtggtttgccggactgccacgctgaacgggtgggagcatgtgcctgatcaccgcggcgagacggtatacagcacggagaacggtaaccccgttctgattacccaaccgggtgattacccggcggacaccaccacaaaacagccggccacgccatgggatacctggaacggtgaggcgtgggtaaccgatactgaacggcagcgagccgcagaactggaggttgccagacagcaacgccagcaacgggtgaaacaggcgatggcgtccgtcgatcttatcaacctcaaactgcgtgctggtcgcagtctgaaaccagaagaaacggcaaaactgaacgccgtgctggattatatcgacgagctgaacgcactggatatcagcacggcacctgaaatcagctggccggaagcgccactggcacttgccagctga

SEQ ID NO: 263923 - DNA, 300 bp, Klebsiella pneumoniae
ttgctgtccgcacaaggggcaacgctgttaagaacagcaatgctggattattataaccaggacactacgggaacctcggggatagtcggcatgggattcaacaatgaagattccattacagaccttcgtgagggcagctttaaaatgccggacgggacaacattcagcaatcctgtcataacaatgtcagacaatggtatgcaggctactattctgacctctatcagaagcgggtatgcgaagggtatcactgtcagaccccgtagcattgcacttaattacattgtgagggcagtttaa

SEQ ID NO: 263924 - DNA, 378 bp, Klebsiella pneumoniae; identical to SEQ ID NO: 9964

SEQ ID NO: 263925 - DNA, 1209 bp, Klebsiella pneumoniae; identical to SEQ ID NO: 9963

SEQ ID NO: 263926 - DNA, 588 bp, Klebsiella pneumoniae
atggacgtcagtcgcagacaattttttaaaatctgcgcgggcggtatggcgggaacaacagtagcagcattgggctttgccccgaagcaagcactggctcaggcgcgaaactataaattattacgcgctaaagagatccgtaacacctgcacatactgttccgtaggttgcgggctattgatgtatagcctgggtgatggcgcgaaaaacgccagagaagcgatttatcacattgaaggtgacccggatcatccggtaagccgtggtgcgttatgcccgaaaggggccggtttgctggattacgtcaacagcgaaaaccgtctgcgctacccggaatatcgtgcgccaggttctgacaaatggcagcgcattagctgggatgaagcattctcccgtattgcgaagctgatgaaagctgaccgtgacgctaactttattgaaaagaacgagcagggcgtaacggtaaaccgttggctttctaccggtatgctgtgtgcctccggtgccagcaacgaaaccgggatgctgacccagaaatttgcccgctccctcgggatgctggcggtagacaaccaggcgcgcgtctga

SEQ ID NO: 263927 - DNA, 825 bp, Klebsiella pneumoniae
atggtaggattgattcgcggtgtcagtgaggggctcggcccggtcggcggcgcagctgctatctattcattaagcgggctgctgttaatcttcacggttggatttccgcgtattcggcagatcccgaaaggctatttactcgccgggtgtctgttattcgtcagctatgaaatctgtctggcgctttccttaggatatgcggcgacccgtcatcaggcgattgaagtgggtatggtgaactatctgtggcccagcctgacaattctctttgccattctgtttaatggtcagaaaaccaactggctgattgtaccaggattattattagccctggttggcgtctgctgggtgttaggtggtgacaatgggttacattatgatgaaatcatcaataatatcaccaccagcccattgagttatttcctggcgtttattggtgcgtttatctgggcagcctactgcacagtaacgaataaatacgcacgcggatttaacggaattaccgtttttgtcctgctaacgggagcaagtctgtgggtttactattttctcacgccacaaccagaaatggtatttagcacgccagtcatgattaaactcatctctgcggcatttaccttaggatttgcttatgctgcatggaacgtcggtatattacatggcaacgtcaccattatggcggtaggttcgtattttacgcccgtcctttcctcagcgcttgcagccgtgctgctcagcgccccgctgtcgttctcgttctggcaaggcgcgctaatggtctgcggcggttccctgctctgctggctggcgacacgtcgtggctaa

SEQ ID NO: 263928 - DNA, 468 bp, Klebsiella pneumoniae; identical to SEQ ID NO: 6969

SEQ ID NO: 263929 - DNA, 477 bp, Klebsiella pneumoniae
atgaaaggtgatgttaaaatcataaattatctcaataaactattgggaaatgagcttgtcgcaatcaatcagtattttctccatgcccggatgtttaaaaactggggcctgatgcgtctcaatgacgtcgaataccatgaatctatcgatgagatgaaacacgctgataaatatatcgagcgtattttgtttttagaaggaatccccaacttacaggatttaggcaaactggggattggtgaagatgtcgaggagatgctgcaatccgacctgcgattagaactggaaggcgctaaggatctccgtgaggctatcgcgtatgccgacagcgttcatgactatgttagccgtgatatgatgatcgagatccttgctgatgaagaaggtcatattgactggctcgaaactgagctggatctcatcggtaaaatcggtctacaaaattacctgcaatcacaaataaaagttaaagattaa

SEQ ID NO: 263930 - DNA, 195 bp, Klebsiella pneumoniae
atgtacgtttgtttgtgtaatggtgtaagtgacaaaaaaattcgccaggcagtccgtcagtttcatccgcaatctttccaacaattgcgtaagtttattcctgtgggaaatcaatgcggtaagtgcattcgcgccgcgcgcgaagtgatgcaggacgagttgatgcagatgccagaatttaaagagattgcctga

SEQ ID NO: 263931 - DNA, 468 bp, Klebsiella pneumoniae; identical to SEQ ID NO: 9947

SEQ ID NO: 263932 - DNA, 603 bp, Klebsiella pneumoniae
atgaaaccacagtatcagacccgttacgagctgctccacgaaagctaccagaaatggctgaccggcttcacccggcacgccgtatcctggggcgtgtgtcatccgaatatccactacttccataatctgacgcccgggtgggtgtcattcaatggtgaaaaaccgaagattgccatcgtaccccggagtctgcaccggctgatttatggctctgacaaacgggccacgccgcccctggatgatgatctggtggtgaacttatgcaccagcgaacatctgctggttcatcatccgatgctggaagggattctgctgtctgaatgtgaacgtctgaggcagcgttctctggcaaataaactgatcagcctcttccgtcagtttggtggcacggagttgcgcctcaaactggtctggctttgctggcttgatttaatgaccggaaacagccttgacgactggacggagaacctgaaacggaaatcagaaaaagagctgggggaatggatcatcgaccgtcagaagcagaacgcagcactgacggatctgatggatcagtacgtgctcctggcataccgcacaacggttgacggtaaccgtaactga

SEQ ID NO: 263933 - DNA, 339 bp, Klebsiella pneumoniae
atgttctcattctcgagatttttccttactgctacctctgacatgttcatttcttcagaaatatcagaaagcttccactttttttcaaagtcacactcaattatctttttgactttatcagtgaaactgatggatgttgatacacatattgatgaaaaaaaatcacactcgttatcaacaatcgagaaaagacacgctagtttgtatactttctcattacatactttcattgattttatacttttgaatatctcagtggaaattatgtccccatctatcatgaatattctctgctgtaatcttctttttctttgcatctgtccaaaactaaacgaataa

SEQ ID NO: 263934 - DNA, 213 bp, Klebsiella pneumoniae; identical to SEQ ID NO: 8729

SEQ ID NO: 263935 - DNA, 360 bp, Klebsiella pneumoniae; identical to SEQ ID NO: 5908

SEQ ID NO: 263936 - DNA, 345 bp, Klebsiella pneumoniae; identical to SEQ ID NO: 5912

SEQ ID NO: 263937 - DNA, 840 bp, Klebsiella pneumoniae; identical to SEQ ID NO: 9898

SEQ ID NO: 263938 - DNA, 279 bp, Klebsiella pneumoniae; identical to SEQ ID NO: 9897

SEQ ID NO: 263939 - DNA, 1419 bp, Klebsiella pneumoniae
atggttactatcaatacggaatctgctttaacgccacgtcctctgcgggatacgcggcgtatgaatatgtttgtttcggtagctgctgcggtcgcaggattgttatttggtcttgatatcggcgtaatcgccggagcgttgccgttcattaccgatcactttgtgctgaccagccgtttgcaggaatgggtggtcagtagcatgatgctcggcgcggcaattggtgcgctgtttaatggttggctgtcgttccgcctggggcgtaaatacagcctgatggcgggggccatcctgtttgtgctcggctcgatagggtccgcttttgcgaccagcgtagagatgttaatcgccgctcgtgtggtgctgggcattgctgtcgggatcgcgtcttacaccgctcctctgtatctttctgaaatggccagtgaaaacgttcgcggtaagatgatcagtatgtaccagttgatggtcacactcggcatcgtgctggcgtttttatccgatacagcgttcagttatagcggtaactggcgcgcaatgttgggggttcttgctttaccagcagtcctgctgattattctggttgtcttcctgccaaatagcccgcgctggctggcggaaaaagggcgtcatattgaggcggaagaagtattgcgtatgctgcgcgatacgtcggaaaaagcgcgagaagaactcaacgaaattcgtgaaagcctgaagttaaaacagggcggttgggcactgtttaagatcaaccgtaacgtccgtcgtgctgtatttctcggtatgttgttgcaggcgatgcagcagtttaccggtatgaacatcatcatgtactacgcgccgcgtatcttcaaaatggcgggctttacgaccacagaacaacagatgattgcgactctggtcgtggggctgacctttatgttcgccaccttcattgcggtctttacggtagataaagcagggcgtaagccggctctgaaaattggtttcagcgtgatggcgttaggcactctggtgctgggttactgcctgatgcagtttgataacggtacggcttccagtggcttgtcctggctctctgttggcatgacgatgatgtgtattgccggttatgcgatgagcgccgcgccagtggtgtggatcttgtgctctgaaattcagccgctgaaatgccgcgattttggcatcacctgctcaacgacgacaaactgggtgtcgaatatgattatcggcgcgaccttcctgacactgcttgatagcattggcgctgccggtacattctggctctacactgcgctgaacattgcgtttgtgggcatcactttctggctcattccggaaaccaaaaatgtcaccctggaacatatcgaacgcaaactgatggcaggcgagaagttgagaaatatcggcgtctga

SEQ ID NO: 263940 - DNA, 504 bp, Klebsiella pneumoniae; identical to SEQ ID NO: 9525

SEQ ID NO: 263941 - DNA, 819 bp, Klebsiella pneumoniae
gtgcatccacgtagtgccgacaatattgataatctgaataggtccgcagagtatataaaagaggtctttgtcagtagcggtgccagagttaccgcgcaggacgtccccattgcgggtggcccctacaaaaacattgttgctgattatggtcctgccgatggaccgctgattattattggtgcgcactatgactctgtcagtagttatgaaaatgatcaattgacctatacgccgggcgcggatgataacgccagcggcgtggcaggattactcgaactggcacgtttgttacagcagcaagcaccgaaaactggcgtgcagctggtcgcctatgcgtcggaagaaccgcccttctttcgtagcgatgaaatggggagcgcggtacatgcagcttcgcttgagcgtccagtgagattaatgatagcgctggagatgattggctattacgactctgcgcctggtagtcaggattacccttacccggcaatgtcctggctttatcccgatcggggagactttattgccgtggtcggcagaatgcaggatatcaacgccgttcgtcaggtaaaagcggcattgttgtcatcccgggatttatctgtttattctatgaatgccccagggtttattcccggtattgatttctctgaccacctgaattattggcaacacgatattcccgcagtaatgattactgacaccgctttttatcgtaataaacaataccacttgcccggtgataccgcagacagattgaattatcagaaaatggctcaggtagtggatggggttataactttgttatacaacagtaaataa

SEQ ID NO: 263942 - DNA, 282 bp, Klebsiella pneumoniae; identical to SEQ ID NO: 21470

SEQ ID NO: 263943 - DNA, 1251 bp, Klebsiella pneumoniae
atgattacgggcttttcgccatcatataaaaaaattgttattggtgacgatgaaataacgatgcctggcgacaagattgttaagtttaaacgtgcatcgaaagcaacctatattaacaaatctggtgtgctgacagaggctgccattgacgagccacgatttgaacgtgatggcctgcttattgaggggcaaagaacaaactacatgctcaattcggaaagccctgccagttgggggcgatcgtcaaatatggatgtgcccgaaacagggacggataattttggttttacctatggaaagtttgtctgcaacgattctctgattgggcaaacctcagccattaatatggcatcaattgctgcaacaaagtcagttgatgtctcaggcgataataaacacgtgacaacctcatgtcgttttaaaacagaactgcaggtaaggttgcgtatccggtttgataaatatgacggtagcgcaacaacttttcttggtgatgcgtatattgatacacaaacgcttgaaattaatatgacaggcggtgctgcctcaagaattacagcgagagtcagaaaggacgaagctaccggatggatttttgcagaggcaacaattcaggcaattgatggggagttaaaaataggctctcagatacagtattctcctaagcagagcggggcaaccgtatctggtgactatatttatctggccaccccacaagtagaagatgggccttgtgtatcatcttttattatatcaggagcgacggcggcgacccgcgcaagcgatatagttacagttccaattaagaataatctttataatcttccttttacggttctttgtgaggtacataagaactggtataaaacgccaaatgcagcgccacgtgtttttgataccggcggtcatcaaaccggagcggctattattcttggcttcggtcgttcaacagattacgacggatttccttattgcgatattggaggagctaacagacgggtaaacgaaaacgcatcgcttgaaaaaatggttatggggatgcgtgtaaagtcagagcagtctacgtgctcagtaagtaacgggcatatatccagcgaaacaaaaaccacatggtcctgtattcagaacaccgcaattatccgtattggaggccagactacagccgggttacgtcatttatttggtcatgtcaggaatttcagaatatggcacaaggcattgactgatgctcaggtgggggagtcaatctaa

SEQ ID NO: 263944 - DNA, 384 bp, Klebsiella pneumoniae
atgtacgcaaaatcctttattgcatttgatggcaacggacgtctgaccggcgcacgtactgcacaggccgcaccttatgcccgctacacctgccacctttgcggcagtgcactcagataccacccgcaatacgacactgaatgtccctggtttgaacacgctgacgacgggctgactgagtatggtcatgagtgcccttatgtcaggccggagcgcagagaaatacagttgattaaatgtctgcagcaattcgtaccggatgccttacccgtggtgcgtaaagccagccggcactgcagacaatgtcatcacgattattatggggagcggtactgcacgcacagccataccgggcacttcagtgaggagggggtggcagaatga

SEQ ID NO: 263945 - DNA, 369 bp, Klebsiella pneumoniae; identical to SEQ ID NO: 24296

SEQ ID NO: 263946 - DNA, 411 bp, Klebsiella pneumoniae; identical to SEQ ID NO: 24297

SEQ ID NO: 263947 - DNA, 477 bp, Klebsiella pneumoniae
atgcaacaactttcctttctgcccggagagatgacacccggtgagcgcagcctcattcagcgggccctgaaaaccctgggccgccatcttcatgaacccggcgtggccttcacctccacgcatgcggcacgggaatggctgattctgaacatggcgggactggagcgtgaagagttccaggtgctgtatctgaacaaccagaatcagctgattgccggtgaaaccctcttcaccggcaccatcaaccgtacggaagtccatccccgggaagtgattaaacgcgccctgtaccacaatgccgctgccgtggtgctggcgcacaatcacccgtccggtgaagtcacccccagcaaggcagaccgccttatcactgagcgtctggtacaggcactggccctggttgatatccgggtaccggaccatctgatagtcggtggcagccaggttttctcctttgcggaacacggtctgctttaa

SEQ ID NO: 263948 - DNA, 474 bp, Klebsiella pneumoniae
atgaaaacattgtctcagaacaccacctcttcggtctcagcaccggagactgacctgcaacaactggttgccagcctcgtccctgatgaacaacgtatcagtttctggccgcagcactttggcctcattccacagtgggtgaccctggagccccgtgtcttcggctggatggaccgtctttgcgaagactactgcggtggtatctggaatctgtacaccctgaacaacggtggcgcatttatggcccccgaaccggatgacgatgatgacgaaacatgggtactgttcaatgccatgaacggtaaccgcgctgaaatgagtccggaagctgccggcattgccgcctgtctgatggcgtacagtcatcacgcctgtcgtacagagaattatgccatgacggtccactattaccggctgcgggattacgccctgcagcatccggaatgcagcgccattatgcgcatcatcgactga

SEQ ID NO: 263949 - DNA, 741 bp, Klebsiella pneumoniae; identical to SEQ ID NO: 32691

SEQ ID NO: 263950 - DNA, 129 bp, Klebsiella pneumoniae
atgacaaatgtgattgcttgtattgacggttcaaatgtgacatccgctgtatgtgatgccagtggctgggccgcctttcaactgaatgcccctgtaatcctaggtgatgctgccaacttactgatttag

SEQ ID NO: 263951 - DNA, 573 bp, Klebsiella pneumoniae
atggtggtgtttttaggagagtggttaaagcttattcctatggcggcactggttgccgtgatgatcatggtggctatcggtacattctcttgggattcaatccgtaatcttaagcatcatcctatgtcaaccaaccttgtgatggtggcgacggttgtggtcgtggtcgctacccataacttagcaattggggtatttgtaggtgtattactcgcgtccctattttttgctaataaagtgggacgttttatggtggttaagagtacaacgactgctgctgacactggtcgccattatcaggttattggacaagtcttttttgcttcatcagataagttcagtaattcattcgattttagggaagtggttgataaagtgactatcgacttatctcaagcacatttttgggatattaccgcggtatcggccctcgacaaggtagtgattaaattccgccgcgaggggactgaggttgagttgattggccttaacgaagccagtgccaccatagtcgataaatttggggtacacgataagccagaagaagttgaaaaaatgatgtctggtcactaa

SEQ ID NO: 263952 - DNA, 777 bp, Klebsiella pneumoniae
atggcaagaagtggatttgaagtccagaaagtcaccgtagaggcattatttctacgagaaatacgaacacgctttggtaagttccgtctgggatatttgtgggcgattctcgaaccctctgcgcatttgctgatactgttgggcatttttggttacattatgcaccgcacgatgccagacatctcattcccggtgtttttacttaatggcctgattcccttttttatctttagcagtatcagcaatcgttctgtaggtgctattgaagcgaatcaggggctgtttaattatcgaccagtaaaacccatcgatacgatcattgcgcgtgcattgcttgagacactgatttatgttgctgtttatatattgcttatgcttatcgtctggatggcaggcgaatatttcgaaataacaaactttttacaacttgtgctcacctggagtttgttaatcattctttcatgtggcgtcggcttaatattcatggtcgttggtaaaaccttccctgaaatgcaaaaggttctaccgatacttcttaagcccctttatttcatctcctgcatcatgttccctctgcactcaattcctaagcaatattggtcttatctactctggaacccattagtacatgtggtggagctaagccgcgaggctgttatgcctggctatatcagcgaaggcgtaagtctgaactacctggcaatgttcacattgataactctgttcattggtctggctttataccgaactcgtgaggaggcaatgctgacatcatga

SEQ ID NO: 263953 - DNA, 480 bp, Klebsiella pneumoniae; identical to SEQ ID NO: 9737

SEQ ID NO: 263954 - DNA, 225 bp, Klebsiella pneumoniae
atgtgcacccgcgccaatcaccgtggcgcgtacggtttgcgctggaaactgcacgttcatctcacgcaggcgcggatggtcatgcagcgccgttgccagaagcgggccgatatcggcaaaacagaacggatcggcgggctggtggcgataacattcgcccacgccgccagaaagcgtaatgatttcgggcgtaacacctgcgggcagcaaaccggtttgcattaa

SEQ ID NO: 263955 - DNA, 369 bp, Klebsiella pneumoniae
atgagcgtaaaccacgcgcccctggctgtcggtttccagcaggcgaccaccgacgttgaggcaggcagtgccgctgatttttccggcatcgaacagggcgtagttcgcggtgccaccgccgatgtcgatattcagtacccgacacagccgttgttcagaaagggtttgcgccccggcaccgtgaccggcgatcacggattcgagatgcggcccggcgctggcgacgacaaaatcgcccagcgactgggagagcgtcatcaccgccgggcgagcgttgcgggttttcgcgctttcaccggtgatgatgatggcaccagaatcaacactttccggcgcaatgcccgcagcctgatattgctccaggattaa

SEQ ID NO: 263956 - DNA, 132 bp, Klebsiella pneumoniae
atgaacgccatgatcttcccgatgattgtcggcaagttgatcggcggcgtaacggcgattggcgtggcgatgatgctggtgccaaaagaagacgcgaccgcggccaaaaccgaagtggaggcacaatcgtga

SEQ ID NO: 263957 - DNA, 732 bp, Klebsiella pneumoniae
gtggcttattacagcattggtgatgttgctgaacgttgcgggattaatcctgtcactctccgggcctggcaacgccgctacggtttgttaaaaccacagcgcagtgaaggcggacaccgactctttgatgaagaagacatacaacgcatcgaagagatcaagcgttggataagtaatggcgtccctgtaggcaaagttaaagcattactggaaaccaccagccaggatacggaagatgactggagccgcctgcaagaagagatgatgtcaattcttcgtatggctaatcctgccaaactacgcgcgagaattatttcactgggtcgagagtacccagtagatcaattgattaatcatgtttaccttcctgttcgccagcgtctcgtgcttgatcacaacacctcccgcattatgagcagtatgtttgacggcgcattaattgaatacgcagcagcctcgcttttcgaaatgcgccgtaagcccggtaaagaagccattctgatggcgtggaatgttgaagagagagcacgattgtggctggaagcatggcgtttatcattgtcaggatggcacatttctgttcttgctgatcccattgaagcgccgcgcccggaactgttcccaacgcaaacattgattgtctggacaggcatggcaccaacgagaaggcaaaacgaacttttacaacactggggtgagcaaggttataaagtcatctttcatgccccctaa

SEQ ID NO: 263958 - DNA, 405 bp, Klebsiella pneumoniae
atgcacagtctggtcatcggacagatcaggacggatgagaaatccaatgagattacagctatcccagaacttcttaacatgctggatattaaaggaaaaatcatcacaactgatgcgatgggttgccagaaagatattgcagagaagatacaaaaacagggtggtgattacttattcgctgtaaaaggaaaccaggggcggctgaataaagcctttgaggaaacatttccgctgaaagaattaattaatccagagcatgacagttacgcaattagtgaaaagagtcacggcagagaagaaatccgtcttcatattgtttgcgatgtccctgatgaacttattgattttacatttgaatggaaaggactgaaaaattatacgtggcagtctcctttcggtcaataa

SEQ ID NO: 263959 - DNA, 303 bp, Klebsiella pneumoniae
atgacggtcagatattatatcagctctgctgatttaaccgctgagaagttcgccacagcaatccgaaaccactggcacgtggagaataagctgcactggcgtctggacgtggtaatgaatgaagacgactgcaaaataagaagaggaaacgcagcagaattattttcagggatacggcacattgctattaatattttgacgaatgataaggtattcaaggtagggttaagacgtaagatgcgaaaagcagccatggacagaaactatctcgcgtcagtccttgcggggagcgggctttcgtaa

SEQ ID NO: 263960 - DNA, 327 bp, Klebsiella pneumoniae; identical to SEQ ID NO: 9975

SEQ ID NO: 263961 - DNA, 603 bp, Klebsiella pneumoniae
atgaagaataaggctgataacaaaaaaaggaacttcctgacccatagtgaaatcgaatcactccttaaagcagcaaataccgggcctcatgctgcacgtaattattgtctgacattactttgttttattcatggtttccgggcgagtgaaatttgccgattgaggatttcggatattgatcttaaggcaaagtgtatatatatccatcgattaaaaaaaggcttttcaacaacgcacccgctattgaacaaagaaattcaggctttaaaaaactgtttgagtatccgtacttcttatccgcatgctgagagcgagtgggtatttttatcacgtaaggggaatccactttctcggcaacagttttaccatattatctcgacttccggtggtaatgccgggttgtcactggagattcatccgcacatgttacgccattcgtgtggttttgctttggcgaatatgggaatagatacgcgacttatccaggattatcttggacatcgcaatattcgtcatactgtctggtataccgccagcaatgcagggcgtttttacggcatctgggatagagccagaggacgagagcgtcacgctgttttatag

SEQ ID NO: 263962 - DNA, 150 bp, Klebsiella pneumoniae
atgcgatcctgcgatttacgcattttggaagcggcgaccatctccatcgctttagtgatcttttgcgtgttctggacgcttgcgatcttactacgtatctcttttgcgccggccatgagcttctcctcaatgccttgcggcctgccctaa

SEQ ID NO: 263963 - DNA, 594 bp, Klebsiella pneumoniae
gtgaaagggaaaaccggttctctgactgcgctgccgattatcgaaactcaggcgggtgacgtttctgcgttcgttccaaccaacgtaatctccattaccgatggtcagatcttcctggaaaccaacctgttcaacgccggtattcgtcctgcggttaacccgggtatttccgtatcccgtgttggtggtgcagcacagaccaagatcatgaaaaaactgtccggtggtatccgtaccgctctggcacagtatcgtgaactggcagcgttctctcagtttgcatccgaccttgacgatgcaacacgtaagcagcttgaccacggtcagaaagtgaccgaactgctgaaacagaaacagtatgcgccgatgtccgtagcgcaacagtctctggttctgttcgcagcagaacgtggttacctggcggatgttgaactgtcgaaaatcggcagcttcgaagccgctctgctggcttacgtcgaccgtgatcacgctccgttgatgcaagagatcaaccagaccggtggctacaacgacgaaatcgaaggcaagctgaaaggcatcctcgattccttcaaagcaacccaatcctggtaa

SEQ ID NO: 263964 - DNA, 468 bp, Klebsiella pneumoniae; identical to SEQ ID NO: 28815

SEQ ID NO: 263965 - DNA, 570 bp, Klebsiella pneumoniae; identical to SEQ ID NO: 9967

SEQ ID NO: 263966 - DNA, 174 bp, Klebsiella pneumoniae; identical to SEQ ID NO: 4526

SEQ ID NO: 263967 - DNA, 318 bp, Klebsiella pneumoniae
ttgtccgccagccctgaattcggtgatatctgtcacccatttctcacagggagcttccgctttgaactgccgctgaaggatattttctgcagcgagtcccatatttccccggtaagaccggtatttcttcaggcgcacaggagacttcaggccgagctgttgcatcagttttcgcactgttttgccactgaacttaagacctcttttctgaagctcacaatggatccgccggtacccataacatccccggtgttcatggaagatggaggctatgagctgtttcacatcagcatacttgtccttagccttctgcagtga

SEQ ID NO: 263968 - DNA, 720 bp, Klebsiella pneumoniae
gtgggcacccttgaaacgtccggggtagtcatacacttcatactgcgtgcgctggtagtcctggtgctggccttcctgttcaaaacgtccggcccagccggggcgtttaaaggtgtagtctttggtcaccacggaagatgggcggatttgtgcgctgtagaggaactggctgatgcagagggtgctcacctcggtacgggtgttcgggttccatgggatttcaaaagattcgggcagatggcggactgtgtcgcacagcaccaggctctggtcggtacttttgtaagcatgctcctcataaaagaagatgccttcctccgccgccatccggcacaggaaatcgtaatcagtctcaccgtactggacacaaaactcacgggaaggatgcggctcgctgaacagcggactccattcggtcaccccgttttcctgcaacatcgtgccgaggatgcttttgatgtcctcgttctggaagatacggaagttctggcgcagaccggcacgccacagcggcgggtgcaccttcatgctgtacagcatctggtttttgtcgttctccccgagttcaaaccaggtcaccacgcctttcacccggcgctgtacgtcatcgccctgccataccgtcaggtaggccattttgtccagcacctgcgcaaattcaagggagagaaactgctggctgaccagagagagatcgagggaaaagagcgaagagagtga

SEQ ID NO: 263969 - DNA, 552 bp, Klebsiella pneumoniae; identical to SEQ ID NO: 9934

SEQ ID NO: 263970 - DNA, 567 bp, Klebsiella pneumoniae
atgcgggatcatcacccagttacggctcaggttcgcaccagaaattttctggatacggcccagttccacttcttcgatttcaccaaacttgctgaagtccactttcggccacggcagcatgcctgggataccgccgccagtcaccgccggagccgcttctgcacgtttgatagcttctttcacgtaagcctgaacgtcttcgcgcaggatacgacctttacggccagtgcccttcactttcgccaggttaacgccaaactcgcgtgccagacggcggatcagcggagtcgcgtgaacgtaagcgtcgttttcagcaaattcagatttgccttccgctttcacagccggtgctgctgccggggcttcagcttttgctgccggagccggcgctgccgcttcctgtttcgcaggagctgccgcaggcgctgcgccttcaacttcgaagatcataatcagcgagccagttttcactttatcgccaacgttgactttcagttccttcacgacgcctgcaaacggagccgggacttccatagaagctttatcgccttctacggtgatcagtga

SEQ ID NO: 263971 - DNA, 1293 bp, Klebsiella pneumoniae
atgcgcgatgatgtcgcattccagattatcaatgacgaattatatcttgatggcaacgctcgtcagaacctggccactttctgccagacctgggacgacgaaaatgtccataagttgatggatttatccattaacaaaaactggatcgacaaagaagaatatccgcaatctgcagccatcgacctgcgttgcgtaaacatggttgccgatctgtggcatgcgcctgcgccgaaaaatggtcaggccgttggcaccaacaccattggttcttccgaggcctgtatgctcggcgggatggcgatgaaatggcgttggcgcaagcgtatggaagctgcaggcaagccgaccaacaaaccaaacctggtgtgcggtccggtgcaaatctgctggcataaattcgcccgctactgggatgtggagctgcgtgagatccctatgcgccccggtcagttgtttatggacccgaaacgcatgattgaagcctgcgacgaaaacaccatcggcgtggtgccgactttcggcgtgacctacaccggtaactatgagttcccgcagccgctgcacgatgcgctggataaattccaggccgacaccggtatcgacatcgacatgcacatcgacgccgccagcggtggcttcctggcaccgttcgtcgccccggatatcgtctgggacttccgcctgccgcgtgtgaaatcgatcagtgcttcaggccataaattcggtctggctccgctgggctgcggctgggttatctggcgtgatgaagaagcgctgccgcaggaactggtgttcaacgttgactatctcggtggtcagattgggactttcgccatcaacttctcccgcccggcgggtcaggtaattgcacagtactatgaattcctgcgcctcggtcgtgaaggctataccaaagtacagaacgcctcttaccaggttgccgcttatctggcggatgaaatcgccaaactggggccgtatgagttcatctgtaccggtcgcccggacgaaggcatcccggcggtttgcttcaaactgaaagagggtgaagatccgggatacaccctctacgacctctctgaacgtctgcgtctgcgcggctggcaggttccggccttcactctcggcggtgaagccactgacatcgtggtgatgcgcattatgtgtcgtcgcggcttcgaaatggactttgctgaactgttgctggaagactacaaagcctccctgaaatatctcagcgaccacccgaaactgcagggtattgcccagcagaacagctttaaacatacctga

SEQ ID NO: 263972 - DNA, 549 bp, Klebsiella pneumoniae
gtgaaaacggggtccgaagccatccgggcgctggccatgcagatcccggcgtttcgtcagaaactgagtgacggctggtatcaggtacggattgccgggcgtgatgcaggtgaaactgaattatcagcccgtcttaatgaaccgctggcaaatggtgccgtgatccacattgtgccgcgtctggcgggagccaaaagtggcggtctttttcaggctgtgctgggggcggcgctgattgcggtggcatggtggaaccctgcaggttggttgggggctgccgcaattacaggaatgtatggtgcgggggccagtatggtgctcggcggtgtggctcagatgctggcaccgaaagccagaactccccgcacacagacaacggataacggcaaacagaacacctatttctcctcactggataacatggttgcccagggcaatgttctgcctgttctgtacggtgaaatgcgcgtggggtcacgggtggtttctcaggagatcagcacggcagatgaaggggacggtggtcaggttgtggtgattggtcgatga

SEQ ID NO: 263973 - DNA, 675 bp, Klebsiella pneumoniae
gtggtgagaacgccggagggggacagatattttccctgcgtgaatatctccggtgagccggaggcgtatttccggatgtcgccggaggactggctgcgtgcacaaatgcagggggaggttgtggcactggtccacagccaccccggtggtctgccctggctgagtgaggtcgacaggcggctgcaggtgcagagtgatttgccgtggtggctggtttgccggggagcgattcacaagttccgctgtgtgccacatctttccgggcggcgctttgagcacggggtgacggactgttacacgctgttccgggatgcataccatctggcggaaattgagatgccggatttttatcgcggggatgactggtggcgtaacggccagaatctctatctggataatctggaggccacagggctatatcaggtgccgttgtcagcggcgcagccgggcgatgtgctgctgtgctgttttggttcatcggtgccgaatcatgccgccatttactgtggtgacagcgagctgctgcaccatattcctgaacaactgagtaaacgagagaggtacaccgacaaatggcagcgacgcacacactccctctggcgtcaccgggcatggtacgcatctgcctttacggggatttacaacgatttggccgccgcatcgaccttcgagtga

SEQ ID NO: 263974 - DNA, 600 bp, Klebsiella pneumoniae
atgcgtaaattatgtgctgttattctgtccgcagtagtctggctggtcgccgctggtacgccagcgagcgcagcagagcatcagtccacactaagcgccgggtatcttcagacccatactgatatgcccggcaacgatgacctgaagggcattaacgtgaaataccgttatgaatttacggacacgctggggctggtgacgtcattcagttatgccaatgccaaagatgagcaaaaaacgcattacagcgatacccgctggcatgaagattcagtgcgtaaccgctggttcagcatgatggcggggccgtctgtacgcgtgaatgaatggttcagtgcttatgcgatggcaggtgtggcttacagccgtgtttcgactttttccggggattatctccgcgtaactgacagcaaggggaaaacgcacgatgtgctgaccggaagtgatgacgatcgccacagcaatacgtctctggcgtggggagctggcgtgcagtttaacccgaccgaatccgtggccattgatattgcttatgaaggctccggcagtggtgactggcgcactgacggtttcatcgtgggtgtcggttataaattctga

SEQ ID NO: 263975 - DNA, 1029 bp, Klebsiella pneumoniae
atggcgcatattgtaaccctaaataccccatccagagaagattggttaacgcaacttgccgatgttgtgaccgatcctgatgaacttctgcgtcttttgaatatagacgcggacgaaaaactgttggccggacgcagcgccaaaaagctttttgccctgcgtgtgccccgctcatttatcgatcgcatggagaaaggcaatccggacgatcctcttttgcgtcaggtacttacctcgcaagatgagtttgtcgtcgcgcccggattctccaccgacccactggaagaacagcacagcgtagtgcctggtttgttgcataaataccacaaccgggcgcttttgctggtcaaaggcggctgcgcggtaaattgccgctattgcttccgtcgccacttcccctatgccgaaaatcagggcaacaagcgtaactggcaaactgcacttgagtatgttgctgcgcatccggaactggacgagatgattttctccggcggcgatccgctgatggcgaaagatcacgagctggactggttgctcacacaactggaagccatcccgcatatcaaacgtctgcggattcacagccgtctgccgattgtgatcccggcacgcatcacagatgcgctggttgaacgcttttcacattctacgctgcaaatcttgctggtgaatcacatcaaccatgccaatgagatagatgaaacattccgtcaggcgatggctaagttgcgccgggtaggcgttactttgctcaaccagagcgttctgttacgtggcgtgaacgataacgcacaaacgctggcaaacctgagtaatgcgttgttcgatgccggcgtgatgccgtattacctgcatgtgctcgataaggtacagggcgcggcgcattttatggtgagtgatgacgaagcacggcagattatgcgtgagttgctgacactggtgtcgggatatctggtgcctaaactggcgcgagaaattggcggcgaacccagcaaaacgccgctggatctccagctacgccagcagtaa

SEQ ID NO: 263976 - DNA, 486 bp, Klebsiella pneumoniae
atgcaagtttttatcatgcgtcacggcgacgcagccctcgatgccgccagtgattcggttcgtcctctgactactaacggttgtgacgaatctcgcctgatggcgaactggctgaaaggtcaaaaagtggaaatcgaacgcgttctggtgagcccgttcctgcgagccgagcaaacactggaagaagtaggggattgtctgaacctgccttccagtgcagaagttctgccggagttaacgccctgcggcgatgttggtctggtcagtgcctatttacaggcgttgaccaatgaaggtgttgcttcggtactggtgatctcccacttacccttagtcgggtatctggttgctgagttatgtccgggcgaaacgccgcctatgtttaccacctcggccattgccagcgtaacgcttgatgaaagcggaaacggcacattcaactggcagatgagcccgtgtaatctgaagatggcaaaagcgatttaa

SEQ ID NO: 263977 - DNA, 276 bp, Klebsiella pneumoniae
atgttgatgctgaatgaagcagtacgttgtctggacgagcaggttatccgtagcgtgcgtgacggagatattggcgcggtatttggcattggttttccgccatttctcggtggtccgttccgctacatcgattctctcggtgcgggtgaagtggttgcaataatgcaacgactggccacgcagtatggttcccgttttaccccttgcgagcgtttagtcgagatgagcaagcgtggggaaagtttttggaaaacaactgcaactgacctgcaataa

SEQ ID NO: 263978 - DNA, 291 bp, Klebsiella pneumoniae
gtggtcgatatcatcgacttcgcctttaccgttacggatatcaatgagctttttcataacatcaatgatgtcgtctttgctcaggataccggaaccttcgatttcttcgcgcagcagagaacggttgaacttcatacgaccaaccgcagacaggtcatagcggtcttcggagaagaacaggttctcgaacaggctttcagctgcttcacgagtcggcggctcgccagggcgcatcatgcggtagatttctaccagtgcgctcagacggtcgttagttgggtcgacacgtaa

SEQ ID NO: 263979 - DNA, 822 bp, Klebsiella pneumoniae
atgaaactggaagatttaccgaaatactaccccccaaaatcccctggcctgaccgatgcatcggcctcaacgtcaaaagatgcgctgagtatcactgatgtgatggccgcgcagggcatgacacagaatcgggctgagatgggtttttctgcgttcctggggaaaatgggcatcagtatgaatgacagggcgcgggcaacagaattactggcagattatgcactcagtcggtgcgatcgtgtggcggcgttgagaaaacttccggcagaaataaaaccggtagtgatgcgcattatggcttcgtacgcttttgaggattatgcccgcagcgcagcgagtaaaaagcagtgcccttgttgctatggggaaaaatttattgaaagcgtagtttttacaaacaaggtccagtatccggatggtaagccgccggtatgggcaaagtgtacgaaaggtgtgtattcgtcttactgggaagaatggaaaaaagtcaaggaagtggtaaaagttgcctgtccggagtgtggcggaaagggtgaggtttccaccgcctgtaaggattgccgtgggcgtggtgtcgccattcatcgtgaagagtcggtaaaacgtggtatgcctgttatcagagactgccagcgttgtggtggtcgtggctatgaaagactaccatcaacggaggcatttaatgctatatgcgaggtgacaaaccagataacacgcgcgtcatgggaaaaaacagttaagaaattctatgatgcgctggtgacccggtttgatattgaagaagcatgggctgagcggcagttaaaaaaggtaactaggtaa

SEQ ID NO: 263980 - DNA, 531 bp, Klebsiella pneumoniae
gtgacactgatctccaccgtgccatccggctttgtggtcatcgtcggagcaaccgttgcgctgttgcctgccaacacgctgaccgtctgtccggcaagcgtattaccgttagcatcggtgaccttcacctgcagcgtattcgccgtcgaaccgtctgcctctgaaccatccttaatgaccaccagatcagcgatcttcgccgtgctgacatcggcgataaatgtcacgttccggctcagactgctgttgttgatgctggctgtgaccgcactgatccccgccgtctggctggtaacagagatctccactgtaccgtccggctgcgtggtgaccgtcggggcgaccgttgcgccgttgtccgccaacacgctgaccgtctgcccggcaagcgcattaccgaatgcatcggtcaccctcgcccgcagcgtgttcgccattgcaccgtctgccactgagtcgtccttaatgaccaccaggtccgcgatcttcgctgtcctgacatcggcgataaacgtcacgttccggctctga

SEQ ID NO: 263981 - DNA, 327 bp, Klebsiella pneumoniae; identical to SEQ ID NO: 10004

SEQ ID NO: 263982 - DNA, 672 bp, Klebsiella pneumoniae
gtggataaggttttagattcagccatcctttcttcggcaaataaaagaaagggtatccttgctattggcgcacatcctgatgatatagaattgggctgtggcgcgtcgcttgctcgtcttgcgcaaaaaggaatttatatcgcagccgtggtgatgactaccggcaactctggcacagatggaataatcgatcgccatgaagaatcgcgcaacgccctaaagatattagggtgccaccaaactattcatcttaattttgctgacacccgcgcgcatttacagctcaatgatatgatttccgccctggaagatatcattaaaaatcaaattccttctgatgttgaaatcatgcgggtatataccatgcatgatgccgaccgccatcaggatcatctcgctgtttatcaagcttcaatggttgcctgccgcactattccacaaattctcggctacgaaaccccgagtacctggctttcatttatgcctcaggtttttgaatccgttaaagaagaatatttcacagtcaaacttgctgcattaaaaaaacataaaagccaggaacgacgcgattatatgcgtcatgatcgcctgcgtgcagttgcacaatttcgcgggcaacaggtcaatagcgatctgggtgaaggctttgtaattcataaaatgattctttga

SEQ ID NO: 263983 - DNA, 675 bp, Klebsiella pneumoniae
atgatcttcagcgcaataaaagaaatatataatggagatcctgattttattttcgataaaatatcacgtaacctcatacatacggtaacaaaatccgatgagaacgggataagcaaaccaacggacttatttacctggcacggtaaagataaaaaatacaacactctcgccattgtaattaaaaatacaaacggaaacgattatttatctctcggttactacgatcaggacaactaccatattaaaagaggaattcgtattaatggtgatagtctcacacaatattgtagtgaaaacgccaggaatgcttcagcgtcatttgaaagcaataaagctctcatggcagaattatttgcaacaggtataaatcatcaagttgtaaacgaactcaacggggaaagactgaaagaaccaaacgaagtttttaaacgttatggtcgagcaataagatataattttcaagtggacaatgcaaaatatagacgcaataatgtaaaagaaatagtttctactttattcgataacgaagttaacactgaccattctcaaaatatatatgtgcactataagaaactcgaaggtaaaattgaagaaaggcttcaaaattgccagacggaatatcaaaatgaaattaatcaactatctgcgttaggtgttaattttgatgatgtttaa

SEQ ID NO: 263984 - DNA, 321 bp, Klebsiella pneumoniae
atgcgcactcgtgagctggagaaactggaaaacagcctgggcggtatcaaagacatgggcggtctgccggacgctctgtttgtaatcgatgctgaccatgaacacattgctatcaaagaagcaaacaacctgggtattccggtatttgctatcgttgataccaactctgatccggacggtgttgacttcgttatcccgggtaacgacgacgcaatccgtgctgtgaccctgtacctgggcgctgttgctgcaaccgtacgtgaaggccgttctcaggatctggcttcccaggcggaagaaagcttcgtagaagctgagtaa

SEQ ID NO: 263985 - DNA, 750 bp, Klebsiella pneumoniae
gtgctgataagaacccagaacgtcgccttccagcgcagcaacgcggcgaatgttgatgttttcaccaattttcgctaccagcgcaacacgttcttcttcgaactgtgctttcagaacttcaacgtcagtgattttgccagcaacagctgcgtccagaactttgtctgcgaacgcctggaaaccagcgtcttttgcaacgaagtcagtctggcagttaacttccagaatgatgccgtagttgccgtcgattttggttttgatcacgccgtcagcagcaacgttgcctgcttttttcgctgctttaatagcaccggacttacgcatgttttcgattgccagctcgatgtcgccgttagcttcagtcagtgcttttttgcaatccatcatgcctgcgccagtacgctcacgcagctcttttaccagggatgcggtaatttcagccattctaaaatcctcggagatgtgatctgcccggcattaaaccgcacagatataaaagtgaaaaagggggccatatgcaggccccctaaccaaacgtgtactacctggtctataagggctctcccccttcatatttcgcgccgcagatgcgttgtcttcgctcgctcatcccggtcacttactgatgtaagctcccgggaattctcgagcttgccgcctttctgcaactcgaactattttgggggagttatcaagccttattactcagcttctacgaagctttcttccgcctgggaagccagatcctga

SEQ ID NO: 263986 - DNA, 276 bp, Klebsiella pneumoniae
atgatagtggaaatcaccattaggatatttatcgatataataaaaatgcatcaaggctttttggaatgcattgacgtcaaaaactatcgcatcgccttttttattagagtgagtccattttcccatattgctttggatatgttcactgaagtcctgccagtatgcgctcattatctcaacgctattcgcataaatttcgaggtagtcgctaccgagcacactcatcaaatcagcaatatcactgcatatatatttatcacttttaaattcgtttga

SEQ ID NO: 263987 - DNA, 795 bp, Klebsiella pneumoniae
atgaatgacagtgctgaaggtttttgtaagataataagtggtttcccagattataatgaaaaaactgagagatatgatttgataataaaaacatggtgtggagagtctggctggctaccttctgaatatgaatataacgaatatattgattcaatgagagaactggaaccaaatgtcccgcaattgctggactctgcaaggatatcatgctttacgaatacggcgttaaaccctacaatgtgggctcattatgctaacaacagaacaggtatatgtatagaattcgatcaagacaaaataagagaactagaggatatctatatctttgacgtcaaatataaagatcgccctccgactattgatactgcagtactaacattaatagctgatcaggtgaactataatcatgatgcaatttatgatgattatcaagaaaagttcaaacatctttatgaacaagcatttgacgagggaagaaatttgcttttggaaatttacaatggaatattggcaactaaatctcaagaatggtcttatgaacaagaaaaacggctaatatatattttatccttctcacaagaagacaaattggcaaaaaaatataaaactggcataaacatatcactccctgaaggatgcattaaaagtgttatcctaggtgagaagacaagtgagcatgataaaaaacttatagtttcagctataaaaaaacattctaaacacattaagttgaagagagctacaataacacaaggcgaatatttattatctattcgtgatgaagtttttagctga

SEQ ID NO: 263988 - DNA, 795 bp, Klebsiella pneumoniae
atgacattaccaacaactatttattcatttcctgcatattcaccccgtttttcgtccaccgacaaaccagtaaaattaaaatttcatcaatacgcacgcgctacattactttcaaatcgtggaagagaccataattgcgatggcagacatactgttgagatccacaaactagatctctcagactggcaagcattcaataagttagcgacgaggtgtaatacttacgatggaataacaatgaatggtgataattcttttggatggaaccatgaagctacattagataatattcacgcccagaaatacaataaagcttacgcgggtgcgaggttaaccgcagaactgaaatatttattgcaagatgtcgaatccttcgaacccaacagtaaatacacaatacacgaggttgttttgggtccaggttatggtactccagactataccggccaaacgataggatacgttgtaacccttcctgcccaaatgcctaattgctggtcatctgaactaccaacaatcgatctttatatcgaccaacttcgcactgttacaggcgtttctaatgccctcggattcatcattgctgcattgctaaacgcgtattctgatttaccccatgatttgaaaattggtctgcgttccttatcaagttcagcagcaatctactcgggtttgggtttcgagcgagtgccgcagggccgagacataaggtgcgatcatatgcatctaacgccagcaaaccatcctgaattatggacacaagagaatggtgaatggatctacttgcgaaactaa

SEQ ID NO: 263989 - DNA, 375 bp, Klebsiella pneumoniae
gtggtgaaaccggatgctgcaattcagagcggcagcaagtgggggacagcagaagacctgaccgccgcagagtggatgtttgacatggtgaagaccatcgcgccatcagccagaaaaccgaattttgcagggtgggctaacgatatccgcctgatgcgtgaacgtgacggacgtaaccaccgcgacatgtgcgtgctgttccgctgggcatgccaggacaacttctggtccggtaacgtgctgagcccggccaaactccgcgataagtggacccaactcgaaatcaaccgtaacaagcaacaggcaggcgtgacagccagcaaaccaaaactcgacctgacaaacacagactggatttacggggtggatctatga

SEQ ID NO: 263990 - DNA, 372 bp, Klebsiella pneumoniae
atgtgtcagtggttctggacaagactgaaacaaaaacaggatgaaaaacatccggtacataacccagtgacccggtggttcataccatcttcaacgaaagaatattatcttgcctctcttgtcgcctttgctttatggaaagaagcgcctgataccattgaactgttcagaacacgaataaatcatgcctggcatcagaaaaaacaaaaggacaaatatcggagtgatggtaaaaaggccattaatatacatataagaagcaatgtgaaagaaatgcttgatgagctcagaactgtttacggtctgagaacaggagagttttttgaaatgctgattacagagaaatatcttgaacacaagcgaaggaagtaa

SEQ ID NO: 263991 - DNA, 183 bp, Klebsiella pneumoniae
atggtcttccttcgacagataaatagtagtctaggtaaagaaagtcgcaagttcgtcagttttcaaccagagaaaactctcttcaggcagtattgcctgccctgcaataatttcaagttcattaatttctttgctgagagcttcttctgcagtcgaaccaaaaacaccaaaagaattgtttga

SEQ ID NO: 263992 - DNA, 330 bp, Klebsiella pneumoniae
atgaaaaccttccgctggaaagtgaaacccggtatggatgtggcttcggctccttccgtcaggaaggtgcgctttggtgatggctattcccagcgcgcgcctgccgggctgaatgccaacctgaaaacgtacagcgtgacgatttctgtcccccgttgggaggccacggcgctggaatcgtttctggcagagcacggaggctggaaagcctttctgtggacgccgccttatgactggcggcagataaaggtgacctgcgcaaaatggtcgtcgcgggtcagtatgttgcgtgttgagttcagcgcagagtttgaacaggtggtgaactga

SEQ ID NO: 263993 - DNA, 261 bp, Klebsiella pneumoniae
gtggggaatctctaccggctgatgcgcggctatgccaccggtggttatgtcggtacaccgggcagtctggctgacagccggtcgcaggcgtccgggaagtttgagcagaataaccatgtggtgattaataacgacggcacgaacgggcagataggtccggctgctctgaaggcggtgtatgacatggcccgcaagggtgcccgtgatgaaattcagacacagatgcgtgatggtggcctgttctccggaggtggacgatga

SEQ ID NO: 263994 - DNA, 618 bp, Klebsiella pneumoniae
atggttgtatttaattatacgaagataaataaacaattagagaaagtgttgggggggatagcacgaaaacaaacctcagaaagaaataaaggcggtctctataccagaataaaaaaagaaagtgactttctttctatggatagatttatggtggaaatagaaaatatcataagacctgaaaggtttcctacatcaatttatccagtcttttcacattcatttattgaacgagagcttccgctactgaatcttgctcgatcacagtataaaagagcaataagtaaaagagtggcgaattcaattttttatactttgcaaaaaactaacgtggcattatggctatatcttgaaatgtttgctctggtggcattcattaaactgtatacaggaaaaggttttgaattcataaagaacatgtgtgtatttatcgattatgagaaagggataataaaatccacacatgaagaactgctgggtgaaattaagcgtaacattcaagtgaatttgaaggtgaatcctgataattttccagagttaatagacatatacaattcatgctttagtgaaaatatattgtcatatgatattcaggatggtaattttaaatggcgctcatga

SEQ ID NO: 263995 - DNA, 786 bp, Klebsiella pneumoniae; identical to SEQ ID NO: 9891

SEQ ID NO: 263996 - DNA, 561 bp, Klebsiella pneumoniae
atgctttacttacccattgatttaattgagagtttccaaaaactttatacggtaactgatcaaatacgtaacaaaacaagtttctttttacctcagaatcctgagttaatatattgttgggagcaactaaaaacatctgtttcccgaggcttctcaactaaaattcaggagcacttagcaatgggcgttctactttcgttaggagtgaatcatgttaatcatttacttttatcatatagtaaacaatcattgataagtcgttgttataacctgctgctatccgaacccggcacaaaatggacagcaaacaaggttgctcgatatctctacatttctgtttctacattacatcgccgtctagcaagcgagggggtaagtttccaaagtatactggacgatgtgaggttaaataatgcgttgtctgctatacaaacgacggtaaaacctataagcgagattgccagagaaaatggttataagtgtccttctcgttttactgaaagatttcataatcgttttaatataacaccaagagagataagaaaagcttccagagagtaa

SEQ ID NO: 263997 - DNA, 516 bp, Klebsiella pneumoniae
atgagcgagattaattatcaggaagggcatgaaacggcagggcaggcaaaaccagttgcatggcgatatcgctacgtgaaaaaagacgttacagactttcaggggaagccgtgggctggtgactggaaatatgtaccgacaaaagaggattgtaacgacaggccgaactatgaaattcaggccttattcatcggcccgccagtcccggtgacatcagaaggactggttaaagccgtgcgcttttatgaacaggtaaagcgtgagaatccgccagtcgaaacaggagcatggaaggatgctgttgactgggtgctcagagaggcctgctgcgctgccattctgggtaaagccgacaatccaccagcatccggcaatcaggttagcgaattaacaatgtgggttaaacgactggtcagtcaactgaaaaaagctcagccggactgtaaattaccggagaaggcgatggattacctgaaacgaaatggactgataagcgtggaggatgttttacgatga

SEQ ID NO: 263998 - DNA, 180 bp, Klebsiella pneumoniae; identical to SEQ ID NO: 18953

SEQ ID NO: 263999 - DNA, 567 bp, Klebsiella pneumoniae
gtggcggttgtaatacaggccggactcctcatcatactgctgacccggcaggcggatgagctgctgcagctgatgcgggttctcttcattcagctggttaccccattcatcgtattctgcgtaccacgctgttgtcccttccgtgctgacaagcgccagcggcaggccgcgatggtcgcagtggtacaggtggatttttcgcgccggcgtgtacaccgggtccatctggttttgtatctgctccaccgtcaggccgcacgatgccagccagcggcggctttcctcactcacccggtcagccaggatttcactttccagccggtcgagcatctgcaccagcaccggcgggaacaccacactgccaccgtcttcgccgccggactgctgaagggcatccgccaggctgcggcgctgcgttttcgccagctcaccggtggcggtttcaactctgatgagtggcgtgaagctccccggctgataaaccgtctggatgcgggttctgtcgttctgtatcgtggtcagccggtcgccgtcccagccgtaccaggtcacttccggtttccatga

SEQ ID NO: 264000 - DNA, 633 bp, Klebsiella pneumoniae; identical to SEQ ID NO: 9900

SEQ ID NO: 264001 - DNA, 171 bp, Klebsiella pneumoniae
atgtcacaaaaagggcgattaaagcaggttttgatggcattgaacttcatggtgcgcacggattccttctacagaatttcttctcccctctatttaaccagcgtaatgaccgatggggaggagatcttgaaggacgtatgcgcttcccgctggccgtattacaggaagtaa

SEQ ID NO: 264002 - DNA, 693 bp, Klebsiella pneumoniae
atgatttcccgctatttcactcactccttaaatgtagtgaaatattataactcgccgcgtcaatataactttttcttaaccagaaaagattcagtcgttcttaatgaagtactcaatcggtttgttgatgctttaacaaatgaagttcgctatgaagtatcacaaaattggcttgatacaggaaacctggcctttctgaacaaaccattagaactcactgaacatgaaaaacagtggattaagcagcatcccgatttaaaggtgctggaaaatccttactcgccaccctattctatgacagatgaaactggctcagttcggggcgtgatgggtgatattcttaatattattaccttgcaaacaggtttaaatttttctccgatcaccgtttcacacaatattcatgcggggacacagcttaaccccggtggatgggatatattgcccgccgctatttatagtgaagatagagaaaataatgttttatttgctgaagccttcataacaacgccttacgtttttgtcatgcaaaaagcgcctgacagtgaacaaacattaaaaaaaggaatgaaagttgccattccctattattatgagcttcattcgcaattaaaagagatgtatccctgtctcttatacacatctccgagcccacgagacgctacgctatctcgtatgccgtcttctgcttga

SEQ ID NO: 264003 - DNA, 573 bp, Klebsiella pneumoniae
atgctgattggctacatacgtgtgtcaacaaatgaccaaaacacagatttgcaacgcaatgcattaatgtgcgcaggatgtgaacagatttttgaggacaaaatgagcggaaccaagtcggaacgaccaggcctgaaacgcgctttaaagtgccttaaaagaggggatacattggtggtctggaagctggatcggttgggtagaagaatgaaacacctcattgctctcacagaagagctacgcgcaaaaggtgtcaattttcgcagtctgacggattcaatcgataccagcactccgatgggaaggttcttttttcatatgatgggtgcactggcagaaatggagcgtgaactgatagttgagcgcacgctggcaggactggctgctgcgcgagcacaaggaagagttggaggacgtcgcccgaaactgacgaaggagcagcatgagcagatcgcaagattgctccagaaagggtatgacagaaagcggctggcaattatctatgatattggactgtcaacgatctaccgctaccaccctgttgggactgtcataacgcaacctgaaatgtaa

SEQ ID NO: 264004 - DNA, 597 bp, Klebsiella pneumoniae; identical to SEQ ID NO: 1985

SEQ ID NO: 264005 - DNA, 357 bp, Klebsiella pneumoniae; identical to SEQ ID NO: 19228

SEQ ID NO: 264006 - DNA, 183 bp, Klebsiella pneumoniae; identical to SEQ ID NO: 9298

SEQ ID NO: 264007 - DNA, 177 bp, Klebsiella pneumoniae; identical to SEQ ID NO: 16185

SEQ ID NO: 264008 - DNA, 261 bp, Klebsiella pneumoniae
gtgcagtttacaactgaccaacgtaagccctggtatatacaggcactgcgtcccgatggttcgccattaacctttggctatgacgtactggatctccaggaaaacaatattggagtcgttggccagggtagtcgcctttttattcgcgtagatgaaattcccactggcataaaagttgctctcaatgatgaacagaacttattctgtactattacttttcaacacgttatcgatgaaaacaaaacatatatatgccagtaa

SEQ ID NO: 264009 - DNA, 231 bp, Klebsiella pneumoniae; identical to SEQ ID NO: 9512

SEQ ID NO: 264010 - DNA, 279 bp, Klebsiella pneumoniae; identical to SEQ ID NO: 9511

SEQ ID NO: 264011 - DNA, 597 bp, Klebsiella pneumoniae
gtggtagaagtcgttaccctcacgagtacgctcacctacgcccgcaaacacagagtaaccggagtgctcgatcgcgatgttacggatcagctccatcatgtttacagttttacctacacccgcaccgccgaacagaccaactttaccgcccttggcgaacggacacatcaggtcgataactttgatgccggtttccagcagttcctgagagctggacagctcttcataggacggtgccgcgcggtggatagcccaacgctcttcttcgccgatgtcgcctttcatgtcaaccggttgacccagtacgttcatgatacgacccagcgttgctttacctaccgggacttcgatcgggtgctcgaggtcttttacatccagaccgcggcgcagaccatcagaagaacccatggcgatggtacgtacgataccgccgcccagctgctgctgaacttccagcaccagaacttcattaccattctgtacctcaagggcttcgtacacgcgtggtacggcatcctgagggaactcgacgtcgaccacggcgccgattacctggacaatctttccagtagccatcttaaatcctctacgaaataa

SEQ ID NO: 264012 - DNA, 171 bp, Klebsiella pneumoniae
gtggttgaaaacctggccagcgagcaggccgcccgtatggtggcgatgaaagccgcgaccgataatggcggcagcctgattaaagagctgcagttggtatacaacaaagctcgtcaggccagcattactcaggaactcaccgagatcgtctcgggggccgccgcggtttaa

SEQ ID NO: 264013 - DNA, 237 bp, Klebsiella pneumoniae
atgcatcaaaattcagtgactttagattctgcgggagcaatcactcgttactttgcaaaagctaacttgcctactcagcaggaaactctcggggaaattgtgactgagattttgaaagatggacgtaatctgagtcgaaagtcgctttgtgccaaacttctatgccgactggaacaagcgacaggggaagaggaacagaaacattataatgcactaattgggttgctttttgaataa

SEQ ID NO: 264014 - DNA, 360 bp, Klebsiella pneumoniae
atgttcaaggagaggatgacgccagatgaacttgccagactgaccggctatagccggcagaccattaataaatgggtacgcaaggaaggctggacaacgtcaccaaaacctggcgtccagggtggcaaagcccgactggttcacgtcaatgaacaggttcgtgaatatattcgcaatgctgaacgtccagaaggtcagggagaagcgcctgccctgtctggtgatgcgccgcttgaagtgttgctggtgacactggcgaaagagatgacgccagttgaacaaaaacagtttacatccttgcttctgcgggaagggattatcggattattacaacgcttagggattcgcgatagcaaataa

SEQ ID NO: 264015 - DNA, 675 bp, Klebsiella pneumoniae
gtggtaagcacgccggagggggaaagatatttcccctgcgtgaatatctccggtgagccggaggcttatttccgtatgtcgccggaagactggctgcaggcagaaatgcagggtgagattgtggcgctggtccacagccaccccggtggtctgccctggctgagtgaggccgaccggcggctgcaggtgcagagtgatttgccgtggtggctggtctgccgggggacgattcataagttccgctgtgtgccgcatcttaccgggcggcgctttgagcacggtgtgacggactgttacaccctgttccgggatgcttatcatctggcggggattgagatgccggactttcatcgtgaggatgactggtggcgtaacggccagaatctctatctggataatctggaggcgacggggctgtatcaggtgccgttgtcagcggcacagccgggcgatgtgctgctgtgctgttttggttcatcggtgccgaatcacgccgcaatttactgcggcgacggcgagctgctgcaccatattcctgaacaactgagcaaacgagagaggtacaccgacaaatggcagcgacgcacacactccctctggcgtcaccgggcatggcacgcatctgcctttacggggatttacaacgatttggtcgccgcatcgaccttcgtgtga

SEQ ID NO: 264016 - DNA, 261 bp, Klebsiella pneumoniae
gtgcatagtgaaaaccaaagtaaaggtgtgcattatgcaaaatcacagcgtctcttagaaattaatcatgcgcacttgcagttaatggaatccttattggatgaagggaagaaacacaatatttttaagccagatatcgacccattgcaggtgtatattaatattgctgcgcttgggggatattatttgatcaaccagcatacgcttggcctggtttatccggtgcgccgtaaaaccccgtccttcagggcggggatataa

SEQ ID NO: 264017 - DNA, 552 bp, Klebsiella pneumoniae
atgtccgcttttaaaaagtcacttcttgttgctggcgtagcaatgattctttccaataacgtgtttgctgatgaaggtcacggtattgttaaatttaaaggtgaagttatctctgctccatgttctattaaaccaggtgacgaagatttaactgtaaatctgggtgaagtagcagataccgtactgaaaagcgatcagaaatctttggctgaacctttcactattcacctgcaggactgcatgctgagtcagggtggaactacttattcaaaagcgaaggttactttcactacagcaaataccatgacgggtcagtctgatcttctgaaaaataccaaagaaactgaaatcggcggcgccactggcgttggcgtacgtattctggacagccagagcggcgaagtaactttaggtactccggtagtaattacgttcaacaataccaacagctatcaggaactgaatttcaaagctcgtatggaatccccaagcaaagatgccaccccgggcaacgtttacgctcaggctgactacaagattgcttacgagtaa

SEQ ID NO: 264018 - DNA, 201 bp, Klebsiella pneumoniae
atgctgatggcggggattcagttcaccactggtgagcatgagctccagttgtttcatcagcagcggaaaggcctggtccagagggtacgcatccgcatctctgaaccggcctctgttaccggcacggtcggcaaggtaatgcaaccggttaccctcctgcaccagacgggcgccgaaacagggcgtcactgtgcagggtag

SEQ ID NO: 264019 - DNA, 402 bp, Klebsiella pneumoniae
atggatgccgtagtttccattggagaaaatgttcaaattaatgactatgttcacatcgcggctattaataatgtcattattggtagagatacattaatagcaagtaaagtatttattagtgatcataatcatggtattttttctaaatccgatatccatagttcaccaactattattccttcgtctaggccccttgaatctgcacctgtgtatattggagagcgtgtgtggattggcgaaaatgtgacaatattaccaggtgcgtgtataggtaatggtgtagttattggcgcaaacagtgttgttcgtggtgagattcctaataatgtgatcattgctggtgttccagctaaaattgttaaaaaatataactatgagcgtatgcaatgggaaagaatatag

SEQ ID NO: 264020 - DNA, 543 bp, Klebsiella pneumoniae
atgtcggttttccagttccggaaaacgccgctgcaccgacagggggatcccgtcgagaatactggcaatttcacctgcgatccgcgacagcacgaaagtacagaatgcggtttccaccacttcagcggagtctctggcatttttcagctcctgtgcatcagcctgcgcacgcgtaagtcgatggcgttcgtactcaatagtccctggctggagatctgtctcgctggcctgccgcagttcttcaacctcccggcgcagcttttcgttctcaatttcagcatccctttcggcataccattttatgacggcggcagagtcataaagcacctcattacccttgccaccgcctcgcagaacgggcattccctgttcctgccagttctgaatggtacggatactcgcaccgaaaatgtcagccagctgctttttgttgacttccattgttcattccacggacaaaaacagagaaaggaaacgacagaggccaaaaagctcgctttcagcacctgtcgttcctttcttttcagggggtattttaaataa

SEQ ID NO: 264021 - DNA, 654 bp, Klebsiella pneumoniae
atgacgaagttatatattgaacacagtgaaaataaaaacaggatgaaagtctttgccggaaccaactttattgatttcaatatgacaggacagaacctgtccgggttcgttctaaccttgtcaaggttttatttcgaagatctacttaatataaatttcactgacgcaaatttaggtgacactattttttcacataaagaacaccctaccccaaaattatataaagacgaacaatatcttgacaaacaaatcgaaggtttattttcaacattattaaccattaatgacaactttttacgagcaaaagcggaaattgcttcgacaataattaaattcttagaggccaggataaccaatctttcatacaatgacatattaaaatatcagcaagaattccaaaaacaatgttataagcaagttaaagcctttacgacactctcccgatacaataaaattcaaacatgggcagaaatgtctgaatatcaattcgaagtatttcaatacgagacacttaacccaaaaaaaatgtcacgcacgccttatttaaagagatcgctacctgatgaaaaaactataaattatggggtggaaatagaaataccatccggcaaaagaattcgcttatcaaatcattatcagaatataataccataa

SEQ ID NO: 264022 - DNA, 540 bp, Klebsiella pneumoniae
atgaaaaaaagtgtattgacggcgtttataactgtggtatgtgcaacgtccagtgttatggcagctgatgataatgctatcacggatggctcagtaacatttaatggtaaagtcattgccccagcgtgtacgctggtagctgcgacgaaagattccgtggtgactttgccagatgttagtgctacgaagttgcaaaataatggccaggtttctggggtgcaaactgatgtgccaattgaattaaaagattgtgatattaccgtaacaaaaaatgcaacgttcacctttaatggcactgcggatactacgcagattacagcgtttgctaatcaggcctctactgatgctgctacaaacgtggccctgcaaatgtacatgaatgatggcacaacgaccatcacgccagacacagaaaccgggaacatcttgttgcagaatggagatcagacgttgacctttaaagttgattatatcgctacgggtaaagccacttcaggtaatgttaatgcggtaacaaacttccatattaactattattaa

SEQ ID NO: 264023 - DNA, 150 bp, Klebsiella pneumoniae
atgaataataaatacaggcttattattccagtcttttttattgcgttggttgattcaaatggctcggttagtaaaatgcaccattcactcggaaaactcaacatgttgcactcttatacgccgtctggaaagggcgtagtagtgatataa

SEQ ID NO: 264024 - DNA, 549 bp, Klebsiella pneumoniae
gtgaaaacgggggccgaagccatccgggcgctggccacacagctcccggcgtttcgtcagaaactgagtgacggctggtatcaggtacggattgccgggcgtgatgcaggtgaaaccgaattatctgcccgtcttaatgagccgctggcaaatggtgccgtgatccacatcgttccgcgtctggagggggccaaaagtggcggtgtgtttcaggcggtgctgggtgcggcgctgattgcggtggcatggtggaaccctgtgggctggctgggggccgcggctgtatcgggtatgtatgcagcaggggccagtatgatcctgggtggtgtggcgcagatgctggcaccgaaagcccggacgcccacggcagccagtacagataacggcaaacagaacacgtatttctcgtcactggataacatggttgcccagggcaatgttctgcccgttctgtacggtgaaatgcgtgtggggtcgcgagtggtatctcaggagatcagcacggcagatgaaggtgatggtggtcaggttgtggtgattggtcgctga

SEQ ID NO: 264025 - DNA, 549 bp, Klebsiella pneumoniae
gtgaaaacgggggccgaagccatccgggcgctggccacacagctcccggcgtttcgtcagaaactgaatgagggctggtatcaggtgcgcattgccgggtgtgatgcaggcgaaaatgaattatctgcccgtcttaatgagccgctggcaaatggtgccgtgatccacatcgtgccgcgtctggcgggagctaaaagtggcggtgtatttcaggtggtgctgggggcggcgttgattgcggtggcatggtggaaccctgtgggctggctgggtgccgcggctgtatcgggcatgtatgcggcaggggccagtatgatcctgggcggtgtggcgcagatgctggcaccgaaagccaggacgtccacggcagccagtacagataacggcaaacagaacacctatttctcctcactggataacatggttgctcagggcaatgttttgcctgttctgtacggtgaaatgcgtgtggggtcgcgggtggtttctcaggagatcagcacggcagacgaaggggacggtggtcaggttgtggtgattggtcgctga

SEQ ID NO: 264026 - DNA, 303 bp, Klebsiella pneumoniae
ttgcaaatcgtctttcacgcgattaagcacttccataccgatttgctggtgcgccatctcacgaccgcggaaacgcagcgtgattttggctttatcaccctcttcgagaaagcgaatcaggctgcggagttttacctgatagtcgccttcatctgtaccaggacggaatttaatttccttaacctggataactttttgctttttcttctgttccttagaagacttgctcttttcatagaggaatttgccgtaatccattatacgacaaaccggcggctcggcgttagggctgatctcgactaa

SEQ ID NO: 264027 - DNA, 504 bp, Klebsiella pneumoniae
gtgaatgcgaactccgggacgctcaataatgtcacgattaaccagaactgtcggattctgggaaaactgtctgccaaccagattgaaggtgatattgtcaaaacggtgggaaaagcctttccgagaaatggcagttatgccagcggtacaataacggtcactgtgtacgatgatcaggcttttgaccgtcagatagtaatcccacccgttctgtttcgcggtggtaagcatgaaaacttcaacagcaacaaccaacagtcatactggtattcaacctgtaagctgcaggtgctgaagaacggacaggaaatctttcagcaacccgcgacggatgtcagcagggtattttcatccgtcattgatatgcctgccggacacggtcatgtcaccctgactttcaatgtttcttcatatggtgctaataactggacgccaacgaccagtatcagcgaccttcttgttgtcgtgatgaagaaatcaacagccggtatcagtatcagttga

SEQ ID NO: 264028 - DNA, 288 bp, Klebsiella pneumoniae
atgcctggtcgatggaccactcaacttgtcaataagcacttaggttacagatatacaggagtattcaaaaccctggcaagtattgatgacaaaccgtcccgtttcgaaattttgataccattgatacaaactttagttcgcgacaatgtaaagctaaataatgatgtgtataaagaacttaataagtttatgcacgattacgacaaaacatccccagaaatgagaaaataccttcagagcatcaacgagtgtatgctccttatgaaaaacatagttcaccaagattaa

SEQ ID NO: 264029 - DNA, 384 bp, Klebsiella pneumoniae
atggttaatgcaggaattaaaggaagtcctgatggttttaattggcaatctcttgagcagcgtgctgaaaagataaaagcattaagtgcagaaaataatatttatagtggagctttattattccttgatgtacatatgcataacgaaattgtggaatctctttccacgaaaggaaaaattggtcttcttgttcttattatgttctatgttgcaatgatctattactgtatacgagagaaaaaatatatactcttggttttccctgcttctattatgttatttggcattagtgatgtcattacacatgctaaaccaataccggcatcgtggattgtgtgcctcttcctgtctatatcgtttttgagtaaaaatgaaccacaataa

SEQ ID NO: 264030 - DNA, 192 bp, Klebsiella pneumoniae
atgtggtcatatctcaatggcgagatcccgtatgatgagatggtttatcgaggtgtttgcgccacgagacagttagccaaacgtcaggtcacctggctgcgcggttgggaaggtgtgcactggttagacagtgaacaacctgaacaagcgctcaacaaagtattacaggttgttggtgcgagccagaactga

SEQ ID NO: 264031 - DNA, 267 bp, Klebsiella pneumoniae
gtgtttcttctccgggatgaccatgtcatcgataccaacagatgcaccagaacgcgctgcataggcgaagccggtgtacatgatctggtccgcaaaaataacggtcggtttcagaccgagaatgcggtagcaggtgttcagcattttggagattgcttttttacccagcgcctggttgacgatggagtaaggcaggcctttcggtacaatcatccacagaatggcacggccaacagtcgtgtctttcaggctggttttcgctactaa

SEQ ID NO: 264032 - DNA, 333 bp, Klebsiella pneumoniae
gtggtcagcattgccgttgatcctgagtctccggaatctttcatgaaacgacctaaacgtcgccgctgggttaacgagaaatacacacgctgggtgaagacacagccgtgtgcgtgttgtggtaagccagccgacgatccccatcacctgattggtcatggtcagggcggaatggggacaaaatctcacgatattttcacgctaccgctgtgtcgggagcatcacaacgagcttcatgcggatcctctggcgttcgaagaaaagcatggttctcaggttgatttaatttttcgttttcttgatcacgcctttgcaactggcgtgcttgggtaa

SEQ ID NO: 264033 - DNA, 450 bp, Klebsiella pneumoniae
gtgcgtgaagcagcgcagatcctggcgaaagactacggcgtgggttccgacgtgtatagcgttacctccttcaccgaactggcgcgtgatggccaggattgcgaacgctggaacatgctgcacccgctggaaaccccgcgcgtgccgtatatcgctcaggtaatgaacgacgctccggcagtggcatccactgactatatgaaactgttcgctgagcaggttcgtacttacgtaccggctgatgattaccgcgtactgggtaccgatggcttcggtcgttccgacagccgtgaaaacctgcgtcaccacttcgaagtcgatgcttcctatgtggtcgtagcagcgctgggcgaactggctaaacgtggtgaaatcgataagaaagtggtggctgacgctatcgcgaaattcgacatcgatgcagaaaaagttaacccgcgtctggcgtaa

SEQ ID NO: 264034 - DNA, 303 bp, Klebsiella pneumoniae
atgataggccgtgcagctcagggaagaccctggatctttcgggaaatccagcattatctggacactggagagctgctgcccccgctgccgctggcagaggtgaagcgcttgctttgtgcgcacgttcgggagttgcatgacttttatggtcaggcaaaagggtaccgaatcgcgcgtaaacacgtctcctggtatcttcaggaacatgctccagatgaccagtttcggcgcacattcaacgccattgaggatgccagcgaacagctggaggcgttggaggcatacttcgaaaattttgcgtaa

SEQ ID NO: 264035 - DNA, 354 bp, Klebsiella pneumoniae
atgcattcggaaaatattgcagcttacatcgggctggatgtacataaagaaacgttggcggttgctattgctgcacctgaacggcttggcgaagttcgttattatggtacgattaacaacgaagcccaggctgtacgtcgattatttcagaaattgcagggactttacggaaacattctttcctgctatgaggctggcccctgtggttttgggctatatcatcaactcacagcgatgaatataaaatgccaggttattgccccttcccggataccaaaatcaccgacagacagaatcaaaaatgatcatcgggatgaaccgccccgggtttcctggagagtgttttatctgtga

SEQ ID NO: 264036 - DNA, 267 bp, Klebsiella pneumoniae
atgcaccttgttcaccagacgcgggttaatgcccgcttcacccagcacaatcgccgtaccgtgagtcgcatccagctcgaagccaaacttcagcagcttcgccgccaggtcaaccacgcgctctttatcgccttcgcggacggagagcagcgcgcgaccctgtttcttcatggtcgagttgctgcccagctgcgctttggcgaacgcttcggcaaaggtgcggccgacgcccatcacttccccggtggagcgcatttctggccctaa

SEQ ID NO: 264037 - DNA, 129 bp, Klebsiella pneumoniae
atgtatgtgcctaacccgctcaaaagcaacatgaaactctactataaagaaacttcgagtgaaagccatcgagttataattgacaacattttgaaactaaagcaactgacgagaatttgtatgcgataa

SEQ ID NO: 264038 - DNA, 366 bp, Klebsiella pneumoniae
gtggtgtttaacgataaacggtttggttgcgtgtacagcctgaaggccagcctttctggtgtgccggatacattccggtatcatctgtctcaccgtattcgtcgcgtggttgggaatgaaaacacatcatcgccatatcagcaggttgcccgggaagtgaaagcgccccgtgaacggctgaagtatgcactggaggcgggtttactggtgactgcactggacggcctgttctggtttggcagtcagcgtattgcggctgatgttctgaggctgagaaaggccggaatgccggtggtgaccacgaccgtggaggtgcacgataacctgacaggaacaacccgcaaagtaccggcataccatctctga

SEQ ID NO: 264039 - DNA, 309 bp, Klebsiella pneumoniae
gtgatcagccgctggcgcgtcgagcagtgcagcgaactgagcgcggtcagtgcctcttttgtgctgtccacaccgacggaaacggatggcgctgtttttccggggcgcatcatgcttgctaatacctgcacctggatctaccgcggcgatgagtgcggttatgatggcccggcggtcgcggatgaatatgaccagccaacgtccgatatcacgaaggataagtgcagcaaatgcctgagcggttgcaagttccgcaataacgtcggcaattttggcggctacctttccattaacaaactttcgcagtaa

SEQ ID NO: 264040 - DNA, 348 bp, Klebsiella pneumoniae
gtgttcgaactggagtggaacaagctcgcagaccgcgtggtgcctcaggcgcgcgatatttcccgcttcccggcgaaccgtcgcgacatcgcggtgctggtcgcggaaaacgtggctgccgccgatgttttagccgaatgtaagaaagttggcgtaaatcaggtagttggcgtaaacttatttgacgtgtaccgtggtaagggtgtggcggaagggtataagagccttgcgattagcctgatcctgcaggataccagccgtacactcgaagaagaggagattgccgctaccgttgccagatgtgtagaggcattaaaagagcgattccaggcatcattgagggattga

SEQ ID NO: 264041 - DNA, 219 bp, Klebsiella pneumoniae; identical to SEQ ID NO: 9856

SEQ ID NO: 264042 - DNA, 342 bp, Klebsiella pneumoniae
atgcacgttgctgcaagcaagccggaattcgttaagccggaagacgtgtctgctgaagtggtagagaaagagtaccaggttcagctggacatcgcgatgcagtccggtaagccgaaagaaatcgcagagaaaatggttgaaggccgcatgaagaaattcaccggcgaagtttctctgactggtcagcctttcgttatggagccgagcaaatctgttggccagctgctgaaagagcacaacgctgacgtgactggcttcatccgctttgaagtgggcgaaggcattgagaaagttgagactgactttgcagcagaagttgctgcgatgtccaagcagtcttaa

SEQ ID NO: 264043 - DNA, 330 bp, Klebsiella pneumoniae
gtggaagaagccctggtatttttcgatttcacgccacgaacagagcaccgccagcacgccgaggagaccggtcagcaccaccatcagcagcgacaggccgtcgatcgccagatggatgctaatgccgaagcgtgggatccacggcagcacgaattccgactgccattgcggaatacccgcggattgcgtcagagaatagccgccctgcatccacagctgcaggccaagcaccagcgtcagtcccatggtaatcagcgcgatccagcgcggcactttcacgccaaagcgttcggtctgccagcacaggaagccgccgataaagggaattaa

SEQ ID NO: 264044 - DNA, 141 bp, Klebsiella pneumoniae
atgttcgggcatggcaagcggatgaatatgccgtggtggggcggttttgatacacgtgcatgggatgtggcaagcctgatggattttgctgtgccggtggtggcgtgtctgctggtctggctgttggttaatcgtgggtga

SEQ ID NO: 264045 - DNA, 204 bp, Klebsiella pneumoniae
atggagtttgttattgacgtgttacaaaaattcttttcttatgatgttgaacgtgcaacgcaactgatgctcacggttcactatgaaggtaaggcgatttgtggcgtgtttaccgcggaagtggcggagaccaaagtcgctatggtgaatcagtacgcgagggagaacgagcatccattgctgtgtacgctggaaaaagcctga

SEQ ID NO: 264046 - DNA, 141 bp, Klebsiella pneumoniae
gtgatcctgatccgtggcggtcgtgttaaagacctcccgggtgttcgttaccacaccgtacgtggtgcgcttgactgctccggcgttaaagaccgtaagcaggctcgttccaagtatggcgtgaagcgtcctaaggcttaa

SEQ ID NO: 264047 - DNA, 417 bp, Klebsiella pneumoniae
atgacgcagccattggcgggaaaacagattctgatagttgaagacgaacccgttttccgctcactcttgcatggatggctgacctcgctgggagcaacaaccttccaggcggaagatggcaaggatgccctgcataaaatgacggaggtgcatccggacctgataatttgcgacatttctatgccgagaatgaacggtctggagctggtggaaacgctgcgtaaccgcggcgaacagttaccgatcctgatgatctccgccaccgaaaacatggcagatatagctaaagcgttgcgacttggcgtccaggacgtgctgttaaagccagtaaaagatttcgatcgcctgcgcgagaccgtttacgcctgtctctatcccgcgatgttcagttcgcgcgtggaagaggaagagcgttga

SEQ ID NO: 264048 - DNA, 1134 bp, Klebsiella pneumoniae
gtgaccggaaccgcaagccagctgcttggtgtctccttactcaatacggtggatgtctccctgctggcggcgaactccacgaagttctcggttagtgaaggaacaactgaggatgtgacgatagctgtcactggttcaacgttgctgagtctgcagtcagtactggcactggtggggcaactggtgggcggcgcttcatccattaccgccgatctgtcgatagtgaataccgacaccggtgaggtggtgcagattattccggatgccgtgagcctgacgccgtctctggcgctgctcaatctggtttactccggcagcgcgaccttcagcgacctgccggccgggaactacgcggtggtggtttcttcaccgcaggcttccggcggtctggccgcagtggttgatgaactggcgtcagcaaatctgctgtcggttgcccaggcgacaatcacggattctacgcagtacacctcgacggcaattgccggcaatgtgctggttgcggatgcagggggtgatgtagcagacaccggtgatggcattacggtaagcaaaatcgcctccagcgtgcagaccacgccgcttgatgtgacggctgcaggtgttgtgataaatggtctttacggtcagctgacgatccatgcggacggcagctatacctacaaggcgactggcgatgcggatgctgttggccaggccgatatctttacctacacgatagtggatgcggatggtgatacggcaacggctacgctgacgattaatatcgtggcaggaagtgatatcggtgagtcggatgctgatgcagattccgacagcgactctgactccgacagcgacagtgattcggactctgacagcgattcggactccgacagtgactccgattccgacagcgattcggatgctgacagtgattcggactcggactctgacagcgattctgactctgacagtgactcggactccgacagcgactcggactccgacagcgactcggattctgacagcgactccgattccgacagcgactcggactctgacagcgactcggattcggacagcgactcggactccgacagcgactcggattctgacagcgactcggattctgacagcgactcggatttctga

SEQ ID NO: 264049 - DNA, 798 bp, Klebsiella pneumoniae; identical to SEQ ID NO: 259935

SEQ ID NO: 264050 - DNA, 969 bp, Klebsiella pneumoniae
  misc_feature (919)..(928): n is a, c, g, or t
atgattgaatggattatccggcgctctgtcgccaaccgtttcctggtcatgatgggggccctgtttctcagcatctggggtacatggacgattattaacacgccggtcgatgccttgcctgacctgtcagatgtgcaggtcattatcaaaaccagctatcccggccaggccccgcagattgtagaaaaccaggtcacctatccacttaccaccaccatgctgtccgtacctggcgcaaaaaccgtgcgtggtttttcacagttcggggattcgtatgtgtatgtcatttttgaagacggcaccgatctgtactgggcccgttcccgcgtgctggaatatctgaatcaggttcagggaaaactgcctgccggtgtgagttctgaaatcggtcctgatgccacgggtgtgggctggatttttgaatatgcccttgtcgatcgcaacggaaaacacgacctttcagaactgcgctctctgcaggactggttcctgaaatttgagctgaaaaccatcccgaacgtggctgaggtcgcttcggttggcggcgtggtgaaacagtaccagattcaggtcaatccggtaaaactgtcccagtacggtatcagcctgcccgaagtgaaacaggcacttgaatcgtctaaccaggaggccggtggctcatccgttgaaatggccgaagcggagtatatggtccgtgccagcggttatcttcagagcattgatgattttaataacatcgtcctgaaaacaggtgagaacggcgtgccggtttatctgcgggatgttgcccgcgtgcagaccgggcccgaaatgaggcgtggtattgccgagctgaacggccagggagaagtcgctggcggcgtggtgatcctgcggtcgggtaaaaatgcgcgcgacgttatcacggcagtgagggatnnnnnnnnnnaaactggagacgctgaaggccagcctgccggaaggcgttga

SEQ ID NO: 264051 - DNA, 822 bp, Klebsiella pneumoniae
  misc_feature (763)..(771): n is a, c, g, or t
atggcttctttaaagataaaatatgctgcaataattatcagcagcctcatagcaggagggctgatatcggttactgcctggcagtatgtaaactcatcacaaaaaacagtacaaaccgaacaaaaggcaccggagcgaaaggtacttttctggtatgacccgatgaaaccggataccaaatttgataaacccggaaaatcgccctttatggatatggacctggtgccaaaatatgctgatgaaagcggcgataaaagcagtggcgggatccgtatcgatccaacgcaggttcagaatctgggattaaaaacgcaaaaagtcacgcgaggaatgctgaattattctcagacaatcccggctaatgtcagttacaacgagtatcagtttgtcattgtgcaggcgcgctctgacggtttcgtcgaaaaagtgtatcccctgacgattggcgatcatgtgaagaaaggcactccgcttatcgatatcaccattcctgaatgggttgaggcacaaagtgagttcctgctgttatccggtacaggcggtacgtcaacccagataaaaggggttctggagcgacttcgtctggctggtatgccggaagaggatattcaaaggctgcgttcaacccgcacaatccagacccgttttaccattaaagcacctattgatggtgtcattactgcgtttgacctgcgcaccggcatgaatatttcgaaagataaagtagtggctcagattcaggggatggacccggtctggatcnnnnnnnnntgcagtgccagaatctatcgcatatctgctgaaagatacgtcgcagtttga

SEQ ID NO: 264052 - DNA, 375 bp, Klebsiella pneumoniae
  misc_feature (327)..(336): n is a, c, g, or t
atgcattttgactggcgttacctgataagtttattccactacgcagatttctggcgtgccagttggctggtagtgcaactgagcgtgatgacgtggctcgggggaattgtgctgggcttaggcgtggcgctggctaaacaatcgcgtaacaccctgttgcgaaatgcggcaggctgctacatctggttattccgcagcctgccgttgctggtgttactgatctttatttttaacctgccacaaattttcccgacaaccagcgggttactgtcgaatccattcgcagccggtttgctggcgctgattcttagcgaaaccgcctatatnnnnnnnnnntcgtggtggattgttgtcagttcagcgcgggcagtttga

SEQ ID NO: 264053 - DNA, 1728 bp, Klebsiella pneumoniae
  misc_feature (261)..(270): n is a, c, g, or t
atggcaaccgttgcagatggattccgctacgccgagcgcgtggtatctggcgatatcgttgctggcgaactggtgcgtcttgcgtgccagcggttctttcatgatttagagcacggcccggagcgcggtgtttattttgatgaaggccgcgcccagcacgttctcgatttttataacttcgtcccccatgtgaaggggcacttgaccggcaagccgatcgagttgatggactggcacaccttcatcctgattaaccttttnnnnnnnnnntttgagagcattcttgacgacgatggcgaccccatgtttgtacgccgctttcgtaccgcctatgacgaagtagcgcgtaaaaatgcaaaatcaacgctttcgtctggcatcgggctttatatgactggtgccgacggtgagggtggttctgaggtttattccgcagcaacaaccagggatcaggcccgcatcgtgtttgatgatgcgaagcgcatgattaagctggctccgaaaacactgggccgtttgtttggtagtaacaagctgaatattcaccaggagcggacgggctcaaaattcgaacctgtagccagtgatgcgaataacctcgacggccttaatattcactgcgggatcgttgatgagctgcacgcacataaaacccgtgacgtctgggaagttctggaaacagcgaccggggcgcgcctgcagtcccttatttttgcaatcactactgcgggttttaataaagaaggtatctgctacgagcaacgtgattatgcaatcaaggttctgaagaactttgataaccctgacccactttcaattaaggatgacagctattttgcgctgatttataccctggatgagggggacgatcctttcgacgaggcaaactggccgaaagcaaatcccggcctggggatatgtaagcgttgggacgatatgcgccgcctggcaaaaaaggcgaaagagcaggtggcggcgcgtgtcggtttttttaccaagcatctcaatatctgggtgcagggtgaaaaagcatggatggatatggcgcgctgggaaaaatgccgtgacgactgggacggctccacttcagccaactggtcaatgtggctcggcgttgacctttccaacaaaattgatatttcagctgcagttaaagtctggcttgctccaaatggcgatgtttatgtccgctccagattctggatacctgaaggtcggctggaagcctgttccaagcagcaggcggacctttacagaaaatggaatctcgctggatttcttcagtttaccgatggcgatgtcgttgaccatgcagtaattaaagaggaaacgatcgaatgggcgcgaggtgactcgctgaacgagtttgcatacgacccgtggagtgccactcagtttgctttgtcggtagcagctgaaggtgtaccaattgttgaagtccctcagacgattaaaaacctgtctgaagcaatgaaggaagtcgaggcgaaaatttacgccgggcgttttcatcacgatggcaatccagtgatgacatggatgatgtcaaacgtcactgtcaaaccagacaaaaacgagaatattttccccaacaaggccacgcctgaaaacaaaattgacggtcctgtcgcgatgtttattgcgatgagtcgcttgcttgttaacggtggtggtgaagttgacttcctgtccactatcgatcctgacgaagaccttttacttctatga

SEQ ID NO: 264054 - DNA, 189 bp, Klebsiella pneumoniae
atgtttccctgcaatgataccatcacgggtgatgtgtacctgcgtgttatgcatactgccgtttgtcatcggactacgttcattaataccgactacagcattgatattcgctttggcacatgcctcagcgatggctttcatatgttcgccatccatctccacagattcgaggaaaagacgcttgtctag

SEQ ID NO: 264055 - DNA, 240 bp, Klebsiella pneumoniae
gtggtcggcgcgtcgatggggccgctaaccggctttgcgctgaatccggcgcgcgacttcggcccaaaactgtttaccagtctggccgggtggggctcgatcgcctttaccggtgggctggcgatcccttactttctggtgccgctgctggcgccggtggtgggggcgattatcggggcgtttttgtatcgcaagcttatcggccaccatctgccgtgcgaatgcggtatcgatgagtaa

SEQ ID NO: 264056 - DNA, 396 bp, Klebsiella pneumoniae
  misc_feature (338)..(347): n is a, c, g, or t
atgagcgctgttgctaccgttcccccacacaaagtgctcgtcgcgaaccggggcgaaattgcggttcgcattatccgggcctgccatgaatacggttttgccagtgtcgcggtctatgctgacccggacgtcgacagcctgcattgccgcctggctggtgaagcctgggcattacccgggtccagcccggcagagacttacctgaatatcgaacaactgatcgacgttgcccgccgcagtgaagccacaatggtgcacccaggttacggctttttgtctgagcgggctgaattcccccgtgcagtggaagcccccgggcttatctggattggcccccnnnnnnnnnnggcttatctggattggcccacgcccggaaaccatcgagcaattgggtga

SEQ ID NO: 264057 - DNA, 261 bp, Klebsiella pneumoniae
atgcccgatccgatcccggtagtagtgctggggcgtctggcggtggatcagtctctacatggacggggcgtaggtcgggcgctggtgagggatgccgggctgcgggtgattcaggtggcggaaactatcggtattcggggaatgctggttcatgccctgtcggatgaagcgcgggagttttatctgcgggtggggtttgagccgtcgccgatggatccgatgatgctgatggtgacgttgggggatttggttcatgcctga

SEQ ID NO: 264058 - DNA, 195 bp, Klebsiella pneumoniae
atggcgactgctgtcggcaatgatcaggtctggtttcagggcagcaatggcttccaggctcggctgcgcgcgcgttccgacggactgccacggtttcaggtgcgcacgcacttcgggcaggatgcgttttgcatcgttatcgtcggcaataccgatcgggctgacgtccacggcggccagcgcatcggcgaatga

SEQ ID NO: 264059 - DNA, 1662 bp, Klebsiella pneumoniae
atggatgccattgacgtggtgcgcggtggtggtgcggtgcgttacggaccgcagagcgtgggcggcgtggtgaactttgttacccgcgccattccgcaggactttggtatcgaggcgggggtggaaggtcagctcagcccaacctcttcacaaaacaacccgaaagagacgcacaacctgatggtgggcggcacagcggacaacggttttggcaccgcgctgctctactccggcacgcgcggcagtgactggcgcgagcacagcgccacccgcatcgacgacctgatgctgaaaagcaaatatgcgccgaatgaggtgcacaccttcaacagcctgctgcaatattacgatggtgaagccgacatgcccggcggcctgtcccgcgcggattacgacgccgatcgctggcaatccacccgcccgtatgaccgcttctggggccgtcgcaagctggcgagcctggtctaccagttccagccggacagccagcataaattcaacattcaggggttctacacccaaaccctgcgcagcggctacctggagcaaggcaaacgcatcaccctctcgccgcgtaactactgggtgcgcggtattgagccacgctacagccagagctttatgatcggcccttccgcgcacgaagtgggcgtgggctatcgctatgtgaatgaatcaacgcatgaaatgcgttactacaccgccaccagcagcgggcagttgccgtccggctcaagcccttacgaccgcgacacgcgttccggcaccgaggcgcacgtctggtatctggatgacaaaatcgacatcggcaactggaccatcacgccgggtatgcgtttcgaacatatcgagtcataccagaacaacgccatcaaaggcacgcacgaagaggtgagctataacgcaccgcttccggcgttgaacgtgctctatcacctgactgatagctggaatctttatgcaaacactgaaggctcgttcggcaccgtacagtacagccagattggcaaggctgtgcaaagcggcaatgtggaaccggaaaaagcgcgaacctgggaactcggtacccgctacgacgacggcgcgctgacggcggaaatggggctgttcctaattaactttaacaatcagtacgactccaaccagaccaacgacaccgtcactgcacgtggcaaaacgcgccataccgggctggaaacgcaggcacgttacgacctgggtacgctaacgccaacgcttgataacgtttccgtctacgccagctatgcgtatgtgaacgcggaaatccgcgagaaaggcgacacctatggcaatcaggtgccattctccccgaaacataaaggcacgctgggcgtggactacaagccgggcaactggacgttcaatctgaacagcgatttccagtccagccagtttgcggataacgccaatacggtgaaagagagcgccgacggcagtaccggccgcattcccggcttcatgctctggggcgcacgcgtggcgtatgactttggcccgcagatggcagatctgaacctggcgttcggtgtgaaaaacatcttcgaccaggactacttcatccgctcttatgacgacaacaacaaaggcatctacgcaggccagccgcgcacgctgtatatgcaggggtcgttgaagttctga

SEQ ID NO: 264060 - DNA, 282 bp, Klebsiella pneumoniae
  misc_feature (244)..(253): n is a, c, g, or t
gtggtcggcgactggctgggcgatgcgcgtgaaaacgacgtatttgaacatgctggcgcgcgtgacgtgatccgccgtgaggatttcgccaaaaccggcgcaaccaccatgcgtgaggtgcttaaccgcatccctggcgtcagcgcgccggaaaacaacggcaccggcagccacgacctggcgatgaactttggcatccggggcctgaacccacgcctcgccagccgctcgaccgtcctgatgnnnnnnnnnngtttcgctcggcaacatggatgccattga

SEQ ID NO: 264061 - DNA, 447 bp, Klebsiella pneumoniae
  misc_feature (422)..(431): n is a, c, g, or t
atgaagatattactgattggcaagaatggtcaggtgggctgggagctgcagcgctccctgtccacgctcggtgatgtggtcgcggtggattactttgataaagagctgtgcggcgatctgactaatctggacggtatcgcgcagaccgtgcgtaccgtccgcccggacgtggtggtgaatgccgccgcgcacacggcagtggacaaggccgaaagcgagcgggagctctccgacctgctgaacgacaaaggggtggcggtgctggcggcggagtcggcgaagctgggtgccctgatggtgcactattccacggactatgtgttcgacggcgccggcagccattatcgccgggaagatgaggcaaccggcccgctgaacgtctacggtgaaaccaaacgtgccggtgaactggcgctggagcnnnnnnnnnnaacccgcgtcacctga

SEQ ID NO: 264062 - DNA, 177 bp, Klebsiella pneumoniae
atggccaataaagtggcgattttcagtgcgcgccccgggcgaatcaaaacggaagtggcggtagattttccgcacccgcgtgattataccctgaaaacatcaccagaatttatggcattgaaggcgcgtatcacggaagaaattcgtacggaaaccctgcaaaccatcgatcactaa

SEQ ID NO: 264063 - DNA, 147 bp, Klebsiella pneumoniae
atgaatgcctgctgtaatgccttagctgactttctcagcggcagtatcaaacagcgccagcgcttcggtcgcttcctggattgccttacgggtcttcgagacaatctcactttccgtgaaaacacgatcgaaagagtcagcgaatag

SEQ ID NO: 264064 - DNA, 426 bp, Klebsiella pneumoniae; identical to SEQ ID NO: 221583

SEQ ID NO: 264065 - DNA, 1215 bp, Klebsiella pneumoniae
gtgccggtcagtcgggacaatctatttatcgcgcttaatgaaggtaaaggcgatattgcggctgccaatctgactatcacgccctcgcgggaagcacaggtcgatttcgcccagccgctctacagcaacgtgaaagaattactgatctccggcccggcttcaccgaaggtcgacagcctggagcaactctctggtcaaaccgtctttgttcgccgctcctccagctattacgacagcctgcaagcgctgaacgcccgatttgccggtgagtcgcgcccaccggtgatactggaggcggcgccggaagcgctggaggatgaagatctgctggaaatgctcaacgccgggctgattccgctgatcgtcgtcgatcagcataaagcgttgttctggaaacaggtgtttccaaaaattcaggtccatgacaatgtggtgctgcgcgacggcggcgacattgcctgggcggtacgcaaagacagctcgcagctgctgacggtactgaacaacttcgtcaaaaagaatcgtcagggcaccacgctgggcaatactctcctgctgcgttacctgaaaaatgctaaatatgtcaaaaatgccgcggcgagtaaggaacgacgcaaattcctcgcgatggtagatgtcttccgcaagtacggcgatcgttacgacgtcgactggctgctgatggcggcccagggataccaggagtcgcggctgaatcagtcggtacggagccacgtcggcgccatcggcgttatgcaggtgatgcccagcactggaaaagagctgaaggtgggcgatattaaacagctggatcccaatatccatgccggcgtgaaatacatgcgctggatgatggatcggtactatgccgatgagcccatgacccggctcgataaagcgctgtttacctttgcctcctataacgcgggtccggcgcgtatcgcccgcctgcgcaccatgactaaacagcgaggatttgacccgaacgtctggttcggtaacgtcgaaaatatggcggcagaaaaaattggcgccgagacggtaacctacgtcagcaatatctataagtattacatcgcctatcggctgatcgtcgatgacatggcccgcaaacagaaagcgacggccgtaccgcggcaggagccggtggcgcagccagccaaaccgcagcccagcgtggcgacagccgccaccgctcaggtgcccgtcatctga

SEQ ID NO: 264066 - DNA, 1239 bp, Klebsiella pneumoniae
atgaaactgcatgaaatgaagcaaaaacgtaacatcatcgccaaagatatgcgtgccctgcatgacaaaattggtgatacaccctggaccgatgagcagcgtactcagtggaacgctgcaaaatcggagcttgacgcccttgaagagcgtattgcacgcgaagaggaactgcgccgccaggatcaggactatatccacgaaaacgagccggaacagcgccagcagcagaatcgtgatccagcaaacccggaagcacaggctaacgaacgtcgtgctgcggcgtttaatgcgtttttgcgccgtggtcttggcgagatgagcgctgaagaacgccaggctttaaaggagctgcgtgctcagggcacgacgccggatgaaaaaggggggtacaccgtaccaacccagttccgcaataagatcgtcgaagcactgaaagattacggtggaattgccagtgtggcgcagattctgaataccgccaacggccaggacattgactgggcaacctctgacggtaccactgaagaaggtgaactgctgggcgaaaacactgaaaccagtgaagaagacgtgtctttcggcggtgcaacgctgggggctaaaaaactgtcctctaaaatcattcgcgtatccaatgaactgctccaggacagcggcgtagatatcgaagcgttcctggccgcgcgtatcgccactcgtatcggacgtggtgaagcgaagtatctggtattagggaccggcaccggcaccccgctgcagcctaaagggctggcagcgtcggtaactggcaccaaaaataccgcagcagcgaccacctttacctggaaagagctgaacgcactgaagcactctgtcgacccggcataccgtaacggtccaaaggtgcgctgggcctttaacgatgcaacgttgcagctggtggaggaaatggaggatggacagggccgcccgctctggttgccgaacattatcggtggcgcacctgctactgttctgcaggtgccgtatgtcgttgaccaggctattcctgatatcgcggctggtgccaaatttgcctacttcggcgattttaaccgctttatcgttcgtcgtgtcacttacatgacgttgaaacggctggttgagcgttacgcagagtatgatcagactggcttcctggccttccaccgcttcgactgtgtgcttgaagatactggcgcgattaaggcgctggtgggcaaaccggcatctggcggctaa

SEQ ID NO: 264067 - DNA, 570 bp, Klebsiella pneumoniae
atggaaatcgaaccactcccatcttgctgtcctgatctccgtactccggcagccagtcatgatgagaaacttcattatcagctgttgtctgtacttcaattcaggaaggatattccaaactgttttgatttcctcatcactcaatctgcgatcttttacggatgctgtgagacctacgtcagagcgcctaaggctctcaattgggttcacattaattacccctcgattggagcaaaaacggaacgtacgctgcatcagcccaagcatctgaccagtgacaactcttcgccccatgccatcaaaaaggttaagccagtgcgctttagtggtctgatcaacaatcatgttccccagcacaggcgctatatggttattgaagtcccgtcggttaaccttgattttcacaagaccttcggggatgcagtaatacttttcccagtaatcgaaagcctctttaacggtgagcgcttcgacttttttctgtttctccagaactgtttgccgtctcggatcgagtccttctgtcaaccaggccctgaactgctgtctacgttcgcgagcttgagataa

SEQ ID NO: 264068 - DNA, 198 bp, Klebsiella pneumoniae
atgcaccatgatttcttcagcttcatgtctttcgattaccccatcctcaagtgcctgttcgataatctgatcaacctgtcctctggcggcagaggtacgcattgcccggctgaacaagtccacgcgatccagctcttccaggtgcggaacatcaaccagcagagccccacggcggcgagcgaagtaatcagccagtaa

SEQ ID NO: 264069 - DNA, 540 bp, Klebsiella pneumoniae
atgccattacccgaacgtctgcaaccagccaaagtaaaccgccagaaactgaaacagctagcggacatggccgaagagatactggcgcaaattgataacggggctaaggaagaggatgccgggttgaaaatgttgataaatgactggaatagccaggttattaacccgtatgcattctctgatttccgggatttctcttcatggaccagtgcaaaagacttcacccggatggcgtttaatcaagaaaaatacgtggcggatttatcctgggatgagctgattcagatcatccagtttgtgtgtcaggccgaaggtaaggaatctgaacaaagctacgcgctgggactgcttgagaaaaactttgatgccaatccatccgacctcatctactggcctaatgaatggtttcaggataaagacatgcttcatgtcgatttaacgcctgaagaaatcgccggatacctgatggcaaaatctggccggcggctaagcgatgcgccgcaaatcgagctgaagtatcctatcccttcaaatatttaa

SEQ ID NO: 264070 - DNA, 684 bp, Klebsiella pneumoniae
gtgctgagtgaactcaatgagctggagcggcagtcggcgctgctcaaaggggagcacagcggcaccctgtgcatctcgacgctcgactccatcgagaccgaaacggcgctctcgctgccggtggttctgcgcagcttcagcgacaaatttccccatgtgcatatcaaactgattatccgcaccccggcggagcaactgaacggcgtgctgaacaaccatatcgacctggccatcggcagctacaactcgcaggtgcataacatcatcagcgagccgctgtaccgtgaacagcactggctctactgcagcgatctgcacccgatgttcttcagccgccagctcgataaagagcagatcagccagtgcccgctggtgacccgcagctactggaacaccagcgatctccgccgtcggggcttcagcaaagggagcgccaccgtcgagaccgtcgacgcccagctgctgctgatcctctcggggaaatatattggctatctgccggagcattacgcctggccgtggatcaaagagaaccgcctgcgggtgctgctgcccaacgagtttggctttcagtcgccgttctcggccatctgtaagcgcgggcgcagcaatgaaccctatctgaaagcgttccgcgatctgctgaagaaaaacacggtggcgcggccgaagtggaattattaa

SEQ ID NO: 264071 - DNA, 732 bp, Klebsiella pneumoniae
  misc_feature (684)..(693): n is a, c, g, or t
atggccgggaagcttgcctcccgcctcggcatggatgccggaactgacctgatgaacactctgaaaaatacagcatttaagggtgggaatgtcactgatgagcagttcacggcactgctgatcgtcgccaaccagtacggactaaatccgtggacgaaggagatttatgcattcccggataaaggcggaattgttccagtggtcggcgttgacggctgggctcgaatcatcaacgaacatcctcagtttgatggaatggagtttgcctacgacaaggaagaaggcgcgtgtacctgcaagatataccggaaagaccggacacacccgaccatcgttactgagtacatgggagagtgcaaacgcaacactcagccatggcagtcccaccctacccgtatgcttcgtcacaagacgctgatccagtgtgcgcgtctcgcatttgggtttgctggcatcttcgatcaggacgaagccgagcgtgtcattgaagggagtacggcagaggttcatgtagggcatgagtcggatggtcgtcgcccggaactgatcgcaaaaggcgagtctgccgcacgccttggaactgttaagtaccaggaattctgggttgcgttaagcgcagaagagaaacaggttatcggcgcggttgagaagcgtcgcatgtatgacatgagccttgcagtcgannnnnnnnnncaacgcagaacctgtcgatgccgcagcgccggaggataa

SEQ ID NO: 264072 - DNA, 492 bp, Klebsiella pneumoniae
  misc_feature (409)..(418): n is a, c, g, or t
atgagtccaggtgttggggcacttaatttcgataagcccatcaccattaacaagcccatcaggacttgctgcgaatcctggtatagttgggtgatcgataagccccacctcagtgatttcggcatcgaactcattcagcgcatacatctcgcgtgctaccggctcgagttctgttccgcgtatcattgcggcgttggagaaaccttcttcaagcttcccggtgaggcgctggcaaatcagctcggccatgtagttctgtcggcttgctgcatagccagacttggttctggccatgacgtcagcaaggcggctggctgtgacttttccgcagcgagcggcaaaccattctggggtgcgttgttccatcatttatcctccggcgctgcggcatcgacaggttctgcgttgnnnnnnnnnntcgactgcaaggctcatgtcatacatgcgacgcttctcaaccgcgccgataacctgtttctcttctgcgcttaa

SEQ ID NO: 264073 - DNA, 660 bp, Klebsiella pneumoniae
atgaatgtaattacttcccctaattcaaatctcacagtaagcaatgaagatataaatgcaaaagatataatggactcattggatgaatctaaacaaagagtttttacaaaagtattatcaacattgccaatgaaccttgtacaaggtccaccgggagtaggtaaaactcacttagtcaaagcaatttctaaatttatctttaaagaagaacctaatagcaggatactctttactgcacaaagtcatgcaaccgttcaacatctatatcacgaagttgtcaaagatttacttactgaaaacaaacatacaaatgatcccataattattagatgcaacaaaatatctggcgaagataatataatattaaacagtgccgatgaaactggattagaatatttgcggaagttcgtagaaagccctttatacaaaaactcttccaatcaaagtttaaaaagtaatatttccagtttgcttaaagctcctccagtaaagagatacccactaattaatcaactaattaaatcagcaagcttaatatttgctacaactaattcagattatgtagagagaatgataaaagaaagagcacaatttgattggtcgatcatggaagaaagtggaaaggttacaggtatagaattaataagcccactttggtaa

SEQ ID NO: 264074 - DNA, 837 bp, Klebsiella pneumoniae
atgaatggactaaatcataacgcgcttacatgcagtgccgtccccataccgccctgggagcgttctcttcagaccgtggaggcccagccgtacttcagcgtttcacaggcgtcgctcgtgcttgaagggatcgtgttcgatcggaacaataacctgctgtttgttgatgtggcgacggggcgcgtgtttaagctaaccccggagcggcagctttccattgtccttaaggagaatacgttcggtgcttccggcctggcggtacacaaagatggacggatctttatcgcctcggtgggcgatatgcagcgaggttctgttcgggctatcgaacccaacggcactcgtgagcagatgattgttgctactgatgccggatttcttgtcaacgacctggtctttgataatcagggcggattttatttcactgacagtcggggaaattcagccgatccacagggtggggtgttctacgttagtcccaatgtcgggtcaattcatgccatcctgcctggactcgcggtcgggaacggcatagcgattgaccccgctggctctcagatatgggccacagaacacgctaaaaacaggcttcatcgcgtaagactgtcagacgccaccacgatcgccccgtttggttcagttgttacctatcagttcaccgggccggcgccagacggggcccgtgtcgacagcgaaggcaatgtatatgtgtccatctcaggccagggccgcgtcatggtcttcaaccgcaacggactgcctattgggcaaattgtgctgcctgaccgcgacaaaggccgtaaccttaaatcgacaagcctggcgatccgccgctaa

SEQ ID NO: 264075 - DNA, 585 bp, Klebsiella pneumoniae
ttggcacgtatcgccattcgcaaccttctcgacagcaacggtattaccgtcgcggcagagctcgacagcggcgctcatgccgtgcagaccgcggaaagcatgcagcctgacctgctcatcgtcgacgtcgatattccggagctcagcggtatcgaggtgctggagcagctgcgcaaacgccgctaccagggaacaatcatcatcatttccgctaagaatgaactgttctacggcaaacgcagcgccgactgcggagcaaatggttttgtgagtaaaaaagagggaatgaataatatcctcgccgcaatcgaagcagccaataatggctacagctatttccccttttcactggaacgcttctgcacccacggcatcaccgatcaggaccggctggatacgctgtcaacgcaggagatgaaggtgttccgctatattctcagcggcgtcgactacaccaccatcggcagcaaaatgaacatcagcaataaaacggtaagtacctataaggtccgtctgatggataaattaggctgcagcaccctgcttgagctatatgactttgcgcaacgcaataaaatagggtga

SEQ ID NO: 264076 - DNA, 984 bp, Klebsiella pneumoniae
atgctggcccaaaaattaaaatctctaataaaaagccatcaacttacggttccggttgaaattaccaacttccatgcatggtgttataagcaagcaaaaattaaaaatattctccctaactcaaagcaaaattttatagaaaaccttgagcaagctgttattactggttttcaaaataaaacaatagcagcagaacaatatagtgcggtattaattgatgaggggcatgattttaaacaggattggctaaaaatactttctggaatggttgatagcgaaactaactatctattatttctatatgacgatgcgcaatcaatttatcagaaaaaaagctcacttgattttacgctttccagcgttggtatcaaagctcaagggcgtacaactattcttgacatcaattatcgaaatacacagcagattctccactttgctaccagcattgcatttgattatttaaatgatcatattgaggataactttaaatatcataaaccagatgctggtggacttcaaggccaggttccaaacatgcttgtttttgataaccaccaacaagaaatcatccatataattaaatggctaaagcaacaacatcatactggtgttagctggaatgacatggctatattatgtccctcgaccgcacatctttctgcaatattagtaaaagagttaagggattcaaaaatcccgcactactttatagcaagctcggaagataaaaaacgctactcaccacaaagcgattttttgtctattatacctttgcctagtagcaaaggtctcgagtttcattcagtcgcagtgatagatagttcaaacataatgggtaatagcgatgatctcaacgacgagatcaagcgactatatgttggtttcactcgggcaaccaataatttgcttgtgactttacatcaaaaaaatgtgctcagcagacatttaacctcaacttataatcaaatctataacaatgcatag

SEQ ID NO: 264077 - DNA, 504 bp, Klebsiella pneumoniae
atgccgaaagaagtgcgtaaggcgcgctatttcagtcgccgcgaagagttacaggatcctgagctactcagcgcgctgatctcccggcgcgattattataccgatgcctggtggatgattgcggtggcggtcacgcctgatgcgccttactcgctggagcagttgcatgaggcgctacgttacccggtatttccgctgtatctgggacgcaaaagtcatccgctggcgctgccgttaatgccgctgctgcttgaaggccacgccgcagaggtacttcgccaggcttatcgccagtatcaggaaagatttaacctgctgaggctttctctgcgacagctgcaggatcaatgctggtgggagggtgagcatgctggtttagtcgccaataaaatactgcggcgccgcgactgtccgcttaaccgccagcattggctgtttggcgagcgctccatgaatcagggaacctggctcagtaaggaggaaacgtgtacctctcaagaataa

SEQ ID NO: 264078 - DNA, 261 bp, Klebsiella pneumoniae
  misc_feature (96)..(105): n is a, c, g, or t
gtggttgccgtcgttatgctgattgaattcaatatcgcccccgccggaaaggtacaggatatcgttgagggtggtcaggtcatagagatagagggnnnnnnnnnngtcgtcaagccaggcgccaagctgccattttttcgccaggctgcgggcgatctggatatcgctttcgccctcgtgctggcccggcagcagtttcatgtgcgcggtggcgccgggcagacgctgcaggttggccatcccttgctcaaggtcgcttaa

SEQ ID NO: 264079 - DNA, 228 bp, Klebsiella pneumoniae
atggccgagagcggcccgttaaaacagttcgtgatcccggggaagaatctctcctctgcccagctgcacgtggcgcgcacccaggcccgtcggctcgaacgcctgctgacggccatggaccgcgcacatccgctgcgcgaggcgctcaaacgctacagcaatcgcctgtcggatgccctgttctccatggcacgaatcgaagagactaggcctgatgcttgcgcttga

SEQ ID NO: 264080 - DNA, 456 bp, Klebsiella pneumoniae
  misc_feature (397)..(414): n is a, c, g, or t
gtggaagaagttgctcacgactggggactgaaagtcaaaatcgttgaaagcaacaaagaggtccatttctacagtgggcgccagtaccgcggcacgacaatttgtcggtcgatggaaaagcccgacacgatagtaggctttaaaatcggcaatgcgctggtggatgaactcgacgttctgaaagcggataaggcgcgtcaggcgtggcgaaaaataatcgcgcgtatgcgttataaagttgatggtctgcgtaatggcattgacgtgactaccacacctgaaggatttaagttcgtctataaccagtttgttaaggctgtgagggaaaagcctgaactgaggtcgatgtatggtctggtacaggcttcgacattcgacaacgaaaagaacctgccgnnnnnnnnnnnnnnnnnnactatattccttcgcttctggcgagttacccgccggaattga

SEQ ID NO: 264081 - DNA, 228 bp, Klebsiella pneumoniae
atggccggacatcgggtcatctttcagcatcgtctgcacctttgcggcgagaccattgaagccgttgcgcatgtcggtgataccggcaaccagccagattttggtccctgttggcaggtggttatcacttcctttatctgtcctgtgatgatccttatgacttcgccagactacttcaccacacacatgggtctgccagataccggttcgggatggatttccgcttag

SEQ ID NO: 264082 - DNA, 138 bp, Klebsiella pneumoniae
atgcaaaacggcatggcgaaagatttgaaattgagactccgctattcggtgctgcgcgtttccagcaacgccagcgactataacgtcagcgggaatgaagtgcggttctacgtcgaatatccgtttaacgtgttttga

SEQ ID NO: 264083 - DNA, 672 bp, Klebsiella pneumoniae
  misc_feature (323)..(332): n is a, c, g, or t
gtggtgggtaatctgttgaatattgtgctcgatctgtggctggtgatgggcctgcggatgaacgtccagggagcggcgctggccacggtcaccgcggagtacgccaccctcattattggcctgctgatggcgaagcgggtgctgacgctgcgcggcgtgtcgctggcgatgctgaaaaatgcctggcgcggggatctgcgccgtttattggcgttgaatcgggacatcatgctgcgctcgctgctgctgcagctgtgctttggcgcgctgaccgtattcggcgcccgtctgggcagcgacatcgtggcggttaacgccgtacnnnnnnnnnngatttacagcctggcggggcagtacattatcgcgttgttaacctcactgccttccctgcagcagctggccgatcgctatctgatctggcagacgatcctgccggtggtcggcgtctggtgctatctgctggacggcatgtttatcggcgcgacgcgcggcgctgagatgaggaacagtatggtggtcgccgcggcggggtttgctgtgacgctgcttacgctaccggtgcttggcaaccatggtctgtggctggcgctggcggtgttcctcgccctgcgcggcctgtcgctggcgctgatctggcgtcgtcactggagacgcggcacatggtttagttag

SEQ ID NO: 264084 - DNA, 147 bp, Klebsiella pneumoniae
atgctgatgatggcggccactttgacaatcgagaaccagaactccagctcgccatacactttgacgtgcgtcaggttgatggcgttgatcgccacgaagaagatcgccgccgacagccaggtgggtacctccggccaccagtactga

SEQ ID NO: 264085 - DNA, 525 bp, Klebsiella pneumoniae
gtggtggtccgcaatcaaccgcggctggccacctttgtcgggctgctgaaagaggaagcgcaggcggatcgcgcgggcaaatctttcgttctggcgcggatggttgagctgctttttatcgaggccatccgttcctccggcacgctcgcgacccccggtctgatgcgcgggctgagcgacccgcgggtcgcccaggcaatccgtctgctgcatcaggcccccgccagacgctggacggtcaacgccctggccgccgactgcgcgctgtctcgctcgacgttatttgaacgctttaccgacctgaccgggatgaccccgatgggctatctgttaggctggcgaatgaccctggccatgcagtggctgagcgagacgggcatcagcattgcggatatcgccgagcgcatcggctatggctcggccagcgcgttcagcgtagcttttacccgttataccgggatatcgccgggcaaatatgcccgccagcgggcggcactaaatgtctcctggccagctctgacttaa

SEQ ID NO: 264086 - DNA, 171 bp, Klebsiella pneumoniae
atgagcagccttctagccaaagtaatggagcgcggcatcttccgcgtaccggcgcgacgcaagcgcaaggtcgaagttaagccttccgacatcccgaccctgaaagactacaccgcccgcctggtcgataagaagtggctacgcctgagagcaaggaggccacatgcttaa

SEQ ID NO: 264087 - DNA, 282 bp, Klebsiella pneumoniae
atggcggtcaaaaactacggcataaactacgacggctggcgccacccgctcacgccgtatcgtctggcgctgaaaggtgacggcggcttcttttccgtcaaaccccagcccggcgggcttatctggcgcgactggctggggttaagccaggacaatcagacggaaagcaacagtgaatacccagcccaggtcgtgaaggtgttcaatgcacgcggtctcaggaacatcaaagccgggctatggggatttggcgccgacttcgacaacatgaagattcgatga

SEQ ID NO: 264088 - DNA, 393 bp, Klebsiella pneumoniae
ttgagctgcggtcctctgctgctcgtactgcgtgtcggctgcgtttttgagggccagcgcgttctgatgggccaaaacgccctgctgctcaaactgctgaatcagcgccaactcctgcgcgtgctggttggccaattgctgcaccgggtcaacttctgcaagtgcctgctgggtggggttaaccacctgctgcgagcgtattttggcaaggttggcctgatgctgctgctccatctgctcagtggctgcgttgtattcctgcagatcaatcttcccggcgttcagcgccgctttcaggttctgcatggattcagcgtaggatttattctccgcctgctcaggcatagccctgagcgcttccgacacccccttagcagcagcagcggcatctaa

SEQ ID NO: 264089 - DNA, 294 bp, Klebsiella pneumoniae
gtgcgctcttcactcccccctcaccagctacagagccgctttccgcagctctgtaaggcgggtagccatgatgatgtcgccgaggtcgtcaatattgccctcagcggcatcgcgatcaaaccgctgagccatgtgccggcggccattccgctacgtctggaaaaccaatatttcgctctggatctctccaccgacgccgcccgcacgatgctggaggccggcaactgcaccttctataccccggaatcgcttggcgacgtgaaacttgaactctttgcggtactgcgctcatga

SEQ ID NO: 264090 - DNA, 390 bp, Klebsiella pneumoniae
atgggggagaccccctctctgacgcaggtctgggtcgacgatggccgcgtgcaaaatcaaccggaaaaggatgcggcgccgtttattgtgctgccgccgattgtgcgcatcgaaccgggaaaaggccagagctggcgcctggtgtttaacggcagccgcctgccgcaggatcgggaatcgctgttctggttcaatcttctggatatcccacctttacctgcagctcgcgatacggtcgcgtatcaagctgttttaccgtccggcaggcgtggcggcggaaaaaatagccgcggaaaaagccctgagctgggcgctggctcctacgggcaacgggctgcgggtgagcaatgcctcagcgcgctatatcaccatcgacagcatcacccttaa

SEQ ID NO: 264091 - DNA, 318 bp, Klebsiella pneumoniae
atgaaaattaaaaaaggattctctttactagaattaactcttgttttaggtgttgggacgatagtggcttttatgaagtttcaggatatgaaaaatgaacaggagagtatattggcttctgctgtcgggcaacaaatgaaacagatcggtgaagcagttaatggctatataaatatccgttatgataaattatcaaccttatccaatgctgccggaacaggaaccgatccggggccaagaacctgttcaggttcagtatgtgaaattacttaccagacattgggtaatccccccatttttaaccgggcagataagtag

SEQ ID NO: 264092 - DNA, 300 bp, Klebsiella pneumoniae
  misc_feature (213)..(222): n is a, c, g, or t
atggacggccgcccctgcgcgctgtttattcttgatgagtccgcctgcatcctgagccgttgcggcgagccgcaaaccctggcccagctggctgccctgggatttcgcgacggcagctattgtgcggagagcattatcggcacctgcgcgctgtcgctggccgcgatgcagggccagccgatcaacaccgccggcgatcggcattttaagcannnnnnnnnnataaccacgggaggctgttcggctctatctcgctttgctgtctggtcgagcaccagtccagcgccgacctctccctga

SEQ ID NO: 264093 - DNA, 336 bp, Klebsiella pneumoniae
gtgatcgtcaaccctggcggcacaaaccagagttttgtcgatgaacacatcaagcaggcgcaaattattcgcgtgcagaacaatgtcgataacctgcaggcgctgcggcagaaaacggccgatatgatggtgaccgatctgattgaaggcgactattaccagagcaaagagcccggcgtgttctgcgttgccaacgaaacgccattcgccggcaccgccagcaacaaggtgtatatgatgagtaaagataacccggcgctgctgaagaaagtgaatcagtggctggatagccaggacaaagaggttctcaaacggaagtggaaaattcgcggttaa

SEQ ID NO: 264094 - DNA, 228 bp, Klebsiella pneumoniae
atgaacgccatgttctgcaatggtaatggcgatcgccggtacaaggtgaatgtggcccgttgcccggtctatgccgactgcctggaacaacaggtgtgggataaaaacggcgagccggataaaaagagcgataacgatcaccccaacgatggcgctggttacttcattgtgaagcaattcccaatcgttcgacctgcattctctatttcactggacacgacattctga

SEQ ID NO: 264095 - DNA, 222 bp, Klebsiella pneumoniae; identical to SEQ ID NO: 250584

SEQ ID NO: 264096 - DNA, 177 bp, Klebsiella pneumoniae
atgagcaagttaagactcttgaaggtcaccgttcggaaatccggcaatcccgtttacttcggtcgtacccgcgttgcacgcaatgcgcaaaaagaagttcgccttacccatggccgtaccctgtcaactggctgcattgacacaaaacagcgctacctaaaactcacggccatctga

SEQ ID NO: 264097 - DNA, 576 bp, Klebsiella pneumoniae
atggggagtaagtggaaaaccgttcgtcttggtgattactgtattaagattggtagtggagctacccctaaaggcggtaatagtgtttacactgataccggcaatacgtattttattcgcagccagaatgtttataaccatggttttaatactaatgggctagtttttattactgatgaagcagcgtttaaacttaaaaatgtagatgttcaggaaaatgatgttttattaaacatcactggcgactccgttgctcgcgtatgtatcgcccctggagcttttctacctgctcgagttaaccagcatgtcgctataattcgccctaaaaatgatgcatttgaccctcgtttccttagatattttttatcaagcccccaccaacaaaccctgctgttaacacttgctagtgctggtgcaacgagaaatgccttaacaaaagggatgattgaggacttacaagttcctaaacctcctttacatgcacaaaaatctattgcaaatgtattagatagctttgataaaaagatagaaagcaataataaaatcaaccaaactgcgtcaaaaagtacgcaatag

SEQ ID NO: 264098 - DNA, 1005 bp, Klebsiella pneumoniae
atgccttatcaggttagtactgctttcaatagcctcatgaacaactttgttaatcttgatgcagatgaaacacgcaacggaagaagaagccgtgattggttagtcgatgagcagctgactgggtttccagataaagatgatgaattcccacttttgagcactacgcctaaaatgtggtttggttcattctctagaagaacaaaaattcgtgaacttgatgacatcgatatgatgattgtcatgcatgctgaaggtagcacatacactcaaagcggcaaaaccttctatatatctccgggagcaaattcccgtttccaaaactacctgaacgaaactggtgagtgggtaaattcacgcagagtcgtcaacaaatttgtttcatcgctaaaatcagtccctcaatactcagccgctgatagcaaacgtcaaggagaggcagcaactctcaatctgaaatcctatacatggaattttgatattgtccctgccttcctcactaaaccagacagcaatggaaacacattttatctgatcccagacggcaacggtaactggaaacagaccgacccacgtattgataaagaccgtgcgactagagtgaaccaaaagcataatggcaatgtattgaacgttattcgtttagttaagtattggaagcgtaagcgcggtgtacctgcaatcggctcatatttactcgaaactattatgctcaactactatgacgaacttgctaaagattcaatgtcagaatctctcggtatcgaatttgcaggtgctttgcaagtattagcctctgcaatcgtcggttatgttgaggatcaaaaaaacttccaaggtgatataaatcatttaagttcagaagagcagaaaaaggtgcgagaaatggcacttgaagatgccaacaatgcaaaagaggctctatcaatagaatttactgatcctgaaaaatctggaaaaatatggcagaaagtgttaggtaaagattttccagtaggaaacgtataa

SEQ ID NO: 264099 - DNA, 933 bp, Klebsiella pneumoniae
atgaacgatttctatgaaaagcagaatgaacctcatatgctcaaacttcttgctgggcagcgtgagatctactctgaagtaaaagctattttaatgaaaggtttttttgctggggtagttatcccatcaatactatcatcaattttctttgtaatgagtttttatccaagttatacgggcccatggatgaaaacacttcttacgatctacggattagtattcttcattattaaccacttcataatggagtatgtcagtaactgtaagaaaaaagcagctcgtattcaggaggagtatgataccagtttgtttaacatggaatggaatgatatcgttgctggaaaaaaaatacctatttctgaaagcatagagtatgcccagaaacacttagctactgaaggtgaacgtcgcctccataactggtaccttaatgctcctatgagcgtttctgctcctttaatggtaatgctctgtcaaagtaagaacatgggatgggatgcaggtctaaaaaggaaaacttcaacatttctgagtattatcctagcgctgaacataattatgtttgcaataacatttattttcaccaatccgacatatctacaatttattgcatttgtagcaatattgcttccgacttaccaattttattatcggtacgttagtgagaataagaaatctgtcgcccgcgcagacgaacttcgcacacttgttgagaatacgctaaggcaagtagtaaaagaacatgcttacgacaaaaaagcgttagaaaagcagtcgcgtttagttcaggaccaaatttttaactacagggcaacagggaatccggtacctgattttatgcataaacgaaatcggactaaagatgaagagcgatatgatcgaatttttgaagaatattcttcacaattacaaggcattgcaacatcatcgtag

SEQ ID NO: 264100 - DNA, 2448 bp, Klebsiella pneumoniae
atgattccggcattcggacccattgaaaatgatagttatggagaaaaaacggtctatgccctgttaaaagaagggctgtccgatgatttcaccgtaattcatagtctcccgtggttgagttcggcggcccgacatatgggtatgaaactacctccaagtggagaaatagattttcttgttctccatcgtatctatggtgttttggctttagaggtaaaaagtgggatatatcgcgtagatggccctatttttgtacatctcaaaacaaataataatgtcgatgttgtgaagcaaacacgtaataatgttcatggattagcccgttggttaggaggaacaacaacgttacgattgcgtattggttatggctttatttttcctgatagctatttcgataataacgttataaatacagcaatggttgatgcgtctgtaagaccattcagaaaaatattcgttgataaaagccaactcccggaaattgcaaagtacactattgagataatgcaatattggaaatctgcattaggaaataatgatttaggaagtgaacgacttcaattaataataaaatctatatgcccgcaatttgatggtacacctgactggggaacccgaattatttatgataatcaactctggttaagactcacacatgaacaaattaaagtcattgaactcctgtcagaatatcaacgatttgttgtaactggatggccaggaacaggaaaaactttgattgggattgaattcgccaggcggtttgttaaagagcaaaaaaaagttttatttattactttcaataaccgtctttctgaatacattcgacaacaaactccagtttcattatgcgacgtttttacctggcacaaactctgtcatcaggctcgtaatagattagccctgcctcccgaggctccaacaggctggtttgaatcaggatgctgcgaggatttgcttagtgcattaaataaaagcaagctaaaggattatgatgctttaattattgacgaagcgcaggcgttacattcctcgtggttggaaaccttattttgttggtttgaaaataaaaggattattgcattttgtgatgaaacccaaacgttctcttttgaaaaagggacgaaccactttgatcttcaacggataattaattcccaattttccttcagcttaactattgtgttaagatgtcctaaagccgtcactgattatttaatggctatcaggccttcatcatatcaaattacgtcccccagaaataacgaacccgatacgttaaaagaattagttgttatcgacccacttgccacactgcttaatgaaatcttacgattgaaagcaagctctgtgccatctgatgaaattacagtccttgttcctactgatttagtgaagaactttcttcagaaagacatgaaaacttttaatataaatattgaaactgtatctcgttttcgtggtatggaatcaccagttgttattacactggattcctcaaacatggaggatgctcaattattttgtgcttattcaagagccacgactgcttttattgcaatttatgactccgagaaattagcatggagagaaaataatacttttttgcaacaactggttaatagaaaagaaactcagagggcaattaacgaagctaagcataactcctcatccaaagctcttatggctagttttttcagtaaaggggacctgaaacttaacagtgtaaaattagcatggtcagaagatctttcttcgtggcttattgagtttgatgcagaaaattcaccagcggaaacatgggttgattacttatactctcattatacttggccgattatatattggtccgtaaactcacgaagagttgtttattacattacaaatcaacaattcgaattaaacacattaggtgtagggacaagtttatcaataaaaaattgtgccatatgtgaaaagatgataccttttgattctgagaataattgtttgctttgcaataagaaaactgaagaatcgttaccaaccagacatgaaattaatgaaattcgcgagtttgatttaacaatctctcagaataattttaatccagctgttcaaaaagaaaagagacgattattacccataccgttagcggcggctagtgcccgaagagtggcatttgaaaaggcatatagaaataaagtactcagcgaatcattacccggcggaaaacttctctacagaagtgcattagctttgatacaggcttgggttgcgttattaccaccagataaaaccctagtattggatgagataacagacgcactacgtaaacgctatatccatcttgagcaattagaacgttctgaattaaggaatgctttagcctgtgcactgtcaacttgctacaataaaaagcatcttattaaagttgaaaaagggaaatatctacctattgacgactaa

SEQ ID NO: 264101 - DNA, 1194 bp, Klebsiella pneumoniae
atgtttaaagtcgatcagcccagcaatagcctgcaaccgcttcaggaaaccaccttcaccaacgcgggtttcaccgagcgctaccacttacaagaatggctggcgaagcatccgcaggcattaacccgcaacagtgatgatgaactacttatcatccagaaagagtttgccggatttgacgataccaaagagcgcctcgacctgctggcgatcgacaaagacggcaatctggtgatcatcgagaacaagctcgacgattccgggcgtgatgtcgtctggcaggcactgaagtacgcgggttactgcgcgaatttacgcaaagaacatatcgtcgagatcttccagcgttacctcgatcagaatgatccagaagaaacccgcccggcttctgacgtgctggcagaatttctcgagcacgacagtctggaagaggtgcaaattaaccagaaccgttcacagcgtatcatgatggtcgcggctaatttccgcaaagaagttaccaatacggcgctctggctgatgcagttcaacattcgcgttcagtgctttaaggtcatgccttaccgctatggaaatgatgtattcattgatatccgccaggttattcccacaccggaagccgaatcctacatgatcggtatggcgcagaaagaagcggaagaacagtcaaccagcggtgagctgaaacagagccaacgcctgcgtaaggccttctggacgcagatgctggagaaatttcatgccagcgactgtacgctgtataacaacatcagcccgtctatggatcactggttatgtgcaggctccggcataagtggtatgccgtatagcctgatattcagtaagaaggaaatccgcgtagaattatggatttcgcgagcctcggcggatatcaacactatggcattgaactggctggaacaacaccgtgcatctgtcgaagaggtattcggcaacccgttggagtggctatcgctgcccggtaaaaaagcctgtcgtattcaataccgccaaaaaatagatggcttccagcaggaaaactggccgcacatgatcgactggctggtggagcatatgacccgttttgaaaatgcgctttcgccgtatttgccacagcttaaccagttgatcaagcagacctttaacgggcatgatgaagctgaaattatcactgaagaagccgaacacgtttaa

SEQ ID NO: 264102 - DNA, 1320 bp, Klebsiella pneumoniae
atgaaattatctgatctggttgattttaaccctaaacgcgcactcaaaaagggtgtatatgcttcatttgtggaaatggcatctcttcctgaaaatgggagagatataagtaacattagcaataaaatattcactggcagtggctcgaaattttcaaatagtgatactttgtttgcccgaataacaccttgccttgaaaatggtaaaacgtctcttgtttctggactgcgggatgatgaggttgctttcggttccacggagttcattgttttatcagctaaagagcctgaatacgatagtgactatatttattatctttctcgtcttccagagttccgctcatttgctcaatctaggatggagggaacctctgggcggcaacgggtcgcgtggcaagctttagctgagtatgaatatgaattccctgataaagtatgtaggaaatatgctggagaacttctaaagaaattcgatgataaaattttattgaaccatcaaattaatcaaactttagaacaagtggcgcaagccctgttcaaaagttggtttgttgattttgaaccagttaaagcccaaattgcggtactggaagtgggcggttcacaggaagatgcaacacttgctgccatgacagcaatttctggaaaggatgctgattctttgaccatatttgagcaagagcatcctgaaaaatatgctgaactcagggctacggcagagttgttcccgtcgactatgcaggaaagtgaattaggggacattccggctggatggagttcgcaacgaatgtcaaatatagcaactcttcattacggaaaagcattaaaaaaaacagaacgcattgatgggccatatcctgtctatggatcgggtggggttaccggctctcacaacggctaccttgttgaagggcctggtattatagtgggcagaaaaggctcaattggtacaatttattgggaagatggaaaattccatccaattgatactgtctattacgtagccactaaagaagaaattccattaagttatttatattatttaatgaaaacattgaatctgcccagcatgaacaccgacgctgctgttcctgggttaaatagagataatgtttatcgtcttgaagtattgaaaccaactcaatctatcttgaatagattcgacaattacatagcaaccatcagaaacggtattcaaaaaaataataatacaatagtatccttagtgggtttacgcgacaccctcctccccaaactcctctccggcgaaatccccctaccggaagctgaagaattagccaaggaagctgactatgtttaa

SEQ ID NO: 264103 - DNA, 636 bp, Klebsiella pneumoniae
atgctgaaccatctctgccttgactggagtcaggccccttttaatgaaaagtatcttcaggctattatcaataccatggataatgcgctaatgcagcatcatagaaccctggccgtgcgtgttgatttacgattgcctgaatatcgcgatatcggagatagtataagttgcacacctaatataactcgagggttgctatcccgattcatccggtcagcgcagtcaaaaattgatgcctttcaaaaacgtcaggcaaagcagggtaaaaggattaatccatgcaaagttcgttatctatgggttaaagaaatagccgatgcgagtaaaccacatttccatgttgtcctgtttgtgaataaagatacttttcgtgggcttggggattttttgcatacaggagataacctgggctcgttcattcaggatgcctggctaagtgcgttaggattagaggattaccctgaatacaggcaacttgtacattttccagctaatcctttatacgtgctggatattaatgccgctaacttccagcaggcctacaacgcgttaacatttcggattagttatttcgctaaagaacacactaaagtttacgacgcctacgaacgctcaatcggctacagccagtgttaa

SEQ ID NO: 264104 - DNA, 1335 bp, Klebsiella pneumoniae; identical to SEQ ID NO: 215064

SEQ ID NO: 264105 - DNA, 390 bp, Klebsiella pneumoniae; identical to SEQ ID NO: 241185

SEQ ID NO: 264106 - DNA, 1593 bp, Klebsiella pneumoniae
gtgagcagcaaatttatcgacgcccatgaggcggcgcggtgggtcgccagcggcgacaccgtctgcaccgtcgggatgacgcttatcggcgcggcggagtccattttaagcgccatcgaagcgcgctttctgaccgcgggcgaaccgcgtgacctgacgctactgcatgccgcggggcaaagcgatcgccagcgcggtatccagcactttgcccatccgggtatggtgacccgccttatcggttcgcactggggcctggcgccgcgctggatggcgatgatcaacaacaacgaagtggaagcctggtgcctgccgcaggggcagatcgttcatctctatagcgcgatggccgccggactgccggggcggctttctcccgtcggtctcggtacctttgtcgatccgcgcatagagggcggaaggatgaacgcccgcacccgcgaacgacccaatctgatcgagcacgtcacgtttcgcggcgacgaatatctgttttatccggcccttcctctggacgtggtcattgtgcgcggcacccatgctgatgaagacggtaacctcacgaccgatgaagaggtgatgaagctggaagtcctgcacgccgttctcgccgccagacgctacggggcgaaggtgctggcgcaggtgaaatatcgcgtagcgaaaggctcgctgcatccgaaaagcatcaccgttcccggcaacctgatcgacgccattgtggtgtgcgaagagccgcagacggatcaccgccagacttcaagctgggccttcgacccagcgctgtgcggcgatatccaactgcccgccgcgcagaatgcgccgctgccgctggatctgcgcaagcttatcgggcggattgcctgccgctatctgacccccggctgcgtcatcaatctcggcaccggtattcccaatgacgtgattggcgccattattcatgaggaacagctcggggagcaggtcaccatcaccgtcgagtcagggatctacggcgggcagcaggcgggtggcgtggatttcggtatcggccgtaatctgagcgcgatgattagccaccaggatcaaatgctctactacaacggcgcaggggtcgacatcacctttatgggcgccggcgagatggacccgcacgggcacgtcaatgccacacggctcggcgcatcctgccccggcgcgggcggttttatcgatatcacccagaatgcccgccacgtcgtgttctgctcctcttttaccgccaaagggctggagatcgcctgtgaacacggggcactgcatatccgccgcgaaggcgaggtgcgtaaattcgtcgccggggtaaaccagatttcttacaacggcgaactggcccgcgccaaaggacaagccatgcattacgtcaccgaacgggcggttttcgaactgcgcccggaaggaccggtgctgacggaaatcgcccccggcatcgatcttgagcgcgacatcctggcgcatatggattttcatccggcgatcgccgcggatcttcaggttatggacagccgaatgttcgccccgccgccctgcggtctcgcggaacatctgtcccggaattcatcctctgactcataa

SEQ ID NO: 264107 - DNA, 735 bp, Klebsiella pneumoniae
atgaaacttgccagtaaaaccgccattgtcaccggcgccgcacgcggtatcggctttggcattgcccaggtgcttgcgcgggaaggcgcgcgagtgattatcgccgatcgtgatgcacacggcgaagccgccgccgcttccctgcgcgaatcgggcgcacaggcgctgtttatcagctgcaatatcgctgaaaaaacgcaggtcgaagccctgttttcccaggccgaagaggcgtttggcccggtagacattctggtgaataacgccggaatcaaccgcgacgccatgctgcacaaattaacggaagcggactgggacacggttatcgacattaacctgaaaggcactttcctctgtatgcagcaggccgctatccgcatgcgcgagcgcggcgcgggccgcattatcaatatcgcttccgccagctggcttggcaacgtcgggcaaaccaactattcggcgtcaaaagccggcgtggtgggaatgaccaaaaccgcctgccgcgaactggcgaaaaaaggtgtcacggtgaatgccatctgcccgggctttatcgataccgacatgacgcgcggcgtaccggaaaacgtctggcaaatcatgatcagtaaaatccccgcgggttatgccggcgaggcgaaagacgtcggcgagtgcgtggcgtttctggcgtccgatggcgcgcgctatatcaatggtgaagtgattaacgtcggcggcggcatggtgctgtaa

SEQ ID NO: 264108 - DNA, 1338 bp, Klebsiella pneumoniae
atgtccgcaataaatgaaaaggcggtaaacgggacgcagctgcaacgcacccataaaaaaatctaccgccatttgatgccgctgcttatcgtggcgtacatcatcagctttattgatcgtaccaatattggcatggcgaaagcgaccatgtcggtggatatcggcctttccgcaaccgcattcggcctcggggccgggttgttttttctcacctacgcagtgctggagatccccagtaacctgtttctcacccggattggcgcacggcgctggatagctcgcatcatgattacctggggcatcctctcctgcggtatggcgtttgtcaccgggcctacgtccttttacgtgatgcgccttctgctcggcgccgccgaagcgggactctatccgggcattatttactacctcaccctctggtttggccgcgaagagcgcgcaaaagccaccggcctgttcctgctgggggtctgtctggccaatattatcggcgcgccgctgggcggattgttattaagccttgatggcatgtccggctggcacggctggcagtggatgttctttatcgaagggctgcctgcgatagcgctggcgttcgtcgtctggcgcagactgccggataaaccagccgacgcccgctggctggacagcgacgatgtgcaagccattaacgcggtactggcgaaagaagccgaggaaacgcgccatacgccgagccgtttctccctgaaaaccgcgctgtccacccgagtgtttttgttgctggtgctgatttactttacccaccagttttcggtttacggcctgagttatttcctgccggggatcatcggtagctggggccagcttactccgctgcagattggtctgctgaccgccatcccgtggattgccgccgccgcgggtgggatcctgctgccgcgattcgcccgcacggaacagcgttcccgcagcatgctgatggccggatatctggtcatggcgaccggcatggcgattggcgccattgccggccacggtgtggcgctgcttggcttctcgctggccgctttcatgttcttcgctatgcaatccatcatctttaactggctcccgtccatcatgagcgggcatatgctggcgggcagcttcggcctgctcaactgcctcgggctgtgcgggggctttctcgggccgtttattctcggcgcgtttgaggaccgcaccggtgcggcaacgtccggcttatggttcgctgtcgcgctactgattatcggcgcgctggtgtccctgtttctcaaaagttcctcatccccaggctccgtatcggcgaaacaggcccacggcgaaaaagtgtaa

SEQ ID NO: 264109 - DNA, 879 bp, Klebsiella pneumoniae
atgcgcattgaagtgttactggatttaaaaacccgactcggcgaaagcccggtctgggatgtcgaacagcagcgtctttggtgggtggacagcctcgacgggcgcctgttcgcctgcaacgcgcagggcggcgcgatcaagagctgggacgtgcgacagaaaattggctctttcgccctgcgccagaacggcgaaggcgcggtggtggcgctgcagaatggcgttcatctgctcgacttcgccagcggcgagctgacgctgttgcaccatccggaagcggaccgaccctttaaccggctcaacgacggcaaagtcgatcgtcagggacgctttctgttcgggtcaatggatatgcgcgaagaggaaccgagcggcgcgctatatcgcctggaccccgatctgtccctgcacgtgctgaagaaagacattatcgtctctaacgccccctgctggagcccctccggcgagaccttctattttgccgatacctggacgggcgaaatctgcgcctgggactacaacaccgcgaccggcgatctttccggcgaacgggtcttttgccatgtcgatcgcagcgaaggcggcgcggcggacggcgccaccgtggacagcgaaggctatctgtggaacgcgctggtctacgcgggcaagctggtgcgctataccccggagggcaaggtcgatcgcatcattgagatgccggtgaaaaaagtgaccagcgtgatgttcggcggcgaaaaccttgatgtgctgtacgtcacctccatggcgcagccgcccctgccgcgcttcccggaagataatcagctgcgcggcagcctgttcgccatttacgacctgggcgtgaccggcgtagcggaacggcgcttcgccggctaa

SEQ ID NO: 264110 - DNA, 1371 bp, Klebsiella pneumoniae
atgctgtcgcgacgccgcggagtaaacacgactatgacaacaatcaatcacacacctgccggcgaacaacgtggcaaaaagcggctgatacatcgcttctcctgggtttcgctactggtttgctggctaatctgggtgcttaacgcctacgatcgcgagatgatcctgcgccttggcccggtcatctctaaggagttctcgctctcgccggaacagtggggcaatatcgtcgccctgatcatggtagcccttgcggtgctggatattcccggctccatctggagcgatcgctacgggtctggctggaaacgagcgcgctttcaggtaccgctggtgctgggctataccgcgctgtcttttatttccgggattaaagcgatcagccacgggctgacggcctttgtgctgctgcgcgtgggcgtcaaccttggggccggctggggcgaacccgtcggcgtcagcaacaccgcggagtggtggccgaaagagaagcgtggttttgcgctgggggtgcatcataccggctatccgattggcgcgctgctgagcggcgtggtggcaagcctggtgcttgccacgtttggcgaaggcagctggcgctactgcttcctgctggcgctgctcgtcgccatcccgctaatgatcttctgggcaaaatattctaccgccgaccgcatcaacacgctttatcagcatatcgacagccaggggttgacgcgcccggcgacgcaggaaagcagccatgtcgccaaaggcgaagggatgaagacctttttacgcaccctgcgcaaccgcaatatttcgctgacggcgggcaataccctgctgacgcaaatcgtctatatgggcattaacgttgtactgcccccgtatctttatcacgtctccggcctgtcgctggcggcgtccgccgggctgagtattatcttcacgcttaccggtaccctgggtcaggtaatctggccctggctgtcggatagctttggccgtaaacgaaccctgatcgtctgcggtctgtggatgagtatcggcattgcgctgttctatttcgccaccaatatgccgcgccttatcgccattcagctattttttggcctggtggccaacgccgtgtggcctatctactacgccatggcgtcggactccgccgaagaacgcgccacctctaccgctaacggaattatcaccacggcgatgtttatcggcggcggcatttcgccattgcttatgggctggctcattcagtttggcggcggctgggaaaatccagcgggttatatctacgccttctttaccatggcgggatgtgcgctgctggggatgttattacagctcatgaccaccgataaaacgccgcgcaaagcgcattaa

SEQ ID NO: 264111 - DNA, 1176 bp, Klebsiella pneumoniae
atgaagattgttatcgcgctggattcgtttaaaggtagctgtagcgcgcaggccgcttgcgcagcggtagcccagggattgcgccgggttgaccagacgctggagctggtcgaaatgcccgtgtccgacggcggagagggactgctgtcgactctggcggatagtccgttgcttaagggggcggtgtggcaacagcagcgctgtacctcgccttatggcctctccctgcaggcggatttcctgatcctgcccggcgagcgggccattatcgagatggcgcaaagctgtgggctcgaactcacgccgccagcgcagcgggatgtgcgtcaggccagcagctacgggctgggcgaacaggtaaaggcggcgctggacgccgggtgtcggcacttgattatcggcctgggcggcagcgcgaccaacgatggcggcatcggttttgcccaggcgctcggcgcacgattctggcgtaaggacggcaccctgctgccggctcccgcggcaggtcaggacctggcgcatattcagcgcatcgatttgagcggtctggacccgcgtctacagcaaagcgaaatacaggcctcctgcgatgtcactaaccctctgcttggcgagcatggcgccacctgggtgtatggggcgcagaaaggcgcggacgaggcagcgctcagcgagctggaggcgggaatggcgcattatagccagctgcttacgcaaaccctcggattcgacgtcagcgagcggcccggcgccggggccgcgggcggtatgggggctgcgcttatcgcctataccggcgccacgctgcgtccgggcattgacctggtgctggagctgcttaacgccgacgaccatcttcgcgatgccgcgctgacgatcgtgggtgaaggctggctcgatcggcagagcgcctttggtaaggccccggtgggcgtggcaggcaaagccgcacgccatggcgtgccggttgtggccctttgcggcgggcgtgatgagagcagccggcaattatatcaacaccatattgacgcaatgtggtctatttgccagcgccctatggcgctggcagagtcgatgaacacatgcgaaccgctcctcgccgacgccgcggagaatgttctacgaacctttctgagcgggtggcgcggagaggcacataagcggataactgtatga

SEQ ID NO: 264112 - DNA, 1158 bp, Klebsiella pneumoniae
atgattattacaacagcgctggctaatgaaattgtcgcccgggcaatggcgataattcatcataacgtgaatgtgattgaccatcatggacagatcattgcctcaggtgaacggcatcgtatcggcgaacagcatgaagtcgcccgggaggtaatacgcaccgggaaacgcatttgtattaacaacgccgcggaagccgcgcgttttcacaacgtgcatcctggtattaatcatcccattatctatgacgatcgcgtggtgatggtggtaggcatcagcggcgatcccgcggcgataagccgctatgctgaactggcggtgctcaccgccgaactgctggtccgccaggccatagagatgcgggaaaccaactggcggcaacgtctgcgtgacaccttgttttgtcagtatctggaacaaggggctacgcccgccgggcaagaagctcttcatcgcctgctggaacttggtttcgattttgatacaccgcgggttccgatcgtagtgaccgtgcaggtcgaacagcatcagttaagcgacatactgagtacgctgttgcgggaattctcgcagctctccggcgtaagtgacgttattttgctgggcagccatgaaatattgatcctcaacgcgctaagcgaagcccaggaaactctgctgcggggcattgagtttgtactgagtaatcagataagccattaccatatcgggattggcgtgcaggcggacagcgccccggacattcgcgaggccattcggttcgcccgctcggtgatcgaagtgggtagcaaagtgcagccgcagcggcagatctactactttcgcgaaatggcaatgctctgcctgttcagggtgctggaagacagctatatggtcaatttttttatcaataacgtacgccagctgcttgagcatgattccggcgaagtgctgctggataccctgagcagctttattgccaataatgccgaaccgggcaaaacgtcgctgctgttggggattcatcgtaatacgctcacctatcggctgcagcaaattaaaaagcatatacagctcgatccgatggtcttcaccgacctgacgcagctggcggtgtcggtacactgttatcgccggctgaatccgcgccagagcgaatggattgatagcttaagctaa

SEQ ID NO: 264113 - DNA, 876 bp, Klebsiella pneumoniae
atgagtacattaccaaaggtcgcggtgctgggactcggcgccatgggacacgcttttgccagtaacctgctgaaaaacggctttaccgttgccggctggaaccgttcgccagcccgcggcgaagatttacaggcgcatgggttatctctgcacgccacgccgcagcaggcggtggccgatgccgaggtgatcatcagtatgctcgccgacggcgaggccaccctcgaggtactggcgcaaatcgcgcccgcctgtcagccgcaggcgatctattgccagatgggcaccattggcctgccggagacccggcaggccatcgcgttgttgcgggaacttcagccagcgatgacctatattgatgccccggtgtcggggaccaaagccccagcggagaaggcacagatcctggtgctcgccagcggcgatagggaaaagggcgccgctgccgaaccggtgtttgcggctatctcccgcgggacgcagtggtttggcgaggcgggcaacagccagaaaatgaagctggtcctcaatgcctggctgatttcgatgatgcagggcatcgcggaaagcgcccagctggcgaagacgctgggcttcacccccgaccagctgtggagcgccctggaaggcggcccgctggcggcgccctatgtcaaagtgaaactggacgccatcgccagcgagcagtttaccccgcagatgcagctggcgcatgccctgaaagatgcccggctggcgctttccctggccgagccgcacaccatgccggggctggaaaacatcgccgaactgtggcagcaggcggcggacgcgggatatgccggagaggatttgtctgcggtatatcagtggctgtcgccgtcgtcaaaagcgtag

SEQ ID NO: 264114 - DNA, 885 bp, Klebsiella pneumoniae
atgcgactggatctggccgatctgcggctatttatcgccatcgtggataccggtagtatcaccggcggagcggcgaatgcccatctggccctggcgtccgccagtgagaggctgcgcaagatggaggccgagatcggcgtgccgctgttgcaccgtcatgcccgcggggtgacgatgacagaggccggggaggtactggcgcgccatgcccgcccgcttcttgcgcagcagcagcgtctgcgccaggcgatgcacgccttcgcctgcggtcagcgggggacgctgcgcctgttcgccaacacctcggcgatgtcggcctttctgccggggaagcttgccgcctggatggcagcgcacccggcggtgcagatcgaaaccgaagaacgcaccagcgcggatatcgtcagctgtatcctggcgggcgtggcgcaggccggagtggtgtccgatgcggtcgacgccgggccgctgcgcctcgatcccgtcgctgacgacccgctggtgctgatcgtgccgccagctcgccctctggccgaaaaacaggaagtggcgtttgcggcggtgctcaacgagccgttggtcgccctctatcagaccagtgcgctacagcagcatatcgaacagcacgcagctgaactcggccaggcgctaaacgttcgggtcaggatgagccattttgcagggctttgcgagatggtggcgcacggcgccggcgaggcgatcctgccgcgcgttattgccgagcgttaccggcagcgctattcgtttgccgtcatcgggttacaggaccgctgggcgcagcgccgtttgtgcctgtgctatcaggatgacgccagcctgtcgccagcgatgcgccgcttactggaatggcttcgtcagccttga

SEQ ID NO: 264115 - DNA, 744 bp, Klebsiella pneumoniae
atgttcgatttacacacgatctctttcctgttgatctttattgccgccgggctggtcaaaggggtgaccggcatgggattgcccaccgtggcgatgggcctgcttggcctgctgatgccgccgcaggccgcagcggcgctgctggtgcttccctcgctgctcaccaatctctggcagttactggcaggcccggcgctggcgcagattgtacgccgtctctggcttatgatgaccgggattattattggcacgttggccggatcctcactgctgatcggcctcaatcctcggtggtcggcgctggcgcttggcgccgcattgatagtctatgccgggtatgcgctctgcagtccggtgtttcaggtttccggccgcgtggagaagtggctgtcgccgctcatgggcgggctgaccggcgttatcaccggggcgaccggggtatttgttattccggccgttccctggctacaggcgctgggctttcgtcgcgacgagctggtgcaggccctggggttgtcgttcaccctttccaccctggcgttggcggctggcctcgccctgcacgatggctggcatgatgatgcatggctattgtcggcgctggcgctgttgccggcactgctcggcatgtggctgggacagcggatccgctcacgtctcagcccgcagcgctttcgtcagggctttctgttgttcctgctggcgctggggatagagctgatcgcccggggatggctggtctga

SEQ ID NO: 264116 - DNA, 699 bp, Klebsiella pneumoniae
gtgatttataaaaagattgccactgaactgcggacccgcatcaacagcgacgactatgccgtcggcgatatgctgcccagcgaaaaagcgctcgccgcggagctgaaggtctcggtgatgacgctgcgcaaagcgctggcgctactggaggaagaaaagctgatcgcgcggcggcacggcagcggaacctgcattgtgcgtaaaagtaactatcatggcggggaactggagggctttaactaccagatgcaggtggtgggcgtcaccaactaccgtaacaaagttattgaatttacgctgcttgatgccccgccagccattgcccagcagttaaagatccagccgggggagaaagtgtattacgtcagacggctgcggctgatcgatgaggtcccaatcctggtggaaaacagctatatccccttcgccaccttcccctggctcagcgtgggtaacctcgagcagtctaagttcaactattttaaaaaagagtgccatatcaccatcatcgagagccaccgcagctataccccggtgctggcgacccgtgagcaggcggagctgctgcaggtggcgccaaacagcctcctgctgcgggtgcaatcgatcagctacgcccagaaccgggcgatcgtcgatttctcagagatctaccagaacaccagtaagtataatgtgaagcacattacccgccgctag

SEQ ID NO: 264117 - DNA, 1533 bp, Klebsiella pneumoniae
atgattggagtgaaaaagcttcaggacttttccaaggcgatgatcgggccggtactgtatctgccagctatcggcctgttgatcgccctgttcagcatgacgaccaaccggctgtgggtggatgaaagcagcgggctctacctgatggggaaatttgtctccagtatgctctgggcgctgatgaaccatctagggtttctgttctgccttgggctggccagcggtctggcgaaaacccgcaaggccgaagcggccttcgtggcggccatgacctggctgatgtacctggcggcgaataatagctggctaaccctcacccatcgcctggcgaccggagccaccaacgcgcaactgtacggcagcggacaaacctttatcttcggttttcaggttatcgatatgggcgtattccttgggattatccttggctgcgctgtcgcctttgtccataatcgcgtggttgggattgagtttcgcggcgcgctgtcgatctacggcaacagtaagctggtgctgatcgtgatgctgccgctggttggcatgttcgccatcgccaccgtctatctctggccggtagtggagctgggcatctcggcgctgaccggctttatgaaatcctttggcgccatcggggtcttcctgtacggctttctcaaccggttcctgatccccaccgggctgcatcatctgatctggtcgccgttcgtttttacctctatcggcggtcagctgctgatcgatggtcagaccgtcattggcgctaagcctattttcctggccgaaatcgcccgccaccccgttgacgcgctcagtgattccgcccgtttcctcacctatgggatggtgaagatttttggcaccgccggcatggcgctcgccttctaccgtacggcgaaaccggagaataagcagcggttgaaagtcacgctgatccccttgattgttacctccgtcctggtggggatcaccgaaccttttgagtttctctttatcttcaccgccccattgctgtggcttatctactccctgctggacggttttttccagatgctggcctggctgcttcacgtcagggtctgcgccactaacggtctcatcgatttcgtcgtctataacctcccggcgggagtcagcgcgacgcgctggccggtgtttgtcgccctcggtctgctggaaaccgcgaccatgtacctggtcggcaccttctgtattacccgtctgcggctgctcaccccgggccgcgaaaccgcagccgaagatgagcattcgcaacaggctaatagcgagcatccggataaaggcgcgctggtgattgccgggctgggagggaaagagaatgtctgtgcggtgggcaactgttttacccgtctgcgggttgatgtgcgggaccccgcccttatccaacagacgctgttgaaagagagcggcgggagcagcgtgctgattaaaggaaaccatgtccaggttatctatggcctgggagttaacaaaattcgaacggcggtcaacgccagtctgggtgttactgaataa

SEQ ID NO: 264118 - DNA, 1329 bp, Klebsiella pneumoniae
atgaaagataattttgtggtcaccattgccggcggcggcagtacttatacccctgggattgtgatgatgttactggaaaatatgtcgcgctttcccctgcgggagatccgtctgtacgacaaccatcaccagcgtcagaagactatcggcgacgcctgcgccatcctggtggctgaacgcttcccacaggtgaagttcagctataccaccgatccgcaggcggcctttaccgacgtcgatttcgtgatggcgcatattcgcgttggcctgtatgagatgcgggaaaaggatgaaaagatcccgctgaaatatggcgtgccgggccaggagacctgtggtccgggtgggattgcctacggtatgcgctcgattgccggggtgctggagctggtcgattatatgcagcagtacgcaccaggggcctggatgctcaactactccaacccggcggctatcgtcgcggaagcgacccgtcgcctgcggcccgacgcgcgcatcatcaacatctgcgatatgccggtggctatcgagggtctgttcgccgacatcctcggcctgccgtcgcgcaaagcgctgaacgttcgttactatggcctgaaccacttcggctggtggaccagcatcaccgataaagccggtaacgatttgatgccggcgctgaagcgtcacgtggcggagcagggatacagcagcccaaaagaagactttcagcataaggcgccgagttggatcgagacctttaaaaaggtgaaggatgtgtttgccctcgatccgacgacgctgcctaacacctatctgaaatactatctctaccccgactatgaagtggcgcattccgacccggagtttacgcgggccaacgaggtgatggccgggcgcgaaaaagaggtctttgatatggcccgggagatcacccgtcgcggcacggcggaaggcgcgcatttccatgccggggcccatgccacctttatcgtcgacctcgcctgcgccatcgcctttaacacccaggagcggatgctgttgatcgtcgagaacaacggagccatcgccaacttcgatgagacggcgatggtggaagtcccctgcctggtgggcgttaatggtccggaaccgctggcgatggggaaaatcccgtcattccagaaagggttgatggagcagcaggtggcggttgagaaactggtggttgaggcctggattgagggcagttaccagaaactgtggcaggccatcgccctgtcgaaaacggtgcccagcgcttcggtggcgaaagccatcctcgatgaactgatcgtcgccaacgaaggctactggcccgcactgcactga

SEQ ID NO: 264119 - DNA, 1446 bp, Klebsiella pneumoniae
atgtcatttataacaaacctgaaccagcaacagagaaaacgacttcatcagatcaccttagtggccaccttcggcggcctgcttttcggttacgacaccggcgttatcaacggcgccttttcctcactgaagcagtacatggcgctgaccccaaccaccgaagggctggtaatgagcgttctgctggtcggcgccgcgctgggcagcgtgtttggcggcaaatttgccgattacttcggccggcgtaaatatttactctttctctcctttgtttttctcatcggcgcgttgctttccgccgcggcccccgatatcactatcctgctgattgcccgcgccctgctgggctatgccgtcggcggcgcttcggtcaccgcccccacttttatttcagaagtggcgcctaccgagatgcgcggcaagctgaccggcctgaatgaagtcgccatcgtcattggccagctggcggcgtttgccatcaacgcgatcattggcatcatctggggccatctgccggacgtctggcgctatatgctgctggtacaagcgattccggccatctgcctgttcgttggcatgtggcgcgcgccggaaagcccgcgctggctgatcagcaaaaatcgtcatgatgaagcgctgcatatcctcaaacaaatccgcccggcggaacgcgcgcagaaggagtacgatgacatctctaccctgatcaaaattgaagctggtaataagtacagcgcccagagcacctttgcgacgattgtcaaaacaccctggatcctcaaaattttgctggtcggcattacctgggccgcactgcagcaaaccaccggcgttaacgtcattatgtattacggtacggaaatcctgagtgccgccggtttctcagagcgtacttcgctgatctgcaacgtgctgaacggtgttttctccgtgggcggtatgctgatcggggtactgttccttgtcgaccgcttcaaacgtaagacaatcatcatctacggtttcgccattatggcaaccctgcatctgattatcgccgctgtcgattacaccctggtgggtgacctgaaagctaccgccatctggctgctgggcgcgctgttcgtcggcgtgatgcagggctccatgggctttattacctgggtggtattagccgaactgttcccgctgaaattccgcggactgtcgatggggatctcggtatttttcatgtggatcatgaacgcggtggtcagctatctgttcccgctactgcaggcaaaactgggccttgggccagtcttctttatcttcgccgccattaactatttagccattcttttcgtggtctttgccctgcccgagacctccaataaatcgcttgagcagttagaagcagagctgtcagcaaaccatgaagataaaaaatccactcgtctcaccagggaggttggttatgatcgataa

SEQ ID NO: 264120 - DNA, 444 bp, Klebsiella pneumoniae
atgatcgataacatcacgctggataatctgcatattgactgcaaagccagtaataaagcggaagtcatcgccatgatcggcgcggagtttaaagccaaaggctatgtcaatcaggaatgtgtccactttctgctggagcgtgaacatcaggtctcgacctttttaggcaatggcatcaccctgccgcatttgccgaaatccgcgacggatatcatccttaaaaccgggattgagatctatcagtttcctgatggcgtaatctgggatcggagcaatgtaatgtttattgccatcggcgtgatcgcgaaagagaaagagcatattgacgtactcaaggaaattgcctcgatatttagcgatgagctgatcgctaatgcactgtcattaatctctgacaaacatgatttcctgaaaattctgcagcataacgccttgccccattaa

SEQ ID NO: 264121 - DNA, 240 bp, Klebsiella pneumoniae
atgtgtaatgcgtttaacggtattgcgattgtcctctgctttcgtggcataagcagcgtcaccggtttcagcgaggcgatctggcaggtcatcatcacgctggctattatcatatcaacctggtacagcgctaactattttgctgcgctggaagctcgacgcgataaacgacgctatctgctgctggcctgggtggtcatgaccattctgttgaattttattcaccttggcggtggttaa

SEQ ID NO: 264122 - DNA, 141 bp, Klebsiella pneumoniae
atgacgctggcgatgctgttggtgcttatcagccaccataaagggctgacgctcttgctgatcgtaattattacgctgctgtttattgcgctcactccgctggtcaaaaaactgttgagtcaccttcaccatcgttcctga

SEQ ID NO: 264123 - DNA, 930 bp, Klebsiella pneumoniae
ttgagttcagggagcatcacaacaggtcgtacgagcgggctgctgacgctggcgattggcgcactcttctacagcagcggcagtattgcccggccggatcttcagccgctggggccgaacattgcggataaagggtcggcgttttaccactttacgcaacgccagtatgactctgccgatggcgaacgtcactaccgggtatggaccgcagtgccggacaaagccccgcccgccgccggctatccggtactgtatatgttggatggcaacgcggtgatggataaactcgacgacgcgtttctgcagcagctcttcgccggctccccgccggtgatcgtcgctatcggctaccagaccgcgctgccctttgataccgcagcccgcgcctgggattacaccccaccgctaaagacgcatgagcctcgcgccgggaaacccgcgctaccgccgcgtaaaaccggcggcaatgatgtttttcgccagctgctgaccgaaacgatggttccccagacggaagctaacctgaaaatagatccccaccagcgcgctatctggggccactcctacggcggattgtttgtgctcgacgcgtggaggaaggcttcgccgtttgggatctactattccgccagcccgtcgctaggtcaggccctgcaatcgcctttgcaggcaagccaaagtcttgatgccgtccgctttcgcgggaaatcgctgtacctactcgagggtgacggtaaagcccgtggagagccgtccgggcacgaggcctcgcttgaggtgttgcgtcaaacccaacagcagcttgccagtaaagggttgaccgtagccttctggcgctaccccggtctgacgcacggtcagatgttcgaggtctcgctgcgctcggcgctgctgcatctttccgggcaggcagcgcttgcgcatcagtaa

SEQ ID NO: 264124 - DNA, 1656 bp, Klebsiella pneumoniae
atgagtaacgatcacctgacggatattgcctatcgccactttattgaaagcgttaaagattatgccatctatatgctgagcgccgacggcacggtcattagctggaatgagggcgcccgccgggcaaaagggtacctgagcgacgagatcatcggtcgctacttcggtctcttctatagcgaagctgagcaactctccggtgtacccgcaaaaaacctggaaatcgccctgcgtagcgggcagtttgaaggggaaggctggcggtatcgcaaagacgggtcccgattctgggcgcatgtcatgatcgataccatccgcgatgagcagaacaccctgctgggttttgccaaaattacccgcgacattagtgaacagaaggcgattaacgaccgcatcgcctggatggcgcgctacgatgcgttaaccggtttacccaatcgagtggagttttttgaacgggtggagaagctgatcactggaaatgatgcccgccgctttgccattttcacgatcgatttagacaaatttaaagagattaacgatctgcagggccatctgattggtgaccagctgctgcagcgcgtggcgggcgccgtgctcaaaacgctgcagaaggaggagatggtcgcccgcttcggcggcgatgagtttgtggccgttaaacctttttccgatgagggtgaagtggatgcctttgctgcgcgcctgtggcactgcttcagcggtaagcagacgtttgccgcgacggaagtggttctctccgccagcattggcatctcagtctacccggaggacggcacggatattaatacgatactgagcaattccgatctggctatgtatcgggcaaaaagcagcctcgaccataagatttgctggtatgaacgtgaaatggatgacaagacgcggcagcgcaatatgatggccgccgatatccggcgcggtattcacgccggggagttttcgctccactatcaggctatccgcaacatcaaagatcgtagcatcaccggttacgaggcgctgctgcgctggcagcatccgcagctggggacgatcccgccggacgtgtttattcccatcgccgaagagagcggcgccatcgtgcccttaggttactgggtgctcgagcaggtgtgtaacgaatcgctggaaaatggtttgaacagaaaagtttcggtcaatatctctccggtgcagttgcgtcatcgtagctttatcgaaaaagtccgcgagatcctgatgcgtaccgcctacccggtcagtctgctggagtttgaggtcaccgaaacggcgtttgtgatcaataaacagctggcgttcagcgttctgcatcatctgcaaaaaatggggatcagtattgcgctggatgactttggcaccggttactcctccctgagcatgctgcgcgattttcatttcgacgtcatcaaactcgaccgcagctttatgacagatgtggagagcaaccctcaggtacgctcattcgtgcgagccattatttcgctgggcaattcgatcaatacgccgcttatcgccgagggggtggaaacggctggacaactgcagatcctcgaagaggagggatgtgacgagatgcagggatttctgttcggcgagccggtcgatatcaaacacctgcccgaccggcgctga

SEQ ID NO: 264125 - DNA, 249 bp, Klebsiella pneumoniae
atgttgcgtgattatttaaaagtggaaaaagaagaccagcttgttgaacaacagagtcggcatgacaatagccagcattattcttcggtgaccgaatgggttattttaagtaaagatggccagcgcaaaggacgggtatccctgtttgaccgcttcaccacccgccgctcctggagcgacagtttccgcattacgcagttcgataatgcgggtaaagtggtggtggataaactcactgacgcgctgtaa

SEQ ID NO: 264126 - DNA, 219 bp, Klebsiella pneumoniae
atgggaatcgtcaaaatctccgatctgctgcacgatgatattcgtgatgccagcaaagccatgtcccgttccgtcaatgcccaggcggaatactggatccgtctgggcatgatgagcgaactctaccctgggcttaaccaccagcagatcaaactgctgatgctgaaatccggttctgaccgtctgctggaggtgatcaatgccatcaataatcattaa

SEQ ID NO: 264127 - DNA, 783 bp, Klebsiella pneumoniae
atgccatcaataatcattaaaaccgccgacgaactcgcccggcagcgccatgccggccagctgctggcgtcggtgtttgatatgctggatacttttatcgttcccggcgtaacgacgatggcgattaacgatcgagtggaagattttatcgtcaaccagctgcacgcccgcccggccagcaaggggcaatacgattttccctatgtgttgaacacttccattaacgatgtggtgtgccacgggatccccaaagcgaccgaacatctgcgctccgggatgattgttaacgtcgatatcaccctcgagaaagcgggcatgattgccgactccagtaagatgtacctgataggcgatgtctccccgctggcccgccggctggtaaagactacctatgaagcgatgtggaaaggtattgaggtggtgaagcctggcgcgacgctgggcgatattggccacgctattcagcgctgggtggaggaacatggctatagcgtggtcagagaatattgcggtcacggcgtcggtcaggaaatgcatgaggaaccgcaggtgctgcattacggccgccccggagaaggcgccgtgctgcaggaaggcatggtgttcaccattgagccgatggtcaaccagggcgacagccgtatcaaaaccaaaaaagatggctggacggtggttacccgcgataaaaaactctccgcgcaatgggagcacaccgtggccgtcaccgccaacggttttgaggtgctgacgttacgcgacgatgaacagtcgcggatccgctga

SEQ ID NO: 264128 - DNA, 288 bp, Klebsiella pneumoniae
atgtctccattccgtctcgctctgctatgtctgtgcctggcgccgctggcgtcgtctgctgcgctttccggccaggttcatttttcaggacgggtcatcaatccggcctgtgttatcgccccccggcacgatcgtatcgatgtctcgtgccagcaccattcaccggaacatgtcgccttgacaaacaaccgtcctcgctacgccatgccggacaatcgcggtgaggtcagtattcactggcgaaatgcgcagcatagtgaagcggatgtcattattcgctatcgctaa

SEQ ID NO: 264129 - DNA, 564 bp, Klebsiella pneumoniae
atgaaagaaaaaggcaccctgctggttgttggttcactgctggccttaagtctggctactgtgaccaccgcccgcgcggcgggtacactgaatttcaccggtaaaattattaacgagtcctgccagatcgccaataacggtggcgatgttaatgtcgattttggcaacgtcgatatgtcggcgctgaaatcccatgaagcgaaaaccgcagaaacgccgttcactatcaacctcaccggttgcccactggcgcagaacatcagtatcagcctggaaggtactccagacaccaacgctaacggcaccagcgccgccgtgctggcgctctctgacgccgcggataccgccaaaggggtgggcattgaagtcttctcttcccctgacggctcaacggaaggcactcagctgacctttgacaagcagagcaaaacggcggtttcgcaagccgacgaaaacggtgatattgcatttaactttattgccgatctgaagagcgattcctcacaggatgtcaccgccggcaatattaatgccacggccaatattgatattgtgtacgaatag

SEQ ID NO: 264130 - DNA, 696 bp, Klebsiella pneumoniae
atgcagtgttataaagcggcttttatcctgagccttctcttttgcccgttcctggcgtctgccgccggggttgccattgccggcacacgtgtcatttataatgaacaaagccatgaggctgacatcacggtaaaaaacaccaatcctcacgatccggtgcttattcagagctgggtagacgatctggctgataataataaatcaccgtttatcgtcaccccgccattgttccgtctggatgccggagacagcaacgatctgcgcgtgttattaacctcggcgcaactgccaaacgatcgggaaagtttgttcaccctgaatatcaaagtgatccctgccaataccgcgccggctggcgagaacattctgcaatttgctataaagaatcaactgaagctcatttatcgcccggcagggctccctggctcggcgctcgacgcggcgcagcacctgcgctggcgggtcagcggcaaccacctgcaggcggagaatgcctccccctattatgtgactatcaccacgctcacctgcgcgggccagaaccagaaaacgccgcttgagcgcagcgtgattgctcctcacagccgtgaagagtattccctccccggcgaggcctgcgcccgcgaggtgagctggcgcattctggatgactttggcgctgtgcagacgtttagcgcccccgtttcggcgcactaa

SEQ ID NO: 264131 - DNA, 2502 bp, Klebsiella pneumoniae
atgcgccacggcccggctcataccgttaccgtcgtcagcctctccatcctgctgggcggacagagcgcgctcttgcacgcccaggcgacctttaatatggatctgctggagaaaaacgaccatttgccggcagtggatctgcaacgcttcaatcagcaggcgggccagccgccaggcgcctatccggtgagctggcaggtcaacggcgtcacgctggacgcccgtaagaccgtcacgtttcgccagaacgatcgcggacagctcacgccctgccttaagccggaagatctgctgcaggccggagttaacccggccgtgctgtcccaggcgaccggcgcaacgtcccgctcatgtcccgaactcaacgcgctgctgccgggcagcacggtcaatttcgattttgctcatcagcggctggtaatgaccattcctcaggcgctgatgacgcaccgggcgagggataatgttccctctgcgctgtgggacgaaggtattagcgcctttcagagtaactatcgttattcaggcgccagccagcgtacccgcgagggcagcaccgagcgcgataactatctgatgttgaaaagcggcgtgaacgtcggcgcctggcgcctgcgcgccagcaatagcctgaccgccaacagcgatgataagccccagtggacgaccagcggcgcctggcttgagcgcgacctgacgcgctggcagagtgaactgaccctcggggataccttcacgtcgggcgatgtgtttgacgcggtacagtttcagggaatatccctcgcctccagcgatgcaatgctcccggactcgcagaaaggttttgccccgaccatccgcgggattgccagaaccaacgcccaggtcacggttcggcaaaatggctacgtgctgtatcaaacctacgtcacccccggcgcgttcgtgattgacgatctttatcccaccgccagcagcggcaatcttgaggttgccgtcaaagagtcggatggcgaaatccgccgcttcacccagccgtatgcttcggtgaccagcatgcagcgcgaaggcagcctgaaatacaacctggtcgccgggcgctaccatagcgacgatgccagccagcggccgttgatgatgcagctgtcgctgatgcgcgggttcacccacaacctgacgctgtttggcggactgcagagcgcggcgcaataccataacctctcgctcggcgcaggacaggggttgggagaagccggggcgctctcgctgcagctgttaaacgcccgcgaccagcaccagcaggatccgatcgatggccgggcctggcagctccagtacagcaaaggttttgatcgtcttggcacgcagttgactttcaccggctggcgttattcgcatcagcgctatgccacgctgagcgaggcgttttccagcccgggtagcgacgacgacctgcaggatagcgacaacaaaaaagcaaccctgcaaatcaccgccagccagagcctgccgtacgatatcaccctctatctgagtctcgaccaggacagctactggtcagggggcgccacacagcgtaccgccaatatggggatcagcagccaggttcacggtatcgcgtggtcgctcagctacagcgactcccgcagcagccacggtgacgaggaggatgacgagccgcattccgacaaagtggtgacgttgtcactttccgtgccgttgagccacctgctgccggggagctatgccggctataccctgacctcctcccgccacagcgttggcagtcagatggtcagcctcaacggcacattgctggacaatcacgcgcttagctacgccgtcagccaaacccgcgatcggcaaaacgggtccagcggcagcctgacggccgggtacagcagtggaaggggcgatctgaatctcggctacagccacgattcgcaggccgctcgtctgaactacggcgccagcgggggcattctgattcaccgccacggggtagtctttacgccggaaatgaatggcgctgtcgtcctgattgacgccggtggcgccgggggtgtgaccctcgccaaccagaaaaccatcgccaccaatggtgacgggtacgccgtgctgcccttcgccaccgcctatcaccgcaacgacgtctctctcgacagccattcgctgccggagaatgtggatctggccaacagcaccgtgacgctggtccctaccaaagacgcggtggttctggcgcgctttcacacccacgttggctataaggcgctgtttacgctgcagtcgcggggacaaccgctgccctttggcagcgaagtacgcgctaaggacaccaacagcatcgttgccagcgagggtcaggtgtacctggccggcctggcgccaaaaggcaccctgtatgcgcaatgggggccaggccctcagcagcgctgtagcgcccgctacgatctcaccccgacgctggcgcagaccccccatccactcatcttacagcagacgttatcatgtcctttttaa

SEQ ID NO: 264132 - DNA, 1005 bp, Klebsiella pneumoniae
atgtcctttttaactctcctgcgtcgggtcgccctgacgctgttattcactctgttaccggccgccagcggatgggcctgtacgccagtgtttgtccgcggccaggcctccacccttcggctgaacgtggggcagctcacggttccggctgacgccagacccggcaccccgctgtatcataaaagtttcgcctggaaccgccttagcgacggcggcgaacagtggatccgctgcgcggacgacccgcacgggctgtcgccgctgctgctggacagtctgctgtccgggggagtgacgcgaccgacggtttatcaaactaatctcgccggcattggcgttcgcgtatcgctgcgcgctatcggcagctatggcggctttcctgaccggccgacgccctcgccgtttagccaacgggtggacaatcccgccgccttgcccgatgcggtgtggaaactgggctatttccgcctgacgattgagctcattaaaaccggtcccgcggcgacgccgggcgagcttgagtatcacagcgagcgctttttaatggcggagcataccccgctggccgcgttagacttaaccggcaggatcagcaccgcgggatgttcagtgaatgacgccacgccagccctgatcaagctccctgcggcgatgcttgaccacttcggcggcgtcggcaaaaccaccggcgacaccccttttgcgctgcagctggattgcaacagctcggtcacgatttccctgcgagttgacggcgcggagcccctctccgcccgggggcatggcgttctgcgcaatgacgccaccgacgatcgggcgcagggtattggcgtgcagttgctttaccatcgtcagccggtcgtactgaatcatgagatgacgctgggcagcgcgagcgcgggccggtttaccctgccgctcactgcccgctactaccagacacgttcccggatcaccgccggtcaggtgtcggccgtcgcgacctataccttgcattatgactag

SEQ ID NO: 264133 - DNA, 1293 bp, Klebsiella pneumoniae
gtggcgctggcaggcgcggcgctcatcgccgctggcatgctgttcagctgcaccagtaaagcccctaaatcccttgtcacgccgccgaacgctgccgccgtcaaagccgggcaggcgcaccgggagccggtgcgcggcgtgtggctcaccaccgtttcgcgccttgactggccgccggtcgggtcgattatcgccagcacgccggagagccgcatcacgcagcagaagctggcgctgatcgctaaactcgataacctgcagcgcctggggatcaacaccgtctttttccaggtgaaaccggacggtacggcgctctggcggtcggatattctgccgtggtccgatatgctgaccggcaaaatcggcgaataccctggctacgatccgctgcagtttatgctggatgaagcgcacaagcgcggcatgaaggttcacgcgtggtttaacccctaccgcgtctcggtcaacaccaaaccgtcgacgattgccgagctgaacaacacccttactcaggtaccggccagcgtgttcgtcctgcaccgtaactggatccgcaccgccagcgatcgctttgttctcgatccgggcattcccgaagcgcgtgactggatcaccagcatcgtcgctgaagtggtgcagaactacccgattgacggcgtgcagttcgatgactatttctataccgaaaccgcctcttcaccgcttaacgacaacgagactttccgccgttacgggcagggctatgcctcgaagggcgactggcggcggcataacacccagcagctcatagcccaggtttccaccaccatcaaaaagctcaatccgaacgtcgagtttggcgtgagcccggccggggtgtggcgcaaccgctcgcacgatccggcggggtcggatacccggggcgcggccgcctatgatgaatcctatgccgatacccgcagctgggtgcagcagggactgctcgactacatcgcgccgcagatctactggccgtttgcccgcgatgccgcgcgctatgatgtgctggccaactggtgggccgaggtggttaaaccgacccatacccggctgtatatcggcgtggcgctgtacaaggtgggtgaaccgtccaaaaacgagcctgactggacggtggatggcggcgtgccggagctgaaaaagcagctcgatctcaatgagactctgccgcagatccagggcaccatcttgttccgcgaaaacaacctcaatcagccgcaaacccggcaggcggttaactatttgcgcagccgctgggggcagccgcagagctag

SEQ ID NO: 264134 - DNA, 1323 bp, Klebsiella pneumoniae
atggcgacgcttaccacctggatgaacaatgtgcgcgtgggaaccttaacccgccaggctaacggggcgcacagttttcgctatgacgaagagtggctgcgcagcccgcgcgccagaccgctctccctctcactgccgctgcagtatggcaatatcactgccgacgcggtgtatcactattttgataacctgctgcccgacagcccgcaggtccgcgaccggatcgtcaggcgctatcaggcgcgctcgaagcagccgttcgatctgctggccgaagtcgggcgggatagcgtaggggcggtgaccctcctgccgccgggggaagaggcgcacctggaaggattacgctggcagacactggacgaggcgcagctcaccgctttgctgaccgcttaccagtcggatatccccctcgggatgattaccggccaggacgatttccgtatctcggtggccggcgcccaggagaaaacggcgctgctgcggatgggcgagcagtggtgtattccgcagggcgccacgccgaccacgcatatcattaagctgcccatcggcgagatcaagcagcccaatgcgacgctggatctgcgtgaaagcgtggataatgagtatctgtgcctggcgctggccagagaactgggcctggcggtgccggaagcggagatcatcgccaccccgcggatccgcgccctggcggtaacccgcttcgaccggcgctgggcgcaggagggacgggtgctgctgcgtctgccgcaggaggatctgtgtcaggcttttggtcttccttcagcgatgaaatatgagtctgacggcgggccgggtatcgccgcgatcatgacctttctgctgggctcgagtgaagcgctgaaagatcgctatgactttatgaagttcatggtcttccagtggctgacgggggcgacggacggtcacgcaaaaaacttctcaatttacctgttgcccggcggcagctaccgcttaacaccgttctacgacattatttcggcgtttccggtgctgggcggcacgggactgcatctgcgcgatctgaagctgtcgatggggctcaatgccacaaaagggcgtaaaacagagattaacgccatctatccgcgtcattttctggcgacggccaaagcggtgaactttccccgggagcagatgctggcgatcctccaggagtttgccgggcatgtgccgcaggcaatcgaaagcgctcgccggacgctgccggcggacttttccagccacgtctggcaggccattacagagaacatgctgaagctgcacgcccgcctgcagcaagggctgcaggcgctatag

SEQ ID NO: 264135 - DNA, 288 bp, Klebsiella pneumoniae
atgatggtaaggaacaaggcgatgaattccccgcagatatacagtcccgtgcagctggccaattacctgaagctgctgcgccagcagaaccactggacccaggatgcgctggccaggcggatcggcattaagcaggccacgctgtccaattttgaaaatcaccccgacaaaaccaccttaaccacgctgtttaagatcctccagtcgctgggggtggtgatgatgctgaacgccaaagctgctgagacggcgtcggctcccgataacaacacggaccttgactggtaa

SEQ ID NO: 264136 - DNA, 327 bp, Klebsiella pneumoniae
atgagcaccctgagcacccatattctggatatttccaccggtacgccggcagaaggcgtaacggtcagcctgagccgggagggcgagacgctggcgaacctggtgaccaacgcccaggggcgtatcgccacctttagcgccgcgccgctgccggcggggcgctattgcttaacagcggaaaccggggcgtggtttgcccgcgccgggcgcgagagcgtctttacccgggcgcagattgattttgttatcggcgaggcggcagaggaccatttccatctgccgtttctcatcgccccgggcgggtggtcgacctaccgcggcagctaa

SEQ ID NO: 264137 - DNA, 501 bp, Klebsiella pneumoniae; identical to SEQ ID NO: 212277

SEQ ID NO: 264138 - DNA, 1380 bp, Klebsiella pneumoniae
atgtctgacgaacatcacagtggcctgctttacggccttgaacagcggatcccaccgcttccggcctttttcagcgctctccagcatgtgctggcggccctggtggggatcatcacgccgccgctgatcatcggcgctaccctcgggcttggcgactggctgccgtatctcatcagtatgtcgctgctggcctcgggcatcggcacttttatgcagtccaatcgggtatggggcatcggcgccgggatgatctgcatgcagggcaccagttttgccttcctcggcgtgacggtggccggagggatgtgggtaaaagcccagggcggcgggccgcaggatatgatggcgatgctgtttggcgttaactttgtcgccgctctggtgccggtgattgtcagccgctttatcgaaccgctgaagaaaatctttactcccatcattaccggcagcgtgattgcgctgatcggcatcagcctgatcaaggtcagcgtcatcaactggtgcggtggggaaaaggccgaggatttcgccagcatgagcaatatcgcgctcggggcgggcaccctcggggttatcgtcctgctgagctgcgccaaaaaccgctggctgcggctctcctcggtggtggtgggcattgccgtgggctgcatcgcagcggggctgagcggtcagttccatcttcacagcctgggcgacactctgtttcgcctgccgacgctgtttccgttcggctttcagtttaacagcgcgatatttctgccggtcgccctggtgtcgctggtctgtattctggaggcggtgggcgatctgacggccaactcgctgatttcgcaacagtctgttgacgatcgcgcttttcgtaaccggctgaagggcggtatcctggcggatggcgtcagctgtatggtggcggccatgctctgtgcttttccgaacaccaccttcgcgcagaacaacggcgtgatccagatgaccggggtggccagccgctatgtcggacgctacattggcgtgattctgatcctgctcgggctgttcccgccggtgggcgaactgctgcggcagatcccggcgccggtgctggggggcgccacgatggtgatgtttggctgcgtggtggcggccgggatccggattattacccagaccccgctgagccgtcgcgatgtgctgatcgtggggctggcgtttggcgcgggtcttggcgtggagtcggtgccggcgtttctcagccattttccgccgatggtcggcgatctgttcggttcggcggccaccagcggtgggctggtagcgatagcgctgaaccttattctgccgcaggagcaggcggcgacgaaatcgttaaggagtcaggatgatcgcgctgagtcagtttaa

SEQ ID NO: 264139 - DNA, 1155 bp, Klebsiella pneumoniae
atgaaagcaatcgtgattggcgccggcatcggcggtttaagtgcggcagtggcgctcaaacagtcggggatcgactgcgacgtctatgaagcggtgaaagagatcaaaccggtcggcgcagcgatttccgtgtggcccaacggcgtgaagtgcatggcccacctcggcatgggcgacatcatggagaccttcggcgggccgctgcgccggatggcgtatcgtgatttccgcagcggcgagaacatgacccagttcagtctcgccccgctgatcgaacgcaccggcagccgcccctgcccggtctcccgggcagaactgcagcgggaaatgctggattactggggacgggacagcgtgcagttcggcaaacgcgtcacccgctgtgaagaagacgccgacggcgtgacggtatggtttaccgacggcagcagcgccagcggcgatctgctgattgccgccgacggcagccattccgcactgcgtccgtgggtgctgggctttaccccgcagcgccgctacgccggctacgtcaactggaacggtctggtggagatagatgaagcgctggcccccggcgatcagtggaccacctttgtcggcgaaggcaagcgcgtctcgctgatgccggtctccgccggccggttctactttttctttgatgtgccgctgccggcgggtctggcggaggatcgtgacaccctgcgcgctgacctcagccgctactttgccggctgggcgccgccggtgcagaagctgatcgccgccctcgacccgcagaccaccaaccgcattgaaatccatgatatcgaacctttcagccgcctggtgcgcggccgcgtcgcgctgctcggcgatgccggacacagcaccaccccggatattggccagggaggctgcgcggcgatggaagatgcagtggtgctgggcgccgttttccgccagacccgagatattgcggccgccctgcgcgagtatgaagcccagcgctgcgaccgggttcgtgacctggtgctgaaggcgcgcaaacggtgcgatattacccacgggaaggatatgcagctcaccgaagcctggtaccaggagctgcgtgaggagaccggggagcgcattatcaacggcatgtgcgacaccatcctcagcgggccgctgggctga

SEQ ID NO: 264140 - DNA, 924 bp, Klebsiella pneumoniae
atgagtccattttcccgtttcgcgcactatttcatcgccgtggcccgctgcggcagcctacgccgggccgccgagcagctgcatatttccgcctcggcgattaaccgccagatcctgcaggctgaggaggccttcggcaccccgctgttcgagcgcctgccggagggactgcggatgaccaccgccggtgagttgctgtatgacaacctgctgcgctggcaaaaggagtttcgccagacgcggcagaaattcgatgagctgcaggggatgaagcgcggaagcgttagcgttggcatggtgcaggcgctggcggaagggggtttcgccgccgcgctggcggagatcatcgccagctggccgtggctggagctggatctgcaggtggctgacagccacaccgtcagccagaaagtgcgtcaggcggacctggacgtcggcctgatcctcgatccgcaggggcaggctggactcagcgtgctggcctttgccgagctggaggtggggattgtgatgcgtccggaccatcccctggcgggggcgaaggcgctgtctttgggcgagctcagcctggagcggcatatcgtgcccggtgcgccgctgatcgtccatgagcgggtggcgctcctctatcgccaccatgactttgcgccggagaataccatcagctgcaatgatatccggcttatcaagtcgttggtgctgcgcggcagcggcgtgacgctccttagcctgctcgacgtgctggacgaggtccagcgtggacagctggcctttgtcccgctgcgcagtacgctgctgcgaccgctgaccctggcgctgtgtactgcgccctcgcgtcagctttcgcggcccgcgcaaatggccattcagacgctgagtgcggtgatcgaatccatggcgacggtcagcccagcggcccgctga

SEQ ID NO: 264141 - DNA, 1038 bp, Klebsiella pneumoniae
atgaagacaatcacccccacgccccccgcccattgcacctttgacccggaagactggctgcggctggcccgctgctggcacccggtggcccgcgcctgcgatattgccggcgccccggtgaaagccaccctgctggacgaacagctggttatctatcatattaaaggccaggtggtagtcgcccgcgacgtctgcccgcaccgcggggtgccgctgaccctggggtttcatgaagaagaaggcatcgtctgcccctatcatggcctgcgctttggcgaggatggccgctgcaaccgtatcccctccagtccggggcaacccattccggccaaactgcatctcaccagcttcgccgtggaggagcgctacgggctgatctggacctgcctggcctgcgatccggacaatccgccgccgttaccgaccatgccgcactgggacgacgccggctttcagcaaatcaactgcccggccttcgaggtaaagggatttgccggccgccaggtcgaaggctttctcgatgtcgcccacttcgcgtggatccacaccgataccttcgccgatccggacaaccagcaggtgccggactacaccccgcaggagacgccgttcggctttgttgccgactactggagctcggtgggcaattacccggccagctctgatttccgcgcgccggaagggttccagtggctgcgtcactttgaaatgcatctgccgttcaccgctacgctgaccatccattttcccgccgacgccaggctggtgatcatgaacgccgcctcgccggtgtcgtcccgggtgacgcggatgtttgcccctattgcccgcaacttcgatctgcacgtgccggtggaagacgtacatgcgttcaacctgcgggtatttgaagaggaccgcctgatggtcgagacccagcgtccggaacggttgccgctggatctgaccctggaggcgcatattccggcggaccgcagctctatcgcctaccggcgcgggctgaagaagatgggctttggcgatttctttctggtatga

SEQ ID NO: 264142 - DNA, 984 bp, Klebsiella pneumoniae
atgcgcgacatactcccggtggtggtcgatggcctgtggcgccagggcgcgaaaaatctggccgttcgtctggtgagcgccgaggggcaaccgctgccggcgtggacgcccggcgcccatatcgatctccatcttccctgcgggctgatccgtcagtactccctgaccggcagcccggccgaacgggatcgctatctgctctgcatcgcccgcgagtcgcagtctcgcggtggctcccgttatattcatgacaccctgcgcccgggacagccattgatgatctctgccccgcgcaaccactttccgctgcacgagggcggccatgtggtgcttctcgccgccgggatcggcattacgccgctgctggcgatggcccacgcccgggcggcgtccggcgccagctttacgctgcactattacgttagccgtgcgcaggaggccgccttcgccaccgagatcgcccgccaactaacgggtggaatctgccagatccactgctcagacgaggggcagagtccgcgccagcggctggcgcaggatctgggggctccggacgccgacacccgggtctacttctgcggtccgcccggatttatggcccgggttcgcgataccgcgcgggcggtcggatgggaggaggcgcaattgcacagcgaagcgttccagccgcccgccccgacggcggcgtcggcggcgtcggcggcggacggaaccttcaccatcaccctcgcctccaccggggagcgctggccggtgccgggggacaaaaccatcgcccaggtgctgcaggagcatggcgtcgcggtgccgctctcctgcgagatggggatctgcggcgcctgcctgacgccggtacgcgagggaaccgtcgaccaccgggataccgtgcagtcggaggcggaaaaacaggccgcagagcagcatattgcgctgtgctgctcccgcagcctgtcggccaatttagttatcgatctcgcgggataa

SEQ ID NO: 264143 - DNA, 1239 bp, Klebsiella pneumoniae
atgagttcctgcatagctgctgacgcgagcctgtcatccgccaaacctgcctggcgcgccgtctatgccctggccctcggggtgttcggcctgatcgtggccgagtttctgcccgccagcctgttaacgccgatggccagcagcctcggcgtcagtgaagggatggccggacaggcggtcaccgcgacggcgctggtggcgttagttaccggcctgctgatcgccaccgccacccgcaatatcgatcgccgctgggtgctgatgttcttttccatactgcagatagtctccagcctgatggtcgcgtttgccgattcgctggcgtttctcctgctgggccgtctgctgttggggatcgccatcggcggcttctgggcgatgtccaccgccacggcgatgcgtctggtgccggcggcccatgtgccaaaggcgctggcgatcatcttttccgcggtgtctgtcgccacggtggtggccgcgccgctcggcagctacctcggggagctgatcggctggcgcaacgtgtttattctctgtgcgatacccagcctgctggcgctgctctggcagctgtgggtgctgccctccatgcgcccggagagcgtcgggaccttctccacgctgttcagggtgctgcgccgtcccggtatgctgggcggcatgctggcgacgatcctgattttcagcggccatttcgccttctttacctacctgcggccgttccttgagaccgtcgcgcaggccagtatcgaaggggtttcgctgatattgctcggcttcggtgtcgctaactttatcggcacttcggtggcgagctatctgctgagccgtagcctgcgcctgaccctggcgctggtgccgttgatgatgagcgttctggcgctgctgatggtgacgtttggccatctgaccgtgctggccgggctgctggtcgccctgtggggatttgccttcggcctggtgccggtggcctggtccacctggcttgccaccaccgtgccggatgaagcagaaagcgcgggcggtctgctggtcgcctctattcagctggccatcagcgccggggccgccggcggcggggcggtgtttgatttgcacggcgccagcggcgtcttcaccggcagcggtctgctgctgttgagcgcgatggtgattgtcttcgccgccgtacgggtgaaaccggtcgcccgcgccgaccagccggtgacgggccgcttatcccgcgagatcgataactaa

SEQ ID NO: 264144 - DNA, 945 bp, Klebsiella pneumoniae
atgagccagcctgccatcgatctgaccagcgaactgttgcgcggtatgcgcctctccggcgttaactaccggcgcatcgaaaccgcacgcccgttcggcgtcggctttagcgccgtggcgggtaaagcccagttccatttcatcagccgcgggccggtgctgctgcgcatggccagcggagaacagttcaccctcgagagcggcgatgcgctgtttattcccaacggcgacgggcacgccctgctctcggatccgcaggccacggtggtcaacgtggcgcagctgcccagcgaaacggtgtgcagcacggtaagttgtatcaacgctggcgaccagcctgactgcccggagcgcgccgtcattttcagcggttgtatggactttgagctcggcggcatgcagccgctggtcaaggccatgcccgaggtgatgcgggtcagcagcctgctaaacacctggccggagatccagccgctgttggtagcgatggagcgggaatcgctcacccgccaggcaggctatgccgggatcctcgcccggctggcggacgtggtggccgcgctgattgtccgcggctgggtagcgtgcgggtgcggcaacgccaccggctgggtacaggtcctgcgcgatccccggctggcgaaagcgatctacgccatgcatcagcgcccgggggtcaactggaaagtggaagatctggcgcgggaggcgggtctttcacgctcgctgttcgcggaacgttttctcgccgccaccggcaccacccccgcccgctatctcaccgagctgcgtatgcggctggcggtgcagtacatcacccatgaaggccaggcgctggaaaaagtcgccttcagcctcgggtatcagtcgctggcggccttcagccgggctttcaaacgcatcaccggccagccgccggggaccctgcgcgccacggcacgctag

SEQ ID NO: 264145 - DNA, 312 bp, Klebsiella pneumoniae
atgcagagctggagcagtaaagatttcaccgccgaccgcgcgtggggcgcgctggatattgccaatttttccggcaccaccgtgcgtctacactggaccgaccaaccctatatctggcacatcaatgatggtcaggaggtgtttgccgtgatggatggtcaggtggcgatgcatgtgaaagtcgacggcgaggagcagatcatcatgctaaacgccggcgatatcttctacgccggggtgggatgcgagcatgtcgctcacccgcagggggcggcgcgtattctggtgattgagaaagaagggtcggtctga

SEQ ID NO: 264146 - DNA, 264 bp, Klebsiella pneumoniae; identical to SEQ ID NO: 242879

SEQ ID NO: 264147 - DNA, 1029 bp, Klebsiella pneumoniae
atgaacgcgaccaccctgccgattctcgacctggcccgctacgcggaccccgcggataaagcggccttcctggccgacctgcgtcatgccgcccgcgacatcggcttcttctatttgatcaaccacggtgtcgacgacgcgcttcaatatgaagttcagcgccagtcccagcgcttttttgctctcgatgaggcgcaaaaacagcaggtggcgatgatccactccccccattttcgcggctataaccgcgcggcctctgagctgacgcgcggccagcctgactggcgagaacagtttgatatcggcgccgaacgtccggcgctgaccctcagcgacgacgccccgcgctggcagcgcctgcagggtccgaatctgtggcctgccgccctgccgtcgcttaaaccggtattacttcactggcaacagcaaatgacccaggtgggcatccgcctgctgcgcgcctttgccgaagccctgcagctcccggagaatgctttcgatcagctctacggcgagaaacccaacgagcatatcaaactgatccgctatcccggccagcaggagacccaaagcagccagggcgtcggcgcccataaagattccggtttcctcagcttcctgctgcaggacgagcagaaaggactgcaggttgaggtcgcgcctggagaatggatcgacgccgtgccgctggccggcagctttgtggtcaatattggcgaactgctggagctggcgaccaacgggtatttgcgcgctaccgtccatcgcgtggtgtcgccgccggcgcagcagcagcgcctctccatcgccttcttcctcggcgcccagcttgacgcggtggtgccggtttacaccctgccgcccgagctggcgcgtgaagcgcgagggccggacagcgacccgcacaatccgctgctgcgcgatgtcggctggaattatctcaagggccgtctgcgttcccatccggacgtggcggaacgctactatcaggacgtgtttcgcgaacgcgccgagcaattgatcgtttaa

SEQ ID NO: 264148 - DNA, 807 bp, Klebsiella pneumoniae
atgaaatatgccgcttttaaactggcaggggtcgcactgtctctttctctggcatggacgtctgcccaggctgccgcgctgcgcgtcgccgcggacccggttccccacgcggagatcctcaactacatcaaaaaaatcgatcccagcctcgatctgaaggtggtggagctgaccagcggggtcaacgccaatgaactgctggccagtggcgatgtggatgccaactacttccagcatgttccctatctgaaagatcaggagaaagcgttgggtaaaacctttgccgtcgcggccaccgtgcatattgagccgctgggaatttactcgcataagcataaagatttctcatcactgccggaaaacgccaccgtggcggtgccgaataacaccaccaacctgagccgggcgctgttcctgctgcaggcgcagaagcttattaagctggaccctaaatttaccgacccggccaccaccctggcgacgccgaaggatattgtcgagaacccgaaacacctgaagattctggagattgaatcgccgcagatcccgcgctccctcgacgatgtcgacctggcggtgattaacggtaactacgcgctggaagccggcctggtgccagcgaaggatgccctggggctggaaagcgccgagcataacccgtacgccaatattctggtgaccaccccagccctggcgaatgacccgcgcattaaggcgctggcgaaagatctgacctcgccgcaggtggcggagtttatccgtaaaacctacaacggctcggtgatcccggtggcccctcagtcatga

SEQ ID NO: 264149 - DNA, 792 bp, Klebsiella pneumoniae
atgataaccatcgaagggctgagcaaaacctacgccggaaccggccgaccggcgctgaacgatatcgcgttgcagataccgaaaggggcaatatacggcattctcgggcgcagtggcgccggcaaaagtacgctcatccgctgtctcaatttactggagcggcccacctcgggccgcattctggtgaacggacaggatattacccagttgaacaaggcggcgctgcgggattatcgcctgcgcaccgggatgattttccagcacttcaatctgctgcatgcccgcaccgtcgctgacaacgtcgcggtgccgctggagattgccggagtgccgagggccgctcgcgaggcccgggtgcgcgaactgctggagctggtggatctcagcgaaaaggccgctgctttcccgtcacagctttccggcgggcaaaagcagcgcgtcggcatcgcccgggcgctggccgcccggccggaagtgctgctgtgcgatgaggcgaccagtgcgctggatcccgagaccaccgcctcggtgctggccctgctggcggatattaaccagcgcctcaatctgaccattgtgctgattacgcaccagctggaggtggtgaaaaccatctgtgaccacgcggcgctgctggaacagggcgagattgtcgaaagcggtaaacttgccgacctgctggtgaccccatggtcgcggctgcgccagtcgctgctgcacgacccgcaggctgaacaggaatttcttacccgccacggcgttcaggggaggcaattatgcggagtagcatga

SEQ ID NO: 264150 - DNA, 1059 bp, Klebsiella pneumoniae
atgagcaacccgctgctttcgcttcttgatattgattatcccctgattcaggccccgatggcgggcgtctccacccccgcgctggctgccgcggtaagtaatgccggtgcgctgggctcgctggggctgggcgcttcaaccgttgcccaggcggaagcgatgatagtcgccacccgccagctgacggaccgtccgttcaatgtcaatctgttctgccatgcgccgccccggcgcgacgcccggcgggaagccgactgggcaacaacattatgtccccattttgcccgctatggcagtacgccaccggattcgttaagcgagatctaccagacatttatcggtcatgcgccgatgctggagctgcttctcgacctgtcgccggcggtggtgagctttcattttggtcttcctgaaggtgagacgatccagcgtctgcggcggcaggggatcgttaccctggcgacagcgacttcgctgcaggaggcgctgctgattgaacagcaggggatcgacgtggtggtcgctcagggctatgaggcgggcgggcaccgggggatctttgctccgcaggcgcctgacgcgcagctgagcaccttcaccctggtgcaacttctgcggcgtcgactaaccatcccggtggtggccgccgggggcatcatggacggagcggggatcgccagcgtgatgcagttgggggcgcagggcgtacagctcggtacggcgtttttactgtgtccggaatcggccgccgacgccggctaccgcgcggcgatccacaacagccttgaagggcgtacggtgctgacctccgcgatatccgggcgtccggcacgctgtctggcgaatgccttctgtgcgctgggggaagcctgtccggcgagcgccgtgccggattatccgctggcgtatgatatcggcaaagcgctggccgccgccgcgaaagcccagggcgcccatgagtatggcgcccactgggccgggcagggggtggggttgatccgcgagtgtgacgccgccagtctggttcgtcagctggcggcagagagcggctggaactaa

SEQ ID NO: 264151 - DNA, 846 bp, Klebsiella pneumoniae
atgaaccacagcacactcgagatcttcattcaggtggcagaaacgcagagcgtcacccaggcagcaaaacggctgggccgcgcacagtccaatatcacgacccgcattcagcagctggaagaggagcttgccgttgagctcttcgttcgcggcaacaaaaaaatggtgttgtccccggcaggcgtgcagtttctcagctatgcccggcggatcctgagcctggcggaagaggcaaagcaggctctgcatccgacaaccccaggcggcagtctgcgtctgggcgcgatggaggcgaccgccgccagccggctgccgccgctgcttacccgcttccaacagcagtgcccacaggtggatatcaccctcatcacccaaccgacccgccagttaaccgagggggtgttaaccgccgcccttgatgccgcgctggtctgcctgccgccaggggccgatgggcaaccggcctgtcccgccgagctggcattcaccccggtgttttatgaaaccctgatgctggtccgtccgcagaccccgggtccgctgcggttcgcggcatttgccagcggctgcagctaccgcgcgctgggagaacgctggctggcagaacagcaggcggccgtcgaggtgcatgaggtcaattcctatcacagcatgcttgcctgcgtggcgtccgggcgctacgcctgcctgctgccgcagagcgtgctgtcgctgatgacgcttcccgaaaactgccttagcgaaccgctgtgcgaggcgaccacccagcttatctggcgcagcggcttgagcgcccccgccctgagcgagtggcgcaagctgctgcaaagcgtggcgattggctaa

SEQ ID NO: 264152 - DNA, 1158 bp, Klebsiella pneumoniae
atgaataaccaatcgcgccaggccttatggctggcactggctggatcgatagtactgatgatcggcatgggctacgggcgctttgccttcaccggcgtgctgccgcttatgcttaatgaaggtctgttaaccctgcacgagggcaatctcgccgcgtcggccaattacgctggctatctggtcggtgcgttgctgctggcgcgggtgcagcctggggccgccacccgactgagcattatctccgccgggttgaccatcgccagcctggcgctgctggcctgggtgagctcgccgtggaccattattacgctgcgcgccgtcgccggcgcgctgagcgcgataacgctgattgcaggttcgctgtggctgctggagcatatggggcatcatcacggggcgccgttgctgtatgccggggtggggctggggatatttatctccgcggaggggatcgcccttggacatgccctgaacctcaccagccagcagatctggctgctctgcgcattatgcgccggtctgctgctggcgctggcgatccgttggctgctgactccgccggctgcactggtgcgggtttcccatgttgaaacctcctcgcctgcgtccgggagcgatacccgtcgcgcggcgtggcgactcttgatggtttacggtctggcgggcttcggctatatcatcaccgccacttatctgccgttgtttctgtccggttcgctgcagagcgttgacccggtccatctgtgggcgctgtttggtctggcggccgcgccgtcctgcctcatctggcataagctggtgctaaagtggggataccggcaagcgctgacccgcaacctgctcgtccaggcgcttggcgtgatccttccagcctgcagcgcttcattgctgttttgcgtgctaagcgcgcttttggtgggctttacctttatgggcaccgtaaccattgcgctaccgaaggcgaaaagtctcagccatcaggtgagcttcaatatgattgccgcgatgactgcactgtacggtgtgggacagattgccgggccgcttatcgccggcgcgctgtatcagatcgcggcttcatttaacccggcgctctatgccgcggcgctggcgctgctgattgccgcagggctggtctttaccgaacgccaggcttag

SEQ ID NO: 264153 - DNA, 483 bp, Klebsiella pneumoniae
atgacgcgctgggtatcctgctgtccggcttcaccgttggacaaaaaagccagccagcccgttaaccgttgccacaatgccactttcgttttctcctctgtcgggaagcgaatcgcctgggtctatttcaaccacagttggccgggcgcgggaaatattaattccgaatttgcaatcctggctggcgcatattacccccgctcctatcccctcaccctaaccctctccctgagggagagggaaccacccggcaatcgttacagccccggtatacaccgcggggctaacgcccatgcgcacgatgaacggaaaattacccctcccactcactccggagggagagggaaccgcccggcaatcgttgccgcgccggtaaaacgccagcgacgcataaagaatacccataggtttgttaagttctttttggttatagataagaattttttcttctttgccgccgacgggcaatttgtgggagcgtga

SEQ ID NO: 264154 - DNA, 123 bp, Klebsiella pneumoniae
atggtgattatttttttttgcgcctccttcttcttgataggaatatgtttctcaacctccttctttgagctatgtaagaataaaaattataaattgacaaataaaatagaaaaagaattataa

SEQ ID NO: 264155 - DNA, 276 bp, Klebsiella pneumoniae
gtggcttctgtttctatcagctgtccctcctgttcagctactgacggggtggtgcgtaacggcaaaagcactgccggacatcagcgctatctctgctctcactgccgtaaaacatggcaactgcagttcacttacaccgcttctcagcccggtacgcaccagaaaatcattgatatggccatgaatggcgttggatgtcgggcaaccgcccgcattatgggcgttggcctcaacacgattttacgtcacttaaaaaactcaggccgcagtcggtaa

SEQ ID NO: 264156 - DNA, 279 bp, Klebsiella pneumoniae
atgcagtgtggtccattcaggctagaagccgctaatgacggtttcatgcatatcaatggccagaagcctgaaactcaaaaaatgacctttctgaagcagagggatgattacgataacctcaaaatgcagtggatgatgccagacaagcaaacggggagatggctaggttttgattacatcaagcgtaataacaaggccatccttaacgttgaagcggtccgtatgaacatggatgagccgcgtgtttttggtacctacgattgcgtgaaagtaaaatag

SEQ ID NO: 264157 - DNA, 1080 bp, Klebsiella pneumoniae
atgtctcaaaactggatgcgtcatttcgagttgcaactgctagatgataaaggacagggcattgccctgtctgattttaaagtggtattcgatattcagaagatggcccagaacagcttcgccagctttgtaggaaactttaagatatacaaccttactcctgagacctgcaaccgtattcaggggcaggagttctctaaaatcagggttatcgccgggtatgatggtatcccgccaaccgttgatgagagcctggttggggtggttcgtaacgtcactgcaggtgaagcatcacaacctgacggcaccaactacggaatgatcttctctggtgatattcgtttcaccattcaggggaaagataacccgaccgatagttggattatggtgcagtgtatcgactgctgggagggacatcttgccgctcaaacgactgttacgcttgcagccggttggacgtggacagagtttctcaatcaggtcgccagagattacgcaccgtacggtatcaccctggggcgtattcctgagcttcctacggcagtgttccctcgtggcagaaccatttttaaagccagtcgtgaggcgatggatgacgttgctcgccagtgcaaggccaactggtggtatgaagacgggcaaatcaacatgctgcccccggataagtatctacatgaggccattgtgttaaatgctgacacagggctaattggcatgcctcagcagactatgggaaacggggttaacatccgtatccttattaacccgaacgttaagctgggtggtctaattcggttggatcaggcgtcggtttatcgtaccgcgctctcagccgatgaaattggtaactctgccgggtggatcactgagcaggacaataacggcaaccgaacagtaacgggcgctgtaagtcagcagccagcctctattaataccgatggtgattacattgtcggcagtatcgactatcatggcgatacaagggggcaggcctggtatatggatttgctatgtattgccaaaggttctgctgatctgcagtcgcaagcaactttgtcgaaggtgtttactcgtgattaa

SEQ ID NO: 264158 - DNA, 303 bp, Klebsiella pneumoniae
atggttatcagcgaaatatcactgactccggataatcagcaatttggtattgtgctgaaaggtgttgcgtatcagatacgggttatctggcgcgagccgtgctggatactcgatctgatggatgccagagaaaagcccatagtcatggggattcctttagtaaccggtgcggatctccttgctcaatattcctatctaaatctgggttttaaactggcggtcatttgtgacgacagtacgcaggattacccaactcaaactgatctcggcactggcagtcatctgctggtggtcacggagtaa

SEQ ID NO: 264159 - DNA, 417 bp, Klebsiella pneumoniae
atggaagtcggatttgctggtggtggttcgttgctggatttcgccgacactacgacgttgggaataaatcttgggctaagtcccagcgaaacctacgcgcagatcatcgacatccagcggagcagagttccgtttgatgtggtaacaggcaagcggctgtatagcaacatgctgatacgggcgattgaggtgacaacggacaggactaccgaaaacgtattgtcggcggtgctgacgctacgagaggtaatcattacccaaacgcagaccatcaccgttgctgacaaaaccgacatgaaagagggcgttaatacctcttcagtgattaatacgggctcaaaagcaccgaaggcgcagaatgaatcgcttcttagttctggctggaagcagtttaagtcaattatcggaggtggttga

SEQ ID NO: 264160 - DNA, 1920 bp, Klebsiella pneumoniae
atgaacgctgaaacgctcaaggactttctgatatcgcttgggttcaaagttgatgaggctggcgccagaaaattcgatgccgtcgttgccgggataacgcttaaagcgattgagctgggcgttaaagttgaggcggcggcgctttccgtcgttgcattcaccgcgaaaattgccagcggtctcgacgacctgtactgggcctctcaccgcacaggcgcgacggtggagggcattaagcagattgggtatgcggttagtcaggttggcggcagtgtcgacggggcccgcggctctctcgaaaatcttgcccggttcatgcgtaacaatcccggcgctgagggtttcctgaaccggctgggtgttcaaacgcgtgatgccagcggcaacatgcgggatatggcgacgctctttaccggcgtcggccagcgtcttagcagcatgccgtattaccgcgcaaaccagtacgctcaaatgctgggtctggatgaaaacaccctgatggcaatgcgtcgcggtatcggccagtttagtggcgaatacactgcgatggcgaaggcgatcggctataacgccgatgtggccgccgtcagctccaataaattcatgacctcgctgcgctcctttgggctgatggcaggcatggcgcgggataaaatcggctccagtctcgctgatggacttgctggctctctggacaggctgcgtcgccagatcctggaaaacttcccgaaaattgaaggcgcgataaccggtaccgtgaaaggcattctctgggctggcgagatggtaggcagggtaatttaccgccttattcagctgggtcagagtatcagcgactggtgggactctcttgataagcagtcgcagcagctgatcgaactaattggagcgctaaccgcagcgtggtggatgctcaaccgcgctatgctcgcatcgccgattacgtgggttctcggtcttgccgctgccatagctttgctatgggaggattaccagacctggaaggagggcggtaagagcctcattgactggggtaaatggaagcctgaagtagacgcagcactgaagatggtcggtgacctgaaacagactgtcctcgatctcggaaaagcgctggcaaagctgctcaatatcgaccctaaatcctggtctttgaaatgggatttcagcaacttcattacccagatgggtgagtttagcaagatgctgagtatgatcggcgacctgcttaacgctatcaaggacggtcgctggtcggatgctgcaagcattggcagggctcttctcaaacaaggcagtaaccagcctgatgcgctgcccggcgtttctgacagtgccaatagcgctgctgactggataaaggataagacaggatttgacccgcgcagcataggccgtttcttccgtggcgagggtaatacgcttgcagatcgcaacaataaccccggcaatattcggcccgtaggcggtggtggctttcgtacgtttggttctgcgctggaaggctgggaggccatgaaaaaccagctcatgcgctacttcacagggaaaacgaccgggcgccgcctgcagactatcatggatatcgtcagcacctgggcgcctgctggcgataacaacgatcctcagttgtacgccaaacaggtagctggctggatgggcgtttcccctgatgccgtattgaatctgaataaccctaatacgatggcttccctgatgcagtctatggcgcgtaaagaagggtattcaaattggcaaagcccactggctcgacaagctgcaggggcgacgattaaccaggaaacgaacatcaatatccatggtgtatccgatccacgcgctgccgggagagaagttgcagatcgccagtccggtgttaactccagaacgcttcaagaatggcagagaggaacaggctaa

SEQ ID NO: 264161 - DNA, 174 bp, Klebsiella pneumoniae
atggtgcaacactcgatctcgtgggccgatctccacgagctggccgccaaacatcaccgctacccggtggcagatgcgctccaccaccgccatatcatgggaaataaacagatagctgagccgatagcgctgacgcaaatcttccagcagcgtcagcacctgcgcctgtactga

SEQ ID NO: 264162 - DNA, 651 bp, Klebsiella pneumoniae; identical to SEQ ID NO: 102213

SEQ ID NO: 264163 - DNA, 450 bp, Klebsiella pneumoniae
atgggattattaaattttgtgaaagaagcgggcgagaaaatatgggatgccgtctccggcgacagtaaagaagatcgggccgaaaagctgaaaaaacatatcgatggacttaatctgcctggcgccgaaaaggtcaatattgatgttgcggaagatggcaccgcaacggtcactggtgatgtcgcttcgcaggaggataaggaaaaaattctggttgcggtcgggaatgtcactggcgtaggccaggtcagtgacggcgttaaggtgacgcaaagcggggcggaaagtcgtttttacacggtcaaatccggtgacactctgagcgcaatctcaaaagcgatgtatggctcggccaatgagtatcaacgcatttttgaagccaataaaccgatgctgacccatcccgacaaaatctatccgggtcaggtgctgattatcccggcgaagtag

SEQ ID NO: 264164 - DNA, 1392 bp, Klebsiella pneumoniae; identical to SEQ ID NO: 215070

SEQ ID NO: 264165 - DNA, 1221 bp, Klebsiella pneumoniae
atgctcgcgctgctgctgctgaccgcatggctgagaccctgtgcggcgcaaggcaatgagctggtgatggcgacgacattttctcccagcgccaccgtgtggattatcgatcgctggcagaaagagccggggtcggtgatgataaggacgctcaaccgcaccagcgcctcgctggaacagttgcttgatacggcaaatgccgaaaatgtcgatctgatcctgacttcgtcgccgatgctgctgcagcatcttcaggagcatcaaaaactggcgccgttcagcggtgcgccggcagtcagccaacatctggtgccggaatccattcgctccacctccgtggccgtggcgatctccgggttcggtttgctgatgaatcgctcagcgctgatgacccggcatctgcctgcgccagcggactgggatgacctgaccgatccccgttatcagggggcgctgctgatgagcagtccgtcgcgttcggataccaaccatctgatggtggagtcgctgctgcaacaaaaaggctggattaaaggatgggaaacgctgttgacgacggcgggaaacctcgtgaccatttcatcccgtagctttggggtggcagataagattaaaagcggcctgggcgtggctggtccggtgattgataattacgccaatctgctgctgaacgatccgcacctggcttttacctatttcccccagtcggcggtttcgccgacctatgtcgcagtgcttaaaaacagccagcacgccagcgaagcgcggcggtttattcgctatctgttaagtccggagggccagacgatcctcgccgacgctaataccgggaagtatccggtaacaccgctggcgccaggcaatccacgggcggcgcagcaggcgatgctgatgaatcaaccgccattaaactatcgattgatcctcaaacgtcagcgtttggttcagcggatgtttgatacggcgattagctttcgtcttgctcagctcaaagacgcctggcgagcgctgcatagcgcggaggtccgtcttaagcgtccgctacccgagatacgggcgctgctcacccgtgtcccggtggatccggccagcagcgaggatgaagcctggctggctcagttcgacaacaaaagttttgcggaacagcagatgatggagtggcagctctggtttctcaacaaccagcggcaggcgattactaaactggaagaactgaaatga

SEQ ID NO: 264166 - DNA, 1995 bp, Klebsiella pneumoniae
atgctgcaacgcctgcggcaaatcagtatcagtagcagtctgcgcggggcatttctgacgggggcgctgcttacgctgattgtcagcagcgtaagcctctattcctggcatgaacaaagttcgcagatccgctattcgctggatgagtattttccgcgcatccatgcggcgtttctgattgaagggaatctcaacctggtggtcgatcagctcaatgaatttctgctggcgccaaataccacggtacgactgcagctgcgcaaccagattatccagcatctggacaaaatagaacggctaagtcaggggttgtcgccggcagaacgccagcagttgggggtgatattgcaggacagccgcgcgctgctggcggaactggatcgcgtgctctacaacatgtttctggttcgtgaaaaggtgggagagcttgcggcgcggatcgactggctgcacgatgatttcaccaccgagctaaattcgctggtgcaggattttacctggcaacagggaacgctgctcgatcagattgaagcccgacagggggatgcgaggcagtatctgaaacgcgcccgggaagtgcagaatgaacagcagcaggtctataccctggctcgtattgaaaatcagatcgttgacgacctgcgcgacaggctcaatgaactgaaatccgggaatgatgacggcatgctggtggagacgcatatccgctatcttgaaaacctgaaaaaaacggcggatgaaaatatccgtgcgctggatgactggccgagcaccattaccctgcgacaaacgattgatgagctgctggaaattggcatggtgaaaaataatatgccggataccatgcgcgactatgttagcgcgcaaaaagcgctcgtggaagccagccggtccagagaagcgacgctggggcgcttcagaacgctgctggaagcccagcttggcagcagtcaccagcagatgcagatgtttaatcagcgtatggcgcagattgtccgggtcagcggcgggttaatcctggtggcgacgttgctggcgctgctgctggcatgggggctgaaccattattttattcgctcgcggctggtgaaacgctttaccgcgctgaatcaggcggtggtgcagattggtctgggccggaccgaggcgaccattccggtttacgggcgcgacgagctgggacgtattgccggtttgcttcgtcataccctgggtcagcttaatgcgcaaaaacagcagctggaacaggagattggcgagcgaaaagcgattgaggccgatctgcgcgccacgcaggacgagctgatccagaccgctaaactggcggtggtggggcagacgatgaccaccctggcgcatgagattaatcagccgctgaacgcgctgtcgatgtatctttttacggcgggaagggcgatcgaacagggacaggcggagcaggcgcggacgacgttaagcaaagcagaagggctgatcaaccgcattgacgcgattatccgctccctgcgccagtttacccgccgcgcagaactggaaacgccgctgcatccggtcgatttgcgtcagacgtttaccgtggcgtgggaactgctggagatgcgtcataagcctcagcaggggacgctggtgataccggatgacactgtctggatcctgggggacgaagtgcgcgtccatcaggtgctggtgaacgtgctgtccaatgccctcgacgcctgcccgcacgccgcgcaaatcaccgtgagctggcaaatccagggcggaatgctgtgcgtgttgattgccgataacggccctggctggcctgcggccttactcccttcgctgttaaagccgttcactaccagtaaaaccgtggggctcggaatagggctttcgatatgtgtttcgctgatgacgcaaatggaaggggcgttgcgcctggcgtcgacgtttacacgcagtgcctgcgtggtgctggaattcaatttgacggatgtaaaagatgttgagtaa

SEQ ID NO: 264167 - DNA, 1026 bp, Klebsiella pneumoniae; identical to SEQ ID NO: 215069

SEQ ID NO: 264168 - DNA, 987 bp, Klebsiella pneumoniae; identical to SEQ ID NO: 215068

SEQ ID NO: 264169 - DNA, 1056 bp, Klebsiella pneumoniae
atgaaggtggccgcttccgtctgtggcggcacggattactggcactcctggcgggcgaccgggaatgcgctggagggaattgccagccgccacaacgatgccctgctgccgctcgatgaactgcgcgaagtggacccgcgggaagccggaatgattgcctatatgctggcgaacggccagggcaaggggcgcgcccgcactgacggcgaagtgcgcaaccgcaggcactggacgctgctgctgttctccaccggagagctgtcgctggcggaacacaccgaacgcgccggggagcgcctctacgccgggatggacgtgcgcatggtacaaatccccagcgatacagggaatcatggcgcgtttgaacagctacacggctttgccagcggccagcagttcgccgataccctctgcgaccgggtcgcccgcttccacggcaccgcctttcgtgcctggctggccttcctcacccacgaccaggacgccagcaccacgctggcaagagagttacttcgccgctaccagactgccctgatgccggagaacgccggaaaccaggtgcagcgcatcgtggcccgttttgcgctgctggcggtggccggagagatggcgacgctgcagggtatcacgggctggcaggaaggcacggcatatggggcggtccagatctgcctgcacgcctggctgaacgagcgcggccatattgctaaccaggaggatgaaggcgtgctggcgcagatcaagcggttcattaccgcgcaccagtacagccgttttgcctcgtgggacggcccggaccgcccgctgaatatggtgggctttcgccgggtggaaaaagatccgctgacgggtgaagaatacacactgtttcacatcctgccggagggctggcgggaaatgtgccggggattcagccccgccagagcggccagattatgtctggaagcggaatgcctgctgcccggcagcgacgggaaataccagtcgcaggttcgcctgccggagatcggcaaagccagggtctaccgccttacctcccgcatcctcagtatctga

SEQ ID NO: 264170 - DNA, 633 bp, Klebsiella pneumoniae
gtgatagaaggcctcgctggcgcgcaggcgatagctctgcagttgtcctaccttgtaggcctcgcccagcgtccgcagcatgctgaaggtggtcccggctccgacgtcgctgccgatgcccatccgcacctggtgctgccagcaggcgggcaggcggaacagcccgctgccgagaaacagattcgacgtcgggcagaaggcgactgcggacccggtgtcatgcaggcactgccactcggcatcatcgagatggatcccgtgagcgaagacgctgcgttcgccggtgagctgatagtgatgatagacatccagatagcgcgcatgctcaggccacagctgtttaacccaggcgatctcctcccggttttcactgagatgcgtctgcagccaggtgtcgggaaactcggcccgcaggcgctgcaccgcctccagcaacgccggcgtcgaggtgggggcaaagcgcggggtgatggcatagcccagcctgccgcgctgatgccagcggcggatcaacgcccgggtctgctcgtagctctccccggcggtttcgcacaggtagtcgggcacatggcgatccatcatcactttcccggcgatcaggcgcatattgaggcgcagtgcttcgctgaataa

SEQ ID NO: 264171 - DNA, 567 bp, Klebsiella pneumoniae
gtggacagccagatagagatgtttgagcagaggctgaaaccgctcaatgaagtcgtgctgttctcggccccggaaggcatggctctcaccagcggggagcgtctgcaaatgacggccacgaagaatgtcgccattaatgccgggggcgatatcagtgccggtgtcatgggtaacatgaccgcactggccggggagaagcttgggctctttgcccggaccggccagctgagtctgaaatccggagaagggccagtggaggtgcaggcgcagaatgccagcctgcggctgtttgcagagaagaaactgacgctgagctcagcgagtgatatttcgtttgccgggaagaagcgtatcacgctgattggtggcgggagctatctgcgacttgaggccgggagggtcgagtatggcacgacggcgacgtatatacggaaggtgaaaaggacgatggcagctgccgctgcatcaataccggttaaggctacaacgggtggcggtatctgcctgagctgcctgatgaaagcgacgatgaatggcgatacttttgttgtaagaggtgaatcatga

SEQ ID NO: 264172 - DNA, 153 bp, Klebsiella pneumoniae; identical to SEQ ID NO: 159235

SEQ ID NO: 264173 - DNA, 279 bp, Klebsiella pneumoniae
  misc_feature (199)..(208): n is a, c, g, or t
atgggtaaggtcgaacagagcaccgactgggtgaacgacaccgggtcaaaattatattattttccgtccatcaatgccggtacgctggggatgattgatgtgaaacataactgggcgggaggggcgaagaacctggctcccggtgcccagatcaaaaatctgtgctttctggatgatccggccagcgtgggttcggtannnnnnnnnnccgacagcggccatgaaagactacatgcatacgttctggctgaaaatcgatccggcgaatgctggcgctga

SEQ ID NO: 264174 - DNA, 804 bp, Klebsiella pneumoniae
atggatgtgcgcatagaacgccccggattccgtttccggctccgggctggcgtcatcacctgcgtcacgatacggtgccgcgtaacggtaatgctccccgctggtgaccgcatcgttacgcacgctgaccgtcgcatccatcggcgtggaggctgtccggtagttgtaatcccgcgtggtgacagtgccggtggcgatgttgtgccaggtccgcacatcccagaccgactctgccgcgccgtcaaacagacccgatggttcgctgtagggcagacgcacatcaaaccggtagttcagctggctgtcggcaaaaatgtacgtatccagctcacgggtgtcatccatctccgtacgccagtaaatccccacctcagacagaatgcgccggataaactgcaaatccgtttcccgccactgggtgataatttcacgcggcgggtaggtgcgctccagccggaagtcaaaatcaggtccttgcaggccatgtttgcgcagcacctgctccaccacctccggcacggactggttctgatataccgcgcactgccgggtgtatcccagcagcgccaggcgggaactgagcgtgagccggtagtgagactggtcctgagaggtggacagccattccaggcgggtcaccatgccgtgaacacttttgccgctccgcatccggaaagaggcatatttcatcagcacctgttccgggagaatgttcgcctgcagggaggtaaactcaatgtcccaccggaagggctcgctcagggcttccctgccacgaaagcgcagaatatccggcttcactga

SEQ ID NO: 264175 - DNA, 1770 bp, Klebsiella pneumoniae
atggatgatttaaccctgcgctattacgaagcagagatgcgctacctgcgtgaagccggtaaagagtttgcccgggctcatccggatcgtgcagcgatgcttaatctggataaacccggcgcccgcgatccttatgtggaacgcctgttcgaaggctttgccttcctgatgggccgtttgcgtgaaaagctggatgatgatctgccggaactgaccgaagggctggtgagtctgctgtggccgcactatatgcggactatcccgtcgctggccatcgtcgagttctcgcctgactggcgtagtctgcgtcaggccgaaatgctggctgaaggcttttccgttctgtcacgtcctgtcgggccgcataaaaccgcctgtcagtaccggacgacccgcgatgtgccgctacaaccgctgcaccttgcggacgccagcctgcacacggaaaccgatggccgctctgctatccgcctgcgcttcgaatgccctgaaaaagtggactggcgtaaagccgggatcgacaaggtcgccatattccttaacgcagagagtcctgtcagttcagcgctgcatctggcaatgacccggcgtgtacatgccatatatgcgcgtcatgccgggacgcatactgaacgtcatcagtttgatggctggtgcaaacccatgggctttgacgacaatgacggcctgtggaagaaagccgataccgccttcagtggttaccagctgctgctggagtatttcagcttccgtccgaagtttatgtttgttgagctgcgcggtctcgacaccatcgggctcactgcggccagcacctggtttgaaatcgacattgtgctcagtgaagcatggtcatccgatctgccttttgagacagaaaacttccggctgcactgtgcgccggtcatcaatctctttaccctggaagccgacccgctgacgcttaacccgctggaaaacgaatacctgctcaggccgctgcgtcttcaggatggacacaccgagatttatagcgtcgataacatccatggcgcggtgaagaatggcaaacacccctatgtgccattcaccagcttccgccaccggggcggtatgatgcgccacgatgcccctgagcgttatttccatacccgcgtgaaacgcggtccctctggcctgtatgacacctggttaattctcgggggacgctcgttcgaactggagcagttgtccgataaaccggagtctctctcgatgcgaataaccgggaccaacggtcagcttccgcgtaaggcactggaaagtaccctgctggacagggtggtcaaaaccggcaaggtgcccgtcagagtactgaacgtcacagcaccgacgatgccactatatcccccggcaaacgatcgttttcactggcgggtgatgagccaccttggttcaaactttctgagcatgatggacaatccggaggtactgcggggcacgctggcgctgtatgactggaccgacgatgaaatgaaccgccgtcggcttgaagcaatcgtcgctgtgaagcacaccctgatccgccgttttgagaagggttttatgctccggggcgtggacattgaggtcacgctgaatatggacaattttgcaggcgagggtgatgtaaacctctttggggagatgctgcatcggttcttcgcgctctatgccgatattcacctctttaaccagctcacgctggtactgcaaccgacagggaaacgactgagatggcgcgagaatcacagccagcacgtaccgggctga

SEQ ID NO: 264176 - DNA, 597 bp, Klebsiella pneumoniae
atgctcggagcgggcggtgaggatcccggtgatggcgtagcgattctcctgggcctggtagacccggtcagcgaagtttttcatccagggatgggagtactcgcgcgggctgttgttccggtcaccagggttatcaaagccaaactccatgccatacagcacgtaggattcactgaccacatagttatgctggctggtttgccgtgggtcgcgcgaatcataggggaccagcacgcagtaaatctccgccagctcgtagggctgcggccggctggcctgacaggtgttaaatccccacagctgaaagcccgccgcgccgtactcctcgtatcccagacggccttcctgaacgtatttgggctggccgttttccagatacgccccgtacagcgtgccgcagggatcgaccacatggctaaaatcccaccccagcaccacattatcgatgctgttgctgtattccggatagcgctccttgatcaccttcagccagatcagcattctgccgatatccagcgccgaatagccgatttcacccggcttgttctggtagttaaccttttgtccgcttatcgtgttataggctttgttgggtag

SEQ ID NO: 264177 - DNA, 648 bp, Klebsiella pneumoniae
gtgcaaagcggcaatgtggaaccggaaaaagcacgaacttgggagctcggaacccgatatgacgatggcgcgctgacggcagaaatggggctgttcctgattaactttaataatcagtaccactccaaccagaccaacgacaccgtgaccgcacggggtaaaacgcgccataccgggttggaaaccctggtccgctatgacctcggcacgctgacgcccacgctcgataacgtctccgtctatgcaagctatgcgtacgtaaatgccgagatccgcgagaaaggcgacacctatggcaaccaagtaccgttctcgccgaaacacaaaggcacgctgggcgtggattacaagctaggcagttggacgttcaacctgaacagcgatttccagtccagccagtttgcggataacgccaacactgttaaagagagcgccgatggcagtaccggccgcatccccggattcatgctctggggcgcgagcgtggcgtatgactttggtccgcagatggcagacctgaaccttgcgttcggcgtgaaaaatatcttcgaccaggattatttcatccgctcttacgacgacaacaacaaaggcatctacgcaggtcagccgcgcacgctgtatatgcagggggcgttgaagttctaa

SEQ ID NO: 264178 - DNA, 471 bp, Klebsiella pneumoniae; identical to SEQ ID NO: 227390

SEQ ID NO: 264179 - DNA, 276 bp, Klebsiella pneumoniae; identical to SEQ ID NO: 264155

SEQ ID NO: 264180 - DNA, 279 bp, Klebsiella pneumoniae
  misc_feature (253)..(260): n is a, c, g, or t
atgtcacaagcaattcaatacaattccagcgtggcgatgatccgtcatccgcgctttttacagcgtgcggccgacctgacgcccgcgctgcaacgcctgcgccagacgccgcaggccatcgtcgaggccgtcgctgaaccaggagcgctgaacggctggcgggggaataccgtctgcacgccggagcagttttatcagcaaccgctcaacgtcggcgacagcatcattattgattttggcagccattttgttnnnnnnnncgctgagcgaagtctgtga

SEQ ID NO: 264181 - DNA, 540 bp, Klebsiella pneumoniae
atgtcggcacagcacgtcctgattgttgaagattcgctggtttatcgtcggctgctaagccgaatgttgacgcagtggggttatatcgttagtgaggcggaaaacggtgtcgacgcgctggcgatcctcgaaaaccagcctgtcagcctggtgataagcgactgggagatgccggagatgaatggcctgacgctatgccgggaaattcgccgtcgccagtttggtcgctatgtttatctgatattgctcaccgcccgcgaagaccctggcgatttaacgcaggggtttgaggcaggggccgatgattttctcagcaaaccggtagagcagagcgagctgcgggcgcggctgcacgccggggcgcggatcctctccctcgaggctgacctcgccgcgcgcaatgcgcggctgagcgaagcgctgcgacagattgaacaggatctggagctggcggcgcgcattcaacagtcggttctcccggctcatcagctgcgccatcagggatttttctccgactggattttcctgccctcggcctag

SEQ ID NO: 264182 - DNA, 201 bp, Klebsiella pneumoniae
gtggcggttgattttatccagggcaaaaaaccgcaggccagcaccgccctgtacaacaccccttcccagctatttaccccggaagtggtgacggccaaaaacatcaaagcggaaatcttcgataaaaaaatccagaactgggatcaggtgtgtagcggcgagtacgccgccgcctgccagaagttaggcatcagcaagtaa

SEQ ID NO: 264183 - DNA, 426 bp, Klebsiella pneumoniae
atgatcaatgcaggccagcatcttgatatcggtgcgatgaaaaatctgtcggtaacggtggaaaaagcccttggtctgtttgtgcataaagagggggcgaagctggtcgccaatcagggggatattgatattcaggcgcagcacaacacgatggcgcttctggcaaagcagcaggtgacgataaccagctgcgaggacgggatttccatcagcacgccggagacactgacgctgaatggcggcggatcgtatctgaagctgagtaaaaacgggattgagcatggttctgagggaatgatggtgatgaaagtggcgaactatctgatccccggtaccggggcatcattgaaaggtgtcgcggagacgttcaggaaaaccacactggaactggtatcaccaccgcggcgcggacggttttcacgataa

SEQ ID NO: 264184 - DNA, 573 bp, Klebsiella pneumoniae
atgggcggtcatggccatcgcgggctgatgttgcctgcccagcgccggcgtctcttcgcgcagcagacggatggcggtttcaccgtccatctccggcatttgcagatcgatcagcaggagatcccagcaggctgcgcgccagcgctccagcgcctcccggccgttgctcaccacctcgcagcggtgacccaactgctccagcagtcgtctggcgaccttttgattaaccaggttgtcctcagccagcaggatatgcagcccggtctggtccctgaccggttccgcaacgggggctggcgctgtcgccaccaccggcgtgggaaggagaataccggcgataacctgatgcagttcgcgctgcgccaccggtttatgcagatagtgggcgataccgatgcgcttaagcatattggcgtcaaaatggcggctcatggagctgagcataataatctggctttgccgggcttcaggcagggcggaaagctccagcgccagggatacgccgtccatatccggcatctgtgcatccagcaggatcagcggccagggcggcccttcggcggcccgacgtaa

SEQ ID NO: 264185 - DNA, 813 bp, Klebsiella pneumoniae
ttgggtgagcgcatagcgacgatcgccaatgtggcccgcgttgacggcaacaatatcggcgatgtgctgacgttctggcgtgatgagaaagtgacaaatccagatgcggtttttgcgcgctcaaacatgttctgggacgagtacaaggtcgcttggcaaatgtctctccccggtggttacgacggcgtggcgctggattacgtcgacccgctgacgaacaagaaggcgtacatctacctgcagatcgacagcagcggcatcactgaggttgaggatgccactgttaacgcgatgcagatcagcctggacggctgccgcaacgccactcaggcaaccgatcgggcctggcttgaggcgaggaaaatcctttactcacgcctgacaatgacggtgaaagtgctggaagaaacgcaggtcgtgcgcggtacggtggttcagtgtccggacatgtacgacaacgcgcagcaaaccggttatatcaccgggcgatccggagacgtatttgcgacctcagagcgtctcgacttttctctcggcgatatgtgggtggttatgaccgacagcctcggaaattaccgcgggcgctggcgggcctatccggtaagcggcaagcccaaagcatttcaggctgcggccgataccttcgatctgaacatttatgaccgcgaaaatgtgcaaaaccccagccgttatttcattgctaccgactcggaactgaactccacaatctggcgcgtcgatagcgctaaacccaacggtgacgatactcaaacgctttccctaactgagtattcagactcgatttatccgtaa

SEQ ID NO: 264186 - DNA, 699 bp, Klebsiella pneumoniae
atgaagtgctctccagtactccattggagaataacggtcacttccgctgtcaattttatccagcaggcgctgataattatgcttcacgagagcatgactggttcgcggatcattggtcgcggcctggtaaagcgaatcgataaggttacggaagaatccagtgggctggttttttccatccaggtaatcaaagctggctggttctgcggtttcagttctgaagcccagctttgccagatcatactgcgacaaaagttgaggttccgcctggcctttagggacgtaagcattttctggtcgcagctgccagtattcctgtctggtcgacttatcgacttccgtttgcacctgtttcagtggcaggatcccgatcctggtcgtcactctcgtatccttcgtgaatgtaccggttgcaacatcctttttgtacagcgccagcccaggagaatacttcaaccagagcgggtttttctcccccaccttttccgggttggtcaggaatttttcaaggttatcatccatgctggtacattcaatatgcacctgatatctcgcctcatatcccccatcctttggggcctgatagtagcccatatgaccaacaggatcaccggcagtgatggcccagggcgtcgggcacacaacctggtcaaatttcataacctctttggccggaggcataagcctgcgccaccatga

SEQ ID NO: 264187 - DNA, 504 bp, Klebsiella pneumoniae
atgcaggatagcgtcagcaaaagaacgactcggccgcagagtgtaatcgaccgcgccagtcgccctgtcgtagctgatggtatgccgcagcgccaacatgttgtacttctgctcgcggttgctgttgctatcgttcgcccccttaatcgtgattcgggcaatcgtgtcttccggatacacgacgttttcgcgtacgttcaccgcgtggatcgccatcagtgtcacgacgttggcgtcattgctgttatcgaggcgctcgatggtgaccgcatagcgccccgccccggccgccgggacgaacttatgcgttgtgcggaaataccgggtcgtcacctggaagtcgttatcgaagaaataatcgtgctgctcggatgtacccggcacctgattgttgtcgtcatcgacctgccagaacttgatcctgtattgcgttgtgccggccgtcgcgccgagctgaaccagcacatgcacccagacctgagtggagacgatcggcgacactga

SEQ ID NO: 264188 - DNA, 240 bp, Klebsiella pneumoniae
atgatcaggcgcaatatcattgcggaggcttttagagcctccatttctataaatcctaaaggttatcaatacctttacacggattctttcatctccgaactacagcggaggggtatccatttctcagagaaggaggctaacaactggatatcgagagagcagacttactttgtcgacaaaaccatcgaccatagcgaaaaccgcctgtggatgctggccaatatggggagggttctgtaa

SEQ ID NO: 264189 - DNA, 291 bp, Klebsiella pneumoniae; identical to SEQ ID NO: 251561

SEQ ID NO: 264190 - DNA, 846 bp, Klebsiella pneumoniae
atgagattgacggttctggttgataataatacattaattgacaggtaccttatcggtgaacctggtgtgtcttatctgattgagtatgatggtcaaaaaatccttttcgataccggatattcggatgttttcctgaagaatgcgcagacgctgaaaattgatttaaccagtatcgatagcatcgttttttctcatgggcataacgatcatacctgggggctaaatcatttagttcaatattatgaccggataaatttcattcctgaaagaaagataaacttaatctgtcacccagatgcattaaccccaaaatactttgatgcaaaagccatcgggataaactacagattcgatcaaaatgatcccttttttgacaaaatttgcagcaaaaaaccttatccactcactgaaaacattatcttcctcggtcaaataccaagggacaataaatttgagatgctgacaccggtaggccaaacggtggatgataaaagcgaaatcacagatgattacgttatggatgattctgcgctggcaataaaaacagaagatggactggtggtagtcacaggctgttctcacgcgggaatagctaacattattgaatatgcaaaacaggttaccggagaaaatcacattgtttcggtcattggcgggttccatttgcaaaatgctgatgaagatcgcctcacccagacaggggattaccttaaagtattgtccccagactccgtctatccgtgccattgtaccgatcttgcggcgaaggttagcctggcgcgttttatcaaaattaacgaggtcggcgttggattaacgctgaatttttctgccaccgggaaataa

SEQ ID NO: 264191 - DNA, 273 bp, Klebsiella pneumoniae
  misc_feature (205)..(214): n is a, c, g, or t
gtgcaggcgctcagccagcagaccacggctcgcgaacaaaaacagcaggccactaatcagcaactgagcgagcagctggcgaagcgcgccccggacgatgggtttacctttaacgcctacgcccgttccgggatgttagtcaacagccatggtaaaggcgcccgcggcgggccgggcgtctccccggccagttcgctcaaccgcnnnnnnnnnncaacggcgatgcccatgtcggtcgtctcggtaacgaaaaagataattacgctgagctga

SEQ ID NO: 264192 - DNA, 1092 bp, Klebsiella pneumoniae
atgctcgccgacggggccaccaacccggatccgtgggttcaggataacgacagccaccatctgaacattcgtcagctgtacgtcgagatgggtaactttgccgaattcaccggtccgttaaaacgcgcctcaatttgggccggcaagcgcttcgatcgggataacttcgatatccactttaccgatagcgacatcatgttcctcggcggtaccggcggcgggatcaatgatgtcgactggggaagcggcctgcgcggcgactattcggtgtatgcacgtaacttcggcgaccttggcagcgataattacgcggataatgacatccagaatctgctgttcaccgccaaccatttttacggcaactggcaactgatgaccacggtgatgaccgcccagggcaacgatgacctgaaagataatacctcgaccaccgggagctatgccctgcgcagcgataataccgccaaaaacggctactacgcgatgctggccctgcacgacaaacagcagttctacggcctggcgccgggggtgtcggaaagcgccctgcaatacggcgtcgggctgggcgccgaagcgcgtcagccggggagcgatggcgatctgaccgagaacgcggcctccctgcgctttgcgtcgtatggcatcctgccgttggggaaaaactggcagctggcgccgtcggtgatagcccagcatagcgaagaccgctatcgcgacggcgaccgctacgactgggcgacgtttaacctgcgggtatcacaggggatctccgctcacttcgccctgctgtatgaggcctcgtggcagtatatggatctcaatccgaacgggcgcagctatcgctataatgacaacgtttatcagtatcaggcggtgcgcggtgatttctacaagctgaccttcgcccccacctttaaagtgggtgatgtgctggatatcaaggcgcggccggaaatccgcttctttgccacttggatgaactgggataaagcgctggatcgctacgcgataaatgacgatttcggcagcaaaggctttaccgccggcgggacatggaacttcggcgtgcagacggagatttggttttaa

SEQ ID NO: 264193 - DNA, 291 bp, Klebsiella pneumoniae; identical to SEQ ID NO: 230701

SEQ ID NO: 264194 - DNA, 876 bp, Klebsiella pneumoniae
atggaattgcgtcaatgccgctacttcatctcagtagcgaagctaggtagcattagtcaagctgcgttagaacttcatattgctcaacccgctctgacacgccagatgcaaaaactggaagaagatcttagagtaacgctcttcaatcgaacagggcgcggggtgcaacttactgatgcaggaagccagttcctcgttgacgcggaaatattgatcaacaatgtaaccgtcataaaggagcgcgctgtacgtgcctcccgtggagaatgtggtaatatttcgctagcgcttcctgtaatacaaaatgcggcaccaccgatcacaacattattaaaaaaattcaagaaggcatcaccgctcgttggtattacgcttcatcacctcatatctgaagtgcaactttcaaagatcgctgagggagagctggatgctggatttttattgtttagacctcttaatgatccgctttttgcaggaatccccgttttcaaagaaaaaatgttattagcttatccgactgagtggaagtggcctgataataaagaacctcgttacttaagagaattgcagaatcttgactttatatggcttcctcgtaccgcggcaccggcgtggcatgatcgacttattcattgcttttacgatgcaggttttacgccacgttccgttatgcacggcgttgatgcagtatcgatgcttacattagttagcgcaggcatgggatgtaccatcgttgcagaagggatgagacatcttgctccgtcaaacgtgtcgtttgtggttttagaagatttaaacattgtacaggaatgggagttagtatggcgcaaggacaggtgctctgaggttttaaaaagtttaataaatttgatttga

SEQ ID NO: 264195 - DNA, 426 bp, Klebsiella pneumoniae
atggctgtcgcaggtgatggcggtgacgcgcagaggggaacagatgcgctggggctggacgtcgctttcaccgtcgcggcgttcggtgagcttgtcaaaccacagtgcctcctcatcgaggcggaagtgatccggcagaatgtcggaaggcctttcctgtcgcaggcgtgcaagctgaccgctccagtcctccagcaactcaccgtcagggctcatcagccgggccatctgcacacccgcgtgcgccagttttaccgcaattttcagcaactcctcttcgcggatatcgccggtgcggagtacccggacgtagagtgtgtcgggtctgataatggtcaggttatccagatcggccagttcatccgggccgagcaccaccgggggaacatcatcttcccgctcgggatcttttcgccagatgcgtga

SEQ ID NO: 264196 - DNA, 792 bp, Klebsiella pneumoniae; identical to SEQ ID NO: 240656

SEQ ID NO: 264197 - DNA, 180 bp, Klebsiella pneumoniae
atgcagaaaatagagatagggcaccgggcccaccgacagcacatagtggctgcggggaatgcgctgaataaaggtgtactgatcgtcgagggcgacgatatcgccggcgcgcaggtgctgcatcgagctttccgacagcttaaatttgctgatcggctcgatgtgcagatcaaacgataa

SEQ ID NO: 264198 - DNA, 507 bp, Klebsiella pneumoniae
gtgggtcagcgtcgccagggcgacctcgcgctgtgggttaaccatctggatatcctcgacgtgatcgctgatccaggcgggaaaatcgggagtcgtcaggctgagctccgtctgcgggcggtcgaggcgggcgtaggtcaggagctcttcaatcagcgcctccagctgaccgatatcgcggttcagcgcctgcgattccgcctcggtgagattctcgctcatctccagacggtagcgcaggcgtaccagcggtgtcctgagttcatgggcgatgccgtcaatcagctgctttttgctggcaataagcgcattaatgttatcggccatttggttaaaggccaccccgagccgctcgaagctggacatactgtcgaagtgaatgcgctcgctgaggtgaccttcgccaaagcgctgggcggccgtctcaatgcgcagcatgtcctgccagtgcgggcgcatccagataaacaccggaaaggccagagagatagcaataaacgccattag

SEQ ID NO: 264199 - DNA, 135 bp, Klebsiella pneumoniae
atgatcgccaatgaaattcaaggctttcatttcattcggagtaactggcaagtaaatatcatgataaataacttgaagttgttctatattgtgaagaaaatattgaagattgttaggttctacttcagagactaa

SEQ ID NO: 264200 - DNA, 477 bp, Klebsiella pneumoniae
gtggcactgacctcaggcgaacaccttcagctcagcagtacccgcaacaccatgatcaatgccggtcagcatcttgatatcggtgcgatgaaaaatgtttctgtaacggttgaaaaagccctgggtatgtttgtgcataaaggcggggcgaagctggtcgccaatcagggagacatcgagattcaggctcaacacaacacgatggccctgttttctgaaaaacagctgacggtgaccagcagtgaagatgaaattattatcagcaccccggaaacactgacgcttaatggtggcgggtcttacctgaggctgagtaagaacggcattgaacatggctcatcagttgagttcattatgaagacgtctgactatctggtaccaggatcgggcgcaaatctccccaacgaaacacccaatttcagcctgacggatatcactcaggaaagcaaaatcagcagcaaatctttcaatgactaa

SEQ ID NO: 264201 - DNA, 786 bp, Klebsiella pneumoniae
atggttgccgaaggcaatgagctgtatatcgatacggcacgtattaaaaacagttccctgacctcaaccaaaatcgcggacggttccatcacgaacgcgaagatcggcaacgagatccgctcgaatgactttgttgacgggtcacgcggctggcgtatcgctaaggatggctcttcgcagttcaacaacgtgatcgttcgcggtgcggtttatgcgactgacggctggttccagggtacggtatatgcgaaccacatcgagggcgacatcgggtcatttgcgatcaacatcgctcagcaccgcacgcgcaaggtgccgaaggctacatggcagtggtttgagctggcccgattccggcggcagaatttcgaccaggtgatcaatattcgcggtggactcctccagacggatagcatcactatcgacggcggcgcgaaactcagagcggggatgtcctacgcgccaggggctgacggcggactgaatcctggctatctgtcgtatgcaatgcttcttcgtggcacaggcgctacgtctggtggcggcagtatggagctaggcattgagcttatgtatgaaacaggtggagcaacacgcctgttaacggcgcaagagtcaatgaacgtagacaacatgtcatttgtcgtccctgccggtactggcgacgctgttctgcgatatggctgttacctggaccgtaacggacagatggtattaaccatcctctcaagattcgacgccttcgccgcgcgcaataacaacgtaattcgcggttcatcaacctga

SEQ ID NO: 264202 - DNA, 213 bp, Klebsiella pneumoniae
ttgttctggaacaaaggtatcgccaccattggcgccacgcggggcgaaatttacacccacatcatccccctctccggcggggtgttgagcatcctgttcctgcatactcaaccgcaggcctggcatctgtttagcgcgctgttcatcatggtggggattgggatctgctcgctggagaaacgccaggcggcgtctattcgtctgcgtgactaa

SEQ ID NO: 264203 - DNA, 198 bp, Klebsiella pneumoniae
gtgggcttccagttcgccaagcaggtggcggcgatcttcctctccgctttcgccggcaatatgtacgatcggatcggctttcaggatacctatatgatcctcggcggtattgccctgaccgtcaccttaatctccgcgtttacgttagcgggtaagacgaaaaccgagccgctgcgcgataatgcaatgaccgtttaa

SEQ ID NO: 264204 - DNA, 240 bp, Klebsiella pneumoniae
atgaaaactcagtatattttggagatctatgacccggaagatctttcatgcgttgcgggtttgtatgaaagtagcacaccttttggtgccttaaatgtaggcgatgagatcagtgggcattctttaaatcatagcgaatcaataaaaaacgtaaagattactaaaattcaacacatcttgtgggaaattgagaattcgcaccggactcacaaaatctgtgttactacacaattagcttaa

SEQ ID NO: 264205 - DNA, 603 bp, Klebsiella pneumoniae
atggtcaaactcgcgggtatagctgttcatgccctcttcggcgcgctggtcgtcgataaagcgatgcgacagcgaaccgctggccagcaccgccacggtgccatcgtatttgtcgatggccttgaggatggcctcgcccagcttgcggctgtcggcaaaatcgtgaacggtacagaaggcggaaatggacaccactttgaaatgcttatcgctattcatgtagcgcatcggcaccagggtgccgtattccagcttcaggctcggaatattgtgcgccttggcgcgtacgccaagcttgacggcctcgtcggcaatcaggtgacccagttccgggttgccgtcgtagtcgtaggtcatgtcgcgaataaaatgcggcagttcgttactggtgtagacgccctggaaatggtcggcacagttgatgtggtaggcgctgttgaccagccagtgggtgtcgaacacgataatggtatcgacgcccatttcacggcagcgcttgccaatttctttatgtccgtcgatcgcgccctgacggcagccgtggtttttccccggcagctcagacagatacatcgacggcacgtgagtgatttttgctgctaa

SEQ ID NO: 264206 - DNA, 123 bp, Klebsiella pneumoniae
atggaaattatgccgaagttagtagacgttatctgtcctgtttataataaggctgaacttgttgtagattttataaattcatttatggacataacctcttctcatatcagcatctatgaataa

SEQ ID NO: 264207 - DNA, 288 bp, Klebsiella pneumoniae
atggcgataggcctcggagatctccgtcggggaggcgacccggcgcagcgacggatggtcaggagcatgatcgcgctcgatatcgaagcgcggccgcccgtcgagggtttctccccacaccgtcgcgtgacctcggctctcctcgacccagccgtcgaaatcgctctgcagggcggcgatgtcggcgctggaaagcacctcttcgaccaccagaaaaccctgctgatgaaactgatcaatttgccactgcgcaatcatagtttttcctcttcacgttccgatagttaa

SEQ ID NO: 264208 - DNA, 210 bp, Klebsiella pneumoniae
atgccgatagtggaataccaagcgatacataatcctgcaacagttccgattactgcaaaagggccacacaaaatgttcagcagtgaaaacccatcattcagaacggtaacaaagctgattgctatagcaataccgatcgcgagatatattacctggctgtactcacggttcattattattcaccattacagaagtatctttttaatataa

SEQ ID NO: 264209 - DNA, 3156 bp, Klebsiella pneumoniae
atgaaacatatagggcagatgaatcagtttattgaaccggctaaagaagaaaccggacaaaaaagtgactttctgcaaggtgtggcgtcttcgctttttggaagcgctggtcaggctcacgatatcaccacaggggcttttgtcctcaaccaaatagataaaggtgtgctgcagtatcgcaagtcgttgggtatcgccgcagattaccaactcttcgaagcgagcatgaaacgaaccaacgccatggtcagtcaggggcaactctggctgaacatctcaggcgctgcaatcagttttctcgagatgttcagttatatggttgcgccctttgctctgattgcgatcctcttcctgggaggtgaaggcataacttcagctgcaaaataccttcaactgatagtcttcgttaacatgtggccgataacagcggtcatggtcaatgcatacgtaaaaatggtattaaatcagcagtttgacacatggtcatcgctgggtgtacagaccactatgaactgggcgaatatgggaagtattcaggagacgtacgggagctacctgtccgtagcttcagcgctgtattgcatggtgccgatgctgacactgttcctgttgaccaccagcatccacccgatgatgggagcgttgaaaaatgtcacgccggatgctcctgccaatactggccatgtcacaccagaagtgtggtcggcgggtaatgcgggtaaacagtcctttggtgaccagacacacaccgcagccacttcaaccggtgccggtatgtcatcaggcgggcttctgaatgcagccgttcgtagttctatgccctctctgtcacttggcaataacttgcaggatactgtttctgcagcaggtaggaatgatattggcacgacgcgtcagtcaacgcgaatgacgagtcaaggtctaagtgaggcatggtcgtcagcttttcaggggcagcattctcaaaacgcttccataacgacgcaaggcgggcagaaacttgtggaagatatagcaacaggtataagtaatgggatcggttctaatgttggaatgtcaagtgatgcaattaaagggaaggcaatggcagcaacccttcaggccggtggggatattgcagcgcagcttggtttaggtacaggaaaatcagcaggtgtagcaggtgttatgcctggaaaaatcatggctgccttgaaaggtgcgcttcttgggcaaataagcagcgattcaaaattgtcagatgctgctaaaaaagggatgactgacaatattgagaatatgtttaaatcaggtagtgcgttttcaagtgacctttctaagtatgcttcaaatgtaacacaagatggttttagtagctctgacacatatcagaaagccgctcagaaaatggaccaatatagccagtctattagtaataccgaaacaaatgcattcaacaaaactggtggacaagcatctcaactggctatgagtaacagtctgaatattgatggcaatatgatctcagataccatgagaacaccggcaaccgaggattcagtaagagcttgggcgtcagcttcaggtcttaatgcagatgcgatagctggtcagtggaagtcaacacgcgatatgatgaacaggagtaacacgctcggttctgataaaaatggtaatgatgcctttgcaaaggtattacttgaccaggcgcaagctaaaactcaaatggaatccggggaaaccgtcgccaaaaatctggctgatattaaacagacatctgcgatgttcaaaaatgcagtcagcatgatgggagccaatgaacaaattctttcaccagcagcagaaaaattagatcaatttgtggctttgggaagtggtggacagtatgccaactaccaagagcaggcacaaactgcgcccgatacatcaggtgtctcttcagccggagctattaccggtggcatggatagtcagcgaggtctgacatcttctaatctaggacaacaccaggaagccgctagagttcaacctagcacatcaattggtggcatatctgctcaaacactttcaggtaacaatgggcgccagtatgttgaagatgaagctggaaagggggcatcgcgtgttctttcctctggtgatagagacaagctcaattatattagagaaaatatgccggtaggctctccaaaagaaacatacgaaagtgcgaaacaagctggagacgctgctgatgccacaacaggcaaagcgcagtctctcgttctgggagatcctaaatcaagcgattacaaagctagtacacaacagactatgcaaagtttgcagacagaagaaccccctaaaagcattgatacctttagatcatcaggtgacagaaccagcgatgctgaaagcgcgctggcccaggctgcactgcatgctgccaacgccaataatcaaataggaaccgcaagagagcagagtttagctgagagcaatgcctatagagaaaaatacaatcaaataaccggaagtaatctctccgaggctggagttgaacgcatagttcgacaagccgctgacggaaaaaataatggctttagtggtggtcttaaggatgtaattagtgctgaagttaatggtactggaacaacaggccgaccagttaccggatctgctgactcatcgcttggtaaggagttgcgtgaaaataacggggcaagcgaacatcccatggataaggcgtccgctgcgtttcaaaagacaggagacgctattcctggccatgaagtagcttcagatttagcacaacgtgttgcgggtattatccctggtgggaatgcactggttccagacattggttcgcaaagaaacgtgccgaatgcaatgggtatatcgaacaatagagctccgggctcacttatcagtaatatcagtaataacatacagttaagtcaggctgttgatagtgcttctgttaacgctggtataaatgatgagaaatttaccaggatgtctgatcaaaatcagatgcttaccgaatcagtacaaaaagcattagctaatgattcgcgatatgggcccgatgtagcggcagaatatcctaagtttatagcaagtttacctagtaacatcggtgtaaatgaagggactaaaatgactaaagattttttagataagcatagaaagaattag

SEQ ID NO: 264210 - DNA, 246 bp, Klebsiella pneumoniae
atggcccgatgttatgtttatatccagttgcgccatgcttttaatctggcttcacgcagagtgggactggtggagaaaaaaataacccccaccaaattcaaaccctcccatccttcccgtcaggcaacccgcgcccaacacattagcaaagtgtgggcctcaatcacgctgaacgatttaccttcgccgaggttggcagttttgccgctggtcgtgtgtttgtgcgccggtactgtgacttcgtga

SEQ ID NO: 264211 - DNA, 258 bp, Klebsiella pneumoniae
atggcttatcaactcaacattaactggcccgagtttttagaaaaatactggcagaaacagccggtggtattaaaaaacgcgtttccggacttcgtcgacccgattactccggacgagctggccggattagccatggagccggaagtcgacagccggctggtcagcctgaaaacggcaaatggcaggccagcaatggtccttttgaacatttcgacgggctgggcgaaaccggttggtccctgctggcccaggcggtaa

SEQ ID NO: 264212 - DNA, 195 bp, Klebsiella pneumoniae
atggtaaccaggatcgttaatcagcggcgtgccggcatcggaaaccagcgcgatgttttgcccttctttcagtttggcaagcagggtttccgccttttgctgctcattatggtcgtgaagcgcaaacaaacgggcgtttatcgcaaaatgttgcagcagcaaaccggtatgacgggtatcttccgctgcaattaa

SEQ ID NO: 264213 - DNA, 1545 bp, Klebsiella pneumoniae
atggcgccgcacgatctcgtcgctccccagcccgttgagtccgaagtgattatcgaaacccgcggcctgtcgcgcgtctatcccggcgtaaccgccctggataatgtcaattaccgggtctatcgaaataaggtcaacgtgctgatcggagaaaatggtgcgggtaaatccaccatgatgaaaatgcttgccggcgttgaaacgccctcctccgggcaaattatcctcgatggtgaagcggtttcattacagtcgacgcatcaggcagaaaaactgggcatcagtattatttttcaggaactgaatttatttcccaatatgaatgtgatggacaacatcttcatggcgaatgaattctttcagaaaggacgcattaacgaaaaataccagtacgcgctggccaaatcgctgctggaacggctggagctggatgtcgatccttacgctccgctgggtgaactcggtatcggccaccagcagttagtcgagattgcccgcgccctgtcgaaagacacccgcgtgctgatcatggacgagcccacctcggcgctgagccagtctgaggtcaaagtgctgttcaaggtgatcgcgcagcttaagcgccgcggcgtgaccatcatctatatctcgcatcgcctcgaagagctgatggagattggcgacaacatcaccattttccgcgacggtcgctttatcagcgagcgtcacgtcagcgacgccagcgtaccgtggatcatcgagcagatggtcggtgataagaaaaaacactttgattatcaaccggcgccaaaaggcgacgcagtgcttgacgtcaaagggctgaccgcgctgcatcccagcggcggttacaagctcaatgacgtcaccttcaccctcagcaaaggcgaagtgatcggtatttacggcctgctgggcgccgggcgcaccgagctgtttaaaggcctggtcggcttgatgccctgccagcgcggcgaggtgcatcttaacggcgaaagcatcggcaaatctcgctttcaacagcgcctgaaaaaggggctggcgctggtgccggaggaccgtcagggcgaaggcgtggtgcagatgatgtcgattcaggccaacatgacgctctctgatttcagcctgcaggggttccgccgcgcctggcgctggttgaacccgcaaaaagaagagacctgcgtgaaagagatgatccagcagctggcgatcaaggtcagcgacgccacattgcccatcacctcgctgagcggcggcaatcaacaaaaagtggtgctgggtaaagcgctgatgacccagccgcaggtggtgttcctcgacgaaccgacgcgcggcatcgacgtcggcgcgaaaaccgacgtctatcacctgatcggcaaaatggctcagcaggggctggcggtgatgttctcatcttcggaactggatgaggtgatggccctggccgaccgcatcctggtgatggccgatggccgcattaccgccgatttaccgcgccatgcagtgacccgcgaacagttaatcgcggcttcaacacctcaagattaa

SEQ ID NO: 264214 - DNA, 489 bp, Klebsiella pneumoniae
atgcgactaatttctttagatttgaggggcagctacaaaggcttgaaagaccaattttttgattttagttatgcccaagataatatatttgcattgattggccttaatggttctggtaaatctcaattacttgagttaatcggggaaacgtttgcctatctagagcgatggcaacgtgcagagttcaaaaataaaacatcgttaggttttagcgtcgcggtacactatcaatgggatcttagaaatgatagtgctgttatatcttacccagacgagctcatgaatcatggtgagagtattgagctaaaggtaactattgagcttgacggagctgtggttttaaatgttcttggtgctgatgagtggcatataatacagcttggtgagcgccattttcccatccctctcgtggttggttatgcttcggggctaaacgaaaatttacagcgaagttttatgaaaaatgctgtgcaagtagccagcgtctaa

SEQ ID NO: 264215 - DNA, 1455 bp, Klebsiella pneumoniae
gtgcgcggtcataaagtcgatggtttccaccgcacgcagggaaaccacccagtcgtatttacggccatcgcccatcacgccgacggaacgaaccggcaggaacacggtgaacgcctggctgactttgttatacaggtcagctttgtgcagctcttcgatgaagatagcgtccgcacgacgcagcaggtcgcagtactctttcttcacttcgcccagcacgcgcacgccaaggccggggcccgggaacgggtgacggtagagcatgtcgtacggcaggcccagttccaggccgatcttacgtacttcgtctttgaacagctcacgcagcggctcaaccaggcccatcttcatctctttcggcaggccgcccacgttgtggtgagatttgatgacgtgcgctttaccggtggcggaagcagcagactcgataacgtcagggtagatggtaccctgcgccagccatttgacgtcgtccagcttcagcgcttcttcgtcgaacacttccacgaacacgcgaccgataattttacgcttggcttccggatcgctttcacccgccagcgcgtcgaggaaacgctgctcgccttcaacgtgaacaatgttcaggccaaagtggtcgccgaacatctccatcacctgctgcgcttcgttcaggcgcagcagaccgttgtccacgaatacgcaggtcaggtttttgccgatagcgcggtgcagcagcatcgcggtcaccgaagagtccacaccgccggagaggccgaggatcactttgtcgtcgccaacctgctgacggatacgctcaacggcgtcgtcaatgattttcgccggggtccacagcgcttcgcactggcagatgtcgcgcacgaagcgctccagcatacgcatcccctgacgggtgtgggtcacttccgggtggaactgcacgccgtagaagcgtttttcttcgttggccataatggcgaacgggcagttgtcggtgctggcgacggttacgaagtccgctgggatggcggtcactttgtcgccgtggctcatccacacgtccagcagcggtttgccgtctgcggtcagggaatcttcgataccgcgcaccagcgcgctgtcgttaaccacttcaacctgtgcgtaaccaaactcacgctcgttagaaccttctacatggccgcccagctgcatcgccatggtctgcatgccgtagcagacgccaaataccggcacgccggcttcgaacacatactgcggcgcgcgcgggctgttctcttcggtggtgctttccgggccgccggaaagaatgatgccgcttggattaaattcgcggatctgtgcttccgtgacatcccatgcccacagctcacagtagacgcccagctcacgcacgcgacgcgccaccagctgagtatactgagacccgaagtcgaggatgaggatgcgatgtttatgaatgttttccgtcattga

SEQ ID NO: 264216 - DNA, 2544 bp, Klebsiella pneumoniae
atggctggcaagtcactcggtacgttaacaattgacctgattgccaaagtaggtggatttgttcagggcatgggcaaagccgaaagagcttcccagaagtggagtgaccaggtaaaaaaagacgccaaagaggtaagttcagcaatcatcgcagttggggcagctgcagccacagcagcagttggaataggggctgctgggttatccattgttaaaaatacagctcaacaggtaactgaggccgaccgctgggctaaatccttaaaaatgtccacgcaggatttattgtcatggcaatacgcagcggaacaggctggtttaactggcgataacattgcagatatttttaaagacattaatgataaagttggtgatgccgttttaaataaatcaggagaggcggctcaagcactcgatactcttggcctctctgctaaaaaactttccgagcaatctcctgataagcaacttatggctatcagtgaagcattgcagaaaataccgagtcaggctggtaaaactaatattcttgaaagcctcggtaatgacttatcaaaaatgcttccattgttcgagaacaacaatgagaagttaaagcaatttattcaattatcaaaagattttggtattgccccgccacaagaggatattgacaacctcgtcaaagtaaaccagttctttcaggatattgaggctagcgctcgtggcctgaagatggaaatagcctccgggctggctaaagtggatcttacgccattacagtctggacttgatgatattcgtgacgtcttcaccgatcccgctgttcttcaggggctatcagacctggttggtgaagccataagccttgccggggttgtggggcgtattgctggtggcctgggggccattgcaacttatacccgctctcgtatcggtgctgtatctggtaattataacgctgctgatgaaagtgatattgcacagcgcattgaattccttaacaaacgagggaatcaaagtaaggaacaaaaagacgaattagcctttttaactaaacgtcttcaatttcttcgcgcgataaagtcaagcatgactccggagcaggtagatagaggagcgaaagggctcacatctctactttctgatcttggcattgacacttctaaagataatgatttttcgttgggcaaaggggagtctaaccagaaccagccaaaaacaaaaccaaaaagcaatcctactgacaatgctttcaaaaatagactgcttgatttacaaaagcaggccgccctaattgaaacaacaggtaaaaaaactgcagaagtaaccgaactggagaagattaattttgatataaccagcggaaaccttaaaaaactatcagagtcacagaaagagcaacttcgtactgctgcaaaagttcttgatgcaagaaaagaagagcttcgcacaaacaaggagaatgctaagcttgcagaatatgtgtcaggtttaaataaacagaataagcttgttaaacagggttatgataatgaactatccggtctttcattcggagggaaagaccgcgaaagaatgcgtgaaataaacagcattcagcaggattatgaaactcgacaagaggagcttttaaatcaacttcaagctggcgacattgaagaaagcttatatgaaaaaaagaaaaccgccttaaaaaaagctcttgaagaaagattgcagatccaaaatgattattaccatgagtcagatgacctaagaaatgattggcaatctggtatttctagtgctctagctgattttgctgatagctcaactgattattaccaacaagcagcggacgcaatgacatcaatcttaggggctgctacggactcagtttcagaacatttatatgatgttgtaagcggaactgaatcgatgggggaggcaataaagggagtatttgcagaccttggccaggcagtgattaaagctctggttgatatggctgctcaatggattgtgtatcaaggtgttcagatgctggtaaacaaaacagcccaagcctctgctattccttcaatgatcgctaatgctcaggctacagccttacaggctcaacttgctgctttcgcatcaactgccgcaatcccaattgtcggaccgggattagctccagccgcgatggctgctgcagcggctataacagaacctatggttgctgctatttctgccgcttccctttctggcatggcccacgatgggattgatgcagttcctgaaacaggtacctggttgcttcaaaaaggagagcgggtgaccaccgcagcgaccagcgccaaacttgatgccactctggatcgagtagcaaaccagtcaacagggggggcaacctatgcgccgagtatgagtttctatgtcaacggcgatccctctgatgctcaaattgccatgatgaagaaagctgcatccgatggcgctcagatggggtatcaaaaagcggtacagtctattgctacagggcagggtgatttacataaagctctgatggggaaaactacctcggggaggaaaattagctga

SEQ ID NO: 264217 - DNA, 498 bp, Klebsiella pneumoniae
atggacgataagccctactgcggcggcggcggccagtacccaggtcagcttccacttataacgaaacagcagcccggcggcgcccagggctatggctgcggaccacgggtcgaaaccggatggtccccagacgctatgccagataaaaaacagcgccagattcaggataacgcccaccaccgcggcggtgatggcggtcaacggcgcggtaaatcccaccttattatgggtcgtttcaataaacggcccgccggcgagaataaagataaacgagggaaaaaaagtaaaccatgtcaccaggcacgccgccgcaatgccccccagcagcacatcatcgacgcccaacaccgctttggtgtagccgccgacaaacccgacaaaggtcaccaccatgatcaacggtccgggggtcgactccccaagggcgaggccatccatcatctgccctgccgtcagccagccatagtgggtcaccgccccctggtaaacataaggtag

SEQ ID NO: 264218 - DNA, 1851 bp, Klebsiella pneumoniae
gtgactcggattcggacagcgactcggatgctgacagcgactcggactctgacagcgattcggatgctgacagtgactcggactccgacagcgactccgattccgacagcgattccgattcggacagtgattccgactctgacagcgactccgactccgacagcgattcggactccgacagtgattcggattcggactccgactccgactctgacagcgattcggattccgacagtgactccgactccgacagcgactcggattctgacagcgattcggacagtgattccgactccgacagcgactcggattctgacagtgactccgattcggacagcgattccgacagcgactccgacagcgactctgactcggacagtgattccgactctgacagcgactccgattcggacagtgactcggactctgacagcgactcggattctgacagcgactcggattctgacagtgattccgattcggacagtgattcggatgctgacagcgactccgattctgactccgactctgattccgacagcgattcggattccgacagcgattcggactctgacagtgattcggattcggacagtgactcggatgctgacagcgattctgactcggacagcgactctgactccgacagtgattcggactctgacagcgattccgattcggacagcgactccgactccgactctgacagtgactcggactccgacagcgactcggattctgactccgactctgattccgacagtgattcggattcggacagtgactcggatgctgacagcgactccgactcggacagcgattccgacagcgactcggattctgactccgactctgattccgacagcgactcggactccgacagcgactctgactctgacagcgactcggactccgacagtgattcggactctgacagcgactcggattccgacagcgactcggactctgacagcgactcggactccgacagcgactccgactccgacagcgactcggactccgacagcgattccgactctgacagtgactccgactccgacagcgattcggactcggacagcgactcggactctgacagtgattccgactctgacagcgactcggattctgacagcgactcggatgctgacagcgattcggactctgacagtgactccgattcggacagcgactctgactccgacagcgactcggactctgacagtgattccgactctgacagcgattcggattccgacagcgattcggactctgacagtgactccgattcggacagcgactctgactctgacagcgactcggactctgactccgattctgacagcgactccgattccgacagtgactcggactccgacagtgactcggactccgacagcgactcggattctgacagcgattccgactctgactcggacagcgactcggattctgacagcgattcggactccgacagtgattcggattctgacagcgattccgactccgacagtgattcggattctgacagcgattccgactccgacagtgattcggattctgacagcgattccgactccgacagtgattcggattccgacagcgattccgactccgacagtgattcggattctgacagcgattccgactccgacagtgattcggattctgacagcgattccgactccgacagtgactccgactctgacagcgactccgattcggacagcgactctgacagcgactctgacagcgattcggattccgacagcgactctgactccgattccgattcggataccgaaccgcaggcaaataatgatacccatacggcggctatcgataccgtag

SEQ ID NO: 264219 - DNA, 762 bp, Klebsiella pneumoniae
atgaatcaatataccgcggtacctcatgccaaaattatcggcggtcgtttcaccttttcacctttccagtctttagagttaggtgcatcgcgcattatgcagtggggtggggaagggcggcctgaatcatttagtagcttctgggatggcttcactggacatgataataccggtaccgataatgagccgggtaaccagctggctgggtttgactttaaattcaaactcgagccaactcttggttggccggtaagcttttatgggcagatgatcggcgaggatgaatctggttacttaccatcagccaatatgttcctcggcggggtcgaagggcaccacggctggggtaaagatgcggtgaactggtatttggaagcgcatgatacacgtactaatatgagtcgaacaggctatacctatatacatcatatttataaagatggttattatcagcagggctatccgctaggcgatgctatggggggagacgggcagttaatcgccggtaaggttgaactgataacagaggataaccagcgttggagcacgcgtttggtatatgccaaggtaaatccaaaagatcaatcaattaataaagcattcccgcatgctgacacattgaaaggtgtacaacttggctggagtggggatgtctataaaacagtccgcctaaatacctcgctgtggtataccaacgcagatcatagcgatagcgatgatgttggcgcaagtgccgggatagaaattccttttagtttatag

SEQ ID NO: 264220 - DNA, 534 bp, Klebsiella pneumoniae
atgtctttttgtgacggcgtggttgctccgcgagctatcgacatgagttttcctttatcgatacgatttagtgtgacctgcgaacgtggtgtggaaatattgcaggaagtgtctcggtatttaatgccagtaattgaaatggaggttattaggtatactaatcgatcgggggccgggttgctgtttaaatttcctaccgagaaggaaattgaactggttcccattgtcattttgctggtgtcaatcgtttctttggtttttatcaaccatactacagtagagttatatctttctgatgaactggaaaccggcacatccgttgaactactttcagccgcgaccaaagagccatttttactgcgtaaaatatcggagacttggaaaccaataccatcaatacctgtttcatataccggtttaccctggataccggtgacgcctgttacaacaggcgcatcgacgctgataacgtatttatcattaggcgctttagtacaagtaaagttttttattctgtcaacaccaaacttatga

SEQ ID NO: 264221 - DNA, 804 bp, Klebsiella pneumoniae; identical to SEQ ID NO: 225050

SEQ ID NO: 264222 - DNA, 531 bp, Klebsiella pneumoniae
atgaaatctgcattaatcagcccgctgctggcgggtctgctgctgttaaccggctgcgcacagcctgccgcacaggccggaggcggcggtggcggaacaataaaagccatcaaccacacaaaatgggcaattaaccacttcagtatcaatggccagtcggggatcgacattataggcccgttccagggcggcggtggcggctgctgcttcagcgtgcccgcccgctggacgccgggtatgacggtgcgcgttgactgggaaaccggggtgggttcatcagcgggtttcccgggatatgaagatgagaagaagtttttagagtgggcaaggaatattaaagctcagaaccgtcagcacagcaaaaccgttccgctgcctgactataacggccaggatgtgtgcggcattacggtgcactttttaccctgcgatgacgtgaaggtgactaccagctgctggtcaccgagaaatgtgaactatccgataaaagagcccgtcaggatgaaggagcccgccgtatgtccgaaataa

SEQ ID NO: 264223 - DNA, 294 bp, Klebsiella pneumoniae
atgacggtgcgcgttgactgggaaaccgggcagggttcatccgcgggtttcccggggtatgaagatgagaagaagtttttagagtgggcaaggaatattaaagctcagaaccgccagcacagcaaaaccgttccgctgcccgactataacggccaggatgtgtgcggcattacggtgcactttttaccctgcgatgacgtgatggtgaccaccagctgctacacctacggcagtccgtcctacccgataaaagagcccgtcaggatgaaggagcccgccgtctgtccgaaataa

SEQ ID NO: 264224 - DNA, 819 bp, Klebsiella pneumoniae
atgactggcgatctaaatcttggcggtaagagcatcaaaaatatccaagacattacggcatcaggaacaaccagcaccggtagtttgaaaacaacaggaaacgctgctatcggatcagatcttgctgttggtggagcctctacccttaatggtcctgtaaatatcaacaacaacctgaaggtaaaatccgatacctatctcaacacgctttctacaacagggctggcgaagtttggaggacgtatcgcgacgaacggactcaatcccaacgatctaccgtcaggatgggctggaggtgttcgcacttatgatttgtatgcgtctggaactgttggggctggaaccgggaaaacggtcaatgcttatatgaacagtgcaggtaatatttttgcgtcaggcaatcttactgctggaacgataaaatctaatggcacaattgaatcagccgggaggattaaggtcggtgagtatcttcatctaaacggtcaggcaacgctgaatgcgaaatgtacgcctaatggtctggtggggcgagacagttcaggtagggttttatcctgtgtcagtggtaagtggcagacagtgagtggtaatggcttaaaaggtatttatattacgatcacagatcaagtttcaggctataagtgcgttataccaaacagcgatacaggctcatgttcttgtccgggatcggcgtatggctcaaaatatggttatttatctggaactttaatagctcaatatgatgatcaacgttgtagtggtggtaagaatgatcactgttatagcaattacagaaggttatatgcatgccaataa

SEQ ID NO: 264225 - DNA, 342 bp, Klebsiella pneumoniae
atgcgcgtcgcccaggaagagatttttggcccggtcgcctgcctgctgccgttcaaagacgaagcggaagggctgcgcctggcgaacgatgtggaatacggcctggcgtcgtacatctggacccaggacgtcagcaaagtgctgcgtctggcacgcggtattgaagccgggatggtgttcgtcaacacccagaacgtgcgcgacctgcgccagccgttcggcggcgtgaaggcctccggcaccggccgcgaaggcggcgaatacagctttgaagtgttcgccgaaatgaaaaacgtctgcatctcgatgggcgaccatccgatcccgaaatggggagtctga

SEQ ID NO: 264226 - DNA, 603 bp, Klebsiella pneumoniae; identical to SEQ ID NO: 264205

SEQ ID NO: 264227 - DNA, 393 bp, Klebsiella pneumoniae
atgggtggtttcgtcgccccaggcgatgccctgcgggacgataacggtataaaccaccgtctttttcgccagcagccccagggagtgcggcagcgcaatgccatcccccagcatggtgctgacgatcgcttcacgttccaccaccgaagcatgaaactccgcatcgacaaagccttcctccagcagctgctggcacagctcggcgaacagcgtttgctgatccatcggcttatcgaccacccggaagtgggcggcatcgaagtacttattcagcatccacggacgggtacggtccaccagcaccagcttgccgatttgatccagctgatagtcggtggggaacggcgcgatggtcactaccggcttgtctttttcgccgatccgcaccgttga

SEQ ID NO: 264228 - DNA, 240 bp, Klebsiella pneumoniae
gtgctgtttgatgttatccagcagcggattggggatcatgatctggtagcgcacccgggtgatcatggttttaatgtgggtcagcagatcggcatgcagctgggcgtcgtccagcaggttgtaattatactggctgttgatgtagcgcaggatgtaattgaccagcgcttcatcatcgtcggcgctgatagtttccggatcgacatcctgcacctgacgggccgcgatatgcacgcatag

SEQ ID NO: 264229 - DNA, 687 bp, Klebsiella pneumoniae
atgcagcagcttaaacagcaggtttttgcagctaatatggatctgccgcgctacgggctggtgacctttacctggggcaacgtcagcgcaatcgaccggcagcgtgggctggtggtgattaagcccagcggcgtagcctacgagtcaatgaccgtcgatgatatggtggtggtcgatttgcagggcaacgtggtggaagggcgctggcgtccctcttctgataccgctacccaccttgcgttataccgccgttattccggccttggcggggtggtgcatacccactcgacgcacgctaccgcctgggcgcaggcggggctggcaatcccggcgctcggcaccacccacgcggactacttcttcggtgatatcccctgcacccgggcgctcagcgcacaggaggtggaagaggcctatgagctgaacaccgggaaggtgattatcgaaacgctgggcgaggccaacccgttacatacgccgggaattgtggtgtatcagcacggacccttctcctgggggaaagatgcccacgaggcggtgcacaacgcggtggtgatggaagaagtggcgcgaatggcgtggatcgcccgcggcattaatccgcagctacagcccatcgacagctggctaatggagaaacattttctgcgtaaacacgggcctgacgcctactacgggcagaagtaa

SEQ ID NO: 264230 - DNA, 237 bp, Klebsiella pneumoniae
atgtttaacgcgctgacggccaacaactacgcaggtgagccccaattcggggtctttccagacgataatcggctccagtacacccagctccgcaatgttcagtaccatcccttcgtcgataggaaggtggacccgttcatcgtaaagcgggtgtgttttgtcggtaaccaggtgcaggttttcaggttcgaacgtcaaaacgttcgttttgccactggcgccgtatacaagctttga

SEQ ID NO: 264231 - DNA, 642 bp, Klebsiella pneumoniae
atgaatacaccatcctttggcaaattctcgccgcgctggctagcgggaaaaaggggccttatcgtcacgctgctcgcggggctggcgatcctggcgctcggtcggggcatgaatttgccggccagagaggtttaccgtgagaggcagatccgccagctggaggaggatgcgcagtgggtgacggaacgccttgagcggcggatgaacattccggcgccgcagcgggaagcgacctggccgctggcggcgatgcgcgccgctctccagaccctcgcccgggagcggcattatcagctgctgctggtgaatggcgacgggcatctgctggcggcatcgcacgcgctgccggccagcgtgctggcccaggtgcaggcgcagttcccgcgagagatgcagcccccgctgttcggcagccactaccagaccattcagccattcgccccgcatcagcggatgttaagccgggcgctgaacggcaacgcgggtctggcgggctggaatctggtgatgctggcgccggatggtggattgccctcgttgctggtggcttaccgctggccggtaacgatcggccttggcgcggtgctcgccagcgcgctgctggcgctgaggcaggcggcgcgcgccaggcgaaaacgctaa

SEQ ID NO: 264232 - DNA, 639 bp, Klebsiella pneumoniae
atgctgaccatctggggccgaaaaacctcctctaacgtgcaggcgctgatgtggtgtgttggcgagcttgggctggactatctccggttcgacgtggggcatcgctatggtggtaccgacggcgaggcgttttatcagctcaatcccaatcgcacggtgccagtgctgcaggatggcgataatccgccgctgtgggaaacgggcgcgatccttcgctatttagccagtcgctacgccaatgacgccttctggccgggcgacctgctggctcgtactgaggttgatcgctgggccgagtggtcaaagcagaatatcgccctcggctttacggcgccggtgttctggcgcgtggtgcgcacgcctgccgccgagcgggatccgcaggccatcgccgcggcggtgacggccctggagcaaaagctggcgattgccgaggcacgtctcgccgggagtcgctatctggtgggcgatacgttcaccctggccgatatccagtttggtcatgtgctgtaccgctactttgcaatcgatatcccccgtcgtcccctcccccaccttgcggcgtattatgcacggctaacctcacggcccgcctttcgccagcacgtcatggtcagctacgacgaactgaaggtctga

SEQ ID NO: 264233 - DNA, 429 bp, Klebsiella pneumoniae
gtggaagggtcgccgatcaagcttatcgaaggcggcaagcagaagcgctgcttcaccgacatcagcgacggtatcgaagcgctgttccgcatcatcgagaacaaagacggccgctgcgacgggcagatcattaacatcggcaacccggataacgaagcgagtatcaaagagctggccgaaatgctgctcgcctgcttcgaacgtcatccgctgcgcgatcgcttcccgccgttcgccggcttccgtgaagtggaaagcagcgattactacggaaagggctaccaggacgttgagcatcgtaagccgagcatccgcaacgccaaacgctgcctgaactgggagccgaaggtggagatggaagaaacggtcgaacacacgctggacttcttcctgcgcacggttgaactggtggacgataaaaatccatga

SEQ ID NO: 264234 - DNA, 381 bp, Klebsiella pneumoniae; identical to SEQ ID NO: 210262

SEQ ID NO: 264235 - DNA, 258 bp, Klebsiella pneumoniae
atgcccgccggcgctgtcgccggccagggtgatgcgcgaaacatccacgccaagctgttttgcgtgctggtgaataatcgtggcacctcgttctgcatcatcgtgcgccgccggaaaagggtactccggggccagacgatactgcacggcgatcacccggcacccactgaaccaggcaagctggcgcaattgattgtcatgggtggcaaagccgccgctgacaaaacagccgccgtggtagtagataagcgtgggtag

SEQ ID NO: 264236 - DNA, 366 bp, Klebsiella pneumoniae
gtgatcggcaaggtccatccgcagaccgccccggcccggacggtgctggagaaagagggattccgctacctgaactacatcgatattttcgacggtggcccgaccctggagtgcgatatcgaccgggtgcgggcgatccgcaaaagccgtctggtgaccaccgaggccggcgaaacgccacccggcgactggccgttgtgcctcgtggcgaacgaacagtatcaccagttccgcgccctgctggtgcgtgccgacccggatggcgacaccctgactctcagcgcccgcgagctggatatgctgaagtgtcatgctggcgaccaggtgcgcatggtgcgcttgatccctgaggagaaaaccgcatga

SEQ ID NO: 264237 - DNA, 159 bp, Klebsiella pneumoniae
gtgtgcgagccgggcggcgtgcagtttatcgatttcggcagcgacccggatttcaataactgcgtggatggtctggtgctggtggatttgacctatctgaaagcgaaccgctatcagcgctatattggcgcgcatctgggtgcgcaaaaatcggcataa

SEQ ID NO: 264238 - DNA, 270 bp, Klebsiella pneumoniae
ttgccctggcgccagctccgggcgcagcgtcagcgacgggatcagataatcgccatgattctgccggcggaatggaatgggctcggtttgccacagcgtgtccagccgctcggccagggcggcgcactgatcggcgaactgcccggcatcggttttatccgtgcggtagaacaccagcggcggaagcacctcaaagccggggtagaacagcataccgtgctgaatggggaacaggatgtcgtcgatggggccattgatcccgcgcggtga

SEQ ID NO: 264239 - DNA, 210 bp, Klebsiella pneumoniae
atgatcaatgcgctgggattgctcgaagtggagggcatggtcgcggctgtagacgctgcggatgccatgcttaaggcggccaatgtgcgcctgctcagtcatgaagtgctcgacccgggcaggttaacgctggtggtggagggcgacctggcggcctgccgcgccgcgctgatgccggggccgccgctgcccggcggaccggctgcgtga

SEQ ID NO: 264240 - DNA, 270 bp, Klebsiella pneumoniae
atgtcattcaccctcacgcaaaatttgaagtcgtttcgtaccattccatacctgaatctcgttgagccgcttagtgccgcgcctgtagctgtgacatataccgccaaaggggtcgacagtatcaacgggactactgcaacggtgctgtttgatacgcaggttgaggggctggaggctacaggccagctctactactctttcgaatttactgaccttgcaaccatttttgaggatgcagaaacggcactaaaaaaagagatttcagagtaa

SEQ ID NO: 264241 - DNA, 660 bp, Klebsiella pneumoniae; identical to SEQ ID NO: 231926

SEQ ID NO: 264242 - DNA, 564 bp, Klebsiella pneumoniae
atgtccgatgctgcgctcgccgagatagctggcgcggcctttacgcgcctgcatagtgatggtggcgtgggccgcacgctcggccacttcgcaggcggcatccagcgcggcggcgatcgacaggtgctgctcgctggactggcgcagggagtccaccaccggcagccagacgtcgcacatggttttatcccctggctccgctttgccgcggttgacgacaccgtccgcaccttcgcggatcatcaggtacagctcgtcgagcgtcaggctctggtgggcctgggtcacctgcgcggcgcgaatgaagaaggtgccgaacagcgggccgctggcgccgccgacgttggagagcagcgtcatgccggtgtttttgaggataaagccaatatctttatcggcaatcgacggcagcttttcgaccactttactgaaaccgcggtgcatattgagaccgtggtcggcgtcgccaatctctttatcgaggccggtgagaaaatcgctctctttggtgaaaatatcgccgcagcggtacagccagtcgacgatttgcgttctgttcagtga

SEQ ID NO: 264243 - DNA, 765 bp, Klebsiella pneumoniae
atgaatcttgattatcaactcgacgggccggatggcgcgccggttatcgtcctctccaattcgctgggcaccacccgggcgatgtggcagccgcagatcgaggcgttaaccgcccatttccgggtgctgcgctacgacacgcacggccacggtaaaacgacgaaaaatggcaaagtgaccctcgcccagttgggtgaggatgtgattgcgctgctcgatcacctgaatatcgaccgcgcctggttctgcgggatctcgatgggcggtttgaccggcctgtggctgggacgctttgcgccggagcgttttcatggtctggcggtcgccaacaccgcggcgcgcattggcgatcaggccagctggctgtcgcgggcgcgggccgtacgtcaggaggggatggcggtggtggccgccggagcggcagaccgctggtttacccacgcgtttcgccagaaggcgccggaggtggtcgaggcgctttgtcaccagctgacccataccgatgctgaaggctatgccgcctgctgtgaggcgctggccgccgccgacctgcggggcgaagtggggcagatcccgctgccgacgctaatcatcgccggggaaagtgaccctgtcaccacggtcggtgacgctcatttcctgcagcagcagatccccgcctccgaggtggtggttctggcggcatcgcatctgtctaacattgaggcgccgaaaagctttacttcggcgctgctgagctttttccagggggaacgccatggatga

SEQ ID NO: 264244 - DNA, 363 bp, Klebsiella pneumoniae
atgaaacaattcttaatcggcgcaatcattgctttattatcagcaacaggatacatctgctatattaacttcttccctactacatacacctgtactttaactactgaagctaatcgttcaactattacttctactgttcaagtcaaagaccataagcattggtttactttccaaactaacgaacgttttttcaactctggtctattaagtactaagagcgatgatacttacggagacgttaagtacaaccgtactaatactggtgagttcatcagtactgtccgtaacggtaaaaagtatttcatgcatgtcgataaagtagctcgtgctgatcgctacttcggtgcttgccgagctcagtaa

SEQ ID NO: 264245 - DNA, 558 bp, Klebsiella pneumoniae
  misc_feature (69)..(74): n is a, c, g, or t
ttgtcgcgtacagtagacacccgttgttcctgcccggcagaaccggcgatgcccggccatttaaccggnnnnnncacgttgttcctgcccggcagaaccggcgatgcccggccatttaaccgggcatcgcatacagtagaccattgccttcagcacctacccggtttgtgggttgtcgcgtacagtagacacacgttgttcctgcccggcagaaccggcgatgcccggccatttaaccgggcatcgcatacagtagaccattgccttcagcacctacccggtttgtgggttgtcgcgtacagtagacacacgttgttcctgcccggcagaaccggcgatgcccggccatttaaccggacatcgcatacagtagaccattgccttcagcacctacccggtttgtgggttgtcgcgtacagtagacacacgttgttcctgcccggcagaaccggcgatgcccggccatttaaccgggcatcgaatacaatagactattgcctgtcagcacgtaccggtgcgtgggttggcgtatgcagtagacaccagagttgttcgtaa

SEQ ID NO: 264246 - DNA, 1062 bp, Klebsiella pneumoniae
atgcgacgtaatgcacaaaaatggatcccgtttggatttgatacggattcaaataaaattgttgatatcgccagcgttgaaaatgggctttcgtgtaactgtatctgcctcatctgtgggacctccctgattgccaaacagggtcaaaataaaaaatggcattttagtcacagcacagaagtaaaaggggtttgtagtgagctcacactacaacatataaaaaaatacataaaggtgaaaatacaggaaaaaaaataccttgctctccctcatcttctgcagggtaaggagaaagggatagttaacctcaaaaatctcgctgatggtgggattgtttgtggccttaatgctgacctcacagggatatgtaacgatacgacaatcgggatattcgttaatgatacatcggaggatatccagccaaatccagaccttttagctcaaacaggccagctggcgctggtggagatcgatgccgttcggattgaaagtatcatcactccatatcgtgagaacggggaaggcataaagatgatggatgctatagaaaagctacttttcacctcagatgaagccaagcggtggatctaccatcccttaatgcagacagcaccaccacatactttacatcagtacaaacgccacctgaatgccagcggcaaccagctgctttctatgattccggtagatctacccatgaatatgaattcgttgcctctggcacctgcacagcaatggcaacatttacgatggacaatagaaatactcgctaaacttacccgggcggatataccttcagggagtaccgtttttgatgaactggtatcctatgcaccgaggatgctggattcctgggaatctataaacgtacccgcgtatgaacgttggtacgattattacatcagtaaaaggggagagggaggactgaatgaggcggagcaggaatacattagcttcatagttaaaatcgcgaactggaacgtgtctatacataacttaccagagtttgatcgcgagagagctttccatgattggtttctcactcatgatcccaataagtga

SEQ ID NO: 264247 - DNA, 495 bp, Klebsiella pneumoniae
atgttgattggctatgcgcgcgtctcgacgcaggatcagaacctggagctgcaacgcgaagccttgagcaaggccggatgtaaaaaggtcttcgaggacaaggtgagtggcacgcgggcagaccggcctggcttggccaagacgctcgaaatgctgcgcgaaggcgatactttggtcgtctggaagctcgaccggctgggccggtcggtcaagcaactggtcgatctggtcggcgatctgcacaagcacggtgtccagttcaggagcctcaccgactccatcgacaccggcacaccatccgggcggttcttcttccacgtcatggcgagccttgccgaaatggagcgcgagctgaccgtcgagcgcacccgcgccgggctggaagtcgccaagcagctcggccgcaaaggcggccgcaagccgaagatgaccaagaacctcggcgtgtccattccgacgctgtaccgctgggtgccagcctccacgcacgcttag

SEQ ID NO: 264248 - DNA, 651 bp, Klebsiella pneumoniae; identical to SEQ ID NO: 102213

SEQ ID NO: 264249 - DNA, 177 bp, Klebsiella pneumoniae
atggccaatgcccggcggcgtatcctgctggcggacagctcgaaatacggcgcctggtcactgttcaacattgctcatcttgactcgttaaccgatatcatcactgatgatcacctggcggaagagacgcgtgaagtcttagcgcatattcatccccggctgatcatcgccgactaa

SEQ ID NO: 264250 - DNA, 255 bp, Klebsiella pneumoniae
gtggtacgcggaagggataagctcacagagtatcgctttaatacgggggaagccgtgcacttcttctgctcggtatgcgggatctacacctttcatcaacggcgatcaaacccgcagcagtatggggtaaatgtggcctgcattgatggcgtttcgcctttcgattttccttgcgtggaggtcaacgacggcgtgaatcatccaaaggatggcggcggaggcgtggtggggtatttacgctacgagaaaaagtaa

SEQ ID NO: 264251 - DNA, 606 bp, Klebsiella pneumoniae
atgagcaaagtattagttctgaaatccagtattctggcagggtactcacaatctggtcaactttccgactattttgttgaacaatggcaggaaaaacaccctggcgatgagatcaccgtgcgtgacctggccgccaatccgatcccggttctggatggcgaactggttggcgccctgcgtccgagcgacgcgccgctgactccgcgtcagcaggaagcgctggccctttccgacgagctgatcgccgaactgaaaggcaacgatgtgattgttatcgctgcgccgatgtacaacttcaacatcccgacgcagttgaaaaactatttcgacctggtggctcgcgccggcgtcaccttccgctacaccgagaaagggccggaaggtctggtaaccggtaaacgcgcggtcgtcgttaccagccgcggcggtatccataaagatactccgaccgacctggtcaccccgtacctgtccaccttcctcggcttcatcggcatcaccgacgtgaactttgtgttcgccgaaggtatcgcttacggtccggaagtcgcggccaaagcgcagtctgacgcgaaagcggccatcgacagcgtggttgcagcctaa

SEQ ID NO: 264252 - DNA, 3903 bp, Klebsiella pneumoniae
atgacagaacaacaaaaaatcaccttcccccagctttatcaacagctcgacggcctgatgctgcgcgacaaaacgcgctttgcccgccgtctacacggcgtgaagaaggttaaaaatcctgaatcgcaacaggccattctgcaggagatggcgctggagataagccaggcagccggtaaagtcctgctgcgcgaagcggcgcgtccggccatcacctatccggaaaacctgccggttagccagaaaaaacaagagattctcgaggcggtgcgcgaccaccaggtggtgatcgtcgccggggagaccggttcgggtaaaaccacccagctgccaaaaatctgcatggagctggggcgcgggctgaaaggactcatcggccatacccagccgcgtcgcctggcggcgcggaccgtcgccaatcgtattgccgaagagctgcagagcgagccgggcggctgcatcggctataaagtccgcttcagcgaccacgtcagcgaaaacaccatggttaagctgatgaccgacggtatccttctggcggagatccagcaggatcgtctattgatgcagtacgacaccatcattatcgatgaggcgcacgagcgcagcctgaatattgactttctgctcggctatctgaaagagctcctgccgcgccgcccggacctgaaaatcatcattacctcggcgaccatcgacccggaacgtttctcaaagcatttcaataatgcgccgattatcgaagtctccgggcggacttacccggtggaagtgcgctatcggccgatagtggaagaggcggacgataccgagcgcgatcagttacaggcgatctttgatgcggttgacgaactggggcgcgaagggcccggcgatattctgatctttatgagcggtgagcgggaaattcgcgataccgccgatgcgctgaataagctggatctgcgccataccgaagtgctgccgctgtacgcccgcctgtccaacagcgagcagaaccgcgtcttccagccgcacagcgggcggcgcatcgtgctggcgaccaacgtggcggaaacctcgctgaccgtgccgggcattaagtacgttatcgatcccggtactgcgcgtatcagccgttacagctaccgcaccaaggtgcagcgcctgccgatcgagccggtttcccaggcgtccgccaaccagcgtaagggccgctgcggccgcgtttcggaagggatctgtattcgtctttattcagaagacgatttcctgtcgcgcccggaatttaccgacccggagattctgcgcaccaacctggcgtcggtcatcctgcagatgaccgccctgggcttaggcgatatcgccgccttcccgtttgtcgaagcgccggataagcgcaatatccaggacggcgtacgcctgctggaagagctgggcgccatcaccaccgatgcgcaggcaacggcttataagctaaccccgctgggccgccagctcagccagctaccggtggatccgcgtctggcgcgcatggtgctggaggcgcagaagcacggctgcgtgcgggaagcgatgatcatcacctccgcgctgtcgatccaggacccgcgcgagcggccgatggacaaacagcaggcctctgacgaaaaacatcgccgcttccacgataaagagtccgatttcctcgccttcgtcaatctgtggaactacctcggcgagcagcagaaggctctgtcgtcgaatcagttccgccgccagtgccgggtcgattttcttaactatctgcgcgtgcgcgagtggcaggacatctacacccagctgcgccaggtggtgaaagagcttggcctgccgatcaacagtgagccggcggaatatcgcgagatccatactgcgctgctgaccggtctgctgtcgcacatcggcatgaaggatgccgataaacaggagtataccggcgcccgtaatgcgcggttctctatcttccccggctccggtctattcaagaagccgccgaagtggacgatggttgcggagctggtcgagaccagccgcctgtgggggcgtattgccgcccgcattgagccggagtgggtggagccggtagcgcagcacctgatcaagcgctcatacagtgagccgcactgggagcgggcgcagggcgcggtgatggcgacggaaaaggttaccgtttacggcctgccgatcgtcgccgcgcgtaaggtcaactacagccagatcgacccggcgctgtgtcgtgagctatttatccgccacgcgctggtagagggcgactggcagacgcggcacgccttcttccgcgaaaacctgaagctgcgggcggaaatcgaagagctggagcataagtcgcgccgtcgcgacatcctggtggatgacgagacgatgttcgagttttacgaccagcgcatcagccacgacgtcatctccgcccgccacttcgatagctggtggaagcgggccagccgtgaaacgccagacttgctcaattttgaaaagagcatgctgattaaagagggggcggagcaggtcagtaaactggactacccgaatttctggcatcagggcaacctcaagctgcggcttagctaccagtttgaacctggcgccgatgccgatggcgtgacggtgcatattccgctgccgctgctcaaccaggtagaggaagccgggtttgaatggcagatccctggcctgcgtcgcgagctgattatcgcgctgataaaatcgctgccgaagccggtacggcgcaatttcgtcccggctcccaactatgcggaagcgtttcttggccgggcggcgccgcttgagctgccgctgctcgattcgctggagcgcgagctgcgtaagatgaccggcgtgaccatcgaccgcgaagcctggcagtgggatcaggtgcccgatcacctgaaaatcaccttccgggtggtggatgataaaaacaagaagctgcaggaagggcgctcgctgcaggcgttgaaagacgccctgaagggcaaagtgcaggagacgctgtcggcggtcgctgatgacggtattgagcaaagcgggctgcatatctggagctttggcaccctggcagaaagttacgaacagaagcgcggtaactataaggtgaaagcctggccggcgctggtggacgagcgcgacagcgtggccatcaaactgtttgataatccacaggaacagcagcaggccatgtggcgcggtctgcgtcgcctgctgctgctcaacatcccgtcgccgattaagtatctgcacgagaaactaccgaataaagccaagcttgggctctactttaacccgtacggcaaagtgctggatctgattgacgattgcatctcctgcggcgttgataagcttattgacgaggcgggcggtccggtgtggacggaagagggctttagtcagctgcacgataaagtgcgagccgagctcaacgacacggtggtggagatcgctaaacaggtcgagcagatcctcaccgcggtgttcaatatcaacaaacggctgaaaggccgggtggatatgaccatggcgctggggctgtcggatatcaaagcgcagatggcgggtctggtgtatcgcggctttgtcaccggcaacggtttccgccgtcttggcgatacgctgcgctatctgcaggcgattgaaaagcgtctggagaagatggctatcgatccgcaccgcgatcgggcgcagatgcttaaggtggagagcgtgcagcaggcgtggcagcagtggctgaataagctaccgccgaaccgccgtgaggacgacgatgtccgggagatccgctggatgatcgaggagctgcgggtcagcttcttcgcccagcagctgggcaccccgtatcctatctcggacaagcgagtgttgcaggcgatggagcaaattaccccatag

SEQ ID NO: 264253 - DNA, 660 bp, Klebsiella pneumoniae
atgcaacaacagtggtcggcagtagacaattatttgattaaggccttaattcccggcgatcctgtactcgatcgggtactggaaaacaaccatcgtgccgggctcccggcacacgatgtcgccgccaatcagggtcagtttctcgccctgctggtacggctaacccaggctaagcggatactggagatcggcaccctcggcggctatagcaccatctggatggcgcgcgagcttcctgcagacggccaactcctcaccctggaggccgacgcgcatcatgcccaggtggcgcgggagaatctgcagctggcgggcgttgaccagcgggtcacgctacgggagggacccgcgctacagtccctggaggcgcttggcgaatgtcccgctttcgacctgatcttcatcgatgccgataagccgaataacccccattatctgcgctgggcgctacgttattcccgcccaggaaccttaattattggcgataacgtggtacgcgacggcgaagtggtcaacccacagagcgccgacgagcgcgttcagggcgtgcgtcagttcattgagatgatgggcgccgagccacggttgacggcaacggcgctgcaaaccgtgggcactaaaggctgggacggctttactctggcgtgggtaaacgcttaa

SEQ ID NO: 264254 - DNA, 1086 bp, Klebsiella pneumoniae
atgagtcagcaggatgcggccaaacaacaggccaacacccggaataatattcgcgtggtttccatttttaccgccgcggcgataggcctcgtcggcgtgctggtgatcctctacgcctggcaactgccgccgttcactcgccatagccagtttaccgacaacgcctatgtgcgcgggcagaccacctttattagcccgcaggtcaacggctatatcaccgccgtcaacgtcaaagatttcgcgattgtccagccgggcgaggtgctgttccagatagacgatcgcatctataaacagcgggtgcatcaggcccaggctaccctggcgatgaaagaggccgcgctgcgcaataacctgcaacagcgcaaaagcgccgaggcgacgatcgccaagaatgaagccgcgctgcaaaacgcccgcgcgcagaatctgaaaatccagaccgatttaaaacgcatccagcagttaaccgccgacggttcgctgtcgatccgcgaacgtgattcggcgcgggccagcgcggcgcaaggggcggcggatattgagcaggcgaaagcggcgctggagatgtcgcgccaggaccgtgaatcgaccatcgtcaatcgcgattcgctggaggccgacgtggccagcgccaaagcggcgcttgagctggcgcagatcgacctgcagaatacccagattatcgcccccaccggcggccagctggggcagatctcggtgcgtcttggcgcctatgtcagcgccggaacccatctgacctcgctggttccgccgcagcactgggtgattgccaacctcaaagagacccagttggccgaagtacgcgttggccagccggtcaccttcaccgtagacgcgctcaacggcgagaccttccacggcaaggtgcagagtatctccccggcgaccggggtggagttcagcgccatctctccggacaacgccaccggcaatttcgtcaagatcgcccagcgcatcccggtgcgtattacggtcaacgacgggcaaaacaacagcgaacgcctgcggccggggatgtcggtgcaggtgactattgatacccgtgcggagaaacaaccatga

SEQ ID NO: 264255 - DNA, 1653 bp, Klebsiella pneumoniae
atgccccgtcgccaggataacccctacgccccgcatgactgggcgccgcatgaaaaaccggctctgctcggttcgccgtcgacgccgctgcacagtccggcgaaacgccttgcctacggcgtggtcggtctgctggtatgtctcaccggcgcgctgggcaacgcagtggtcaccgccaacctacagctgctgcagggtaccttcgccgcctggtcgacagaaatcgcctggctgccggcggtatacgtgatgaccaacgtctccatcaacctgctgctggtgaaattccgccagcagtttggcctgcgcgctttcaccgaaggctttttggtgctctatgtgctggtcacctttttccacctcttcgtcaacgatctcagctcagcgatgatggttcgcgccgcccacggcatggtggccgcggcgctcagctcgctggggatttactaccaggtacaggcctggcctgcgcgccatcgcctgaaagggctgactatcggcatcaccggctcgtcgctagccattcccctggcgcgcctcttttccaccgaactgctgcagaccgatgaatggcgcggtctctacttctttgagctgggcctggcgctggtgtcgctggcctgcgtcatcgcgctaaaactgccgccaagcgatcgtaaaaaagtgttcgaaaaaaaggatttcattaccttctttctgctggcgcccggcatggcgctggtgtgcgccgtgctgtcgctggggcggctcgagtggtggtttgaagcgccgtggatcggctgggcgctggcggcggcggtaatactgatcgtcgctgcgattaccttcgagcataaccgcagcaaccccctgctcaataccaaatggctctccagcggcagcatcgtgcgtctgggcctgattatgctgttgatccgcatcgtgttggcggagcagaacaccggggtcatcggctggctgcagtacgttggcctgcaaaacgaacagatgactaacctcgcgtggtcgattttcgccggtattctgtgcgggatcattgccagctgtctgacgctcaacccgcagaagctctactggccgaccgccaccgcgctggcgctgatcatgatagcctcgctgctcgacagccagtccaacgccctcacccgtccggaacaattaatgttcagccagtttttactcggcttcggcagcgccttctttctggccccggcgatgcttgccgggattggcggcgtgtttgccgacccgcgcaacctggtcagcttctcggtgctgttcggtatgagccagaacattggcgggctgctcggctcggcgatcctcggcaccttccagacctggcgtgagaaattccactccagccagctggcggaccagataaccaccctgaacccgctgatcgtcgagcggctgcagcagtacagccagatgtatcagagccagattggcgacagtacgctactcaacgttcaggccaccaccctgctgcaaaacgccgcgacgctgcaggccaatattctcgcctggaatgatacctatctgctgacggcggcgatctccgccgggacactagtgtgggttttctggcgcttaattcgcttacgactgactgcccgtatcgcgttgcaacgcgctaccggcagcaaataa

SEQ ID NO: 264256 - DNA, 432 bp, Klebsiella pneumoniae; identical to SEQ ID NO: 137871

SEQ ID NO: 264257 - DNA, 1572 bp, Klebsiella pneumoniae
atggctgacattgcaattcgacaacaatcgccgaccgcgttttatattaaagttgacccgacagataatgtggcgattattgtcaacgatcgcggcttaaccgccggaacgcgtttcccggacggcctgacgctcgtcgagcatatcccgcagggtcacaaagttgccctggtggatatccccgcccatggtgaaatcatccgctacggcgaagtcattggctatgccgtacgcgatatcccgcagggaagctggattgacgagtcgctggtggagctgcccaccgccccgccgctgaataccctgccgctggccactaaagtgcctgaaccgctaccgccgctggaaggttacaccttcgaaggctaccgcaatgctgacggcagcgtgggtaccaagaatctgctgggtattaccaccagcgtgcactgcgtcgctggcgtggtcgattacgtggtgaaaatcattgaacgcgacctgctgccaaactatcccaacgtcgatggcgtggtgggcctgaatcatctctatggctgcggcgtggcgattaatgcgccggcggcggtagtgccgattcgcaccattcataatatcgccctcaacccaaacttcggcggcgaggtgatggtcattggcctcggctgtgagaagctgcagccggaacgcctgctgcagggcacggaagacgtcaaaagtatcccggtggacagcgccagcatcgtcagcctgcaggatgaaaagcatgttggttttaaatcgatggtcgatgacatcctgcaggtcgccgagcgccacctggcgaaactgaaccagcgccagcgggaaacctgcccggcctctgagctggtggtcgggatgcagtgcggcggcagcgacgccttttcaggcgtgaccgccaacccggcggtaggttacgcgtccgacctgctggtgcgctgcggcgcgacggtgatgttctcagaagtgaccgaagtacgcgacgccattcatctgttgacgccgcgggcgattaacgaagaggtcggtaaacgtctgctggaagagatggcctggtacgataactatcttgatatgggcaaaaccgaccgcagcgccaacccctcccccggcaacaagaaaggcggtctggccaacgtggtggaaaaagcgctggggtcgattgccaaatcagggaaaagcgccatcgttgaggtgctctctccggggcagcgtccgaccaaacgcggcctcatttacgccgcaacccccgccagcgattttgtctgcggcacccagcaggtagcctctggcatcacggtgcaggtattcaccaccggtcgcggtacgccgtacggactgatggcggtaccggtgataaaaatggcgacccgtaccgagctggccaaccgctggtatgacttaatggacattaacgccgggaccatcgccactggcgaagagacgattgaggatgtcgggcggaagctgttcgaatttattctcgacgtcgccagcggacgcaaaaaaaccttctccgatcaatggggcctgcacaaccagctggcggtatttaacccggcgccggtaacctga

SEQ ID NO: 264258 - DNA, 150 bp, Klebsiella pneumoniae
atgacttatggcataagcacaattatggctttaaataataactttatattgtgggtatgcatagtgtctggcgggggcgtgctgattatactgagtcatgtttttgaggtgatcgatatgcgaatagacagtttcaatatcgtcttttaa

SEQ ID NO: 264259 - DNA, 1332 bp, Klebsiella pneumoniae
atgattttggattctacattagatgaaaaaaaaggaataccgacccgctatttaattctgttgattatatttgtggtgacggcagtgaactatggcgaccgcgcgaccttgtctatcgccggtactgaagtcgcgaaagagctggggctcagcgcggtgtcgatgggatacattttttccgccttcggctgggcttatctgctgatgcagatccctggcggctggctgctggataaatttggctcgaaaaaggtttattcatacagtctgtttttctggtcactgtttaccttcctgcaaggctttattgatgtgttcccgctcgcctgggccggggtctccatgttctttatgcgttttatgctgggcttttccgaagcgccctcgtttcccgccaacgcccgcattgtggcggcctggtttccggccaaagagcggggtacggcttcagctatctttaatgccgctcagtacttctcgctggctctgttctcgccgctgctcggctggctgaccttcgcgctgggctgggaacatgtctttaccgtgatggggataatagggtttgtgctcaccatcatctgggtgaagtttgtgcataaccccaccgatcatccgcgaatgtccgccgcggagctgaaatatatctcagaaggcggcgcagtggtcgatatggaccataaaaaagaggccaccccggcggccgggccgaagatggactatatccgccagttgctaactaaccgaatgatgttaggcgtatttttcggtcagtatttcctgaataccattacatggttcttcctgacgtggtttccgatctacctcgtgcaggacaagggaatgtcgattctgaaagtggggtttgtggcttcgattccggcgctgtttggctttgctggcggcgtactgggcgggctgttttcggattatctgattggccgcggctgcacgctgacttttgcgcgtaagctgcccattgtgctgggaatgctgctggcgtcgtccatcatcctgtgtaactacacggccagcacgccgctggtcattacgctgatggcgctggcgttctttggcaaaggctttggcgcgctgggctggccggttatctcggatgtcgcgccgaaggagattgttggcctgtgcggcggggtattcaacgtctttggcaatgtggcctcgatcgccacgccgctggttattggctatatcgtgagcgaactgcactcatttaatggcgcactgatttttgttggcggctccgcgctgatgatgatggtctgctacctgtttgtggttggcgatatcaaacgtatggaattgcagaagtaa

SEQ ID NO: 264260 - DNA, 771 bp, Klebsiella pneumoniae
atggataacgcaatttttccgaacaaatttaaggccgcgctggcggcgcatcaggtgcagattggctgctggtgcgctttggctaacccgattagcaccgaggtgctgggtctggcggggttcgactggctggtgctggacgcggaacacgcgccaaacgacgtcaccacgctcattccgcagctgatggccctgaaaggtagctccagcgcgcaggtagtccgtgtgccgaccaatgaacccatcatcatcaagcgcatgctggacatcggcttctataacttcctggtgccgtttgtcgagacggctgaacaggcggcgcaggcggtggcttcgacccgttatccgccggaagggatccgcggggtctccgtttcccaccgcggcaatatgtttggcaccgtgccggactacttcgcccagtccaacaagaacatttccattctggtgcagattgagagccagaccggagtggacaacgtcgaggcgattgccgcgaccgagggcgtggacggtgtgtttgtcggcccgagcgacctggccgccgccttaggccatttgggcaatgccgcccatcctgaggtgcagcgcgctatccaacatatcttcgccagcgcgaagaagcacggtaagccaagcggcattctggcgccagtggaagccgatgcgcgccgctatctggaatggggcgcgaccttcgtcgccgttggcagcgatctgggcgtcttccgttctgcaacccagaaacttgccgacgcgtttaaaaaataa

SEQ ID NO: 264261 - DNA, 891 bp, Klebsiella pneumoniae
atgacaatcaaagtaggttttatcggtcttggcattatgggcaaaccgatgagcaaaaatttgctgaaagcgggttactcgctggtggtgtctgaccgtaacccggaagcgattgccgacgtgatcgccgctggcgctgagaccgcgacgacgccgaaagcgattgccgaacagtgcgaggtgatcatcaccatgctgccgaactctccgcatgttaaagaggtggcgctgggtgaaaacggcattattgaaggggcgaaaccgggcaccgtggtgatcgatatgagctccattgcgccgctggcgagtcgggaaatcagcgaagcgctgaaagccaaaggtattgatatgctggatgcgccggtgagcggcggcgaaccgaaagccatcgacggcacgctgtcggtcatggtcggcggcgataaagcgatcttcgataaatactacgatctgatgaaagcgatggccggctccgtagtgcataccggcgatattggcgcgggcaacgtcaccaaactggctaaccaggtgattgtcgcgctgaacatcgcggcgatgtctgaagcgctgaccctggcgactaaagccggcgtcaatccggatctggtttatcaggctattcgcggcggtctggcgggcagtaccgtgctggatgcgaaagccccgatggtgatggaccgtaacttcaaaccgggtttccgtatcgacctgcatattaaagatctggccaatgcgttggatacctcacacggcgtgggcgcccaactgccgctgacggcggcggtgatggagatgatgcaggcgctgcgcgcggacggtctcggcactgcagaccatagcgcgctggcgtgctattacgaaaaactggcgaaagtggaagtcactcgctaa

SEQ ID NO: 264262 - DNA, 465 bp, Klebsiella pneumoniae
atgttattacgttttcgcgtattaccgctggtttttgtcatctcgctgttaagcggctgcggcctggcttctaaagccttttattccgcgggagacaaattatttcaacccggagatgacgccgtcgcttcgatgcagacgtattcagtggctcagttcctgcagccgtttactctcaacccggcgaaggccagcagcgattatctgggtaaatgggtcaaggtacgcggggtgattgtcgacattcgtcggaagagcggtatcgccggcagctactattttatcgtgaccatgcgagatgaacagaataaaacggataaacgtcttacctttaattttggctcgcataacagcgcagacgtagaggctttaagcaacggcagcgtcgctacgatcgtcggccaggttcatcaggtgcaagattccacgatcccgacgctacagaatcctaaggtggtaaaataa

SEQ ID NO: 264263 - DNA, 411 bp, Klebsiella pneumoniae; identical to SEQ ID NO: 221631

SEQ ID NO: 264264 - DNA, 168 bp, Klebsiella pneumoniae
gtgagtaagaagaaaaacagaaaaaaggcgtcaccaacgccgttagccccggtgcaaccgcaagtcgccggggccgccagctttggttatgatgagatgcttagcgaactggaagccattgttgctgaagcggagatccgcctgcgggatgaagaaagtctcgcctga

SEQ ID NO: 264265 - DNA, 702 bp, Klebsiella pneumoniae
atgattactacccgaacagccaaacaatgcggacaagcagacttcggctggctgcaggcccgctacaccttctcctttggccactacttcgacccgaaattactgggcttcgcatccttgcgcgtcctcaaccaggaagtgctggcgcccggcgcttccttccaggccagaacgtacccaaaagtcgatatcctgaacctgattctggaaggcgaagcggagtatcgcgacagcgacggcaaccacgtgcaggccaaagccggtgaagcgctgctgatcgccacccagcctggcgtgagctatagcgagcataatctgagtaaagagcagtcgttaacgcgaatgcaactttggcttgatgcctgcccgcagcgggaaaacccgctgcagcagaaaatcaatgtcgcagacgcgacgctgcagctgctggcctctccggagggcggggataacagcctccagcttcgccaacaggcctgggtctaccatatcgcgctggagaaaggtgagcagatcaacgtgcaattacatggtccacgcgcctacctgcagtcgattcacggctccgtccatgccgtcgcacaggaacagcaaaagcaggctctcacctgcggtgacggcgcatttattcgtgacgaatctaacattaccctcgtcgccgatacgccgctgcgcgctttgctgatagatttaccggtgtaa

SEQ ID NO: 264266 - DNA, 999 bp, Klebsiella pneumoniae
gtgaaaacacgttatctcggaaaagagaagttccaggtttccgcattgggtctcgggtgtatgggaatgagtttcgcctacggcggcgccgaggagtcgcaggcgattaatacgattcatgccgcggtggacatgggcgtgaccttcctggattctgccgaagtgtatggtcctttcgataatgaagttcttgtcgggaaagcgataaaaggtatccgcgataaggtgcagattgccaccaagtttggttttcgtattttgccgaccggccagggactggagcggatggccggcgtcgacagtcgtccggaacatattcgcgagtcagtggaagggtcgctgaagcggctgaatatcgagaccatcgatctgctctatcagcaccgcgtcgatccggcggtgccggtggaagaggtggtgggcaccatggccgacctggttaaagaggggaaaattcgtcatatcggactgtcggaagtctcatcccagacgctgcgccgggcctgcaaggtgcatccgattaccgccgtgcagacggaatactcgctgtggacccgcgagccggaggccggtattctcaacgcctgccgcgagctgggggtgggctttgtcccatacagcccgctggggcgcggcttcctgacgggaaaaatcaccgatcctggcgtcttcgctgaggatgatttccgccgtaatctgccgcgcttccaggccgagaccatgcgcaaaaaccagctgctgcttgagcgcctgcagcaggtggccacgcgctatgacgcgacccttgcgcagattgcccttgcctgggtcatgagcaaaggcgaggatattgtgcctattccgggggcgaggaaaattgcccatctgcgcgataatgccggagccgccaatattaccctctctcctgaggatattctcaccatcgaagatattttcactcccgataacgtcactggcttacgctataaccagggcgactttaacttaatcgaaaaataa

SEQ ID NO: 264267 - DNA, 1188 bp, Klebsiella pneumoniae
atgactattgctgtttcccgtacggcgggattgcctgcggcagtttatgcgctttccgtgggctcatttggtattggtaccaccgaatttgtgattatgggattattacttgatgtggcccatgattttcatatatccattacgcttgccgccgggtctattaccgcttatgcctgtggggtggtgattggcgcgccgctcctcacaccgctattaagccgctaccccaaaaaaccggcgttgttatttctgatgatcttattttccatcggtaatttaggttgcggtattgccggtaatatgaccatgctcattattttccgggtaataaccgccttagctcacgcctcattcttcggcatcagttcggtctatgccgcggagctggcgccggtggataaacgggcttcggcggtctccgccgtctttctcggcgccaccctggccaatattctgggcgtgcccctcggcgcctgggtagggcaataccttggctggcgctacaccttctttatggtcacgctgattggcactctttccgccctggcagtcattgccctggtgcccggccgtcaggcccaaccggcggtgcagagtcggatccgcgacgagctgaaggtgctgcgccatccgacggtgctgcgcagcctgctgatcaccgcgctcgggttttccggcgtcttcgccgcctttacctacattgcgcccatgctgaaaaccgtcaccgggatgagcgaacatctcattccaccggtgctggtgctgtttggcgtcgggatggtcgccgggaatcacctcgccggccgcctgaccgacggtggggtccgccgggcgctgctgctgaccctggccttgcttatcgtcgtcctgtgcctctttccgttcgccattcagacgctacccggcgcctgcgcggcggtgtttctgctgggtgcggcgatgttctccaccattccgccgctgcagatgcaggcgctggacagcagtgagaccggcaaaagcatggtctcctcgtgcaatatcgccgcctttaacctcggcaatgccgctggcgcctggtttggtgggctgttgctcaccgccggcgtctccctctcgcatattcccctggccggtgcatgcctgaccgccagcggatttgttatcgctagtgtgacgttgtcacctttaaaaggaagtcaagcatga

SEQ ID NO: 264268 - DNA, 267 bp, Klebsiella pneumoniae
atgcaggagattgcccgtcagcgcaacgccagcgtggcgcaggtggcgctcaactggttgcgtacccgcccggggatcacatcgctggtgatcggcgcgaccaaactcgcccagctggaggataacctggcggcactgaactggacgctgagcgacgaggaggcggcgatcctcaacagcgtgagcgaaaaagagaagccttatccctactggcatatctgcaatgtcgccggcgatcgccgtctggccgacgatatctacccctaa

SEQ ID NO: 264269 - DNA, 564 bp, Klebsiella pneumoniae
atgataaccgtgagtggcgcagataagaccgtcgcgcaggatcacgtcggagagccgcccgtcgccgagacggtagccccagcgggctttagcgtccagcaggtacggcgcctggctcatgttttccataccgcctgcgaccagcgcttgcgcctgtccggccagaatcgcctgcgcggccagcgccacgcttttgaggccggagccgcacactttgttaacggtaaagccgcataccgtctcggcaagaccgcttttgagcagcgcctggcgggccgggttttgcccgagaccggcctgcaggacgttacccataatcacttcatccacgcgctgaggatcgagctgcgcgcgctgaagggctgccttaattaccgtagcgccgaggtcgatggcgctggtggtcgccagcgcgccgttaaaactgccgattgcggtacgcgccgcgctgacgatgacacaatttttcatcttaattccttaaaagtgagggggtgccgtcagaacaaggtcaaaccaatgacaaaaatgatcccagagaagagaagggcggtgatgcagtag

SEQ ID NO: 264270 - DNA, 300 bp, Klebsiella pneumoniae
atggtgcccggcatgggcggcgcgatggatctggtgaccggctcgcgcaaagtaatcatcgccatggaacactgcgccaaagacggttccgcgaagatcctgcgccagtgcactatgccgctgaccgcccagcatgcggttcatgtgctggtcactgaactggcggtattccgctttattgatggccggatgtggctgactgaaatcgccgaagggtgcgaccctgaaactctgcgggcgaaaaccgaagcacgcttcgacattgccgcagatctgctgatccagcggggtggcgcatga

SEQ ID NO: 264271 - DNA, 465 bp, Klebsiella pneumoniae; identical to SEQ ID NO: 135825

SEQ ID NO: 264272 - DNA, 165 bp, Klebsiella pneumoniae; identical to SEQ ID NO: 135824

SEQ ID NO: 264273 - DNA, 1413 bp, Klebsiella pneumoniae
atgacccgctaccaacatctcgctacgctgctggccgaacgcatcgaacagggcctgtatcgccatggcgaaaagctgccgtcggtgcgcagcctgagccaggagcacggcgtcagcatcagcaccgtccagcaggcctatcagctgcttgagcagcagcaaatgattgtgccgcagccgcgatcgggctatttcgtcgccccgcgcaaagcccagccgccggtgccgccgatgtcgcgtccggtccagcgcccggtggagatcacccagtgggatcaggtgctgaccatgcttgacgcccgctacgataaatcgatcatccccttcggcggcggctcgccggacgtgacgcagccaagcctgaagcccatctggcgtgaactgagccgggctatccagcacaacctcactgaggtgttgaactatgacgagctggccgggcgtcgcgagctacgggagcagatcgcccgcctgatgctcgacggcggatcggtggtaactgccgacgatctggtgctcaccagcggctgccacagcgcgctgtcgctggccctgctgtcggtgtgccagccaggggacatcatcgccgtggaatccccctgctactacggcaccatgcagatgctgcgcgggctgggattaaagacgattgagatccccaccgatccggaaaccgggatcagcatcgaggccctggagctggcgctggatcagtggccgatcaaaggggtgatcctcgtgccaaactgcaataacccgctgggctttatcatgccggacgcccgcaagcgcgcggtgctgaaccttgcccaacgctacgatatcgttattttcgaggatgatatttacggcgagctggccaccgaatacccgcgcccgcgcacgatccactcctgggatatcgacggccgggtgatgctctgcagctcctttaccaaaaccatcgcccccgggctgcgtatcggctggatcgcccccgggcgctactacgacaagctgctacagatgaagtacgccgccagcgggaccaacgtcccctccactcagctggcggcctgcaattttattcgcgaaggccactaccaccgccacgtgcggcggatgcggcagatctatcagcgcaatatcgagatctacacctgctggctgcgggaatttttcccctgcgggatctgcgtcacccggccgaagggcggttttatgctgtgggttgagctcccggagcaggtagatatggtctgcgtcgccaagcagctgtgccggctgaagatccaggtcgcgccgggctcgctgttttcggcagcgggcaagtatcgcaactgcgtcaggatcaactgcgccctgccgccgaccgagaaacataaagcggtgatggtgaagctgggagaagcggtgaaggtggcgatggagtga

SEQ ID NO: 264274 - DNA, 1851 bp, Klebsiella pneumoniae
atggcaacgatcatcccaaccatcggaagctgcggtaacaagattactgccggagaaaagcgtcttgcgagaatttttgaaagcaatctgagtagcgattgtacttgttggtatgacattcctactggcgaaaaacaaacacatcctgatttcatcattctggatcctcagcgagggctgctttttattgaagtgaaggactggtatatttcaaaaataaaatccgctaataaaacacatgtgatatatgaaacatcagatggtgacatttctctaacccatcccatagaacaggtcagacaatattcttacggcgcaattaactatctaaagcgggacccacaacttcttcaggacaacgaaaaatataaaggacaattttgcgccccctacggtcatggagtctacctcagtaatattacacgtaagcagttagataaatacttttccaatagtgatatttttccttctgatatcgtgatttgtaaagatgaaatcaccgagtttatgtcatctgaagaaatatcattacgcctattttctttggtcaaacatacattttctaaagagataagtaataagcaagtagatcgtatacgttggcatttataccctgaaattcgcatcacccacgctctcgataaaccagagagttctgccaaaccaatatctgtactccgaacgccgaatattataaaaataatggatactcagcaagaattactcgccagaagccttggtgaggggcatcggataattcacggcgtcgccggctcaggtaaaaccttaattctcctttatcgttgcctacacctggcgaaagataataatttaaagaaacctattcttgtcgtgtgttataatataatgctggcccaaaaattaaaatctctaataaaaagccatcaacttacggttccggttgaaattaccaacttccatgcatggtgttataagcaagcaaaaattaaaaatattctccctaactcaaagcaaaattttatagaaaaccttgagcaagctgttattactggttttcaaaataaaacaatagcagcagaacaatatagtgcggtattaattgatgaggggcatgattttaaacaggattggctaaaaatactttctggaatggttgatagcgaaactaactatctattatttctatatgacgatgcgcaatcaatttatcagaaaaaaagctcacttgattttacgctttccagcgttggtatcaaagctcaagggcgtacaactattcttgacatcaattatcgaaatacacagcagattctccactttgctaccagcattgcatttgattatttaaatgatcatattgaggataactttaaatatcataaaccagatgctggtggacttcaaggccaggttccaaacatgcttgtttttgataaccaccaacaagaaatcatccatataattaaatggctaaagcaacaacatcatactggtgttagctggaatgacatggctatattatgtccctcgaccgcacatctttctgcaatattagtaaaagagttaagggattcaaaaatcccgcactactttatagcaagctcggaagataaaaaacgctactcaccacaaagcgattttttgtctattatacctttgcctagtagcaaaggtctcgagtttcattcagtcgcagtgatagatagttcaaacataatgggtaatagcgatgatctcaacgacgagatcaagcgactatatgttggtttcactcgggcaaccaataatttgcttgtgactttacatcaaaaaaatgtgctcagcagacatttaacctcaacttataatcaaatctataacaatgcatag

SEQ ID NO: 264275 - DNA, 420 bp, Klebsiella pneumoniae
atgctgagtggactgaatcacctgaccctggcagtcagccagctggcgccgagcgtggcgttttatcagcagctgctgggcatgatgctgcatgcccgctgggacagcggggcttatctctcctgcggcgatctgtggctgtgcctgtcgctggatccgcagcggcgcgttactccgccggaagagagcgactacacccattatgcgtttagtattagcgaagccgattttgctagcttcgccgcccgccttgaggctgccggcgtagcggtctggaagctgaaccgtagcgaaggcgcttcgcactactttctcgaccccgacggccacaagctggagctgcacgtcggcagtctcgcccagcgcctggccgcctgccgcgagcagccgtataaggggatggtgttttttgatgagtga

SEQ ID NO: 264276 - DNA, 909 bp, Klebsiella pneumoniae
gtgattaatttacagcgtctggatctcaatctgttgcgcaccctggatgtgctgcttagcgaaaacaacgttacccgggcggcgcagcggctgaatctgtcgcagccctcggtaagtattcagctcgccaggctgcgggagattttcgccgatccgctgctgatgccgggcccgcgcggcatgcagcccaccgcccgcgccgatgagcttcgccagccgctgcgcgccgcattagccgcgctggagcaggcggtggcgccggtcagcccttttgatccggccacggcggcggagacctggcgggtggcggcgacggactatatggcctcggcgatcctcctgccgatgctggctgggttacgccaggcctctcccggcagtcggctggcggtattcgaactgcagccggcgcggctggagcagcaggcggccagcgatacagtagatcttttctttcatacccgcgagggcgcgccgccggggctgcatcagcgcctgctgtttcgcgaacgctacgtgctggctggccgggcggaacattcggcgctgcggcctgggcttagcctggaaacgttctgtcagctggagcacgtgatcgtctccccggacgggggcggcttcagcgcggcgaccgatatcgcgctggcgaacctcggactgatgcggcgggttgtcctttccgtgccacatttcctgtttatgctggagaccctgcgcaatagcgatctggtggcggtcctgccggagcggctggtgcgcgggcagagcgggctggtggtcgtcgagccgccgctggcggtcgccggctttgagatgctgatgctgtggcacgagcgctggcaccgcgacccggcgcatcaatggctgcgtcagttcattgtgaattcactggaggaacagacatgctga

SEQ ID NO: 264277 - DNA, 270 bp, Klebsiella pneumoniae; identical to SEQ ID NO: 264238

SEQ ID NO: 264278 - DNA, 1059 bp, Klebsiella pneumoniae
atgaaacgacttttaattttactctgcctggtggtactgaccgcctgtgaccagaataatacccacaaggacgcaccggtgaacccgctgaccgatattaatgcccgtctggcgtttacctgtaaacaccagattattcctgaggcgtctgcggataccgatgtcctgtttaaatatgcccgctggctgcaaaaaaataacctgattaaccgggataaaacggtggatgcggaaatttcccgtctgtaccggatagcggcagagaacggccattacaaggccagtattaatctgcagaacggcgcgctgcgcgggcgctttgcgctgagcagccatgaacgtctgcgcctgagtcagcaactgattgatgcgaaggtggccgccggctactactttattgccatctatctggagcacggtgcggcagggctggcgcaggacccggagatggcgctgcgttactatcgtaaggcggcagatgaagggaatccccaggcgcaggcttttttaggcgaaaaactatttccggccaaaagagctcctcaggtagccatgcagatgtttcgatgcgctgccctacaaggtgagggaaaagcggctaattcgttaggaattatgctaacaattgaccagaaatatcaggacgctgtagatgtctatcagttaggggtggccgcaggagattcaggctccgccagtttccttgaacatggatttgcaggcccggcaccgaccgacaggctgtactatctggcactggagaaagacccggagcgtgcccgtcgttatgagcagataggtgctgtgctggcgaaatactcatgggcccatcctgtcgtcccggaaatcaacgatatcgtgccgctgccgccggcgccgctgccggagtgggacggcaagctgaagtggctggaggaacgggaggccaatatcccgccgccagtgcctgatgcagcgctgatagagaaactggcgaaagcgaagcagctgaacccggcgacgggcaggccgctgccgacgtcaccggactttgagaaggacagcgtggcggccccgtga

SEQ ID NO: 264279 - DNA, 612 bp, Klebsiella pneumoniae
atggctgccgataaagctgggggtatgggcgtaaggaatggcgatgctgtcgtcgacaaatccctcttttttggcgttggcgataaacgcctgcagatcgtcgccgatcacctcggccatgcaggtggtggagacggcgataatctcgggtttatacaacgcgctggcattctgcaggcccagattcatgttgttgttgccgccgaacaccgccgcgtcctcggtcatcgagtcggagacgcaggccaccggctctttaaaatggcggttaaagtaggtgcgaaaataggcgacgcagccctgggagccgtgcacatagggcagggtgccagcgaaccccagcgcgcagagcaccgcgccgagcggctggcaggctttggccgggtcgacggtcagcgcctcgcgctggaagttcagcgcttcatactcggcggtggtggtccaggcaaacacctccttcacgcgctgtgcgtcgtgcgcctcttcaaggctctttttgttctggaacagggtctggtattcatcctgttcaaacagcggataacagctgtgaattttatcgatcgtttggctcatggtgttctcctcccgcgccacaaatcggtggactga

SEQ ID NO: 264280 - DNA, 228 bp, Klebsiella pneumoniae
  misc_feature (198)..(207): n is a, c, g, or t
atgaaagcggcgatagcggcgtttgccgtcgcctgcgttcatcagcgggaagcgatcctcgccggacgcggcgcggtattgctgataaccggcggagaagagaccggctgcgacggcgcgcgggcgctgatcgcctccgcaacgttgccggaggtgggcgcgctgatcgtcggtgaacccaccgccaactatccggtnnnnnnnnnnctatccggttatcggccataa

SEQ ID NO: 264281 - DNA, 954 bp, Klebsiella pneumoniae
atgctgctgcgcctgatccgccttcggggtcagcgtgcgggtggttttgccatcagacagcgtgacactgtcacccgaaacagactgcacctcccagatactgttggccacatagccgcgctccaggtcacttttgctgaagcgcattcggtccccctgagacacggtgatcttttcctggcgataaagcgtcacaccttcagcagaggcttcacggggagagatatatcgctcctttccttcactgtctgtcagggtgatcagctgattatccttatccactttgctgatacggtggtatacgttatcaaccagcgccaccgcctccttgtgagccgtccaggtcgacagtttgcgcagttcaccgtcacggatgttgctcgtgaccagcaccggcagggtgatttcctctttgccggtttccccgttctcccgccgtgcgtcatggatcagactgttcagcgcccgccggtccttattcagatgggtgataatcagcgtctgcgactgtgcctccggggtccgtccggtatagtccttcaccagcgcctcgtagagcgtcgcgggctgacctgccggcagggtttccccctcgctcagcgccttttgtatcgccttttcctgcgccggcgtgaattccaccacagaactgcccggcgcccatgcgccttcttttctcggcacctgctccggcgtgacctgctcaatggtggtcagggcgaggtgcacatcccgctcaatcaggctgtagaccgccggtcgcagctcaggcacctggcgcacaatctctttcatgatggcaacgtcggcggcgctgcgctgctgcatgagcctgaacggctggcccggcgcgatgggctgcagctggtcgttatccccactggacaccgcccgtccaccgccggcgacgatgagggagtgggcttttgccatatcggccagccccaccattga

SEQ ID NO: 264282 - DNA, 477 bp, Klebsiella pneumoniae; identical to SEQ ID NO: 188271

SEQ ID NO: 264283 - DNA, 246 bp, Klebsiella pneumoniae
atgggttatctgcagcgccggggccaggcgttcgcggaatatctgcaggtcaatctggctgtggcagtcatcgaccacgccctgctctttgaggaagtagccgggaaacgtcgcccgcgagatgaggtatgccgaaccgggatgcagcgtcactttgtcgatgccggcgatacctttttcgataagcgtaaagcgatcgtgataggaaaagcaggaggcatcttccttcacgacaaacagatgtaa

SEQ ID NO: 264284 - DNA, 810 bp, Klebsiella pneumoniae
atgattaaccgcgatacgctgctgtgcatctccctggcgggtcgccccggcaacttcggcacccgctttcataactatctgtatgacaagctgggattgaactacctctacaaagcctttacgactaaggatattgaggcggcggtaaaaggggttcgcgcattgggtatccgcggctgtgcggtctccatgccgtttaaagagagctgcataccgtttcttgacgcgatcgatccgtcagcaaaagtcatcgactccgtcaacaccatcgtcaacgacgacgggaagttaaccgggctaaacaccgattacatcgcggtcaaaagcctgatcgccagccatcggctcgataccaacgccagagtgatgattcagggtagcggcggcatggggaaagccgtcattgccgccttccgtgatgccggtttccgcgacgtgatcattgcggcccgcaatcgccagcgcggcctggcgctggcaaaacagtatggctttcagtggcagcccctgcccgaagggatcgcagccgagattctggtcaatgtcacaccgctgggcatggcggggggagcggaaagcaacacgctggcgttcagcgaggccatggtggcccgggccagcgtcgtgtttgacgtggtcgcgttgccggcggaaactccgctgatccgcctggcgcaacaacggggtaagcaaaccatcagcggtgcggaagttattgccctgcaagccgtcgagcagtttgccctttataccggcgtacggccggatagcgcgctggtggcagaggcctcggcgtttgccagaagctag

SEQ ID NO: 264285 - DNA, 438 bp, Klebsiella pneumoniae
atggagcaactcaagatagtcaatttccggactgtagatcgggtggcgcatcagtccgatatccagttcaccgctgcgaattttatcttcctgctcggtggtgataagactgaccagctcaacccgggtattcggttgtttgcggcgaaacaagggcagtacgccgggcagcaaattgacttcggccgacggaacaaaaccaatcgccaggtggttatcgtgctggacgatttttcgcgcgcgcattttggcactctctgcctggtcgagtatcgccttcgcatcctgcagaaaacactcccccgccgccgtcagcgtcaccttgcgtttgtcgcgctcaagcaacgacacgccgacgcactgttccagatcgcgaatttgactgctcagcgaaggctgcgaggtatgcagtttttctgccgcgcgggtgaagtttag

SEQ ID NO: 264286 - DNA, 1152 bp, Klebsiella pneumoniae
atgaaaaagttacccttgcaaggccgcaccctggcactgcttgccgtcatcattcctttgctggtgctttttatttatgtcggtctgcgatcagggccgctcgccccggtcgctgtgacggtggcaagcgtggaatcacaggctatcacaccggcgctgttcggcatcggcacggtggaggcgcgctacacctacaagatcggaccgacgtttgccgggcgcgtcaaacgcctggaggtgcatgtaggcgaccaggtcaaggccggacaggtgctcggcgagatggagccggtcgaccttgatgatcgggtgcgctcacaggagtctgtattcaagcgggcggaagcggctttgcgcgaggcagaagcccggcaagcctacgcgcaaacccaggcgcgccgctatgagcaattgtttgcggtgcgctcgaccagcgaggaaatcgtcaccaccaagcggcaggaactgcagatcgccgatgccgccctatccgccgctcgggaagatattgcccgggcacgctccgaccgcgaagcactcgtcgcgcagcggagcaatctgcgcctgatcgcgccggtcgacggtgtagtcgccgtgcgcgatgccgatcccggcacgaccatcgtcgcgggccaggccgtggtggaagtgatcgaccccaagagtttgtggatcaatgtgcgcttcgaccagatcagcgcatcggggctggctggggggctgccggctcatatcgtcctgcgttcgcgtggtggccagaccttgaaaggtcgcgtgctgcgggtggaacccaaggccgacgcggtaaccgaggaaacgcttgccaaggtgacattcgataacaaaccagaacctttgccaccagtgggtgaactggccgaagtcacggttgacttgccggcgcttccggccgctccactgatccccaacgctgccgtccagcgtgaaggcgataaagttggtgtctggcaaatcgtggatggtgatctgcatttctccccggtcaagctcggcacttccgacctcaatggttacgtgcaggtgcgcgaagggctcaagaatggggaccaggttgtgacctatagcgaaaaggcactgacggcgcgcagccgcatccatgtggtcgagcatatcccgggagtttcacgatga

SEQ ID NO: 264287 - DNA, 1206 bp, Klebsiella pneumoniae
atgatcagcctggccggccgcgacattctccatgcctgggggaaattcgtcttcaccggcatcggtctgggtctgctgatcggcgtcaccctagtcatggctggggtgtaccgaggcatggtggacgacggcaaggcgttgctcgacaacagtggcgctgacctttgggtggtgcaaaaggatactctgggtccttatgcggagtcgtccagcctcaacgatgacgtgtatcgcgccattctcgccatgccgggagtctcacaggcagcgaacgcgacctacctgaccatgcaggtacgcaagggcgagagtgatgtacgcaccatggtggtcggcatcgcgcccggtgcgttgggggctacacccggatggcctccttatctcgtcgctggacgccagatcacgcgcggtcactacgaggctgtggccgacatcgccaccggcttcaaactgggagatcgtcttgccattcgccgcaatcattacaccgtcgtggggctgacacggcgcatggtgtcgtccagcggcgacccgatggtattcattccgctcaaagatgcccaggaggcccagttcctcaaggacaacgatgccatctggcaaagccggcgtcgcaccgaagccaacccggtcttcaatcgacccggtgatccaggtttgctggatgccgtgattgcttcacagagcagcaacgcgttcgtcaatgccgtgctggtcactctgaaacctggtcatgcgccggacgaggttgccgaatccatccagcgctggaagcgtttgacggtctacacccgggcacagatggaagacatcctcgtcggcaagctgatcgccacctcggccaagcagatcggcatgttccttgtgattctggccatcgttagcgcggccatcgttgccttcatcatctattcgctgacgatggacaaaatccgtgagatcgcggtgttgaagctcatcggcacacgcaaccgaaccatcgccgcgatgatcatgcagcaggcgctcgccctgggcgtgattggcttcgtggtcggcaagatcacagccaccttttcagcaccggcttttccaaaatatgtcctgctcacgccaatggattctgtcgccggtttttttgccgtgctcgtgatctgcgttctagctagcctcgtcgccattcgcatagcactcaaggttgatccggccgaagccattggaggttga

SEQ ID NO: 264288 - DNA, 528 bp, Klebsiella pneumoniae
atgacccaccgcaaacacagccacgcatttggaactatcaccctgaccgttacggcctgcctgcttttatggggttttctgttgccagcttgggctggtgacgctacccaggttgagccactggcgctacgcaagatcatgcaggaactcgggcgcaacatgcaggctattaccggtgcgatttcgcaggaggaatgggttcaggtcgttcagctcgccccaaaagttgctgcacaccccgagccaccgcttactgaaaaaatgcgcatccttgcttacctcggcgctgatgcgaccaagttcagaaactttgacgcgcagactcacgaggcggcgctggccatgaagctggctgctgcgagcagcgacggcaaggcggtgatccaatcattcgccctatctgtccccgctggggtgggagcatatcaacctgaccggcgattacctatggcgcagcagtgccaaggtcggtgcggggaagttcaggccattgcgaccgctgccaccggcttagcgtgctttatttaa

SEQ ID NO: 264289 - DNA, 993 bp, Klebsiella pneumoniae
atggtgcgcactcatttccccgccgtagatggcgtcttcctggcgcatccgctccttgatgaacgcatgccccgtcttcgacatcaccggctggccgccgctgcgggtcacgatgtccaccgtgttccacgtcagacgcgggtcgtgaatgattttcgcccccggctgcttctgcaggaacgcttccgccagcaggccgacaatgtagtacccctcgataaacgacgcctcgtcatcgaacaggaagcagcggtcgaagtcgccgtcaaaggcgatacccatgtccgcctgatgcgcacgcaccgcgtcggcggtgtcctggcggcactccggcagcagcgggttcgggataccgttcgggaaatggccgtccggctggtgatgcaccttgataaaggtcaccggcgccccggccgccgcgaagcgtttctccacttcatcaatcacgtgccccgccgccccgttgccggagttcaccaccagcttcagcggacgggtaaagttcgccaggtccacgtagcctatcaggtggtcgacgtactccttcagcaccgaaatctggcgcagggtcccgcgacgcgccgggtccaccggcgcgaactggttctcctccgccaggcgctggatatcccgcaggccggtgtcgccgctgatgggcttcgcgttctcgcgcaccagcttcatgccgttgtagttcatcgggttatggctcgccgttacctcgatgccgccatccaccccgaggtggaaagtggcgaagtaaatctcttcggtaccactcaggccgatatccagcacgtcggtgccggcgtccatcagtccgcgggccagcgcaagcttcagcgactcgctggtgaggcgcacatcaccccccaccactatcttcccgggtttcagaaattcgccgtatgcgcggccgatacggtaggcgatgtcctcgttcagctcctcgcccagttcaccacggatgtcataagccttaaagcatgttaa

SEQ ID NO: 264290 - DNA, 1416 bp, Klebsiella pneumoniae
atgttacttcctgtgataatggctggcggtaccggcagtcgtctctggccgatgtctcgcgagctttacccgaaacagttcctccgcctgttcgggcagaactccatgctgcaggaaaccatcacccgactctcgggccttgaaatccatgaaccgatggtcatctgtaacgaagagcaccgcttcctggtggccgaacagctgcgccagctcaacaagctgtcgaacaacattattcttgagccggtcgggcgcaacaccgccccggccatcgccctggcggcccttcaggccacccgccacggcgacgacccgctgatgctggtcctcgccgccgaccatatcatcaataaccagccggtcttccacgacgccatccgcgtcgccgagcagtatgccgatgaaggccatctggtcaccttcggtatcgtgccgaacgccccggaaaccggctatggatacatccagcgcggcgtggccctcaccgacagcgcccacaccccgtaccaggtggcccgctttgtggagaagccggaccgcgagcgcgccgaggcctacctcgcctccggggagtactactggaacagcggcatgtttatgttccgcgccaaaaaatacctctccgagctggccaaattccgcccggatatcctcgaagcctgccaggccgcggtcaatgccgccgataacggcagcgacttcatcagcattccgcatgacattttctgcgagtgcccggacgagtccgtggactacgcggtgatggagaaaaccgccgacgcggtggtggtcggtctcgatgccgactggagcgatgtcggctcctggtccgccctgtgggaggtcagcccgaaagacgagcagggcaacgtcctcagcggcgatgcctgggtgcacaaaagtgaaaactgctacatcaacagcgacgagaagctggtggcggccatcggcgtggagaacctggtgattgtcagcaccaaggacgccgtgctggtgatgaaccgcgagcgttcccaggacgtcaagaaggctgtcgagttcctcaagcagaaccagcgcagcgagtacaagcgccaccgcgagatttaccgtccctggggccgcagcgacgtggtggtccagaccccgcgcttcaacgtcaaccgcattaccgtgaaaccgggcggcgccttctcgatgcagatgcaccaccaccgcgccgagcactgggtcatcctcgccggcaccggccaggtgacggtcaatggcaagcagttcctgctgaccgagaaccagtccacctttattccgattggcgccgagcacagcctggaaaacccgggccgtattccgctggaagtgctggagatccagtcggggtcgtacctcggcgaggacgacattattcgtattaaagaccagtatggtcgttgctaa

SEQ ID NO: 264291 - DNA, 1368 bp, Klebsiella pneumoniae
atggggcgtaaccttgcgctgaacatcgaaagccgtggttataccgtctccgttttcaaccgctcccgtgaaaaaaccgaagaagtgattgccgaaaatccaggcaagaaactggtcccttactacacagtacaagagttcgttgaatcccttgaaacaccacgtcgcatcctgttgatggtgaaggccggggctggtacagatagcgccatcgattccctgaagccttaccttgataaaggcgacatcatcattgatggcggcaacaccttcttccaggacactatccgtcgtaaccgtgaactctctgccgaaggttttaactttatcggtaccggtgtatccggtggtgaagagggggctctgaaagggccttccatcatgccaggtggccagaaagaagcctatgaactggttgctccaattctgaaacagatcgcggcggttgcagaagatggtgagccatgtgtgacctatatcggtgctgatggtgctggccattatgtgaagatggttcataacggcatcgagtatggtgacatgcagctgattgccgaagcttatgcgctgttgaaaggcggtcttgcactatccaacgaagagctggcgaaaacctttaccgaatggaatgaaggtgagctaagcagctacctgatcgacattaccaaagatatcttcaccaagaaggatgaagaaggtaaataccttgtcgatgttattcttgatgaagcagcaaacaaaggtaccggtaagtggaccagccagagctcactggatctcggcgaacctctgtctctgatcaccgagtccgtatttgctcgttacatctcatcgcttaaagaccagcgtgtagccgcttctaaagtgctgagtggtccgcaggctcagccggctggtgataaagctgaatttatcgaaaaagtacgtcgtgcgttgtacctcgggaaaatcgtttcctatgctcagggcttctcccagctgcgtgctgcttctgatgaatacaactgggatcttaactacggcgagatcgctaagattttccgcgctggctgcatcattcgtgcgcagttcctgcagaagatcaccgatgcttatgcgcaaaacgccggcattgctaatctgctactggctccatacttcaaacagatcgctgatgactatcaacaggcactgcgtgatgttgtagcctatgccgtacagaatggtatcccggtaccgacgttctctgccgcaattgcctactatgacagctaccgttccgctgttctgcccgctaacctgattcaggctcagcgtgattactttggtgcgcacacctataagcgcactgataaagaaggtgtattccataccgagtggttggaataa

SEQ ID NO: 264292 - DNA, 303 bp, Klebsiella pneumoniae
atgaaacctgtttatctcgataacaacgccaccacccgtctcgacccgatggttctcgacgcgatgatgccctttttaaccgacttttacggcaacccttcgtcgatacacgattttggtctgccggcgcaggcggcccttgaacgggcgcaccagcaggtggccgccctgctcggggccgactaccccagcgagatcatctttacctcctgcgccaccgaggccaccaccaccgctatcgcctcggcggcggccccgccactctggcggtgtgcgaacagctggagcgccagggatacctga

SEQ ID NO: 264293 - DNA, 267 bp, Klebsiella pneumoniae
atgggccgcacgctgggcgaactgcgacaaaccatgacggttggcgaattcaggatgtgggctgagtacgaccgtatcagcccaatcggcgatattcgcggcgatatcctcaatgctcagctggtatctgcggtttacggagcgcagggcgttaaagtcaccattgaagatgctcagcttcagtggagcacagaagagaatgaggtaaacgacggcggcgatccctttgcagggctggaagcggcgcttctggctgcgtcagcatag

SEQ ID NO: 264294 - DNA, 705 bp, Klebsiella pneumoniae
  misc_feature (648)..(657): n is a, c, g, or t
atgaagattttccgcccattatggcgcgacggggcttttctggtcccgcagcagtttcagcaacaggcccgctgggacgcgcacgtcgccgatacggtctcccgcatggcgctcgcccacccgtggggggtattgcgcgcggagtttgacgcgagcgcgctcaccctttcccggctcaacgctacccggctgatcgtgcgtttcgccgacggaacgctgattgacaccgagctggcggatattttgccaccggtccgcgatgtatcggacgtgatgcaggacagcgtggaggttatgctcgctctgccgctgctcagcgccagcggcggcaatcttgatgacggccaggagagcgcccgcccgcgccgctggcgcgccgagcaggtgaccgtccaggagctggccggccatgaacgcagcgagctggccgttctgcggcacgcgctaacgctgcgtctctccaccgaggaaaatgcagccttcctcacctgcccggtagcgcgtctggtgcgcgacgcccaggggcagtggatcgttgacccggaattcatcccgccgctgctgtcgctggcggcaagcccgacgctggtcagcgagctgggcgagctgttacatcgcctgcaggcccgatgcagacgcctgatggcnnnnnnnnnnacatcgcctgcaggcccgacgcagacgcctgatggccatgcgtcgtga

SEQ ID NO: 264295 - DNA, 324 bp, Klebsiella pneumoniae
gtgacgggtttcgccgtgcgccgaacgcccgggaaacagaccgtcggtatccccgcagaccagaaccaccgccccctgaaaatcctcgggcggcaggacgatttccgatcgctgacggctgactgcccggcgacgctgacgccagagcgccgcgccgcccgccagcaggatgcacagactgaagatcacctggttgccgatggacagcagccagaagcccagcaccagccacagggccaggatgacggtcagtatcgtaagcagacgacgggcgttatcacgcatctcttatccctgccctgctatctgcgccaccatctgtga

SEQ ID NO: 264296 - DNA, 147 bp, Klebsiella pneumoniae
atgggtggacccaatgccatttgtaagcaggataaggcatttatgccgccatccggcacaaccgcgggtacggtgtctgatgtgtatcgcccggcggcgctgcgcttgcacgggcctgcgctgtttgaacccgcggggggcccgtag

SEQ ID NO: 264297 - DNA, 681 bp, Klebsiella pneumoniae
atgagcgctaaattttcaccgtcactgatgtgcatggatttaacgcagttcaaagagcagatcacggcaatgaataaaaaagcggatttttaccatgttgatataatggatggcaattacgtccgaaatatcacactgtctcccttttttattgagaatctgaaaaaaattactactgtgcccattgatgttcatctgatggtgaatcatccggaagatatcattcccatgtgtctcgaggccggcgccgatatcatcagctttcatcccgagacggcgaataacaaaatattccgcctgctgaatcagatcaaggatgcgggcaaaaagtgcggggtggtgctgaacccggcgacaccggcagaaagcattgccgaatatgcgcatctgctggataaagtgacggtcatgtcggttgaccctggctatgccggacaaaagtttattcctgagtcgctgaacaagattagaaagctcatcaacatgcgcaaaaataatggttatcactatctgacggaaattgatggctcttgcaatgagcaaaccttcggtcagattgctgaatccggggtagatgtctttatcgtcggcacatcgggtctgttttcgctccatgaggatgtcagccaggcgtgggacagaatgatcgagatcttccagcgggaaactgtcgctgcataa

SEQ ID NO: 264298 - DNA, 291 bp, Klebsiella pneumoniae
  misc_feature (209)..(218): n is a, c, g, or t
atgatcgacaccctggttcgcgaaaaaatcgccgcccacctgagcgcaatggcgccggcgatcccggtggggatctccaaccgccacgtccatctcgcgcaacaggacgtcgaggcgttgttcggtaaaggctacagcctgacgccgtttaaaccgctgcgccagccggggcagttcgccgcccaggagtgcgtgaccgttgtcgggcnnnnnnnnnngtgtcctcgggccgacccgcccggtttcgcaactggaagtgtcgcgcgccgactgcttcacgctcgggattaa

SEQ ID NO: 264299 - DNA, 1209 bp, Klebsiella pneumoniae
atgccatatacacttaaacatttgccagaacgctaccccagacctaagcctctgaaattttctcgttggcttgttgctctggttgtcatgctttcagtcagtattatcataatgcgtatatttgggcgttatgttgaaaatctgtacttctggagattagctttaggttttcctgttgctttgtggagtgtcttgctttcttctcgtctgcttgtttggtctttacaggatagcaaagcaaacgcttttgacaaacagcgagaacagtggattcttcgagaaacccgtaaggcacggcgtgcattacaagtgctgagtgcaacatttattaccggccactcatcagttgctcagaaagataccgctattgctatgcaaaacaacgacagcattattgtttcacaggtcggccgggatggtaatgaaagcgccagaatgagccaaatttcttccagcccgcaggattctatggaattcgtgataatgaatattttttcgcagatgattgcagacattccttttacacaaatccctgataaatgcccactagtagtagtttttgatgtaacaacatcgctgcctttggagaacattcgccattactgggatgaggcatggcaaaagaacaatatcacttttcctgttgaacacgttgaagggcgtggtcttagtgtaattgaccgctggttaaatgaacgtattaaagataaagcaatgttattgatcgttggcctccagattgatccggttgttacaaacaatactgctgaagcggctgttgctctacttcttggcaaccgcctaacgcaagaggcgcttgaccccctcgcattactacaccggccagatgctgctccctcaggtgaacttagcgaagggatgaggatggccgcctggaacgtcccgctaaaagaaagtatggtgaaaaatttatggctcgctggaatgacaggtgagcaacgtgcagaagcgattggatgtcagaatgcacatcctgcgcagtgcgtaaaagatgaggctgtcatttcactcgatatatccatggggaatgctggagccgctgcaccctggctggctattgctgccgccactgaaatcgcccgacaaacacattccccgcagatgattatctgcggggataccactcagaaagtgctatggagcacgcttattaccccgatagcttcaagacaggagatggatctgtga

SEQ ID NO: 264300 - DNA, 591 bp, Klebsiella pneumoniae
atgaagaccgccaaatggtcggcaggatatgcgtcagatatcatagaagcttttaaaaacaacattttcccttatgttggaacaaggaaagtgggagagattaaaccgctggagttgctgaacgtactgcgtaaaattgagaaacgtggtgcgttggagaaaatgcggaaagtgcgtcagcgttgttctgaagtgtttcgctacgcaattgtaacgggtagagcggagtacaatcctgcggcagatctttccagcactctcgaagtacaccaatccaatcatttcccgttcctaaaagctgatgagatacccgaatttctgcgtgccttagacagtttcacaggcagtcggcttgtacaagttgctacgaaattactcatgattacaggtgtgagaaccattgaatttcgtgcagcattatggcaagaatttgatctggattacgcaatttgggaaattcctactgaaaggatgaaaatgcgcaggccatatcttgtgccattgtcgactcaggcgttagatttactcaatgaactgaagatcatgactgggaactatcgttatgtttttccggggcggaacgatccgtaa

SEQ ID NO: 264301 - DNA, 408 bp, Klebsiella pneumoniae; identical to SEQ ID NO: 168366

SEQ ID NO: 264302 - DNA, 606 bp, Klebsiella pneumoniae
  misc_feature (437)..(446): n is a, c, g, or t
atgagcaaaacggtcgttcttccgcagagtgacagcccttccgtcgtcgcttccgtctccttctggcaggcatttcgcttttggctcaagcttggcttcatcagcttcggcgggcctgccggacagatcgccatgatgcaccaggagctggtggataaccgacgctggatctcggaagggcgatttctgcatgcgctcaatttttgtatggtcctgcccggcccggaggcccagcagctggcgacctatatcggctggctgatgcataaaacctggggaggcgtcatcgccggggtgctgtttatcttgccctcgctggtgttacttatcgccctggcgtggatctacctcgtctggggggatgtcgccgtggtggcggggatcttttatggcatcaaacccgccgtagcggcgatagtattgcaggcggcgcaccnnnnnnnnnnctggtgggttttatcggcggacggttggcgccgacgacgttcggcaaagcggacgcccaccgtgcgcagagtcaccctggcggagccgccatcattgatgacacgacgccgatcccggcccacgccctgttcagctggcggcgcacctctcaggtgctga

SEQ ID NO: 264303 - DNA, 651 bp, Klebsiella pneumoniae
atgctgctatggctggcgccgatggccgccctgacgctaatgctgggctcggcgcacccgctgacccagatgagctggttctttaccaaagccgcgctgatgactttcggcggggcgtatgccgtcttgccttacgtttaccagggggcggtgacccactatggctggctaaccgcagggcagatgatggacggcctcgccctgggggaatccactcccggaccgctgatcatggtggtgacctttgtcgggtttgtcggcggctacagcaaagcggtgttgggcgtcgatgatgtgctgctggggggcatcgcggcggcgtgcctggtgacatggtttacatttttaccctcgtttatctttattctcgccggcgggccgtttattgaaacgacccataataaggtgggatttaccgcgccgttgaccgccatcaccgccgcggtggtgggcgttatcctgaatctggcgctgttttttatctggcatagcgtctggggaccatccggtttcgacccgtggtccgcagccatagccctaggcgccgccgggctgctgtttcgctataagtggaagctgacctgggtactggccgccgccgccgcagtagggcttatcgtccatatggcgggactgtccggcgcaggatga

SEQ ID NO: 264304 - DNA, 882 bp, Klebsiella pneumoniae
atgggctttgtgatggatgagctcgcgcagtgggtggcgtttaagcccgtctgcccggagatggcgatcggcctgcccgtaccccgcccggcgctccgcctggtgcagactccggtcggggagatccgcatgcgcttcagccacgccccgcacgaggatgtgacggagaagatggctgatttcgccagcgcccacctggcaactctgggcgagctgtcgggctttatcgtctgcgccaaatcgccgagctgcgggatggagcgcgtgcggctgtatgatgaaaaaggcaatcgcgggcgtaaggaaggcgtggggctgtttaccggcgccctgatggcgcgctacccgtggctgccggtggaagaggatggccggctgcacgatccgctgctgcgggagaattttgtcgagcgcgttttcgccctgcatgaactcaacgccctgcgcgcccgcggcctgacccgtcacggtctgctggcctttcacagccgctacaagctgcaactgctggctcaccaccaggcgggctaccgggagatcggcccgttcgtcgcctcgctgcatgaatgggaggatctggaggcgttcttcgaggtttaccgcgagaagctgatggcgatcctcaagcagcccgcctcgcggaaaaaccacaccaacgtgctgatgcatattcagggttatttccgcgaccagctgaacagccgccagcgcggcgagctgcgggaggttatcctcaactatcgcgccgggctgctgccgatcctcgccccgctgacgctgcttaagcactatctggccgagtatccggatcgctacctgcaggcgcagaactattttgacccctacccgcaggatctggccctgcgcctgacggtgaactga

SEQ ID NO: 264305 - DNA, 627 bp, Klebsiella pneumoniae
atggagcgcgtgcggctgtatgacgaaaaaggcaatcgcgggcgtaaggaaggcgtggggctgtttaccggcgccctgatggcgcgctacccgtggctgccggtggaagaggatggccggctgcacgatccgctgctgcgggagaattttgtcgagcgcattttcgccctgcatgaactcaacgccctgcgcgcccgcggcctgacccgtcacggtctgctggcctttcacagccgctacaagctgcaactgctggctcatcaccaggcgggctaccgggagatcggcccgttcgtcgcctcgctgcatgaatgggaggatctggaggcgttcttcgaggtttaccgcgagaagctgatggcgatcctcaagcagcccgcctcgcggaaaaaccacaccaacgtgctgatgcatattcagggttatttccgcgaccagctgaacagccgccagcgcggcgagctgcgggaggttatcctcaactatcgcgccgggctgctgccgatcctcgccccgctgacgctgcttaagcactatctggccgagtatccggatcgctacctgcaggcgcagaactattttgacccctacccgcaggatctggccctgcgcctgacggtgaactga

SEQ ID NO: 264306 - DNA, 828 bp, Klebsiella pneumoniae
gtggtggccatcggggcggtgattctcggcgcgatgatggtgatctctccggcgatcttgcagccgtttacccgtaaaattaccaataccgacgatctggctctcggccattttggctctattggttatctgctttccgcgctggtgggcaaagtcgtcgggaaaggtagcccctcgattgaagaaattaaagtgcctaagtcactcaattttcttcgcgactcgtcggtggccatctctctcaccatgatgattctgttcctggtgctggtggtcgtcgcgggcaaaacctttgtcgaggagacactgagtgccggtcagaattttattatcttcgccattattcagtccctcacttttgctgcgggggtttatatcatcctcgccggtgtgcggatggtgattgccgaaattgtgccagcgtttaaaggtattgcagacaaattagtgaaagatgcgaagccggcgctcgactgcccgacggtgtttccctttgctcccaatgccgtcatcgtcggttttctcgcaagctttgtcgcgggcctggtcagcatgtttctctgcccgctgttcggtttgagcgtcatcgtcccgggcctggttcctcatttcttctgcggggcaacggctggcgtttacggcaatatcactggcggacgtcgcggggcagtggtgggggcatttgcccacggcctgctcatttcgttcctgccggccatccttttgccaatgatgggagacatgggcctgggttctacaacctttggcgatgcagactttggcgttgtcggcatcgttctggggcatattatcgcaatgtttaactaa

SEQ ID NO: 264307 - DNA, 750 bp, Klebsiella pneumoniae
atgaagcatgtgcacaagctggcctggattggcctgttcgttaatattattatctgttttgtcgcgcgtaatttattactcgatgaaggacaactgaatttccatcgtggggtggacagcatgtggtcctggctggttcttgccctgtttatcgccgtggtggttcagacgctcagcattatgctgtctggccgctatccttatctggccattgtgctggcctttattggcggtatcgtgatggtacccgccagcatgttctttctggttggcagtatgttcagctttcaaacgcggattaacgccggttttaccccgtggcggtcaacaaccggggcgatgggccgcgacgataatcaccagctattaacttttaatgcgtccggtttttatccacagggggcgctggcgctcatcgccggcattattatcttaatgattggcatgggtattggcggggtatttattgccgccggtatcgttgcgctgtgcaacggctatcgtctgcaaaatcgggtggtgattggcgtgagcggcgagtcaatgatatttacgccggggctctatgcagatacctacgttattcccttaggggacgttgtgctggctgagcgcgggaacaatgatgcgaaagttcgactactgatccgttcaagcggcagaagcttcacgttgcgtaaaaaactgctcgccggtgataacgtcaatgacgctttcgccgccattctggccaaactgtccacggtttaa

SEQ ID NO: 264308 - DNA, 693 bp, Klebsiella pneumoniae
gtgggtatcccgttcggcgtgactaaactgccgacgcattttatcgatgccccccactcgctggcgccggtgctgggacaggttgacctgctgggggcgttaaacatcgccttcctgccgttcctgttcgtctttttcgcatctgagtttttctccaccatggggacaacgctggcggtgggcggcgaggcgggtctgctggatgaagaaggcaacatgccgcagattaatcgcccgttcatggtcgattcgattgccgccgcgctcggcccgtgggtgggcattccggcggcgacggcgctgattgaatcttcggcggcagcggaagcgggcggcaaaaccggcctcaccgccctgtcggcggcggtaatgttcctgctgatgctgctgttcacgccggtggcgttgatgatcccgaaagaagccaccgccccggcgctgatcctgattggcctgaacatgttcagcggcctgcgcaaagtggatcttgccaacttcaccgacgggctgccggtgctgatgatggtgatgatcacccttatcgccaacagctttggcaccgggattgccggcgggctgctgttttacattgtgatcaaggctatcgccggtaagtggcgggagatcccgattggcctgtgggtattggccgtcccgctggtgtattacttcgcgaccttagtcaggcattaa

SEQ ID NO: 264309 - DNA, 528 bp, Klebsiella pneumoniae
gtgacgctgcagaaatatcgcaacgctctggaagaggcgcagctcaacctgggctggacccaggtgcgcgctgagaccgacggtatggtcagcaacctgcagcttaatccgggtatttacgccaccgccgccaccgccgtgctggcgctggttaacaacaataccgatatcgtcgccgactttcgtgaaaaaagcctgcgccatacggcggtgaataccgacgcggcggtggttttcgatgccctgccgggtaaagtcttcccggcgcacgtgaccagcagcgacgccggtattcttgccggtcaggaagcggtgaatggccaactgtcgcagcctgagcagtctacccgctgggtgcgcgatgcgcagcgcatgcggatccacgttgcgctggatcaaccgctggataagccgctgccgaccggcgcccgcgccaccgtccagttgtacaatagcgacggccccttcgcccgcacctttgccggcctgcagatccacctggtgagctggttgcactatgtctattaa

SEQ ID NO: 264310 - DNA, 378 bp, Klebsiella pneumoniae
atgaaagctaccgacatcaccaccgatcatggcgtggtgaataacaccggcaaaatctcagcgggtaatatctccatcacgacttattccaatattgttaacgaaggtaccctgtacagtaccggagacctgctgctgaatacgcaaaataaaggcaacatcagcaactattatctgattcaggcggatgggacgttgacgatgaacgccaaaaaagtcgttaatagcggccgcggctgcggctggttagggtttaacacttgtgacgtcggcacgctccgtgcgaacaagctggttctcaactcctcgcacagctatgccagcaacatgggtggctatcagtatttcaagagtaccgaaatcaacaccgtgaaataa

SEQ ID NO: 264311 - DNA, 483 bp, Klebsiella pneumoniae
atgattgccatcccctttggcgagaaactatcgctgatcccggtggccagcccggactatatacgcgaagccggagagcccgacaccccgcagtcattagttaatttccgctgcattaaccgctgttttcctggtggtgagaagtaccgctgggagtttattggccccagcggcgagcttagcgaggtcgcggttaaaggcgatctggtcgtcgatgccgatagcgcaatgatccaggccgcggagagcggattaggcatcgcctttgtctatcagtcgctggtgacgcagcagctgagcgcgggcagcctggtccatttgttacccgactaccgctatcctgccgaccatttttgcgtctactacccaagccggaaacatattcccgcccccctgcgggcctttatcgcctgggtgatggcgcagaataaaaatatcctcggtcagcagaccgcacgacacagatcgcggccggaagattaa

SEQ ID NO: 264312 - DNA, 450 bp, Klebsiella pneumoniae
atgattgccatcccctttggcgagaaactatcgctgatcccggtggccagcccggcctatatccgcgaggccggcgagcccgacaccccgcagtcgctggtcaatttccgctgtatcaaccgctgttttcccagcggtgaaaagtaccgttgggagtttattagccccagcggtgagcccagcgaagtttcggtcagaggcgatctggtcgttgattccgatacggcgatgatccaggcggcggagagcggattaggcatcgcctttgtctatcagtcgctggtgacgcagcagttgagcgcgggcagcctggtccgtttgttacccgactaccactatcctgccgaccatttctgcgtctactacccgagccggaaacatataccggtgccgctacgggcctttatcacctgggtcatggcgcagaataagagcatcctcagtgagtag

SEQ ID NO: 264313 - DNA, 192 bp, Klebsiella pneumoniae; identical to SEQ ID NO: 231816

SEQ ID NO: 264314 - DNA, 150 bp, Klebsiella pneumoniae
atgagttacctcaattttttaatgtattatttggtcagatgtctgttgttggcccacgcccgcatgcagtttctcataatgaacagtatagatctcttattcaaggttatatgcttcgacataaggttaaaccgggtattactggtttag

SEQ ID NO: 264315 - DNA, 156 bp, Klebsiella pneumoniae
atgaacaaggacggcgtcatcgaggacatgcaggcgtatgacgcctgggctgatgagcagacactgcgggatatgcagcggcgtgaggaagtcaatatcaaccacagccaccgccacgatgagcaggatgatgtcgagattggggggaacttctga

SEQ ID NO: 264316 - DNA, 123 bp, Klebsiella pneumoniae
atggctgttaacctctcgcgctctcccggtcaggcgctggtcaaacagtgctttcagagcgcgcttgataccgagatagcggtcctcgatatcccggaacatcgcgctgacctgcttcgctga

SEQ ID NO: 264317 - DNA, 183 bp, Klebsiella pneumoniae; identical to SEQ ID NO: 198171

SEQ ID NO: 264318 - DNA, 147 bp, Klebsiella pneumoniae
atgaccgtcagcaagaaggggccgcaatgccccgcttacatcgacccagatgcactggagcgagctatagccgccgcacgccaaatcaaagaggccaacccggatctctacaaaccgctacccgtccaaccggaagttaaacgatga

SEQ ID NO: 264319 - DNA, 732 bp, Klebsiella pneumoniae; identical to SEQ ID NO: 195263

SEQ ID NO: 264320 - DNA, 135 bp, Klebsiella pneumoniae; identical to SEQ ID NO: 195265

SEQ ID NO: 264321 - DNA, 600 bp, Klebsiella pneumoniae
atgacgaatgatgatcgcaacagcctgacggctgaccagaacaaaccagcgtcaccaggtgacgttaacgaagttaacccggctaaaccgggctgcatagaaccactaccagatccagaacttcccgatttaacccgcctgtttaaaaatcgctgccgtgatagtgatgttatgcggaaatgtaagcatctcctcatcgcgggaatgccgccgggaaaggtctcgctggtatgtaggcttccgctggagcgtgttatcgaactgtacaatagctcatacaatccgcgttgccgtcgatttgccaaaactaacagctataccaacgccaggttagcgctatgcagcttcaacgagggcgcaacgcttgcagatatctgcacggtgctgggcctgtcattgtactgggtggttatgtctctccgacagaatggcgttgctgaatccgcgatcaatgcacgtatgccgtcagcagatgaccccctctgcgtggagtatcggcgtgttgtggctcgcaaagctgcgagcaaatttaaaccgattcagctaaacccggttcgccgcagccgcagggctgacgcaggcacgacagcaaccgtctga

SEQ ID NO: 264322 - DNA, 381 bp, Klebsiella pneumoniae
atgaacctgatcgaaaaagtacgcagcggcattgccgacgcgcttctggggaagacgccagaccaactggaagaagagcagcggcaggacgctgtaaaaagcgccgtttctcgcttccttgagtccaaccacgattggaaaccgtctgcgaaaccggcgccagcagtcgtgccagttgccaacaccaaacagaaggctaaacacaaagccaagcgcatcatgaaaaccttgggtgctggagctggcaagttcatacctcacgttgtggatgagttagctctcgaacgtgctcgcatcaaatgccgggagatagtcgccgccgatccggctgcgtactcatttattatcgaatcagcaccgatcaaaggggcgaatgattga

SEQ ID NO: 264323 - DNA, 258 bp, Klebsiella pneumoniae
atgtctggccacaagaaatacctctctgtcgccctgctgagcgctgtcttactgccggcgatggcctctgccgctgacgcgccggcgactttcaccccggaacaggaggcgaaaatcggcaaaatcgccgccgactatctggtcgctcacccggaagtcctgctgcaggcgagccagaaactgcagcaaattcaggctgagcagcaggccagcgcggccactcaggcggtgctgaagaacgccgccgtgttgacctag

SEQ ID NO: 264324 - DNA, 507 bp, Klebsiella pneumoniae; identical to SEQ ID NO: 137281

SEQ ID NO: 264325 - DNA, 582 bp, Klebsiella pneumoniae
atgcaaagcgaggcgataaccggcgtcgtgctggcgggcggcagggccacgcggatgggcggcattgataaaggattacaggcgctaaatggtcgccctctctggcgacacgtcgcggaagcattagccccgcaggtagatgagttagtcattagcgccaatcgtcatcttgaacagtggcgtgccagcggatatccggtctttcgagacatacaggagggttatcaggggccgctggccggaatgcttgctgtgatgcagcaggtcgcgagcccatggtttgttttttgcccctgcgacacgccgttcattccgtcctttttggtggagcgctttatccagcagagaggggacgcaccggtcgtttgggcccatgacggcgaacgggatcatcctgccgttgcattagttcatcgtcaaatcattccggaactggaggcttatctggcacatggagagcgcagggtgatggtttttatgcgacaaatgggtgggcgcccggtgaatttcagcgatgtgaaaactgctttcattaatgtaaatacgctcgaagatttgcagcagatgcaggagccatcatga

SEQ ID NO: 264326 - DNA, 270 bp, Klebsiella pneumoniae; identical to SEQ ID NO: 137279

SEQ ID NO: 264327 - DNA, 987 bp, Klebsiella pneumoniae
atgcacgataaggcttttacttttcagacgcttcgcccggataccattatcgatgggttattcgatctgggtatgcgggtggactccggtctcaccccgctaaacagctatgagaaccgcgtttatcagttccaggacgaagagcgccatcgctatgtggtaaagttctatcgtcctgagcgctggtccgcagaacagatccttgaagaacaccagtttgcgcttcagcttgtagaagatgaagtgcccgttgctgcgccgctcttatttaatgacagcacgcttcatcagcatcagggattctactttgccgttttcccaagccttggcggtcgtcagttcgaagcggataaccttgatcagatggaatgggttggccgctatctggggcgcctgcaccagacgggctgcaaacagcgctttactgcccgcccggaaattggcgtgcaggagtacctgctggaaccgcgtcaggtgtttgagcaggcgacgctgatcccctctggcctgaaggccgatttcctgaaggcgaccgataaactcattgctgccgtcatggagcaatggcacggcggtgggaacacgttgcgcctgcacggtgactgccatgccggtaatatcctctggcgcgacggaccactgtttgtcgacttagacgatgcgcgtaccggcccggcgattcaggatctgtggatgctgctcaacggcgataaggctgaacagcgtatgcagctggagactattgtcgaggcctatgaggaattcagcccctttaacagcgatgaaatcgcgctgattgaacctttacgcgctatgcgactggtttattatctggcgtggttgctcagacgctgggacgatcccgctttcccggtcaatttcccctggttaaccggggaggattactggcgggggcagacgtcgacttttcttgagcaggtgaaggttctacaggaacccccgcttcagttaacgccaatgtattaa

SEQ ID NO: 264328 - DNA, 624 bp, Klebsiella pneumoniae; identical to SEQ ID NO: 137277

SEQ ID NO: 264329 - DNA, 900 bp, Klebsiella pneumoniae
atgtcgagattactcgctgcgataacacttccgctgagtatcgccttaaccatcttagtcaccattatctgctctgtaccgatcatcgtcgccgggctgattaaactgctggtccccattccagcggtatggcgctctatatccgttttttgcaattttatgatgtactgctggtgcgaagggctggcgctgctgttgcatctcaatccctggctaaaatgggacgtccagggtctggaaggcctgaacaaaaagaactggtatctgctgatcagcaaccaccacagctgggcagacatcgtggtgctgtgcgtgctgttccgcaagcatattccgatgaataagtacttccttaaacaacagctggcgtgggtacccttcattggcctcgcctgctgggcgctggatatgccttttatgcgccgctactcgcgcagctatcttattcgtcacccggagcgccgcggtaaagatgtcgaaaccacccgccgttcgtgtgaaaaatttcgcgcgcatccgacgactatcgtcaattttgtggaaggctcgcgttttaccgaagaaaaaaagcgcgaaacgcgctctccttaccacaacctgttaccgccgaaagccgctggtatcgccatggcgctcaacgtactcggttcgcagttcgataaactgctgaacgtcacgctgtgctacccggataatcatacaagaccattttacgatatgttaagcggccgcctgacgcgcattgtggtccgtatcaatctggtccctattggcgaagagctgcacggcgattacgttaacgataagaactttaagcgcagcttccagcgctggctgaatggcctatgggaagagaaagaccgtcagttgactgacatcatgagggacaaagaacggtag

SEQ ID NO: 264330 - DNA, 2793 bp, Klebsiella pneumoniae
atggttcagatcccagaaaaccctctcatcctcgttgacggctcctcctatctttatcgggcgtatcatgcgtttccgccgctgactaacagcgcaggggagcccaccggggctatgtacggcgtactgaatatgctgcgcagtttgatactgcagtatcaaccgactcatgccgtcgtggtctttgatgcgaaagggaaaaccttccgtgatgaattgttcgagcattacaaatctcaccgcccgccgatgccggacgatctgcgcgcgcagattgagccgttgcataagatggtgaaagcgatggggctgccgctgatggctgtcccgggcgtcgaagctgacgatgtgattggcaccctggcgcgggaagcggaaagggcaggtcgcccagtcctgatcagcaccggcgataaagacatggcccagctggtgacgccgggcatcaccctgatcaataccatgaccaacactatcctcggaccggatgaggtggttactaagtacggcgtcccgccggagctgattattgatttcctggcgctgatgggcgactcctcggataacattcccggcgtgccgggcgtgggcgaaaagaccgcccaggcgctgctgcaaggcctcggcggccttgatacgctgtatgcggaaccggagaagatcgctgaactgagcttccgcggcgcgaaaacgatggcggcgaagctcgagcagaacaaggacggggcttatctctcttatcagctggcgaccatcaaaaccgacgtcgagctggagctcacctgtgaagagctggaggtgcagccgccggcggcagacgatctgctggcgctgttcagacagtatgagtttaagcgctggactaccgacgttgaggccggaaaatggctgcaggctaaggggggcaaaccggctgcgaaacctgcagcgcctgcagcagcggcagaagcggaagaagaggttgaagccgctactgcactttcagcagagcattatgtcactatccttgatgaggctacgctgctcacctggatcgataagctgaagcaggcgccgctctttgcctttgatacggaaaccgacagcctggataacatctccgccaacatggttggtctttcattcgctgttgagccgggcgtggccgcctatgtcccggtagcgcatgattaccttgatgcgccggatcagatcccgcgcgagcgcgtgctgacgctgcttaaaccgctgctggaggatgagaaggtgctcaaggtcgggcaaaatctcaaatacgatcgcggcattttggctaattacgacattgagctgcgcgggattgcgttcgataccatgctcgagtcttacattctcgacagcgtggcgggccgccacgatatggacagtctttccgaccgctggctgaaacataaaaccattaccttcgaagagatcgctggcaagggtaagaatcagctcacctttaaccagattgcgctggaagaggctggtcgctacgcggcggaagatgccgacgttacgctccagctgcatctgaagatgtggccgaagctacagcagcatgaaggcccgctgaatatcttccagcacattgaaatgccgctggtgccggtgctgtctcgcgttgagcgcaacggcgttaaaatcgaccccgccgtgctgcatgcgcactcgcaggaaattgcccagcgcctggttgagctggagcagcgagcacatgagatcgccggggaagcgtttaatctctcctccaccaaacagctgcaaacgatcctgtttgaaaaacagggtatcaagccgctgaagaagacgccgggcggtgcgccgtccacctctgaagaggtgctggaagagctggcgctcgattatccgttgccgaaagtgattctggagtatcgtgggctggcgaagctgaagtcgacctataccgataagctgccgctgatgattaaccccaaaacgggccgcgtgcatacctcctatcatcaggcggtcaccgccaccggccgtttgtcgtctaccgatccaaacctgcaaaacattccggtgcgtaacgaagaagggcgccgtattcgccaggcgtttatcgcgccggaagattacgtcattgtctcggcggactactcgcaaatcgagctgcgcattatggcgcacctgtcgcgggataaaggcctgctgaccgccttcgcggaagggaaggatattcaccgggcgacggcggctgaagtatttggcttaccgctggacagcgtcagcagcgaacagaggcgcagtgcgaaagccatcaacttcggtctgatctacggcatgagcgcctttggcctggcccgccagctgaacatcccgcgtaaagaagcgcagaagtacatggatctttatttcgaacgttatccgggcgtcctggagtatatggagcgcacccgcgcacaggcgaaggagcaagggtatgttgaaacgctggatggccgtcgactctatttgccggatatcaagtccagcaatggcgctcgtcgtgccggcgcggagcgtgcggcgattaacgccccgatgcaggggacggctgcggatattatcaagcgggcgatgattgccgttgatgaatggctgcggagcgagaaacctcgcgtgcggatgatcatgcaggttcacgatgaactggtctttgaagtgcataaggatgagctcgatgccgtatcgaaaaaaatccacgaactgatggagaacagtactacgctggcggtaccgttgctggtggaagtgggcagcggcgaaaactgggatcaagcgcactaa

SEQ ID NO: 264331 - DNA, 633 bp, Klebsiella pneumoniae; identical to SEQ ID NO: 137274

SEQ ID NO: 264332 - DNA, 507 bp, Klebsiella pneumoniae; identical to SEQ ID NO: 137273

SEQ ID NO: 264333 - DNA, 1410 bp, Klebsiella pneumoniae
atgcaacgagggatagcctggatcgttgatgacgatagctccatccgctgggtgcttgaacgcgcgctcaccggagccggcttgagctgcacaacgttcgaaagcggcaatgaggtgctagatgccctcaccaccaaaaccccggatgtactgctgtcagatatccgtatgccgggaatggatggtctggcgctgctcaaacagattaagcagcgccatccaatgcttccggtcatcataatgaccgcgcattccgatctggacgccgcggtcagcgcttatcagcagggcgcttttgattatttgcccaaaccttttgatatcgatgaagccgtcgccctcgtcgaccgggcgataagccactatcaagagcagcagcagccgcgaaatgcgccgataagtagcccaactgccgacatcatcggcgaagcgccagctatgcaggatgtctttcgcattattggccgcctgtcgcgctcatccatcagcgtgctgatcaatggcgaatccggtaccggtaaagagcttgtcgcacatgccctgcatcgccatagtccacgctcaaaagcgccgtttatcgcgctgaatatggcggcgatccccaaggacctgattgagtccgagctgttcggccatgaaaaaggagcctttaccggcgccaataccgtccgtcagggtcgctttgaacaggctgacggcggtacgctgttcctggatgaaattggcgatatgccgcttgatgtccagactcgtctgctgcgcgtgctggcggatggtcagttttatcgcgtgggcggttacgcgccggtgaaggtcgatgtgcggatcatcgccgctacccaccagaacctggaacagcgcgtgcaggaggggaaatttcgtgaagatttgttccaccgcctgaacgtcatccgggtgcatttaccgccgctgcgtgagcgccgggaagatattccacgcctggcccgccattttctgcagatagccgcccgcgagctcggcgttgaagccaaacagctgcatccggaaacggagacagcgctgacccgcctggcgtggccaggcaacgtccgtcagctggaaaacacctgtcgctggctcaccgtcatggccgccggccaggaggtgctgacgcaggatctgccgagcgaactgtttgagaccacgattcctgatagcccaacgcagatgcagcctgacagctgggctacgctgctgggtcagtgggccgatcgggcgttgcgatccggtcatcaaaacctgctctcagaagcgcaacccgaaatggagcgcacgctgctaacgaccgccctgcgccatactcaggggcacaagcaggaggctgcgcgcctgctgggatggggacgtaataccctgacgcgtaagctaaaagagttgggtatggagtag

SEQ ID NO: 264334 - DNA, 1050 bp, Klebsiella pneumoniae
atggcaacaggcacactgcccgatgctgggcagatccttaactcccttatcaacagtattttactggtcgatgatgacctggcggtgcactttgccaaccctgcggcgcagcagctgctggcgcagagctcgcgcaaactgtttggcaccccattacctgagctgttgagctatttttcgttgaatatcgggctgatgcaggagagtctgcaggcgggccaggggtttaccgataacgaagtgacgctggttatcgatggccgttcgcacatcctgtcgttgaccgcccagcggctgccggaaggctttattctgctggaaatggcgccgatggataatcagcgccgcctgagccaggagcagctgcagcatgcgcagcaggtcgccgctcgcgacctcgtccgcggcctggcgcatgagataaaaaacccgttaggcggcctgcgcggcgcggcccagctgctcagcaaagcgctgcccgacccggcgctaacggaatataccaaagtgatcattgagcaggccgaccggctaagaaatctggtcgaccgcctgctcggaccacagcatccgggcatgcacgttaccgaaagcatccacaaagtcgccgaacgggtagttaaactggtttccatggagttgccggacaacgtgaagttgatccgcgattacgaccccagcctaccagagctaccccacgacccggatcaaattgaacaggtgttgctgaacatcgtccgtaatgcgctgcaggcgctggggccggaagggggcgaaattattcttcgcacccgcaccgctttccagctgacgctgcacggggtgcgttatcgcctcgccgcccgcatcgacgttgaagataatggcccgggtattccgccccatctccaggatacgctgttctatccgatggtcagcggccgcgaaggcggtaccggcctgggcttatctatcgcccgtagccttatcgatcagcactccggcaaaattgaattcaccagctggccgggtcataccgaattttcggtatacctgcctattcggaagtag

SEQ ID NO: 264335 - DNA, 1410 bp, Klebsiella pneumoniae
atgtccgctgaacacgttttgacgatgctgaacgagcacgaagtgaagtttgtcgatctgcgcttcaccgataccaaaggtaaagaacagcacgtcacgattccgtctcatcaggtaaatgccgaattcttcgaagaaggcaaaatgtttgatggctcctcgattggtggctggaaaggtatcaacgaatctgacatggtcctgatgccggacgcgtccaccgcggtcattgacccgttctacgaagaaccgaccctgatcatccgctgcgatatcctcgagccaggcaccctgcagggctatgaccgtgacccgcgctccatcgcgaaacgcgctgaagagtacctgcgcgccaccggcatcgctgataccgtcctgttcgggccagaaccagaattcttcctgttcgacgacatccgttttggcgcctctatctcgggctcccatgtcgcgatcgatgacattgaaggtgcgtggaactcctccaccaaatacgaaggcggtaacaaaggtcaccgtccgggcgtgaaagggggttacttcccggttccgccagtagactcttctcaggacatccgttccaccatgtgtatgatcatggaagagatgggtctggttgttgaagcccatcaccatgaagtagcaaccgcaggtcagaacgaagtggcaacccgcttcaataccatgaccaaaaaagcggatgaaattcagatttacaaatacgttgttcacaacgtcgctcaccgctttggtaaaaccgcgacctttatgccgaaaccgatgttcggcgacaacggctccggcatgcactgccatatgtctctggcgaaaaacggtaccaacctgttctccggcgacaaatacgccggtctgtctgagcaggcgctgttctacatcggcggcgtaatcaaacacgctaaagccatcaacgccctggcgaacccgaccaccaactcctacaagcgtctggtcccgggttacgaagcgccggttatgctggcttactctgcccgtaaccgctctgcctctatccgtattccggtggtgacctctccgaaagcgcgtcgtatcgaagtgcgcttcccggacccggctgccaacccgtacctgtgctttgcggcgctgctgatggctggccttgatggtatcaagaacaaaatccatccgggcgaagcaatggataaaaacctgtatgacctgccgccggaagaagcgaaagagatcccgcaggttgccggttctctggaagaagccctgcaggccctggatgctgaccgcgagttcctgaccgctggcggcgtgttcaccaatgacgctatcgatgcctacatcgccctgcgtatggaagagaacgaccgcgtacgcatgactccgcatccggttgagttcgaactgtactacagcgtctaa

SEQ ID NO: 264336 - DNA, 1824 bp, Klebsiella pneumoniae
gtgatcgaaaatctgcgtaatatcgccatcatcgcgcacgttgaccatggtaaaactaccctggttgacaagctgctacagcaatccggtacgttcgacgcacgtactgaagcacaagaacgtgtgatggactccaacgatttggagaaagagcgtgggattaccatcctcgcgaaaaacaccgcaatcaaatggaatgattaccgtatcaacatcgttgataccccagggcacgccgacttcggaggtgaagttgagcgtgttatgtccatggttgactctgtgctgctggtggtagatgcctttgatggcccgatgccgcaaacgcgcttcgtgaccaaaaaagcttttgcccacggtctgaagccgatcgtggtcatcaacaaagttgaccgcccgggcgcgcgtccggactgggttgtcgatcaggtgttcgacctgttcgttaacctcgatgcgaccgacgaacagctggacttcccgatcgtttacgcgtccgcgctgaacggtatcgcgggtctggatcacgaagacatggctgacgacatgaccccgctgtaccaggcgattgtcgatcgcgtgccggcgccggacgttgatcttgacggtccgctgcagatgcagatctcccagctggactacaacaactacgttggtgttatcggcatcggccgcatcaagcgcggtaaagtgaagccgaaccagcaggtcactatcatcgatagcgaaggcaaaacccgtaacggtaaagtcggtaaagtgctgactcacctgggtctggagcgaattgagagcgacgtagctgaagctggcgacatcatcgcgatcaccggtctgggcgagctgaacatctccgacaccatctgcgacccgcagaatgtcgaagcgctgccggccctgtccgttgatgagccgaccgtttccatgttcttcaacgtcaacacctctccgttctgcggtaaagaaggtaagttcgttacctctcgccagatcctggaccgtctgaataaagagctggtgcacaacgtggcgctgcgcgttgaagaaaccgaagacgctgatgcgttccgcgtttccggccgtggtgaactgcacctgtccgttctgattgaaaacatgcgtcgtgaaggtttcgagatggcggtttcccgtccgaaagttatcttccgcgaaatcgacggccgtaaacaagagccgttcgagaacgtgacgctggacgtcgaagagcagcatcagggttctgtcatgcaggcgctgggcgagcgtaaaggcgacctgaaaaacatgaatccggacggtaaaggccgcgtacgtctcgactacgtgatcccaagccgcggtctgatcggcttccgttcagagttcatgaccatgacctccggtaccggtctgctgtactccaccttcagccactacgacgacgttcgtccgggcgaagtgggccagcgtaacaacggcgtactgatctccaacggtcagggtaaagcggtagcgttcgcgctgttcggtctgcaggatcgcggtaagctgttcctcggccacggcgctgaagtttacgaaggccagatcatcggtattcacagccgttccaacgacctgacggtaaactgcctgaccggtaagaaactgaccaacatgcgtgcgtctggtactgacgaagccacggttctggttccgccggttaagatgaccctggagcaggctctggagttcatcgatgacgacgaactggtagaagttactccgacctctatccgtatccgtaaacgtcacctgaccgagaacgaccgtaaacgcgcgatgcgcggtgcaaaagaagagtaa

SEQ ID NO: 264337 - DNA, 600 bp, Klebsiella pneumoniae
atgctctatatctttgatttaggtaatgtgattgtcgacattgacttcaaccgggtattgggagcctggagcgatttaacccgcatcccgctggcgacgctgaagcagcatttcaccatgggtgaggctttccatcagcatgagcgcggcgagctcagcgatgaagactttgccgccgccatgtgccatgaaatgaatatgcccctcagctatgaacagtttgctcacggctggcaggcggtgtttgtcgcgctgcgcccggaggtgattaccatcatgcataaacttcgtgcccaggggcatcgggtggtggtgctctccaataccaatcgtctgcacaccacgttctggcccgatgaatacccggaagtgcgcgcggccgccgatcgcatttatctgtcgcaggagatgggattgcgtaagcctgaagcgcaaatttatctgcgagtactggaagaagaggggttttccgccgcagatacggtcttttttgatgataacgtcgataatatagcaggggccaaccggttggggatcaccagtatcctggtgactggtaaggagaccatccctgactatttcgcgaaacagctatgctaa

SEQ ID NO: 264338 - DNA, 861 bp, Klebsiella pneumoniae
atgctaaaaaccgttcatcaaaaattactccaccatacccggccgctgctggcgtggctaaagctgctgtggcggcgcattgatgaagaccatatgaccactctggcggggaacctcgcctatgtgtcattactgtccctggtgccgctgattgccgtcgtgttcgcgctgtttgcggcctttcctatgttctccgaagtcagcgtgcagatccgtcattttatcttcgccaattttattccggcgaccggggatgtaatccagggatatatcgagcagttcgtggccaactccagccgcatgaccgccgtaggcgcctttggcctgatcgtcacctcgctgctgctgatgtactcgatcgacagcgcgctaaacaccatctggcgcagcacgcgcagccgccccaaagtttattcctttgccgtttactggatgatcctgaccctcggcccgctgctggcgggcgccagcctggcgatcagttcctatctgctgtcgctgcgctgggcaagcgacctggacggcgtaattgataatctgctccgcctatttccgctgatcctctcctgggcagcgttctggctgctctatagtattgtaccgactacccaggtacgtaaccgcgacgcggtgatcggggcgctggtggcggcgctgctgtttgaggcaggtaaaaaggcgtttgccctctatatcaccacctttccgtcctatcagctaatttatggcgtgatttcggtggtgccgattttgttcgtctgggtgtactggacctggtgtatcgtcttgcttggcgctgaaattactgtcactctcggtgaataccgcaaacttaaaacagaagaaacagaacaaccatga

SEQ ID NO: 264339 - DNA, 438 bp, Klebsiella pneumoniae
atgattgcattaattcaacgcgtatcccgtgcaagcgttaccgtggcggacgaggtgacgggcgaaattggcccggggcttctggtgctgctgggcgtcgagaaagacgatgatgaacaaaaggcgaatcgcctttgtgaacgcgtgctgggctaccgcatcttcagcgatgcggaagggaaaatgaacctgaatgtccagcaggcgggcggcagcgtgctggtggtttcgcaatttacgctggcggccgataccgagcgggggatgcgaccgagcttctcgaaaggcgctgcccctgaccgcgctgaggcgctgtatgagtatttcgtcgcccgctgtcgccagcaggaaatgcacacccagaccggaagattcgctgcggatatgcaggtttctttggtcaatgatggtcccgtgaccttttggttgcaggtatga

SEQ ID NO: 264340 - DNA, 990 bp, Klebsiella pneumoniae
atgacccagcttccgggcaggctgcgggtaacaaaagagagtacgactatgtatcaccttcgtgtaccgcaaacagcagaagagttagagagctactaccagttccgctgggagatgctgcgtaagccgctgcatcagcctaagggatcggaacgtgacgcctgggatgcgatggcgcatcatcagatggtagtggatgaagagggcaacctggttgccgtcggccggctatatatcaatgcggagaatgaagcctccatccgctttatggctgtgcatccctcggtgcaggataaagggctgggtacgctgatggcgatgaccctggagtccgtcgcgcgtcaggaaggggttaagcgggttacctgcagcgcgcgcgaagatgcggtggaatttttcgccaagctcggatttgtcaatcagggtgagatcaccaccccgaccaccacgccgatccgtcattttctgatgatcaaaccggtcgcgtcgctggacgatattttgcaccgcggcgactggtgcgcacagctccagcaggcgtggtatcagcatattccgctgagtgaaaaaatgggcgtacgtattcagcagtacaccgggcagaaatttattaccaccatgccggaggcggggaaccagaatccgcaccatacgctgttcgccggcagcctgttttcgctcgctaccttaaccggatgggggcttatctggctgatgctgcgcgagcggcacctgggaggcaccattattctggcggatgcgcatatccgctacagccagcctattagcggccgccccagcgccatcgccgacctcggttctctgagcggcgatctcgaccgactggcgcgcgggcgtaaagcccgcgtgcaaatgcaggtggagctttttggcgacgataaacagggcgccgttttcgaggggatctacatcgtgctgccggcgaagccctttggctcgtacgaagagggcggcaacgaggaagagtaa

SEQ ID NO: 264341 - DNA, 918 bp, Klebsiella pneumoniae
atggcgctggaaaaagggattgcttcgctggttgaggcatttattgcggcaggtcgtccgtcatcacgcgatcagcatattgatgatcggagggccggctatatcgccagtgcggtactcgccggggagacggaaacgcgagtgcgggtggaggatatcaccctggagggtatgcacttccgcgtcgtttcaccgcccactgccgacggcctgctactcacgcttatctactaccacggcggctgttttgtcagcggcggctttgccacccatgacaatcaattgcgccagcttgcctggttcagtgggtgccgggtgatcgccgtgcagtatcgtctggccccggagtacccttttccggcggcgcacgatgatgcagaacgaggtgccatgattatccaccggcacgcaaaacagcttggcgtggatgcttcgcgcatcaccctggccggcgacagcgccggcgggcatctcgccctggtcacggctctgcgcctgaaagcggcgggaacatggcagcctgcacagcttatcctgatttacccgatgctcgacgctaccgccagcatggcaagctacgccagcaacggcgaggattacatcattacccgagacacgctgcttagcggctacgaaatgtatttagcggccacacccgctacccatccggatgccagtccgctgtggcgcgaagattttcacggtctgccaccggtccacatcctgacggcggagttcgatcctttacgtgatgagggcgaagtgctgtaccgaaggctgacggagcaaggggtggagagttcctgtcagcgctatctgggggtgatccacggcttctttcagctgggaggcgtcagcaacgccgcgcgtgatgccatgcgggatatcgcctggcgtgtggcatcgccaggacgataa

SEQ ID NO: 264342 - DNA, 249 bp, Klebsiella pneumoniae; identical to SEQ ID NO: 138969

SEQ ID NO: 264343 - DNA, 543 bp, Klebsiella pneumoniae
atgcgtcagctttttcggtttatgtttcatcacgcctctcaccttacgttcggtgcgatgctgatggccatgtccagctttggacagacctattttgtctcactttacgggcaggattttcgtgaggcctttgggctcaccgacggcggactgggcggcctgtacgcaatcggaacggtgatgagcgccatcacgctgacctgggccggacggctgattgactacaccacgacccgccgcttcacgctggcggtcacccttttgctgctcacggcctgcctgctggtttccggcgcacaggcggcgtggatgctgtgcatcgggttttactttctgcgcctcggcggccagggactgatggtgcatactgcgctgaccgcaacggcgcgccagttcccccttgatgcaggcaaggcgctcggcgccatcgcgctggggctctcgctggcgcaggccgtttttcctgtgattgcggtgcagataagcgcgctgcctggggcatcaatgccggaatgcttgttgccggcgtgggggtcgcgctga

SEQ ID NO: 264344 - DNA, 2916 bp, Klebsiella pneumoniae
atgcagatcactgagtaccacgccaaatactacgcccacgagctcacgtgccttcacgcggcagacagtgtcgatcgactctcgcagtccctgttcgatgcaaccgtagacctaaacccacaccagattgaagccgcactttttgcattgcgaaaccctttgcagcaaggcgtattactggcagatgaggtaggacttggcaaaactattgaggcagcgctcgtcctctgccagcactgggcggaacgccgccgtcggttagtgatcgtatgcccggctgcattacgcaaacagtgggcgcaggagctcgctgaaaaatttgcattgcccagcactgtgctggacgcagctgccatcaaacaaaatgggctttcgccaataacttgtcttgcaaatacagcaggcaaaaaagtagtgattatgtcctaccattttgccgctaaattagccgacgacttagcgacagtgccttgggatctcgtcgtcattgacgaagcccacaaactaaggaacgcccatcgcaacagtaatcgcatggggcaagcacttaagttggcatttaatggtcgacgtaaagtgctgcttacagcaacgccgttgcaaaactccctgatggagttgtatggcctttctaccttgctcgacgagcatttgtttggggatgaaaaggcatttcgcaaacaatttattcatggtgaaagtgatacagatgaactgaaaaaacgcttagccggttttgccaaacgcaccttgcgcagccaagtacttgaatacgttcgctacaccaaacgtcaagccgttactcagccatttaaacccaccgatgcggaacaagacctttacgagcgcatctccgcctttttacagcgtgaaatatcctttgcactccccaagcggcaacgccacctaacgggtttgatactgcgcaagcttctggcttcaagcccgtatgccatcaccggaaccttgcaaaccatactcgaacgcctgcagaaaaaactgcagggtgacgatctgtcagatgaagatctggcggctcagttgatcgagcaagacgatttggaaaatgactatctggaagatgctgatttttccgaggccgaaacgggtgaagcgccagcagaaacagcacctgaatctgatgatgccaccaaagaactacaggctgaaatcgcagaaatcgagtcgtttattcagcaggcgcaaacattaaccaaagataccaaggccgaagcgctgctcacggcgctggatttaggctttgccaaaatggcagaacccaatggtccgcgcaaggccattatttttactgaatctaaacgtactcagcagtttttggcggattacctggccagtcatggctaccaggataaaatcgttaccttcagtggcaccaatgctggcccgcaaaccaatgaaatttaccaacgctggttacagcaatatcagggtagtgaccgcattaccggttctgcgcaagtcgataagcgcacggctctcattgacgagttccgtgagcgcgcggaaatcatgattgccactgaagcggccgccgaaggtgtcaacctgcaattttgcgcgctactcattaactacgacctaccctggaacccgcagcgggtcgagcaacgtattggtcgttgccaccgctatgggcaaaagcatgatgtggtggttattaactttctgaacacccgcaatcaggcagatcaacgggtgcttgaactgctcaccgaaaagtttcagctgttttcaggtgtatttggtgcatccgatgaagtgttagggcgaattgaatccggcattgattttgaaaagcgcatcgcccgcatttacgacacctgccgtaaaccagaagacattgaatctgcgtttgaagcactacaaaaagagctcgaagccgatatcaacgacaaactcaaacaaactcaaagccagttgatggagcatttcgatgaggacgtacacgacaaactaaaacttcaactggatgccacccaagcgcgcctcgacaaagtcagccgttggttttggggcgttacccagttcgccttaaacggccaaagtcactcaaacgccaaggcccagtttgatgagcaaaactatagcttcgcgctaatacagtcgcctattaccaccgccgcgaccgggcgttaccagctcgtgcgagcgcagcaaaaccagcagcgccaacaggacttcatggcgcacgcctaccgcatgaaccacccgttaggtgaatggtcgctggaaaccgcaaaaaacagcaacacacccgtagcagagctgatatttgactacggccatcacgaaaccaaattaagtgtgattgccgacctggttggcaaatccggttggttaaggttagacaaactcacagtaagcgctctggatgccgttgaaagcttattgttttcagcaatcacagatgatggcaaaacactggaccaagaggcctgtgaaaaactgtttgccgttcaggcaaaaaagataggcagcaaaacgtcagcagagccaccaagcgtactagccgacaatcaacaacggcgtatcgaggccagcttggcgcaatttatagaggaaaatcagcgcctttttaatgcagaaagggaaaaactggaacgctgggccgatgacaaactgctggccagtgaagaggcgttaaaagacaccaaagctagaattgctcaaattaaacgcgatgcccgtaaggcgccaaccttagaagagcagtccgaactgcaaaatcagttacgcgacctagagcgccaacaacggcgccaacgtcagcaaatttttgatgtggaagacgagatcatagccaagcgagataagcttattgaagctctacataaacggctcacgcaaaccacagaaacagaacacttgtttaccattcgctggcaagttgcttaa

SEQ ID NO: 264345 - DNA, 135 bp, Klebsiella pneumoniae
atgttgaaaaatagtctgatgttccttgtaataaccccccaggatggcataaaacgctacccgcgattaactttagccctgttaaaacagttgaaatgccagggaaggttacaggggaatattctgttcgcgtag

SEQ ID NO: 264346 - DNA, 918 bp, Klebsiella pneumoniae
atggacagcctcacctcgctgacgtcctttgtccgcaccgccgaaacgctaagctttgttcaggccgccaggctgctgggcatatctgcctcggcggtgggtaagaatgtcgcccggcttgagcataaactgggggtccggctgttcaaccgcagcaccagaaacgtcagcctgacggcggagggggccgcatttctgacccgctgtcagagtatcctggagcagatccaggaggccgagtcagagctgaccagcagtctctcacagcccaccggcaaactgaggatttcactgcccgtcattggctaccgcctgttgctccccgccctcaccgcctttagccgtctttatccgcaggttgaactggatctcgactttagcgaccggctggtcaatctgatcgatgagggagttgatgtcgctatccgcagcggtgaattagcggactcccgcttgatcgccagaaatctggggggttttcgttttgtgctctgtgccagcccggcctatctggcggaatacggcgcccccgactcgccagcggaattggcggcgcacaagtgcattttttttcgcttccccgcaacggggctgatccagccctgggaactgcgcggtatgcggctgacgggagatttcagggccgctgccgtgatgacggtcaataacattgaggccgccattcgcttaagcgcggcggggatgggcatcgcttatgtgcctgattttgtcgtgcgcgaggcaatggatgagggacaactgcaggaggtgttgcccgggtgttgcatcaaggatgggcatttctcggtcctgtggcccgccagccgctacctgtcaccaagaatacgctgttttatcgattttatggctgcggcagagatacctttgtcacccgcatcggcaagccctaccacctga

SEQ ID NO: 264347 - DNA, 1284 bp, Klebsiella pneumoniae
atgacgttcccctcctcttgcgcgccgcttgtcgggatcagccgcgcccgactcccggcctgggcgctgcccgacggctggccgacgcgggccaacggtgagccgctgctggcggacctggcctttcgcgacggccggattgccgcattgaccccaaccgaccagccgactcccggcctgtgggacctggcgggagccctgacgctccccggcctggtggaaccccatgcccatctggacaagacattcaccattgaacgctgccgtccggcgcaggccgggctgctggcggcaatccacgccatgcacgaggatcgccgacactggaccagggcggatattcaacgtcgggcgtccgccgcgctggcccgggcggcagcgaatggcgtgacccatttgcgcagccatgtcgactggtttaccgccgacgcgccggacgcctggcaggagatcgcccgcctcgataccgtcggcatcaccctggagcgggtggcgctggtcccgctgcccctgtttcgcgagccagcgcaagcggaggccatagcccggacggtcgccaacagcggagagcgctgcctgctgggcggcttcatccactcctccaactgggacgccgccgccatggaaaatctgctgtgcagcgcggcccgctgggatctggatctggatttgcatattgatgaggagctcagcgaagtgtctcaggggctgacctggctggcggatcatctctcccgccacccttttcccgggcatatctgctgcagccacggctgcgcgctggccgccggcagcgacgaacaggcggcgccgatcctgcgccagctggcggcgcacggcgtcacccttatcgctctgccgatgaccaacctgctgctgcaggatgcgacgttcggccgcacgccgcgccagcgggggatcaccctgctgcacgaggcgcaggccgccggcgtggccaccctgctcggctgcgacaacgtgcaggatgccttctgcccggcggggagctatgacccgctggacaccctggcctgcggtctgttcagcgctcagctcagcgacctgttcgaccagcagtcgcggctgatctgcgatcgcgcggcgctaaccggttcgccggcagacgcggcgccctttgccgtcggggcgacggccagcgtggtgattttcccgggtagcgaccgttttatctggcctttaaacagcgccgcccgtctggtggttaaccacggcaggttaacccaccggcgcgtgtggcaggaggagatggcacatgagtcttga

SEQ ID NO: 264348 - DNA, 480 bp, Klebsiella pneumoniae
atgagtcttgaagcaggcgccggggcgccgctggcgcggtatgccgcctggcgcagagccggcgattttatctttctctccggcattattccggtcaatcccctgaccggcaccatcgtcaacggctttcaggatgtgcctgagccggtgcgggagctgctgggggcgaccggcgaattttcaaccgatgcgaaacagggcccgatcctcgcccagagctggtacgtcctggagagcatccgccgcaccgtggcgtccgcgggagggcagatgagcgacgttatcaaactggtgcagtactttcgcaaccttgaccattttccctattacagccgggtcaggaagctgttttaccccgaccagccgcccgtttccaccgtggtgcaggtcagcgaaatgctgcccgacgccacggtactgattgaagtcgaagcgaccgtctggttacccccgtcatttaactccgaggcaccgcgatga

SEQ ID NO: 264349 - DNA, 984 bp, Klebsiella pneumoniae
atgaataccagattgacgcccgtttttaccctgctgaccgtggccgccctcgcgacctcagcctcctgcttcgcggcggagaagtttacctttctcaccaactggtatgcccaggccgaacacggcgggttttaccaggcccaggccaccgggctgtatcaacacgccggtctcgatgtcgaaattaaaatgggcggcccgcagatcaacgtcatgcagctgatggcggccggtcaggcggactgcacccttggcgacaacggccaggcgctggagacctggcaggccggggtgcacgcggtgaccgtcgccaccgtgttccagcactcgccgacggtgtttatcacccatgacaaggtggagaacccggcggaacttaaagacaaaaccttcctgctcgccaccgaggcctatacctccttctggccgtgggcgaaaagcgagctgggtctggctggcagcaaagtgcgcccctatacctttaacgttcagccgttcctcgccgataaaaacctggtgcagcagggctacgtgacctccgagccgttctccgtcgccaaaggcgggcagccgttctatgtctatccgctcagcgactggggctacccgccctacggcaactcgattatctgtatggccgacaccatccgcaaacgtccggcggcggtggcggccttcgtcaaagcctccatggaaggctggaaaagctacctgcgggatcccgcccccggcaacaacctgatcggcaaagcgaatccgcagatgggcgccgagcagatcgcctttggcattgcccagatgaagcagtaccagctggtgaccggcggcgatgctaagaccggcggcatcggcatcatcaccgagccgcggctgaagaaaacctgggacatgctggtgaaaaacaaactgatcgacgccagcaaggtgccgtttgagcagacttacaccctggagatggtcaaagacgccggagtgatgccatga

SEQ ID NO: 264350 - DNA, 831 bp, Klebsiella pneumoniae
atgaataccgccccgaaactgaccgtgatgagcgatacccgctttatacccgccgctgccaccccggccatcgaggtgctgtcggcggagaaaatctacagcaacggcacccgggcgctgctgcccgtcaacctgaccatcaatcagggggagtttattaccctgctcggcccgtccggctgcggtaaaagcaccctgctgaagatggtcgccggcctggtggagcccagcgacggcaagctgatgctgtggcggcgcgacagtcgggaaaaggcccagcatccgctgtcgttcgtcttccaggaagccaccctgatgccgtggagcagcgtgcgcaataacgtcaggctgccgctggatctggccggcgtgccgcgggcggagggaaatacccgggtgagtgaagtccttgagctggtgggcctcggcaagttcgccgacgtcctgccgcgcgaactctccggcggcatgcaaatgcgcgtctccatcgcccgcggcctggtcacccgaccaaagctgctgctgatggatgagcccttcggcgcgctggatgaaattacgcgtaacaaactcgacagcgacctgctgcgtctctggcaggagcaaaacctgacggtagtgttcgtcacccactcgatccacgaagcggtgtttctctcccagcgggtgatcatgatggcggcccgtcccggacgggtggtcgaagatatccccatccgcgagccgttcccgcgcagcgaggcgttccgcgtcagcccggccttttccctgtatgcccgtcagctgcaggacagtctgttgcaggccagccagtccggtatggagtcataa

SEQ ID NO: 264351 - DNA, 816 bp, Klebsiella pneumoniae
atgaaaaatacaaccgcaacgccgtggatccagcatccgcgttttctcaaaattctctatccgaccctcgtcgcggtggcgatggtgctcctgtggcagggcgcggtgagctatttccgtatcccggcctttctggtgccgtcgccgctggtgatgctggaaagcctgtggacgcatctcacgccgctgctgctggcgctgctgttcaccctcaagatcaccctgatctcgtttctactgtcgattgtcatcggcgccgcggtggcgtttatcctggtgcagaaccgctttgtggaaaccgccctgtttccctacatcgtgtttttgcaggtgacgccgatcgtcgccatcgccccgctgatcatcatctgggtgaaagatgccacgctctcgctggtggtgtgcgccaccctgatggcggtgtttcccatcatctccaataccactcagggactgcgcagcgtctcccccggcctgctgagctattttcgcctcaatcacgccagccgctggcaaacgctggtgcggctgcgtatcccctcggcgctgccctatttcttcggcgcgctgcgtatttccagtgggctgtcgctgattggcgcggtggtggcggagtttgtcgccgggaccggcgggaccaataccggactggcctatcagatcctgcaggctggctaccagctggatatcccgctgatgtttgccgcgctgctgctgatctctctcgccgggatcgcgctgtttggcgtgatgtcctgggtttcgcgccgggcgctcagcgcctggcatgaaagcgaagccgtgcaatctcattaa

SEQ ID NO: 264352 - DNA, 1419 bp, Klebsiella pneumoniae
atgactgatgaacagcgtcaacacgcggtcgcggcgatccagcaggcactcccggcgctggagtggaccttacagccggcgaagatcaaacggctctcccgcgattttcactggttcagtccgctactcaccgagcaactggcggggaaacaggcggacgcggtggttcgcccgcgcgatgaagaggagctgcgccagctggtctgcgcctgcgcgcagcaccagctgccgctgaccctgcgcggcagcgccaccggcaactacggacagctggtccccctcgaaggcgggctgctggtggatatgaccgggctcaaccagatcgtcgccctcggcaacggcacagtgagggcccaggccggcattcgcctggcggacatcgaaaccgccgcccgcccgacgggctgggagctgcgctgtatgccatcgacctatcgactggcgagcctgggcggtctctacggcggcgggttcggcggtatcggctccatcaactatgggccgctggcggcgcccggcaatgtgctcagcgtcaaagtgatgaccgtcgagccggtcccccgcgtgctgaccgtcccggctcccgaagcgctgctcctgcatcacgcctacggcaccaacggcattatcctggaggttgagctggcgctggcgcctgcgcaccagtggattgaacgtctggacgtgtttgacgatttcgccgatgcgctgaactatgccaacgcctgcgtccgctcgccggggctggtgaagcgccaggtggcgctgctggccacgccgatcgctgactattttagccacctcaacgatcgttaccatgccgggcaacatgcggttatcagcctgatcgccgaggagagcgaaggactctgcgccagcctgttaccgcgccatcgcgggagcaacgccatccggcaggccagcgacgaggcccggacgcgcaacggctcgttaatggaatactgctggaaccacaccaccctgcatgcgctcaaggtggacaatacgctgacctatctgcagacggcgtttgatccgctgcgctatccgcagcaaattttacagatggagcagcacttcgccggggaggtgatgtcccatattgaattcctgcgcgatatcgagggcaatctcaccgccagcggtctgcagctggtgcgctataccacgcccgaacgtcttaacgccatcatgcagatatttcgcgacaacgacgtcaagattaacaacccccacgtgctgcaggttgaggacggcaaacagggcgtgattcgtcccgacgtcgtggcggtgaaacagtctctcgacccggcgggattgcttaaccccggcaagctgcgcggctgggcgctgcgcgaccagctggaactcgacagcaacccgctgacgcgggccacccgcgaaagccccacgacctga

SEQ ID NO: 264353 - DNA, 909 bp, Klebsiella pneumoniae
atggaacatactgttgcaggcgccatcaaagaatggcgtaaacataataaagtgatcggtcaggtcaaaataagctataaaaaaattttacgaaaatgcagagagctctcgctcgcaggaggtaaatacagagaatatcaaggactttgtgcgaaatatcagtgcgcgcggttgaccgcggtgaccaaaggactggtgccttttgaggataaaccgtttaaagcgtatctcaataaacggctgtcaaaacgacgcaaactggatattgcccatggttcactgaatttcatcgagaaaacgtttcaccctgatgtcctgccgcaactctacaatgtcgcggattttggccgcgagatgttttctattcccttgaaaaatggcgataagcttgacgttaagctgctggcctcgccgtttcaggaggaaggggagctgatgctgcagctgtttcttggcgaccggcgcgtctatagcgtctgtttttcctgcaccgacgatggccgcgcttatatcggcggcatccagggcgggaaagatatcaccaatgacgaagtgaaggtgctgactaaagagctgcatggcgcgcggccgaaaaatatcatcatgagcgtgctgtatggtttgctgcgatatttcaacatctccacggtctacgccatcgattctgattaccacgtgaaaagcgatctggtgaaagccagttattcatcgctgtggctggaaatgggcggtgagaaacaggctcgcggctggtataaactgccggcgcaagagatcaaaaagagtattgaagaggtgaaaagtaagcaccggagccagtttattaagcgcgaaggtcttaaagagctgattcagattaatatggcgaatgccctgcagcaaattaccttgcctgcgcgggtgaattaa

SEQ ID NO: 264354 - DNA, 141 bp, Klebsiella pneumoniae; identical to SEQ ID NO: 260212

SEQ ID NO: 264355 - DNA, 891 bp, Klebsiella pneumoniae
atgagaatgagtgtcaaacagttacgcgcgtttttagcggtagctcacactctgaatttcgcccacgccagcgaaaggctgaatctgtcgcagccagctctcagcctgaccatcaaagggttggaggaggcgctgggcggcgcgctgctgcagcgcagcacccgcaaagtgacccttacccaggagggggaactctttctgccgatggcccgtcagctgctggccgactgggataacgtcgaggaggccatgcgtcagagctttaccctgcagcggggtaaaatttcggtcgccgcgatgccgtcgtttgccgccaacgttctgccggaggcgctgaaagcctttcgcgaccgctatgccggggtgaacgttacggtgcatgacgtgattaatgagcaggtgatcgagatggtgcgcgaggggcgggtggagatgggcatcgctttcgagccatcgcccaaccacaacctgctgtttaccccgttggcggtggaccgcttcgtggcgatcgttccccaacaatccccgctggcgaagaaaaagcagctcagctggcaggagctgttgaccctcgactttattaccctgcagcgcccctcggcggtacgccttatgctggaggaggcgctggcgcgcagcggacgtcagctggacgtggcgctggagagtcatcagctggtgacggtggggaggatggtggccagcggcctggggggcagcgcggtgccggcgctgtgtaaaacgcagatggcatcgttgggcgccgtctgcatcccgctctgcgatccgccgattgagaagtgcgtcggcgcgatccatgccggacatctgccgctgtcgaaggcggcgcaggcgctgctggatacgctgaaagggtttttacccacctga

SEQ ID NO: 264356 - DNA, 708 bp, Klebsiella pneumoniae
atggcaggactggataaacgcgtcgccagttacgaagcggcgctggaagggttaacggacggcatgacgctgctcgccggcggcttcggcctgtgcggcattcctgagaacttgatcgccgaggtgcagcgtcgccaggtgcaggggctgacggtggtctctaacaactgcggggtcgacggtttcggtctcggcatgctgctggagtcgcgccaggtcagcaaggtggtggcctcttacgtcggggaaaacgcgctgtttgaacagctggtgctgagcggcgagctggcggtagaactcaccccgcagggaacgctggcggaaaaaatccgcgccggcggcgctggcatccccggcttttacaccgccaccgggtatggcaccccggtcgccgaaggcaaagaggtgcgccagttcgacggaagacactacatccttgaagaggcgatccgcggcgatttcgcgctggtcaaaggctggaaagccgactggtacggcaacgtggtctatcgccacaccgcgcagaatttcaacccgctgatggccaccgccgggcgcattacggtggtggaggtggaagagattgtgccgccgggcgaactgcccccctccgccatccatactccggggatctatgtcgaccggctgatcgtcgggcaattcgaaaaacgtattgaacagcgcaccctgcgcgccggagggcactga

SEQ ID NO: 264357 - DNA, 657 bp, Klebsiella pneumoniae; identical to SEQ ID NO: 210801

SEQ ID NO: 264358 - DNA, 1182 bp, Klebsiella pneumoniae
atgaccgatattgccattgttgctgcagtacgcaccccgataggcagctttcgcggcgccttcgcccctctttccgccgtcgacctcggcgcggcggtggtgcgcggcctgcttgaacgctgccagctgcccgccgcagcggtcgacgaactaattttcggccaggtgcttaccgccggctgcgggcagaacccggcgcgccagaccgcgctgcgggccggcctgccggtcgacactccggcggtcaccgtcaatctggtgtgcggctccggactgaaagcggttcagcaggcggtgcaggcgatccgctgcggcgacgccgggatcgttatcgccggcggccaggagagcatgagcaatgctccctatctgatgcatggcgcccgcgacggcctgcgtttcggccacgccagcctgcaggacagcatgatccaggacggcctgtgggacgccttcaacgactaccacatgggcattaccgccgagaacctcgccgacgccttcgacatcagccgcgagcgccaggacgccttcgccgccagctcccagcgcaaagcggcggccgctatcgccgccgggcgctttcgcgaggagatcgttccggtcagcgtcccgcagggcaaaaagccgccgcgagtcgtgactgacgatgagcaaccgcgcccggagaccagcgagcagcagttggcccagctgcgcccggcgtttcgcccggctgacggcagcgtcaccgccgggaatgcctcgtcgctgaacgacggcgcagcggcggtcctgctgatgcgtgtcgataaagcgcgcgagcttgggctgccggtgctggcgcgcattgtcagctcagcggtcgccggggtcgacccgtcggtgatgggcatcggcccggtgagcgcctgccgccaggcgctgcagcgcgccggctggacgctggacgaggtggaccttatcgaagccaacgaggcttttgccgtccaggcgctggccgtcggccagctgcttgaatgggacagcgagaaggtcaacgtcaacggcggcgccatcgccctgggccatcccatcggcgcctccggctgccggatcatcgtcagcctggtgcatgagatgcagcgccggggcgccagcaaagggctggccaccctgtgcgtcggcggcggccagggcatcgccatgacccttcaacgttaa

SEQ ID NO: 264359 - DNA, 924 bp, Klebsiella pneumoniae
atgtttacaccacgcctggcggtactcggcgcgggactgatgggcgtcggtatcgcctgccatttcgcccgtcacggtcacgccgtccgcctgtatgacaccgacccgcagcgtctcgccgaggtgccggcggtggccagcgccatcctgtgcgagctggaggccagcggtcaacaggatcccgccgaccgcgacgcggtgctggcccgtctgacccccaccccgacgctgaatgccctggccgatgccacgctgctgattgaagcgatccccgaacggctggcgctgaagcacgccctgtacgccgagctggaaacgctgatcgccgacgaggcgattatcgccagcaacaccagcggcctgccgccggatcggctggcgcagggcatgcgcctcccggaacggctactgatcgctcatttctggcatccgccgcacctgatcccgctggtggaagtggtgcccgggagcgccacgctgcctcatctggcgcgcgaggtgagcgacttttgcgccgcctgcgcgctggaggcggtggtgctcaaccgcgccgcgccgggctttgtcggcaaccggctgcagttcgccctgctgcgcgaagcgctgcatatcgtccacagcggcatcgcttccccggaggtggtggaccaggtgatgcgcgcctcgctgggccgccgctatgcgatggtcggcccgctggaggctgcggacatgaccggcctggcgacggtccaggatatctgccagcacctgctgccggagctggccagcggcacggagatgatgtcgctggtggcggagaaagtggcgcgaggcgacaccggcgccggcagcgggcaaggcttttaccgctgggacgaggcccggcaccagcgcatccagtcgcgccgggaacaccagctccgcttcgccctgaaaccctag

SEQ ID NO: 264360 - DNA, 1392 bp, Klebsiella pneumoniae
atgagtgtgataatagccctggccgcgctggcgttactgatgctggcagcctaccgtggatacagcgtgatcctctttgcgccgatcgccgccctcggcgcggtgctgctcaccgatccgggcgcggtcggcccggcctttaccggcctgtttatggaaaaaatggtcggctttgtgaagctctatttcccggtgtttctgctgggcgcggtattcggcaagctgattgagctgtcgggattctcacgttcgattgtcgccgccgccatccgcatccttgggcgccgccacgcgatcccggtgatcgtgctggtgtgcgccctgctgacctacggcggggtgtcgctgtttgtggtggcctttgccgtctaccctttcgccgccgaactatttcgccagagcgggatccccaaacggctgatccccgccaccgtcgccctcggggcattctcgtttaccatggacgccctgcccggcacgccgcagatccagaatattattcccaccagcttcttcggcaccaacgcctgggcggccccctggctggggcttatcggctcgctgttcattatcatcttcggtttgctgtggctggagcgtcagcgccgcaaagcgcaggcccgcggcgaaggctatgggaccgacctgcaaaatgagccggagaccccggatgacatcgatctgccgcatccgctaatcgctatcgccccgttgctgctggtgggggtgctgaatttgctgttcacccactggatcccgcagtggtacggcgccagccatgagctcaacctgccgggcctggcgaagcctgtcgtcaccgaagtggggaaaatcaccgccatctgggcggtgcaggcggcgctgctctccggcattgtgctggtgctggtttgcggctatcgcaatatccgcggccggctggcggagggaagtcggacggcggtgggcggggctattctcgcggcgatgaacaccgcctctgagtatggcttcggcgcggttatcgccgccctgccgggtttcctggtgctgtcaaaagccctcgcggccattcccaatccgctgttaaacgaggcgatcagcgtcacggtgctggccgggatcaccggctcggcctccggggggatgagcatcgccctggcggcgatgtccgagacctttgtcgccgccgcccacgccgccaatattccgctcgaggtactgcaccgtgtcgccgccatggccagcggcggcatggacaccctgccgcacaacggggcggtgatcaccctgctggcgatcaccggcctgagccatcgccaggcctacggcggcattttcgccatcacggtgatcaaaagcctcgcggtactgtttgtcattgccacgttctatgtgaccggcattgtctga

SEQ ID NO: 264361 - DNA, 771 bp, Klebsiella pneumoniae
atgaacttacacggtaaaacggcgctggtcaccggctccaccagcggcatcggtttagggatcgccaaagtgcttgcgcaggcaggcgcccagctggtgctcaatggcttcggcgacagcagccacgcccgggctgaagtcgccgcgctgggcaagatccccggctatcacgacgccgacctgcgcgacgtcgggcagatcgaggcgatgatgcgctatgccgaaagcaccttcggcggcgtcgatatcgtgatcaataacgccggcatccagcacgtggccccggtggagcagttcccggtggacaaatggaacgatattctcgccatcaatctctccagcgtcttccacaccacccgcctggcgctgccgggtatgcgccagcgcaactgggggcgcatcatcaacattgcctcagtgcatggcctggtggcgtcgaaagagaaatcggcctacgtcgccgccaagcacgcggtggtcgggctgaccaaaaccgtggccctggaaaccgcgcgcagcggtatcacctgcaacgccatctgccctggctgggtgctaaccccgctggtgcagcagcagatcgacaaacgcatcgccgagggggtcgacccggagcaggccagcgcccagctgctggcggaaaaacagccctccggggagtttgtcaccccgcagcagctgggcgaaatggcgctgtttctgtgcagcgatgccgccgcccaggtgcgcggcgccgcatggaacatggatggcggctgggtggcgcagtaa

SEQ ID NO: 264362 - DNA, 873 bp, Klebsiella pneumoniae
atggaacttcgttatcttcgctattttgtcgccgtcgccaggacgcggcacttcacccaggccgccaaggagctgggtatttcacagcctccgttaagtcagcaaattcagcggcttgagcgcgaggtggggaccccgctgttccggcgtttaacccgcggggtggagctgacggaagcgggagagtctttctatgaggatgcccgccagatcctcgccatgagcgatgcggcgctggagaaggccaagggcattgcgcgcgggatgaacggcagcctgtcgctaggcattaccagttctgatgctttccatccgcaaatcttcacgctgctgcaccgttttcagctcgaccaccccggggtgaccctgcaccagatggaagacaatatggccaatctgatgaccgccctgagcgaggccgagctggatatcgccttcgtccgcctgccgtgcgagagcagtaaagcctttaatctgcggattatcgatgaggagccgatggttatcgcgctgccgcgcgataacccgctggcgacgcagccgaccctggccctggagcagctgcgcgacgtggcgccgatcctcttcccgcgggaggtggcccccgggctgtatgagctggtgtacaacagctgtctgcgcgccgggatcgatatggagcgcgcctggcagtcgtcgcaaatttcgtcgtcgctgagcatggtcaatgctggcttcggcttcgcgctggttccgcagtcgatgacctgcatccagcagccgaacgtcagctatcacccgcttagcggggcgccgctgaagaccgatatcgccatcgcctggcggcgcttcgagcgctcgcgtacggtgaaacgctttctggcgatgttctga

SEQ ID NO: 264363 - DNA, 780 bp, Klebsiella pneumoniae
atgaatcattctgctgaatgcacctgcgaagagagtctatgcgaaaccctgcgggcgttttccgcgcagcatcccgagagcgtgctctatcagacatcgctcatgagcgccctgctgagcggggtttacgaaggcagcaccaccatcgccgacctgctgaaacacggcgatttcggcctcggcacctttaatgagctggacggggagctgatcgccttcagcagtcaggtctatcagctgcgcgccgacggcagcgcgcgcaaagcccagccggagcagaaaacgccgttcgcggtgatgacctggttccagccgcagtaccggaaaacctttgaccatccggtgagccgccagcagctgcacgaggtgatcgaccagcaaatcccctctgacaacctgttctgcgccctgcgcatcgacggccatttccgccatgcccatacccgcaccgtgccgcgccagacgccgccgtaccgggcgatgaccgacgtcctcgacgatcagccggtgttccgctttaaccagcgcgaaggggtgctggtcggcttccggactccgcagcatatgcaggggatcaacgtcgccgggtatcacgagcattttattaccgatgaccgcaaaggcggcggtcacctgctggattaccagctcgaccacggggtgctgaccttcggcgaaattcacaagctgatgatcgacctgcccgccgacagcgcgttcctgcaggctaatctgcatcccgataatctcgatgccgccatccgttccgtagaaagttaa

SEQ ID NO: 264364 - DNA, 1680 bp, Klebsiella pneumoniae
atggacaaacagtatccggtacgccagtgggcgcacggcgccgatctcgtcgtcagtcagctggaagcacagggggtacgccaggtgttcggcatccccggcgccaaaatcgacaaggtcttcgattcactgctggattcctccattcgcattattccggtacgccacgaagccaacgccgcatttatggccgccgccgtcggacgtattaccggcaaagcgggcgtggcgctggtcacctccggtccgggttgttctaacctgatcaccggcatggccaccgcgaacagcgaaggcgacccggtggtggccctgggcggcgcggtaaaacgcgccgataaagccaaacaggtccatcagagtatggatacggtggcgatgttcagcccggtcaccaaatacgccgtcgaggtgacggcgccggatgcgctggcggaagtggtctccaacgccttccgcgccgccgagcagggccggccgggcagcgcgttcgttagcctgccgcaggatgtggtcgatggcccggtcagcggcaaagtgctgccggccagcggggccccgcagatgggcgccgcgccggatgatgccatcgaccaggtggcgaagcttatcgcccaggcgaagaacccgatcttcctgctcggcctgatggccagccagccggaaaacagcaaggcgctgcgccgtttgctggagaccagccatattccagtcaccagcacctatcaggccgcaggagcggtgaatcaggataacttctctcgcttcgccggccgggttgggctgtttaacaaccaggccggggaccgtctgctgcagctcgccgacctggtgatctgcatcggctacagcccggtggaatacgaaccggcgatgtggaacagcggcaacgcgacgctggtgcacatcgacgtgctgcccgcctatgaagagcgcaactataccccggatgtcgagctggtgggcgatatcgccggcactctcaacaagctggcgcaaaatatcgatcatcggctggtgctctccccgcaggcggcggagatcctccgcgaccgccagcaccagcgcgagctgctggaccgccgcggcgcgcagctcaaccagtttgccctgcatcccctgcgcatcgttcgcgccatgcaggacatcgtcaacagcgacgtcacgttgaccgtggacatgggcagcttccatatctggattgcccgctacctgtacagcttccgcgcccgccaggtgatgatctccaacggccagcagaccatgggcgtcgccctgccctgggccatcggcgcctggctggtcaatcctgagcgcaaagtggtctccgtctccggcgacggcggcttcctgcagtcgagcatggagctggagaccgccgtccgcctgaacgccaacgtgctgcatcttatctgggtcgataacggctacaacatggtcgctatccaggaagagaaaaaatatcagcgcctgtccggcgtcgagttcgggccgatggattttaaagcctatgccgaatccttcggcgcgaaagggtttgccgtggaaagcgccgaggcgctggagccgaccctgcgcgcggcgatggacgtcgacggcccggcggtagtggccatcccggtagattatcgcgataacccgctgctgatgggccagctgcatctgagtcagattctgtaa

SEQ ID NO: 264365 - DNA, 771 bp, Klebsiella pneumoniae
atgaaaaaagtcgcacttgttaccggcgccggccaggggattggtaaagctatcgcccttcgtctggtgaaggatggatttgccgtggccattgccgattataacgacgccaccgccaaagcggtcgcctccgaaatcaaccaggccggcggccgcgccatggcggtgaaagtggatgtctccgaccgcgaccaggtatttgccgccgtcgaacaggcgcgcaaaacgctgggcggcttcgacgtcatcgtcaacaacgccggcgtggcgccatccacgccgatcgagtccattaccccggagattgtcgataaagtctacaatatcaacgttaaaggggtgatctggggcatccaggcagcggtcgaggcctttaagaaagagggtcacggcgggaaaatcatcaacgcctgttcccaggccggccacgtcggcaacccggagctggcggtatatagctcgagtaaattcgcggtacgcggcttaacccagaccgccgctcgcgacctcgcgccgctgggcatcacggtcaacggctactgcccggggattgtcaaaacgccgatgtgggccgaaattgaccgccaggtgtccgaagccgccggtaaaccgctgggctacggtaccgccgagttcgccaaacgcatcaccctcggccgcctgtccgagccggaagatgtcgccgcctgcgtctcctatcttgccagcccggattctgattatatgaccggtcagtcattgctgatcgacggcggcatggtgtttaactaa

SEQ ID NO: 264366 - DNA, 642 bp, Klebsiella pneumoniae
atgatatcgataataaaggatctatttagtaaccaagtgggttccgcagtcattcttactatcattggagcgattacaaaaaagtatattcagtttcatcgcagagactttttttcacgctcatcctccgagcagataaaagcagtcgaatggcttagaacctcttctgtacccatctccgatccgttagcaaaggcggaacagcagttccgcctacagtcgttcggactgcatagagattggcatttatcttataaaatcatatgcttgagttccgattatgcacagtcattgattccgtccttgaaggcagtcttgcgttatcagggcatgtacacaattactaacgggaatatataccctcataaattccataagtggataataccttttgtgttaatatcgttgctattatatatcggtgctgagatatacagaggttcttcacagagtgatggtatagagattttgaaatctctatacgtcgttattgtggcttttatagtatggtgttgggtcgctgcttgtgctctgagagtatcaagcatcagtaaaaagctcaatgcctatatcccacccgcaaacgattttaaatccaagacatacgatttcagttcaatactcaataatagatatccctag

SEQ ID NO: 264367 - DNA, 162 bp, Klebsiella pneumoniae
atgctagcgccgttttttaatcagttggcgcagggcagcgcggcacagtcgcggcagttaaatcaggcgaacatccgctggtctgaagctcagcagcgcagtccgcaatttaatgaggcgatctgtcaggcgttggccgccgcggtggcaaagaaaaaatag

SEQ ID NO: 264368 - DNA, 705 bp, Klebsiella pneumoniae; identical to SEQ ID NO: 136261

SEQ ID NO: 264369 - DNA, 363 bp, Klebsiella pneumoniae; identical to SEQ ID NO: 180186

SEQ ID NO: 264370 - DNA, 651 bp, Klebsiella pneumoniae; identical to SEQ ID NO: 102213

SEQ ID NO: 264371 - DNA, 225 bp, Klebsiella pneumoniae; identical to SEQ ID NO: 194719

SEQ ID NO: 264372 - DNA, 555 bp, Klebsiella pneumoniae
atgcccggtgacatgatattgcgtgttcagaatgcgctcgtgacgcagacgggcgaaatacgccccggactctgtactttccgtatcacccgctgtcaggaaaggctccgcgtagtggtaaatttcaccggcggtgctcccttcctgactgctgatactttccgtgctgtcctgcggcgtcagcgcttcccggtagttgtagtcccgggtggccacccttccgctcaccacgttatatgcagtctgaatatcccagatactctcctgtccgctgtcactcatcccggcctggttgcgcagtggcagcgtgacgccaaactcatactgctgctggctgtcctgaaaaatcaccacgtcctgttcaagacggctgtccatttcatagcgccagtaaatgcccacttccgccagcaggcgctggataaactcaagatcggtctcccgccactgagtgatgagctcccgggacggatattcgcgggagagccggaactcgaaatcaggcccttccagaccgtgtttacgcagtaccttttccacaacttcagtgactga

SEQ ID NO: 264373 - DNA, 837 bp, Klebsiella pneumoniae
  misc_feature (25)..(34): n is a, c, g, or t
atgtattacatattttttttttttnnnnnnnnnnatgtatatgtattacataatgttttttgtttcgagaataacgaaaagccatttctattaaaaacaaagaggttttttaatccagtatttctttttagaagtgcaagagagcgttatctcctggcaacagctaaaaataaaaaaataatagcagtttcaaaaaaaacattagatgaggctgcgagatattgtaatagaaagtcagatttagtctatataaataatggtgttaatcttgaagagtttcctttccgcgaacatacaattgatgaccattgttttaatattatatttgttgggcatgagtttgaaagaaaagggttaaaatttatcattgaaagtttaaccctgttgccggaacaagtaaaacttaatgtagttggtggtgcaggtagtaaccagaaaaaatatgaggatctggctaagcaattacatgtctctcacagagtcaaattttgggggacgttgcttggggagcagttggttcaactgtatcatcgttcacatgtgtttgctctaccaagttcatatgaagcttggccactagttggtttggaaagcatgtcttgtggtttacctgtcttaatgactagagtgggaggtattcctgaatatctatctgatggatataatggatactttattaatatatcttccgaagatattgcagagaaaataatgttacttatcaacaacgttgataaatattcaagtctatctctaaatgcaagaaatacagcaatgcaacactcttggaatgttggtgctgagaagtacctagatattataaagaagtgtatttaa

SEQ ID NO: 264374 - DNA, 1038 bp, Klebsiella pneumoniae
atgaagtatgtgaatctgggtcgtagcggattgaaagtctcccgtctttgtctcggttgtatgagttatggcgaacctgaacgtttgcctcaaccctggtccctggatgaaaaggcgtcacgtccgctcattcgccaggcgcttgaagccggcattaatttttttgataccgcgaatatctactcgggcggtagttcagaagaaattacaggaaaagcgctgagagagatggccagacgcgacgagatcgttgtagcgacaaagaccttctttccgtggcgcaactcacccaataccggatttctttcccgcaaggccatttttcagtctattgacgatagcctgatgcgcttaggcatggattatgtggatctctttcagattcatcgctttgactactccacgcctgttgaagagaccatggaggctctgcatgacgtcgttaaagcaggaaaagcgcgttatatcggcgcatcttctatggaagcctggcgctttgcaaaaatgcagcataccgctgagcgtaacggctggacccgatttatcacgatgcaaccgcaatacaacctgctttaccgggaagaagagcgcgagatgctgcccctgtgtgaagaccagggcgttggggtgatcccctggagtccaatggcacgcggcaggctcacgcgcgactggagtgtcgcgtcccgacgaacgcaaaacgatgcctttgcgttaaaaatgtatgagaacgcagcccttctggataagcccgtgattgatgttgttgccagcattgccgaaaagcacgcggtgccaagagctcatgttgcaattgcctggctgttatcaaaatccgtcatcacagcaccgatcattggcgcaacgaaaccagaacatctttccacggctatcagcgcgctggacttttcacttagcgatgccgaaatcacggaactggaagctcgctatctgccgcaccccgttgacgggatcattcccccgcttccggatacgccgccttccctcacgccgccttcagcgatccagaactattaa

SEQ ID NO: 264375 - DNA, 351 bp, Klebsiella pneumoniae
atgtttgtgcataaagagggggctaagctcgttgccaaccagggagacatcgagattcaggctcaacacaacacgatgtccctgttttctgaaaaacagctgacggtgaccagcagtgaagatgaaattattatcagcaccccggaaacgctgacgctgaacggcggcggatcttacctgaggctgagtaagaacggcattgaacattgctcatcaggtgagttcattatgaagacgtctgactatctggtaccaggatcgggcgcaaatctccccaacgaaacacccaatttcagcctgacggatatcactcaggaaagcaaaatcagcagcaaatctttcaatgactaa

SEQ ID NO: 264376 - DNA, 1428 bp, Klebsiella pneumoniae
gtgccaacctggaaaaccgtcgcatcccgctttgaaggaaatgcggaggttcatatttgccatgacggtaaacatccttccctgactatcagcagcctggagaaactggaggagccaacatcgttgcatcgtctcaacagtcgggtaaggctgctactcccgccagtagatttgacggaactgttgcttgaaatagatgccagaacgggatttacacgtgagtttacgcatgtcagtgaatccggggcccgggcacaggatctgcacatcagcctgtgcgcggtcctgatggcagaggcctgcaatatcgggctggaaccgctgataaagcacaatataccggcgctgacgcgccaccggcttagctgggtaaaacagaattacctccgggcagaaacgctggtcagcgccaatgcccgcctggttgattttcagtccacactggagcttgctggccgctggggtggtggcgaagtggcttcagctgatggcatgcgctttgtcacgccggtgaaaaccgtcaattcaggacctaacagaaaatattttggttccggacgtggcatcacctggtacaacttcgtctctgatcagtactctggattccacggcatcgttgtccccggcacattacgagattccatttttgtgctggaaggccttctggagcagcagacagggctgaatccggttgagatcatgacagacacagccggtaccagcgacattatttttggcctcttctggctgctgggataccagttttccccccggcttgccgatgccggtgaagcggtattctggcgagtggataaatcggcaaattacggtgcactggacgaactggcacgtggttgtgccgatctgtcgaaagccgaggatcagtgggatgagatgatgcgaaccgccggttcgctgaaactgggcaccattcatgcttcagaactcattcgctctttgctgaaaagctcgcgcccatcagggctggcacaggcgatcatggaagtggggcgcgtcaacaagacgctgtaccttcttaattatattgatgatgaggattatcgtcggcggatcctgacgcagctaaaccggggggaaggccgccatgctgtggcgagggcgatctgctacgggcagcgcggtgagatcagaaagcgctatcgtgaaggtcaggaagatcagctgggggcactgggcctggtcactaacgcagtggtactgtggaacacactttatatgcaggaagccctgagctggatacgcagtaatggagaagaaatcggggttgaagatatcgcccggttgtccccactgatgcacgggcatatcaatatgctggggcattatacgtttacgctaccggaggatattttgaagggggaactgagagaactaaatttcaatttaaacaatgaattaacttcttag

SEQ ID NO: 264377 - DNA, 1011 bp, Klebsiella pneumoniae
atgaatccggccagtaagaaaaatattcttgtcctggcggccctgggcgctgccgccctggcggcagcgagctacggcgcttactggtggcataccgggcgctttatgcaaaccaccgatgacgcctatgtcggcggcgacattagcgccatctccagcaaagtctccggctatatccagcagctggcggtgcaggacaatatggcggtgaaaaaaggtgacctgttgatccgcattgacgaccgcgattatcgcgccgccctcgcgaaagccgccggagaagtggcggcgcagcaggccgcgctggccgatatccaggctacccgccagcttcagcaggcgaccattgccggctctgcggcctcgttactggccgccacggcggcaaccgaaaaactggctaacgacaaccgacgctataacgccctggccgcgtcgagcgcgatttccgcacagatccgcgataacgcctccgccgattatcgccgggcgcacgccgagcaggagaaggccaaagcggataaaaccgtggccgaacgtcagctggcggtgctggatgctcgccagcagcaaatcctggctgccctggcgcaggcccaggctaacctcgagatggccaggctgaacctcagctataccgacattcgcgcaccgttcgatggggtgattggcaaccgccgcgcgtggtccggctccttcgtcagcagcggtacgcagctgctctccctggtacccgcgcacggcctgtggattgacgctaacttcaaggaaaaccagctggcgcatatgcgtgccggccagccggtgaccatcgtcgccgatgtgctgccgaaccataccttaaggggcatgtcgccagcctggcgccggcgaccggctcacgcttcagcattctgccggcggagaacgcgaccgggaatttcactaaaatcgtgcagcgggtgccggtccgcattgcgctggaaggtgacggggcaaagcttgacgtcctgcgcccgggactgtcggtga

SEQ ID NO: 264378 - DNA, 1563 bp, Klebsiella pneumoniae
atgagcaccgttcaggcgctgtccgccccgcagggtctgtcgatgccgacggcgaagaagatcttcgccttcgccagcatgtgcgtggggatgtttattgcccttatcgacatccagatcgtctccgcctcgctgagggatattggcggcggcctgtcggcgggcgacgatgaaaccgtctgggtacaaaccagctacctgatcgccgagatcattattatcccgctttccggctggctggcccgggtcatgtcgacccgctggctgtttgccgcttccgcggcgggcttcacgctgatgagcctgctgtgcggctgggcgtggaacatccagagtatgatcgccttccgcgccctgcagggactggcgggcgggtcgatgatccccctggtgttcaccaccgctttcgccttttttcagggcaaacagcgggtcatcgccgcggcgacgatcggcggcctggcctccctcgcccctacgctgggtccaacggtgggcggctggatcaccgaaaactacaactggcactggctgttctttatcaacgttgttccggggatttacatcgcggtggcagtgccgctgctggtaaaagtagacagcgccgaccccactctgctgcgcggcgccgactatctcagtattctgctgctggccttgtccctcggctgcctggaatataccctcgaagaaggtccgcgctggggctggtttgatgacgcgaccctgacgaccaccgcctgggtcgccctgctctgcggcgtggcctttgttatccgcaccctgcgccatccgcagccggtgatggatctccgcgccctgcaggatcgaaccttcagcctcggctgctatttctcgtttatggccggcgtcggcatcttcgccaccatctatttaaccccgctgtatctggggagcgtgcgcggtttcagtgcgctggagatcggcctggcggtattttccaccggtctgttccaggtcatgtctattccgttttattcgtggctcgccaaccgcgtcgatctgcgctggctgctgatggccgggctgatcggctttgcggtgtcaatgtacagctttgttccgatcactcacgactggggggcggaccagttgctgctcccgcaggcctttcgcggactggcgcagcagtttgccgtcgcgccaacggtgaccctgacgctgggcagcctgccgcccgcgcgcctgaagctggcctccgggctgtttaatctgatgcgcaacctcgggggcgccatcggcatcgccctgtgcggcacggtgcttaacgacagaaccaatctgcactatagccgcctggcggaccatctgaataacgccaacctggcaatgagcgattttgttcagcgcagcgcggcaaacttcaccgtccaggggatctcgccggatgccgcgcagacggcggcgctgaaaaatctttccgcgctggcgctacgggaggcgcgaacccaggcattttccgatgctttctacctcatcatgatgggttttttaattgccgcgctgctggttcccttgatgaaaaagccgccggcacactga

SEQ ID NO: 264379 - DNA, 846 bp, Klebsiella pneumoniae
atgcagcgcgcagagcaggcagcgccagagacctggtggttgcgctgggtggggccatggcagtaccagatctccgccagccagatgaatcaatataccgcggtacctcatgccaaaattatcggcggtcgtttcaccttttcacctttccagtctttagagttaggtgcatcgcgcattatgcagtggggtggggaagggcggcctgaatcatttagtagcttctgggatggcttcactggacatgataataccggtaccgataatgagccgggtaaccagctggctgggtttgactttaaattcaaactcgagccaactcttggttggccggtaagcttttatgggcagatgatcggcgaggatgaatctggttacttaccatcagccaatatgttcctcggcggggtcgaagggcaccacggctggggtaaagatgcggtgaactggtatttggaagcgcatgatacacgtactaatatgagtcgaacaggctatacctatatacatcatatttataaagatggttattatcagcagggctatccgctaggcgatgctatggggggagacgggcagttaatcgccggtaaggttgaactgataacagaggataaccagcgttggagcacgcgtttggtatatgccaaggtaaatccaaaagatcaatcaattaataaagcattcccgcatgctgacacattgaaaggtgtacaacttggctggagtggggatgtctataaaacagtccgcctaaatacctcgctgtggtataccaacgcagatcatagcgatagcgatgatgttggcgcaagtgccgggatagaaattccttttagtttatag

SEQ ID NO: 264380 - DNA, 1299 bp, Klebsiella pneumoniae
atgcgtttcacggaagcctgcttactgaaaacggagaacaacatgacgacactcagcgaaccgttggttaccccgaaatatggcaagtggcgccagctggtgctgggcctgatctgtatggccgccatctccagtccgcaatatgtctggacgctgttgacaaaacccctggccgccaaacttggcgtcggtctgccagaattgcaggtcaccttctcgctgctgatcatcctgcagaccttcttttccccttttcagggacggttagtggaaaaatttggcccgcggcggctgatcgctattggcacggtgatggcgggaatgagctgggtgctttccgcgcaggtgaatggcctggcaacgctctggctggtttatggctgcatgggcggcctcgggaccgggatcgtctacatcggcgttgtcggcctgatggtcaaatggttcccacagcagcggggatttgccgccggcgcggtggcggcgggctacgggatgggggccatcataaccaccttccccatctccctgtcgctgaccaataacggccttgaacacacgatgacgactttcgggatccttttcgccctcgtcggcttcctcgccagtcaggggctgaagctgccgccgcccgctgtctcccagcccgtcagtcagacggtggtgcagagcagcagatcgtttacttcccgggaaatgctgcgccagccgctgttctggctgatgttcgtcatgatggcgatgatgtcgacttccgggctgatggtcacttcgcagatggcggtgttcgccgaggatttcggcattagccaggcggtggtgtttggcatggcggcgctgccgctggcgttaacgatagaccgctttaccaacggcttaacccggccgctgtttgggtttatttccgaccgcttcggccgcgagcaaaccatgtttatcgcctttgcgctggagggggtggcgatgatgctctggctggcgtgccgggaagatccgctgctgtttgtcctgctctccggggtggtgttctttggctggggggagatcttctcgcttttcccgtcgacgctcaccgatacgttcggcagcgagcatgccgccagcaactatggctggctgtatatttcgcagggcatcgggtcaatctttggcggtccgctggcggcactgctctatcagcacactcacggctggcatgtggtcttcagctgcgcgattggccttgattttgtcaccgccgccctcgcgctgtgggtgctaaaaccgtggcgcgcgcgctttatccgccagcatagctaa

SEQ ID NO: 264381 - DNA, 534 bp, Klebsiella pneumoniae
atgttacccctgaccacgccccggctgctgctgcgccggttcagaacggaagatctgccgtctttcagccattatcgcaatctgccggaggtggcccgctttcagagctggacccactacggcatgacagaggcgacagccttctatgaacaacagcgttcgcaggcctttgctgaggatgagagctggttccagcttgccgtagagattcaggccaacggtgcgctggcgggagatgtggggatccacttcttagatcacggcagacaagccgagctggggatgaccttttccccgacgtatcagcatcaggggtatgcccgggaagcgatgcgggcggtgatggccttactctttgaacagttagcccatcaccggctgatggcggtggttgatacccgcaataccggcgcgatcaaactcctggaagggctgggctttcgtcgcgaggcgcattaccggcagaatatcttttttaaaggcgagtggggcgatgagtacctgtacgcgctgttgcgtagcgaatatcagtga

SEQ ID NO: 264382 - DNA, 135 bp, Klebsiella pneumoniae; identical to SEQ ID NO: 239987

SEQ ID NO: 264383 - DNA, 447 bp, Klebsiella pneumoniae
atgtatacgtatttcaaaagtaaggatgagcttgttaaggctattgtactggaagaacagaactccgcgctgactgcccataatgcgacctatgcaggctcttattttgatcgcctttgtgcacaagtcacatcctgtattagcgagatcggttaccctatcacgcatcaactttgggttgaaattatggctgagtctgcgcgtaatccagaactgcgaaaaacgtatatctccagtgatgacatcatgcggaaaagcttcgcgcggctcatccaggagggtatcgctgccggagagtttcgccgtgatattaaccttgaagaaatcacgatcattatttttgcccttattgacggtttaatcgctcgtcaggcaataaacacgaccttctcattcaaggatgatctgccaatgttttttgacgttatggcaaaattgcttaaataa

SEQ ID NO: 264384 - DNA, 555 bp, Klebsiella pneumoniae
atgcccggtgacatgatattgcgtgttcagaatgcgctcgtgacgcagacgggcgaaatacgccccggactctgtactttccgtatcacccgctgtcaggaaaggctccgcgtagtggtaaatttcaccggcggtgctcccttcctgactgctgatactttccgtgctgtcctgcggcgtcagcgcttcccggtagttgtagtcccgggtggccacccttccgctcaccacgttatatgcagtctgaatatcccagatactctcctgtccgctgtcactcatcccggcctggttgcgcagtggcagcgtgacgccaaattcatactgctgctggctgtcctgaaaaatcaccacgtcctgttcaagacggctgtccatttcatagcgccagtaaatgcccacttccgccagcaggcgctggataaactcaagatcggtctcccgccactgagtgatgagttcccgggagggatattcgcgggagagccggaactcgaaatcaggcccttccagaccgtgtttacgcagtaccttttccacaacttcagtgactga

SEQ ID NO: 264385 - DNA, 828 bp, Klebsiella pneumoniae
atgaatgagccaatcactgagcagttatacaataaagttgtaaatttcgttaataaaatggatgggagtgtgcgctttgattatatatctaaggccttgcgcattcctcctgacactcttgatgaaattgtggacaggatgattgctgatggagtcgttgttaatacaggaacggtaggtgaatatttaccagtaaaacacgcatcttccaaaaacactgataaagataatcgatgctgtacatctcaaaaaaacaatgatagtagtggactaaaatttcttgttgggagagtagcattagttatagccataatattttttattataacctgcttttatgcttacagagcaccgatatcgtttgtttttctaatcccagccataatggctgcatttgtttttacaaaccaaaatcatggtggagaaggtttcctagggttgagttcaatctctgcatgtttaatctttttgttcctcactaatgcgcagacaccaatatttggagaagcatatgaattaagaaagcagagggatgaaatgaaaaatgaagttactaggaaatcaaaggaagaagatcagcaacagctaaatgatatccttaacgccagggagcatataaaagggatgctaaaagacccctcctcagctaaattttctggtgaattcattggaaaaaatgatgctatctgtggccatatcaacgctaaaaatagttttggtggttacactggggagtctcgttatatattttctgtcaatttttctgcaatagatgaaggcaccacttcctttaataaggagtgggagagacagtgttatcttaattga

SEQ ID NO: 264386 - DNA, 1011 bp, Klebsiella pneumoniae
atgacccgactggttatgtctgtcgccgcaggcgcaggtaatctgcaggacgcggcaaagttcgctgcagaggaactgaatgatcagtcggtatcgatggccatctccacggcggcggcatccggtggcgtacttattccgcagaacctgcacagtgaagtgatcgagctgctgagtgaccgcaccatcgtccgtaagctgggtgcccgttccattccgctgccgaatggtaatatagcgctgccacgcgtagccggtggtgcaacggctggctataccggtgaaaacaaagacgctaaaacatcagaaacacgcttcgatgacgtaaaattgacagcgaaaaccctgattgcgatggtgccgatttccaatgcgctgatcgggcgtgccggatttaacgtagagcagctggtcctgcaggatattctgacagctatctccgttcgtgaagataaagcttttatgcgtgatgatggtaccggcgatacgccgattggtatgaaagcgcgcgcaactcagtggaaccgtctgctgccgtgggaagctgatgcagcaatcaacatgaacacgattgacgagtatctggacaacatcattttgaaggcgatggacggtaacagcaacatgatcaacagtggctggggcatgtctaaccgtacctacatgaagttgttcggactgcgtgacggcaacgggaacaaagtttacccggaaattgctcagggattactcaaaggctacccgattcagcgtaccagcgctattcctgccaatctgggtaccggcggtaaggagtccgagatctactttgccgacttcaatgacgtggttattggtgaagacggcaatatgaaggtcgatttctcgaaagaggcctcttatatcgacgccgatggcaacctggtatcggcgttctcccgtaatcagtctcttatccgcgtggttactgaacacgatattggtttccgtcacccggaaggtctggtgctgggtactggcgttctgttctaa

SEQ ID NO: 264387 - DNA, 165 bp, Klebsiella pneumoniae; identical to SEQ ID NO: 97282

SEQ ID NO: 264388 - DNA, 126 bp, Klebsiella pneumoniae
atgttatataccctgtacggcgcggagctggtggccggggaaccgctctcaacggtccagccggcattggcctgcgggatcacatcctgcacccgaaccacggcctcgacgatgtcgtcgatatag

SEQ ID NO: 264389 - DNA, 651 bp, Klebsiella pneumoniae
atggatctgccgcgctacgggctggtgacctttacctggggcaacgtcagcgcaatcgaccggcagcgtgggctggtggtgattaagcccagcggcgtagcctacgagtcaatgaccgtcgatgatatggtggtggtcgatttgcagggcaacgtggtggaagggcgctggcgtccctcttctgataccgctacccaccttgcgttataccgccgttattccggccttggcggggtggtgcatacccactcgacgcacgctaccgcctgggcgcaggcggggctggcaatcccggcgctcggcaccacccacgcggactacttcttcggtgatatcccctgcacccgggcgctcagcgcacaggaggtggaagaggcctatgagctgaacaccgggaaggtgattatcgaaacgctgggcgaggccaacccgttacatacgccgggaattgtggtgtatcagcacggacccttctcctgggggaaagatgcccacgaggcggtgcacaacgcggtggtgatggaagaagtggcgcgaatggcgtggatcgcccgcggcattaatccgcagctacagcccatcgacagctggctaatggagaaacattttctgcgtaaacacgggcctgacgcctactacgggcagaagtaa

SEQ ID NO: 264390 - DNA, 213 bp, Klebsiella pneumoniae
atggtcgcccatacggcgccaccggagctacgcggcacggcgttcagtatgtttaatctgatgagtggcctggctctgttgctggccagcaccggcgcggggatactctgggaaagcttcggcgccgcatcgacgttttacgccggcgcggttatctgtctgctgacgctcatcggcatgcgctgtatgccatcggcctatcgtcagggttaa

SEQ ID NO: 264391 - DNA, 177 bp, Klebsiella pneumoniae
atgcgctggacttgcaagccagtacagcaggtaacttactgcggcagctacatgccgcgggaaaactccatcgtacccataacggctgccagtatgtctaccgggttgttgcaggcgttgaggttcccgatgttaccctgccgcaggctgcaacacaattatctgaagaatatgtga

SEQ ID NO: 264392 - DNA, 147 bp, Klebsiella pneumoniae
atgatgatctcatatcaggaacttgttcgcaccttccttaagactttttacctgacgataaattttaaaaaaagtaaaattattattagcgatataacaggaagtgactatcacctgcgtgattttcgtgacacctgcgcaccttaa

SEQ ID NO: 264393 - DNA, 177 bp, Klebsiella pneumoniae
atggctgataacgttggtatgtctgaacagatagccgtccaggcagccgaaactttcatcggtaacaatattgaagagattgctatctatgacggcgataaaatccgtgagggtctcgcaagactgatacgtacgtacaacgtccgtatcaatactatcgagataaatcccttatga

SEQ ID NO: 264394 - DNA, 339 bp, Klebsiella pneumoniae
  misc_feature (315)..(324): n is a, c, g, or t
atgtcagaaactaaattaaacgtcgtcgagttgcacaaaagctacggagagcacgaagtgctgaagggagtctccctgcaagccagggctggtgatgtgatcagcattatcggctcttccggctccggtaagagtaccttcctgcgctgtatcaattttcttgaaaaacccagcgaaggctccatcagcgtgaataacgagatgatccacctggtacgggacaaagacgggcaacttaaggtagcagataaaaatcagctacgccgtctgagaaccagcctgaccatggtatttcagcacttcaacctgtggagnnnnnnnnnntgtggagtgatctga

SEQ ID NO: 264395 - DNA, 360 bp, Klebsiella pneumoniae
atgccgggcatcctcgatatcaccggcgtcgatggcgtgccggacgaagagtatttcggtccgctgacctgcgtgacgcgctatgacgagttcgatgatgcgctgcgtctcgccaaccacactcgcttcgggctggctgtagggctggtgtcgccagaccgggcgctgttcgaccgcctgctgatggaagcgcgcggcggagtgggggcctcgggcaaccatcgcgccagcgccttctacgccgccgactactgcgcctggccgatggcctcgctggaaagcgcagcgctgacgctgcccgccaccttgccgccagggctcaaccttaatgatgcgcagagcgggaacagagaagcatga

SEQ ID NO: 264396 - DNA, 4965 bp, Klebsiella pneumoniae
  misc_feature (1447)..(1456): n is a, c, g, or t
  misc_feature (3863)..(3872): n is a, c, g, or t
atgatgtctcgctgggatatgcaggctgccccgcctgatgttcttgtcactaacgcctcaatgctaggggctatgctttcgcgcgaagtcgaagacggtatttttgatgctacgcgcgaatggttgatgaataacaacgatgcgtatttctatctggtattcgacgagctgcatttaatgcgcggttccgctggaaccgaaaccgcaatgttgattaagtcgctgattatcagacttgggcttgacgatccgaaacatcgctacaaactgcgtttgctggcgtcttccgcatcgctgccgatggatggagctgatggagaacaatcacggaaataccttcgggatctctttgcgccctttggcacttgccgcgattctctggatcccggtagcgataagcctgatttctggcgtaactgcgtcattcagggaaaaccttatataccgttgaagccagaaggaaaaatcgccgtgcggccttttgccgcattaatgcgggttgcccttgagaatcagggaaatgtcattcgccatttgaacatgacggacgcgctgagtcaggctttgtctgatgtcttcctggctctgagcgtgagtgcaaaaaatgatatgcaaggcattaaacaagcggcggaaaaagcggctgcgctattgaccaacgcttgtatagaagaagacggcgagttgccacgagcaatgcctcctggacttatcatagataagatttttctgaaggaagactcggataaaccagatgaattggaattagcattacgcgggttaatgctggtgcgcgcgctgccggaatgcggagtggtttgcgagaagaccgccaacgtcacaccagcttttcgcgtgcatacattcgtcagaaatattgaaggtttctttgcctccgtatcgccgggagagcaaaaggcgaaattcgcagatttttgcctagagcgagggctgtcgcacgcgccatcaacaccagccggaaaacgtggtcgccgtttgttcgaaatgttgtattgtgaagcgtgtggcgagttactgatcggggggcagaagggacagaatcacggtaaaatcatcgaattattaccttcagcgacaaatctggaaaatcttccagaacgccctggcgctgaatattacgatgatatgacactggatgagtttgcggttttctggcctgtcgatatagcttatcggccaccggtaggttgcgaaaaaggttgggatgtctgggaaaaagcggcgcttaatcctattacaggcatagtgaccattgggcaggaaacatcaacgacgaatactgacgtagttcgcgggtatatctatttccagaatcaggttaagcctaaaaaaggtgagccgccgaagaaaccttctgcgcaacctttctgctgccctagctgcggcattgactattccagccggcctgccagcaatcgttccagannnnnnnnnnccagaacacccattcgcgcatttcgtaccggtgtgacgaaatcatcccaactggtagcaacggagctatttgaattactgcatgcgatcggcgcggaagcaaagagtattgttttctcagacagtcgacaggatgcggcatcaatggcgctggaaatcgaacggctgcacttgcgcgatctgcgcagggaaatattggtcgcagcttccagggcgatgattaacgaggccgaaagcgggtatatttcagacaaggatattgaagaaaggaaagccaaagctaaacaatctggagactacgatgagtatgtcaaactacatgaccttcaaaaaagccaagtcggaattaccgagctttgtaaatatcgacgggtaaaaatagacaaattgctggagtctgaaggcgactcaatcggaagaatcacatctgagctagtcgggttgggaatatcaccctataaatatcgttctaattcagaggagcatgatagtgctgtttggcatgctaatttcattaaagaagaggaatcggttagattcagtgaaagacttccttctcatgaactaatgaaaataaagacgaaaatatcttacgatcaatctgaactgatagatgacgttatcttcgccaatacttttttcgcgctggaagaaacaggactggcatacccatgtatctcagataaagatgacatgccggaaattgatgcttggctaagggtgttttccggtgcctatcgtgttaaagagaataaatatttcgatgcaagccgtactcgtgattggtatgttgggaaagatgttgaaaaagagaaaattaagcgagtcgccagagttttattcggtgataacaactatcaagatggtttgacgcgtatcttaaagcagtttactgatttgaaacatccagcaggattaattagtatcggcaagttgtttcttaaagttgctaaacttggcgataattactggcaatgcggtaattgtgggcgaattcacttacatttagggttcaaacattgtacccggtgcgtaaacccgctcgacattgaacccagcggagttgtcgaagagctatgggaagaaaattttcttggtaagcgcattgtacgtggagagcgagacggagttaaacgtttccggctgaacgtcgaagaattgacgggacaaacggatgatttctccgatcgtctgcgtaagttcaagggtattttcgtcgataagatgagtgaacttgaaaagctagatgcggaaatagatatgcttgctgttaccacgacaatggaagttggaattgatatcggttcacttcagtctgtttatcaggcgaacatgccgcctcagcggtttaactaccagcagcgcgtcggccgagctgggcgacgcggtcaagctttttctttcgttatcacattttgtcgcggacgtactcatgatgcttactatttcgcccatcctcatgcgatcaccggtgatccgccgccgccgccctttctggcggtagatcacgacgccattccattaagacttatgcggaaagtatggcttagagctgcatttaatcttttacgcgaagaggatcataaaaacggaacaactttccccggagataaacttgtcccacctgatattcatggcgagtatgtttctacgcatgattactatcgtgacgatgaaacgaattggtctgaacgattactgggagcgttgaaagcaacacagaatatacatgatcgctttattgaagcagcaacgttcgatccagtgcaaagacaacgtctttattccgcattaaatgcggaaaaaataatctatgaaatcgctgaactgaacacttacgtccctgaagaagatatggggctagctcgtttcctggccgaacacggtaaactgccgatgtatggaatgccgactcgagtgcgcaacctttatttgggattgcgtaaaacaaaaggtctaaatgctcaagaagaatacgaatggtcgacgatggatcgagatcttgatctcgcagttttcgaatatgctcccggctctgtattgattaaggataagaaaaagcatgaggtaataggctttacaggcaattaccatgaaccacaggttcaaaataaccgaatatcggatctatcgacggtaggctcctggcaagagtcatgcagccatgtagcaatttgcccggcatgtggctccgccaagctggagttaaataagcctgacagcgacattaattgcgaggattgccgcactcctattagtcctgacgaattcaggctttatatcacgcccgccgcttttcgcacggatttcaaacccaaagacgatatagatagttttatccgcatgtcgttgaaaaccacggcgacagtgttgcatgaaggcgtcccaacaaaatgcgattctttcannnnnnnnnnaagaaaatgcgattctgtcactgtgcaacgcggcgaagtgaccatcctgcgcctcaacgatggtcctattaatggagaaaaggaaggtgaacgatttactgtcgacttggtaaccgatcaaaaagcaccgatgcccttttctacatattgtccgtcagttaaaggcgagcaggctatcgattcagaatggctggaatcgcacaataacccgcgctggcagtgtagcggcaagaaaaaaagttttgggcttgtatcaagcaaagagacggaatcgcttcatatcgaattaacaaaattcgatgctcgccttaatctggatatggtcgccagattcggtgaatacatgaatttacctacgcgcgcggcggctatcagcgcgacccagatattaacgcataaggcagcgctctatctagatgtttcgccagatgaatttgaaatgcttgaacccagactacatcttggcaaacccatattacaaatcgccgatgcattaatcaacggttcaggattatgcagacggcttgctgaaccagcatctgctgacggcttacctttgatagtcacattattacatgagattctcgaagagaataacaactggccgatagttgattttctaaaaaaagatcatccaactcaatgcaaaaccgcgtgttacaagtgcatacaacgctatggcaaccgtcgatatcacggcttgttggactggcgtttaggtatggcctatttacgggcgatggttatgcccgaattcgcatgcggcctgaacgccgccgactggaaccagccggaaatgaaaggctggcgagaaagagcgtttgagttagcggaagacgtcgaggcgctacgaccaggaacaatcaaattgtcaaaagaacattcattacctgttcttatcgaaatacaggatggaaaagagctttggcgagcggccgtaacgcatccattatggcaatggagggacgccgaacgtgattcccttattgactgttttggcctagctggcggggagtcgcagctacgattcattgatacgtttgaactggaaagacgaccattgcgtgcgcttgcgaaccttaaacggagttaa

SEQ ID NO: 264397 - DNA, 540 bp, Klebsiella pneumoniae
atgctcgatgccgcccggcagcggcgagaagtctttcgcgtatttcggctgaccgcccacgctgacggtaaacagcgtacggccgtggaaggcgttgcagaacgccagaatgcgggttttgttcggcacaccgctatcgcaggccactttccgcgccagtttcagcgcagcttcgttggcttccgcaccggagttgcagaagaacgccttgtcggcaaaggtggcgtcaatcagctgtttcgccagccgcaacactggctcgttggtgtagccattgcccagatgacagacgctggccgcctgggtttgcagagtcgccagcaactgaggatgagcatgcccgagtgcattcaccgcgataccgccagcgaaatcgatatactcttttccgttctggtcccatacacgggagccttgcccgcgtacgggaatgaacggggcaggggaatataccggaaccatatatctgtcaaaatcttcgcggtgtaccgcattcgcatgctgggacataagacctcctggcgattaaacgtgaagtga

SEQ ID NO: 264398 - DNA, 372 bp, Klebsiella pneumoniae
  misc_feature (314)..(323): n is a, c, g, or t
atgatggtaacgcaggacttccagcctgactgggtatctccacccggtgatacgattatagatctgatggatgaacacggaatttctgatgaggagttgagtaaaaagataggcttgtcccttgatcggggtcagcaacttcttgaagggaaactccgactgaatccgtccctggccgacaagcttgaagagctgttcagtgtgtcgacggacttctggatcaggcgcgaagatgcttatcgcaggcaaatagaacatatccagaaagttaacagcgactggctggaatcattgcccgtacgcgatatgatggnnnnnnnnnnatatgatggagtttggctggatcccgaaaaccacaacgcgggaaagtaa

SEQ ID NO: 264399 - DNA, 204 bp, Klebsiella pneumoniae
atgacaagtggcttggaaaactatatagacgtgatgagatctcaatgggtattgctcacagccttgaaagaggaggtcttcttcgaaaaaaaaatcaatggcctagttttgattgatagttacgccctgatcaataggttgggcttcggtgaagcccggagtgatttgtgcaatgggtgtttgcagaaaattgagaatgcttag

SEQ ID NO: 264400 - DNA, 1377 bp, Klebsiella pneumoniae
atgtcgaacactttaacttgctttaaagcatatgatatccgtgggaagttaggtgatgagctaaatgaagacatagcatatcgtattggccgtgcttacggagaataccttaaaccaaacaaaattgttctgggcggtgatgttcgtcttaccagtgagtctttgaaacttgctttagcaaatggattacaagatgctggtaccaatgtgcttgatatcggtttgagtgggactgaggaaatttattttgcaacgtcctatcttggtgtcgatgggggaatagaagtcacggctagtcataatcccatggattacaacggaatgaaactagttcgtgaagagtcaaaaccaatcagtggagataccggcttacgtgatatacaacgtcttgctgaagaaaacaactttcccttagttaacaaatctgctcgaggccactacgagaagatatctatacttgatgcatatatcgataagctgttatcttacgttaattttgaaaattttgaccgtccgattaaattagtgcttaattctggtaacggtgcagctggtcatgttattgatgcccttgagcaccgatttaaagaagctagtctccctatagaattaattaaagttcatcataatccagatggtaatttccctaacgggattcctaacccattattacctgagtgtcgccaagatactattgatgctgttgtgaaccactcggcagatattggcattgcctttgacggcgattttgacaggtgtttcttttttgatgaaaagggacagtttattgaaggatattatattgtagggcttttagctcagtcttttttagagaaaaacccaggttcaaggattattcatgatccgcgcctcagttggaacactattgatattgttaaagatttcggcggtgtacctgttatgtccaaaacaggtcatgccttcattaaagaaagaatgaggaaagaagacgctgtctatggcggtgaaatgagtgcgcatcattatttcagagactttgcctattgtgacagcggcatgataccttggttgttggttgctgagttgttatgcattaagtcacagtctcttagccagcttgtaggagaaaggatgaattcataccctgcatcaggagaaataaatagcgcgctgaaagatcctaagggcgcaataaatcgagttttagaaaagtatgcggaagatgcgatatcagttgactataccgatggaattagtatcgagtacacgaattggcgttttaatctacgtagttctaatacagaaccagttgttcgtttaaatgtagagtctcgtggtgattccgggttgatgatcaccaaaactaacgagatattgacattactgaggtcataa

SEQ ID NO: 264401 - DNA, 1419 bp, Klebsiella pneumoniae
atgatattacctgtaattatggctggtgggactggcagccgcttatggcccatgtcgagggaattatatccaaaacaatttttaaggttaggaagtgagttctcgatgcttcaggagacgatttttcgtcttgatgggcttgatgtttctgacccaatgctaatttgtaatgagcaacatcgattcttggctgcggaacaattaaggcagataaacaaaaatactaataatattattttagaacctgttggacgcaatactgcacccgcgattgctctggcagcattgagtgctctcaaaaacaatgatgatccattgttgcttgtgcttgctgctgaccatgtaattgaagatgtacaatcgtttcataaagctgttaaagatgcagttgcttacgcagaaaaaggaaaactagttacttttggtatcgtagcaacaggccctgagacgggttacggttatattcatcgaggaaaacttcaatccgatgacgcggtttcttatagtgttaagagttttgtggaaaaaccaaatctcgaaacagcaattaaatatattgaaagtggtgaatattattggaatagtggaatgtttcttttcaaagccagccaatacttgcaagaattatcaaaattccgacctgatattcttgaggcttgtgaaaaatcgatagcttcaatcagttatgatgctatcgctgattttattagaatcaatcaagatgcattcctctcatgtcctgatgaatcaattgactatgctgttatggagaaaactgaagaagccgtagttatccctcttgacgctggttggaatgatgttgggtcatggtctgcattgtgggatgtacaagagaaggatcaaaatggaaacttacttacaggggatgtattcattcataattcagctaattgctatattaatacggacgaaacatttgtggcagcaatcggtgtggaaaatctggtgattgttaacacaaaagatgcagttctagtaattgataaatctaaagtacaagatgtaaaaaaagctgtcgaatacttaaaattaaataaaagacgcgaatatcgtttacatcgcgagtcataccgtccatggggacatcacgacaagatcgtaaatcaacctcgctatcatattaacagactaactgtgaaacccggggggaaattttcattacagaaacatcttcatcgagccgagcattgggtagtgctgtcaggtactgcagaagtcaccttagaagataaaaaatttcttctcactgagaatcaatcaacatttataccagtcggtgcaactcatatgttagaaaatccaggcaagattcctctggagctacttgaaattgagtctggttcgtatctcggagaagatgatattgttcgtttgaaagattattatggtcaatgctaa

SEQ ID NO: 264402 - DNA, 648 bp, Klebsiella pneumoniae
gtgagtgaattttcaaaggcagaaattagtgagtactataaaatttcacgagacaatatttttgtcattcacaatgctgttaatgaaaacttcagatataccggtagaatcaaaacgggtgggtatatactagctgtttcatcgccagcttatcataaaaactttcatggattaattgaagcttttacaaaaagtaatattaaaactaagttaaaaatcatcggtgaagcctcagggaattttcaagtcacagaaagaagtaacattgatagcagagtagaattcttaggaagagtcgacgataaatcacttattgaactataccagaacgccgacttatttgtctttccttcattctatgaaggctttggaatcccacctctagaggctcaatcttgtggttgtccagttgtttcttccaatagagcatctctacctgaagtattagaacaaagtgtaatttacttcaatcctgaaaatgaagatgaaataatattggctattacaaaggtattagaaaattcagatacagctgatgaattaaccgagcgtgggcttaaaaatgttaagcgtttctcatggcaaaaatccgctactgatttaatcaaagcaataatgttagttaataagaactcaatcaattcttag

SEQ ID NO: 264403 - DNA, 291 bp, Klebsiella pneumoniae
atgccggacaaagctagcatcattgatgcattcttcatttttgctcagcgtgagcagctgcgtgaagctgaagcgttgataaaagaagaaaatcttaatgaagaggcagcgaagcgctatatccgtacatcgttaaaacgcgaatatgccaccgaaaatggtactgagttaaacgagactttaccaaagcttagtccgttaaaccctcagtacaaaacgaaaaaacaaaccgtttttcagaaaattggtgagtttattgagaagtttaaaggggtgggtggacaaatttag

SEQ ID NO: 264404 - DNA, 2742 bp, Klebsiella pneumoniae
  misc_feature (2730)..(2739): n is a, c, g, or t
ttggacaaatacaacccggactggaagattaccgagagctaccagagcgaaggtgatctggagcgtgagctgattcaggatttagttaaccagggctatgaatacctgccaaccctgaacaacaccaaggctatgctcgccaatgtcagggaacagttgcaaagccttaacaatgtggagttcctggaggctgaatggcatcgctttgtagaaacctggatggacaagcccagcgatggcgttgtcgaaaaggcccgcaaaattcatgatgattatgttcatgatttcgtcttcgacgatggccgtattcagaatatctatctgctggatagaaaaaacgtccttcgcaataaagtgcaggtcatcaagcagtttgaacaagcagccacgcatgccaatcgctacgatgtcaccattctggtcaatggcctgccgctggtgcaaattgaattgaaaaaacgcggtgtcgctatacgtgaagccttcaatcagatacaccgttacagcaaggaaagctttaacagtgacaattctctgtttaagtacctgcaactgtttgttatatccaacggcaccgatacccgttactttgccaataccaccaagcgggataaaaacagttttgatttctccatgaactgggcgaagtccgacaacacgttgattaaagacctgaaggacttcaccgccacgttcttccagaagcataccctgctcaatgtgctgtttaactacagcgtgtttgacagtagccagacgctgctggtaatgcgcccctatcagattgctgccaccgagcgaatcttatggaaaattaacagtgcctttaccgcgaagaactggtccaagccagaaagtggggggtttatctggcacaccaccggatcgggcaaaaccctgaccagctttaaggccgcacgtctggcaacggaactgagctttattgacaaagttttctttgtggtcgacaggaaagacctcgattaccagaccataaaggagtaccagcgtttctcgccggacagcgtcaatggttctgacaatactgcaggccttaaaaggaatctggataaagacgataataaaattatcgtcacgactattcagaaactgaataacctgatgaaggcggaagcggacttgtccgtctatcagcagcaggtggtgtttatttttgatgaatgtcaccgtagtcagtttggtgaagcacagaagaacttaaaaaagaaattcaaacggtattaccagttcggttttaccggcacgccaattttcccgcaaaacgcattagggtcggaaacgaccgccagcgtttttggccgtgagttacattcttacgtgattaccgatgccattcgtgatgaaaaggtgctgaagtttaaggtggactataacgatgtccgcccgcagtttaaggcgctggaaaccgaaaccgacgagaaaaaactcagtgccgcggaaaatcagcaggcttttcttcacccgctgcgcatccaggaaatcacacagtacatactgaacaacttccgccagaaaacacatcgcactttccctggtgccagaggttttaatgccatgctggcagtaagtagcgtggatgcggcaaaagcgtattacgcgacgtttaaagagctacagaaagaggtggctaataaatcagccagctataaaccgttgcgggtggcaactatcttctcttttgcggctaatgaagaacaaagtgctatcggtgacattactgatgaaagctttgatactagtgcaatgaatagcagcgccaaagagtttctggatgcagccattgatgattataacgctcactttaaaaccaatttcagcactgacagcaacggctttcaaaactattaccgtgatttggccctgcgagttaaaaatcaggacatcgacctgctcattgtggtgggaatgtttttaaccggttttgacgctccgacgctgaacaccctgttcgtcgataaaaacctgcgttatcacggcttgatgcaggcattctcccgcaccaaccgtatctttgatgccaccaagaccttcggcaatatagtgacgttcagggatcttgaacgcgcaaccattgatgctattacgctgtttggtgataagaacaccaaaaatgtggtgctggagaaaagctacaaagagtacatggagggctttactgatatcgtgacaggtgaggccaagcgcggctttatggatattgtgacgaccttggaacaccagttccctgatccggctagcattgatagcgagaaggggaaaaaagccttcgttaaactgtttggtgaatacctgcgggctgaaaatatcctgcaaaactacgacgaatttgccatgctgaaagatctgcaaaaagtcgatatcagcgattccgatgccgtgaaaaccttcaagacagcgcattatcttgacgatgaaaagtttgccgaattacagaccattcgtctccccacagaacgtaagattcaggactatcgttcagcctacaatgatatccgtgactggcagcgtcgcgagaaagtggctaatgacaaggataagtcaaccactgactgggatgatgtcgtgtttgaaatcgacctgttgaaatctcaggaaattaacctggattatattcttggtctgatttttgaacataacaggcagaagaaaggtaaagaggcattgactgaagaggtcagacggttaattcgctcaagtctaggtaatagnnnnnnnnnntaa

SEQ ID NO: 264405 - DNA, 381 bp, Klebsiella pneumoniae
  misc_feature (364)..(373): n is a, c, g, or t
atgaatatcaaaactgctttaattgcggtggctgtctcctcttgtatgttaacccctaccctgggccaggccagtgaacattcttctgcattcaccccggagcaggaaaaaagaattggtgaaattgcagcagattatatgcgtgtgcatcctgatattcttattcagatgagcgaaaagctgcaggcagaacagcaggaaagggaaagtcgcgagttgaaatcagctgcgctggcacaacaagccagaattctgtctgataaaaacatcccatcatggggacccgctgaagggacggtcatggtcgtcgagttcttcgactatcagtgcatctggtgcagcagactggcaccagaactggaannnnnnnnnnaaaagtga

SEQ ID NO: 264406 - DNA, 438 bp, Klebsiella pneumoniae
  misc_feature (16)..(25): n is a, c, g, or t
atgtttatgcgatcgnnnnnnnnnngtgacaacgagcgcgccgccgagctttccggcgtgaaagtgaagcaaattaaagtgctggtctacacgctgtccggtttttgcgccgccattgccgggatcgtggtctccgcgcagctgctggccagccatccggctaacggtaccgcttttgagatgaatgctatcgccgccgtcgtactgggcggaacatcgctggccggcggccggggaaccattctgggtacgctgattggtgcgtttgtcatcggttttctcgccgacgggctggtgatgatgggggtgagcgagttctggcagatggtcatcaaagggatcgtgattattgtggcggtcattatcgatcagatgcaaaaccggatgcagcagaaagcggcggtggtcgcccagaaagcggtcatggagaataagtaa

SEQ ID NO: 264407 - DNA, 306 bp, Klebsiella pneumoniae
atgaccggagaatgcctgtgtggaaagaagactcatccccccatcctgcttttccggatcaacatcatcaagagctatccaaatagagaaggctctgtcttcaggatagatatatttgaaactggtcacaccgatatgccagtcgaaaccaacagaattgctgtccgtttcaaaaattatcccatcagtgaatacacaatcttcataaccaagttttttaacaagatcggcaaacttttctgtgcgtataaaggacagaattttttcatcttcgattgctacattatatgtatttcttttgaatga

SEQ ID NO: 264408 - DNA, 561 bp, Klebsiella pneumoniae
  misc_feature (490)..(499): n is a, c, g, or t
atgcagcgaagtattcgctcgatcaacagtaacctggtgatgggcgaaagttcatcgctctcaaccatcttcgacagcgtgccgtttaccggtattcagctggccaccgataccacgatgttgccggaaagtatgcgcggctatgcgccgattattcgcggtatcgccaaaaccaacgcccgcgtcgtcattaaacagaacggctaccaggtttaccagacctacgtggcacccggggcatttgaaatcaccgatatgtacccgagcggcggtagcggcgacctttacgtcagcgtggaagagtccgacggatccaagcaagaatttgttgtgccgttcgccaccctaccggtcatggtgcgtgaaaatcaactggagtatgagattacttccggtaaatatcgtccttacgatggtggagtcgatgaaacgccatttactcaggccaccgcgacctatggcgtctccagcagcctgacgctttatggcnnnnnnnnnnctttatggcggtatgcaggcggcctcgcgctaccaggcgctgtcgacgggcctcggctataa

SEQ ID NO: 264409 - DNA, 1035 bp, Klebsiella pneumoniae
atgaaaatgacacggctttatcctctggccttggggggattattgctccccgccattgctaatgcccagacttcacagcaagacgaaagcacgctggtggttaccgccagtaaacaatcttcccgctcggcatcagccaacaacgtctcgtctactgttgtcagcacgccggaattaagcgacgccggcgtcaccgccagcgacaaactccccagagtcttgcccgggctcaatattgaaaatagcggcaacatgcttttttcgacgatctcgctacgcggcgtctcttcagcgcaggacttctataaccccgccgtcaccctgtatgtcgatggcgtccctcagctttccaccaacaccatccaggcgcttaccgatgtgcaaagcgtggagttgctgcgaggcccacagggaacgttatatggcaaaagcgctcagggcgggatcatcaacatcgtcacccagcagccggacagcacgccgcgcggctatattgaaggcggcgtcagtagccgcgacagttatcgaagtaagttcaacctgagcggccccattcaggatggcctgctgtacggcagcgtcaccctgttacgccaggttgatgacggcgacatgattaaccccgcgacgggaagcgatgacttaggcggcacccgcgccagcatagggaatgtgaaactgcgtctggcgccggacgatcagccctgggaaatgggctttgccgcctcacgcgaatgtacccgcgccacccaggacgcctatgtgggatggaatgatattaagggccgtaagctgtcgatcagcgatggttcaccagacccgtacatgcggcgctgcactgacagccagaccctgagtgggaaatacaccaccgatgactgggttttcaacctgatcagcgcctggcagcagcagcattattcgcgcaccttcccttccggttcgttaatcgtcaatatgcctcagcgctggaatcaggatgtgcaggagctgcgcgccgcaacccgcaaccctgggcgatgcgcgtaccgttga

SEQ ID NO: 264410 - DNA, 558 bp, Klebsiella pneumoniae
atggacaaacagtatccggtacgccagtgggcgcacggcgccgatctcgtcgtcagtcagctggaagctcagggggtacgccaggtgttcggcatccccggcgccaaaatcgacaaggtcttcgattcactgctggattcctccattcgcattattccggtacgccacgaagccaacgccgcatttatggccgccgccgtcggacgtattaccggcaaagcgggcgtggcgctggtcacctccggtccgggttgttctaacctgatcaccggcatggccaccgcgaacagcgaaggcgacccggtggtggccctgggcggcgcggtaaaacgcgccgataaagccaaacaggtccatcagagtatggatacggtggcgatgttcagcccggtcaccaaatacgccgtcgaggtgacggcgccggatgcgctggcggaagtggtctccaacgccttccgcgccgccgagcagggccggccgggcagcgcgttcgttagagaccagccatattccagtcaccagcacctatcaggccgccggagcggtgaatcaggataa

SEQ ID NO: 264411 - DNA, 708 bp, Klebsiella pneumoniae
atgggtgacgtggctgcgtacagttccgctgagaagctgagctatcgccttttaggcgatgctggctgggaagcgataacgctttatgatggtgaaaaagaggtatggcaccgggatttgcacgcggaaatgggccgttctcagcggcagttccgtgtacgcctgagtggcgctcgtattaaagaccgctatcgtggtgcgtactggacaggacatattgatgtcatcgggacgcctatcaatggcttctccctgaccggcgctgaccaccctgaacagacagtatggcgcgagagtcatacgcagattgggttgcggacggataccaatggagacagcgacacggtgacagtcagcacgggtgggctgaatggggcaacggtacgcgtgcatcttgagatctgcagctatatcaaagtgggcgatccgcttacgcctcaacctcatacatgggcccccgtttttgatgctgagattgatggcaaagcccttctgttatcaggcaaagagaccttcacgctagcgggcactgagctgcaggttgagattgagctggtgacagaacagccgctgccacgtgacctccggggtgatttacttctttcagaaatcaatctgcccgaaaagtctgaacatgctctgttcatcagtgcgagacagaaagaccagtcgcgtatctggacctcggctcttttccttacgcgttag

SEQ ID NO: 264412 - DNA, 237 bp, Klebsiella pneumoniae
atgatccccactcgccagctgcatgcgatttgcacctggtgtatccgcaatcaataccgcagcggtaacgggtgcgactatgccggcacccggtattttgacaggaacaatcagccagttgatgacccgtcgcaggatgtctgcaacggaacgctcacggcctgcaaattacgtcatggtgagaatagcgaactgccgtttggcgggttccccggcacttcattaatcaggagctga

SEQ ID NO: 264413 - DNA, 834 bp, Klebsiella pneumoniae
gtgaaaagcgcagatctgctgttcgggcgggcaaggccactggatgaaaccgccgcgggccgggcagccctgcagcagtccggtctggcacagggaagttcaccgggaaaattcatttctccggggaaaaagtcccctcagccgcatgtggcgctgccggcatttgataaaaacgggaaagccgccggtatctggctcagcccgctgaccgatcgggacggacggctggaggctatcggcggagagggacgaattatgggcaatgaagacgcccggttcgtggcgctgcagaacagccgcaacggtgaaagcctgctggccgggaatatgggggagggcgtcagaatggcccgcgacaatcccgataccggggtggtggtgcggctggccggtgatgaccgcccctggaaccccggggccatgaccggcgggcgggtatgggctgaaccggcgccggtggctccggtaccgcaggccggggctgacattatcctcccgccagaggtactggcacagcgggcggcagaagaacagcagcgccgggaaatggaaaaacaggcggaacagactgcccgggaagtggccggggaggcgcgtaaagccggcgagccggcggaccgggtgaaagaggttatcggggacgtcattcgcggactggagcgtgaccggccgggcacggagaaaacgacgctaccggatgatcctcagttccggcggcaggaggcggcgattcagcaggtggcctcagaaagtctgcagcgtgagcgtctgcaggctgtggagcgggacatggttcgtgacctgaaccgcgagaaaaccctcgggggcgactga

SEQ ID NO: 264414 - DNA, 885 bp, Klebsiella pneumoniae
atggtgcgcgctcatctccccgccgtagatggcgtcttcctggcgcatccgctccttgatgaacgcatgccccgtcttcgacatcaccggctggccgccgctgcgggtcacgatgtccaccgtgttccatgtcagacgcgggtcgtgaatgattttcgcccccggctgtttctgcaggaacgcctccgccagcaggccgacaatgtagtacccctcgataaacgacgcctcgtcatcgaacaggaagcagcggtcgaagtcgccgtcaaaggcgatccccatgtccgcctgatgcgcacgcaccgcgtcggcggtgtcctggcggcactccggcagcagcgggttcgggataccgttcgggaaatggccgtccggctggtgatgcaccttgataaaggtcaccggcgccccggccgccgcgaagcgtttctccacttcatcaatcacgtgccccgccgccccgttgccggagttcaccaccagcttcagcggacgggtaaagttcgccaggtccacgtagcccatcaggtggtcgacgtactccttcagcaccgaaatctggcgcaccagcttcatgccgttgtagttcatcgggttatggctggccgtcacctcgatgccgccgtccaccccgaggtggaaagtggcgaagtaaatctcttccgtgccgctcaggccgatatccagcacgtcggtgccggcgtccatcagcccgcgggccagcgccagcttcagcgactcgctggtgaggcgcacatcgccccccaccactatcttcccgggtttcagaaattcgccataggcgcggccgatacggtaggcgatgtcctcgttcagctcctcgcccagttcaccacggatgtcataagccttaaagcatgttaa

SEQ ID NO: 264415 - DNA, 1476 bp, Klebsiella pneumoniae
atgaaaggaagcgtagccaagacgggtaagtcttttaaaaatagagttgattacatattaaaagatgatcacgatttcatatgtagcaacatggcaagtgattataataatgttagtgatttaactgatgagttcaaagctgtaagcagctttagacaagatataaaaaaaccagtgtttcatgcgtttttatctcttccaaaagatgagaagctcacagatgaaaaatggcaagagatagcaaaagactatttgaaagaaatgaatatcgatatagaaaaacatcaatatatttgtgtgcgtcataacgatacagataaagaccatattcatattgtagcaaatagggttgggctggatggttctgtatggcatggtcagcactcagcatttaatacaatagcagcttgtgaacgtttagaagtaaagcacggcttaatcatcacacaaagtctcaaaggccaaaaatcagacgtatcagcaccaaccaaagctgagatagagcaagccctccgcactggtgaaaaaccagctcgtatcgtgctacagaacgcactacaagcagctatgacaggtaagcctgatttgtctacgttcgtagaacgtctgcaggccgtaggcattgaaccaaggttcaatgttgccagcactggcaacgtggcgggggtttcattcagtgttggagatgtggcattcaagggatctcagttgggtaaaaaatacagttggaacacaattaaatcaaaggtgaaatatgacaaaaatagagatgatgaactcattaggagcttctcagcaagaaaagatgatgaaccaaatagtgttggacgatcatttgttgaaccaaatatcaatgacagtagaacctctgacagaatcaatgatgatattatcggagtcggtcagtacggcattaaatcagacgcaacagacactaaccagagtgaacaactcattagaagcaacaacaaccgctttaaactcagcgaaaaatataatagaccagcaagccataaagttagaagaacaacacagaaagctacacaaatactcaacagagttaaaaaacaacacaataaagaaccaatcaaaacttatactaaaagtagctttaatcgtgggagcaatacatttagcggcggttctatcagtaggatacttgatcatgcagaaacagccaacgcagccacgaataactttagactcaaaggccgtggcaacatcaatagtagagcaactaagatcgaagagataagagaaaggttaggtataaaaaaacctattattcagccaaagaataaagaaaaaatagttaaagaagaaataaagaaaaagcctttaggtttgaatatggatgaaaatagatttaaatcgaagttaaaagaagctcttaaaaaagaaaaaccaaaaaatgaaacaacacaacagcaggaagacgatcagcatttaaaaccacgcggttttaaaccaagataa

SEQ ID NO: 264416 - DNA, 1377 bp, Klebsiella pneumoniae
atgggcgttaagggatactatttattcagaggtgataagacacgatgtggtggcgttatcactgaaggatggagcgaccaccagcattttgacagagatatgtcctgtgaagggcataaagtaacttgtggtaaacatccagggctttaccgtatttgtggtgggcttgatgatgacatacacggcaaaaggattgccggaacactacacagttatagctcctgcccctgtaaatccaaattcatcaattcaaactgggatgatgattacgaacttggtggagaagcaacggtaacgcacactgatctacctcacctcgtcaagatgcctgaacttccagggccgattgagtcagaaccggaacagaacgcccaaacagcaaaaaagaaaacaggtatagatgcaggttttgccgttatcacttatggcggtactacggaagcgtggcaacgcctgttattcactgaaaacccaccagcaggggcaaaagagctattctctattctgaacggcccggatgaaagatacaaagctggttcgattatgcttctggttgatccagagaaacaggacgacgagcagattgcccacatgaaagccgcgaaagcgcgagttgatgcggcgttagaaccgctgacaatccaggaagctaacttgctgcacaaacactacgcaaccatagctaatttcaccagctacgctgatacaggaattggccttgctgctgatcctgttggaaaatactttgagagtatcgaaaaaacactcagagagattcaagaaacgtataagaatacctacataacgagaggctcgttgataggagaacaattttacgttcaacgtagccagttgtttaaagagcttgaatcaatacttaaagtcagattcctgaataaggctatgaaattcggagagtatacaaaaataaaaaaagcacttggcctatccagcagttctattacccacaaatggaatgaaacggggatcagtgacattgaaggctatgctacccacatcgaacgggcagctaaatacgtaaaagcaatgcgttacactggttatttaggcattggttttagcggactgcattcactaaatgaaataaatgaggcttgttctgttggtcgcgaagctgaatgtaccaagaaaaagtatactgagattggtagctttgctgtaggtacgggggttggtgttgctggtggctatttagcaatacctctttgtatcgctatcggtgttggtactgctggtgtcggagggcttgcttgctctgtgattgctggggctggtttaggctatgtcggtagtagtgcaggtggcgcattcggtgaatggggtggagagcagctgtatgaaactttcggtaattaa

SEQ ID NO: 264417 - DNA, 756 bp, Klebsiella pneumoniae
gtggacagtgacaggcagccgcgcggcgaaggctttgagctgagaaccgacagctggggagctatccgggcacagaaagggatatttatcagcgcggacggacaggcgcaggctcaggggcaggtgctggcgatggagccggcggtcagcaatctggccgaagcccgggagcagatgatgtccatctccggaaagaatgcagacgtcagcgtggtgaaaaatctgttcatcggggtgggcagtgcgctgagcgtgtttgtgcgaaagcttgggatcaggctgatagcgaaccagggaccggtacagatgcaggcgcagaatgacctgatggcgttgcttgcccggaaggaaatcagcattgtcagcacggaagacagtatcgaaattattgcgaaaaaacgggtcacgataaacggcgggggaagttatatcacgctcaatgccagtggcattgaatcagcgacggcaggtgagtacagaacaagggccgggtattacgtcaggcgggaaaaagcgcagcataagcctgacattgcacctttagctaatgcgataaatgacggcagccataatattcgctacctgtgtacagatgataatggggtgccgatgatgaatactccttacagggcctttctggctgatggctcggtattagagggtgtcagtgatggcgaggggtatacgaagttgtttacttctgcacagatacaggatgttctgctgcatatgataccggaggccatcaatgcctaa

SEQ ID NO: 264418 - DNA, 198 bp, Klebsiella pneumoniae
atgttcgatttcattcttttgggttgccagaaaagtagccatttccgcatcaagaacatctcgacgttgctggcgttcggcggaaaattcgtcttcgagcgcttttttttgttcagcgcgcaacgtcgcttgctcttcttcagcgatacgttgtatctgacgttcgagcaagtcagcgattctgccgtcactgagtag

SEQ ID NO: 264419 - DNA, 1236 bp, Klebsiella pneumoniae
  misc_feature (74)..(83): n is a, c, g, or t
atgttttgtgcagatggcgagcatggtgcagaagtctattgcggcgccacgactgaaaaacaggcatggaaggnnnnnnnnnngcctgtgatcggtgacccgggggatggtgattcgccatcatgcgccatcattgatgaatatcacgaacatactactgatgcgctttacactaccatgaccaccggtatgggggctcgtgaacaaccgatgacactgatcatcaccaccgccggctatgacattacatccccttgctatgaaaagcgtactcaggttgtcgagatcctgcggagaacccgtaatggcgaggaaaatgaaaccatatttgggctgatttatggccttgatgacgatgatgactggacgactcctgaggcattaatcaaggcaaaccccaactatggcatttcggtaaaagcagattttctccgggctaaacaattattgggtatgtcgacgcccgggcagacaaacaagattctgaccaagcatttcaatcgctgggtaagcgcaaaatcagcttattacgacctgagaaaatggatggatgcagccgataaaaaccttaagttgtcagattttgaaggggaagaatgctggctgggtatagatctggcctcgaaagttgacctcaatgccgtggttccagtttttcgtcgtgaaatagacggaataacacatttttactgtgtttctcctctgttctgggcaccagaagaaaccatttactcgcaggagaccgcgctgaaaagtaccgcagaacgttatcagtcctttgtccggcagggtaagttgatcccgaccgatggtggcgaagttgattacaggctgatatttgaaacgatcctgaagctgcggaataccgtaaaaattgcccaatgccccattgatccttatggcgcgacttcattacgtcacatgcttgaggaagaggggcttgagcctgtcgagataagacaaaattttacccatatgagtgatcctatgagagagattgaggctgcgctcatctcggggagattccatcatgacggacaccctgtcatgaactggtgtatttccaatatcgtcggccagtaccttcccggaagtgacgatattgtgcgtcccgggaaagaagggcggcagaacaagatagatggtgcggttggtttaatgatggggctggggcgcgccatgctcaacagttcagtgatgacatccgtatacgatgaggaagatatagcatgctaa

SEQ ID NO: 264420 - DNA, 1479 bp, Klebsiella pneumoniae
atgttagtaaataaagaaataaagaatggaaaaatcacagtaatattagatggttttgacgagctacttaatgaaagagaagatgagaaattccaatttgaaaagtctcaagccatgctcgaaactattggaaagatgttggaaaataatgcaaagattatattaacaacaaggaagactgcaattttacaaggtgatgattttgatgagtggattggtgagaactctacaaattttgaatttatgcggtatacacttaaggagccctcagcaaaaaactggttaagtcttgaaagatattcgatgcttaacaggctaaatattaatattaaaaacctttcaaatccagttttactgacttttttgaaattcattcctagcgaacaatttaatgaagtaattagcatgccggatgagattgttcacaaatattttactcttatattgtatcgtgaaaaagaaagacagaatttgaagcttgaggttaatgaacaatctgcgcttcttactcgattagcaagacatatgattaagcttaattataccaagacatcaaaggagtcattaataaactacatttcctatgatgagcttgaattaatcgaagagtgtcgaagtcgatatgaacatgatttgaggcctacatttgaagagatgatcgaaaaattgtcaaatcatgctttacttgataggtcaggtattgatgagaaaattgggtttgttaataactttgttttagggcattttgttggcactgatataataaatactgacgaagagtggcttgctgatagtatttttattgatgcagttattaacgcattttcctccagaaccttacaaaccagagagtttgtctggaatagattgaaagatagtctcatactactttcagatgaggaaaaggttgtatttgagcagactttacttgatagagtatcaggtggttacaagaactcacaattcaaagagataaattttgaatcaagtaatctattcattaatggtggtgtccattcatctttcttttatgattgtactttcattaactgttctattgatttggaatgttttaaaaacaacaccttcatttcttgctcattttataattgccatgtacatggtgattataactcaaatgagtttatatcacctgtcatggatgaatcatcgaggttatctttgtcatcatgtttgatgatggcctcaacgaaccagccagtggttacagaggaaaatcagttaaaagcatatgtacttgaaaaattctggcctattggtcgggaaacgattgtattcgcccacaggccgttgttcattttttacagaggaagtaattactccgcgcaagaaattagtaacactatagacgaattcaggaaggaaggcgttatcatttctgcgaaaagaaaaaactgggtaggtttagaattctctggacaaaatatgcaaatcatcaaagatattttggggcgctaa

SEQ ID NO: 264421 - DNA, 303 bp, Klebsiella pneumoniae
atgcagctctttagtcagcaccttcacttcgtcattggtgatatctttcccgccctggatgccgccgatataagcgcggccatcgtcggtgcaggaaaaacagacgctatagacgcgccggtcgccaagaaacagttgcagcatcagctccccttcctcctgaaacggcgaggccagcagcttaacgtcaagcttatcgccatttttcaagggaatagaaaacatctcgcggccaaaatccgcgacattgtagagctgcggcaggatatcagggtgaaacgttttctcgatgaaattcagtga

SEQ ID NO: 264422 - DNA, 363 bp, Klebsiella pneumoniae
  misc_feature (262)..(271): n is a, c, g, or t
atgccgatgatactggccttaataatcctgctcacgatgctcttgctgacgctaatgtggtccaccatccgtaagcaggagaatgtcatacgggaactcagtacaagagaaagctggctggagagagaggttgagcgtctcaggaccgataacgagaagctgtaccgctggttgagatacaacggtgaaaaggttatcgatgaaatgacttgtgaactcgatgcactgtccgccgttcgccagacgaacagggattcatacnnnnnnnnnncgccagcttttcctcttcgactgcctgtccctgatggtgtgggccgggatggagggcgccgaagactctacacgggaaaaggtccgcaataa

SEQ ID NO: 264423 - DNA, 360 bp, Klebsiella pneumoniae
  misc_feature (339)..(348): n is a, c, g, or t
atgaaaactaccctgataaagtctgttctgtttgcctccatgatggccgcatctggctcacttttcgccgccgataatggcctgatcgcaatcattaccccttcacatgataatcctttctttaaagccgaggctgacggcgcagcggcgaaagcaaaagaactgggttacagcaccctggtcgcctctcacgacgacgacgtcaacaaacaaaaccaactgattgaaacggctattgcgcggaaagccaaagccatcatccttgataatgctggcgcggatgctaccgtcggcccgctggaaaaagcaaaagcggcaggtgtgccggcatttttaatnnnnnnnnnnaagaagcggtga

SEQ ID NO: 264424 - DNA, 573 bp, Klebsiella pneumoniae
gtggcgcagatcgtctctaacaactatcagggcgcccagcttggcgcagaaaagtttgccagtctcctcaacggtaaaggcaagtatgtcgaactattaggtcgtcagtcagacactaacgccagcgtccgctcgcagggttatcacgatgtgctggacgactatccggaaatgaaaatggtcgcccagcagacggcgaactggagccagacggaggcctttacccgtatggaagccattctgcagacgaatccggatatcgtcggcgtgatttccggcaacgataccatggcgctgggggcggaagcggcgctgaaagccgcgggtaaaaacgacgtgattgttgtcggcttcgacggcagcgactacacgcgcgactcgatactcaagcagggcaacattaaggccacggttctccagcccggctggaagcaggcgcaaatggccgtggaacaggcggactttttcctgaagaacgggaaagcccagaaagaagagaagcagttgatggactgcatcctcatcgatagtggcaatgcgaaaaaactcaacatgttcaacctcagcgagtaa

SEQ ID NO: 264425 - DNA, 249 bp, Klebsiella pneumoniae
atgaataatgtaacccagtgggtcaaactgcaagtccagaggtcttactcgttcaaactgatgttgattgtcaggcacagatggcccgaaaaacagttgattgacacaatccattgcttcatcaggtttttcactaagtgtagcgactcgagtgatgtttttccttttaaactcgatgatattatcaatgcatctggtaccgtaaaaactgtcttctaccatcagcaaatgcaatttattcaaccgtga

SEQ ID NO: 264426 - DNA, 1032 bp, Klebsiella pneumoniae
  misc_feature (387)..(396): n is a, c, g, or t
  misc_feature (990)..(999): n is a, c, g, or t
gtggatgcgcgcacgacggcatcgttcctccacgacacgcagctgctgcagcgcgatggccagacacccgatttcagcaacaccctgttcctgctcgacgagagctcaatggtggggctggccgatatggcaaaagcccactccctcatcgtcgccggcggtggatgggcggtgtccagtggggataacgaccagctgcagcccatcgcgccgggccagccgttcaggttgatgcagcagcgcagcgccgccgacgttgccatcatgaaagagattgtgcgccaggtgcctgagctacgaccggcggtctacagcctgattgagcgggatgtgcaacgcgccctgaccaccattgagcaggtcacgccggagcaggtgccgagaaannnnnnnnnngcctgggcgccgggcagttctgtggtggaattcacgccgaagcaggaaaaggcgatacaaaaggcagtgagcgaggggaaaaccctgccggcaggtcagcccgcgacgctctacgaggcgctggtgaaggactataccggacggaccccggaggcacagtcgcagacgctggtgatcacccatctgaacaaggaccggcgggcgctgaacagtctgatccatgacgcacggcgggagaacggggaaaccggcaaagaggaaatcaccctgccggtgctggtcacgagtaacatccgtgacggtgaactgcgcaaattgtcgacctggacggctcacaaggaggcggtggcgctggttgataacgtataccaccgtatcagcaaggtggataaggctaatcagctgatcaccctgacagacagtgaaggaaaggagcgatatatctcaccccgggaggcatcggcagaaggcgtcacgctctatcgtcaggaaaagatcaccgtgtctcagggggaccgaatgcgcttcagcaaaagtgacccggagcgcggctatgtggccaacagtatctgggaggtgcagtctgtttcgggnnnnnnnnnncgctgtctgatggcaaactcacccgtacgctga

SEQ ID NO: 264427 - DNA, 1134 bp, Klebsiella pneumoniae
ttgttgacgctcggtcaggtgggccacgatcccggcgttaaacaggaagttatcgtaatcggttttgccgcctttgatggcgtcggcggagcgcgctttgccgttggcgatatcctgctgctgggcgtagccgacaaagtcgtcgacccggttttcggtccactggtagcgtaccccgccgctgacggtaaagatatcgttcagatcgtagctggactgcaggaatggcgcgacattggaaatactgtatcccgggtagcggccggttgtgtagatcgattcgttgtgcaacccgccggaggccatcgattgtggcagatcgaagaacatttggttggcattaaaggtctcatgatcggcgtcgagaccccaggtgagatcccaccccgccagcggttggctgttgagggtcagcttggccccatactgatcggtatcctgctgcgacgaggagaagctactgacctgacctttcgtgagcgtcgggaacggatagaaggtgagggactcatcgcgatagtacacctggctcaccagattctggccgaaaaagtcggcatcagagtactggaggctgatcagatggcgttcggtgccggggatacggtcggaattgagcccgtcggtggtatacgctttgccgccgctggtgaccgcggacatgttcttcccgagccacagaccgtagtcatcatcgccctggcttttataatactgggtgaccaactgcagctggcggttattatcgatctcaatcgtccccgtccccatcacgtcgaggcggtcagaatgctggagccccgtttgggtattatcgaggatcagcgcatcggtattgccgtcgtaccagccgccgaaacgctgataggctaccgacaagcggccggatgcgtggtctgttccgccgctgacggccgccgcgacgcgctcatcatgatcgttgctgttcgcaaaaccgctcttgctgcccacctcaagatcgacctgacgatcctgctgcccctttttggtaacgatgttgataagcccgccggtactgcccccgccgtacagcgaggtcgctccggagatcacttcgatatgttcgatgttgaatggatcgatggcgtcgagctggcggctgtcggtgcgtga

SEQ ID NO: 264428 - DNA, 261 bp, Klebsiella pneumoniae
atgaagcgtgccaaccaacgccagctgcgcccgcggaccggcggcctcaatcgccagcgcgacggtctgcggcgtaccggcggtctcgaggactacctggtcgaactgaatggattccagcgcctgctgaatcgcctggccgctcatctcgcgactgttgaacacatgggttgcgccgagggttttggccagctccagcttctgcggattgatatcgatcgccgtgacgctgttggcgcccagttcgcgggcgcactgtag

SEQ ID NO: 264429 - DNA, 630 bp, Klebsiella pneumoniae
atgcgcgaccatgatgaccgtccggccacgcatggccgccgcgagcgccttgataagcgccgcttcgttttccgggtcagcaaacgccgtcgcctcatcgagcaccaggatggggcgatcctgcaaaagcgcccgggcgatagtaatgcgctgccgctggccgccggagagaaataccccacgttccccgactcgtgtgttgtaaccttctggcagagcgctaataaaatcatgggcctgcgccactctggccgccgctattaccgcctccagcggcgtatccggcgcgcccagacgaatgttattggctatcgtgtcggcaaaaaggaagttgtcctgaaacacaaacgagagttgcttcatcagggtgtccgtctgcatatcacgcagatccacgccgccaatacggatatggcctttgtccgggtcggcgtaacgcagcagcaagcgcgccacggtgctttttccggcgccgcttggcccgaccagcgccacaatttgcccggcaggcacatgaaagctcacctcctgcaacgcggcgccagtacgcgcttgcggataatgaaagctcacctgctcaaaggtaatgctcgcctcttgcggctgccggtcagactgcggcagcgataa

SEQ ID NO: 264430 - DNA, 723 bp, Klebsiella pneumoniae
  misc_feature (595)..(604): n is a, c, g, or t
atgatggttattcgtcccgttgagtcccgcgatctgcctgcactgatggcactggccggcaaagccggtgtcggactcacttccctgccgcaaaatgaagatattctggccgggcgcatcactcgttctcaggaaacctggcagggcctgcgcccccgtggtgaacagggttacctgtttgtgctggaagacacagatagcggccgtgtcgtgggcatcagtgccctcgaagttgccgtggggttacacgaaccctggtacaacttccgggttgcgccacttgtgcacgccagcacctcactgaacgtgtacagttcgcatcaaacattatttctcagtaatgaccatacaggttgtacagaattatgcacgctgtatctcgacccggagtggcggcatagccataacggcaaattactctccaaagtacggtttctgtttcttgccgcgttccgcgactgcttcgcccagcgcgtagtggcggaaatgcgcggctacagtgacagcaacggacgctcaccgttctgggaggggctcggcaaccgattttttgccatggacttcgcccacgccgactacctgaccggtatcggcnnnnnnnnnncccggatactgttccggcccgccgactgctggagaccgaagggctgcgccaccgcggttacgtggacatctttgacggcggcgccacgcttgaggcggaactggacgaactgcgggtag

SEQ ID NO: 264431 - DNA, 291 bp, Klebsiella pneumoniae
gtggacatctttgacggcggcgccacgcttgaggcggaactggacgaactgcgggtagtaaaagaaagccgcaaagtcacggtgtcgaccaacgaagcgccagtatcgacacctgactccacgctgctggtcgccaatgatcgctacctcaactatcgcgcgacgttagcacccggccatttttctcccgaaggcgttctgtacctgacgccgtccacagcggatgcgctggaaatcaagacaggcgatcgcgttcgggtggtttccctcaatccgctggagaacctgtaa

SEQ ID NO: 264432 - DNA, 261 bp, Klebsiella pneumoniae
  misc_feature (64)..(72): n is a, c, g, or t
atgggcaaaaaaacgcgcgctctcgcccgcaccagccttaacacggagcaggtgcccagtgccnnnnnnnnngacagccggtcgcttatcgggcccataccagctgtacgtacgcaaaaccatcagaaatccggtgataatgagatcggcttcgccgacaattgcgtggccaacatcggcattactggcaaggagatatcaatagagactaaggtgaagactatcaggccgctcaaaatcaagttaaagataatcttttaa

SEQ ID NO: 264433 - DNA, 429 bp, Klebsiella pneumoniae
atggaaaaccgagttacacattttccagaccatcagcgcgacggctttctgcggctgctgcaacagggccgcctgaaccgccagtgtgcgttcagaagaaaggcgggtcagcaacgggacactgacggcgtccagcggatcgactttttcaggagcctgatcggtggatgcatccttctcctccattttttcatcggcgcgcagtactacgccacgctgcaccgtcacctcatgaccattccaggaaaccaccacaccggaggtctgcttatattcatccgtccatgcccggtgttttgcccggtgcgcgatggtctgctgttcttcccagacggcttccagagccccggccacgacgtcatcattcacgccggggttctcgccttcatacttagcttccagagcttccagctccgcaagacgttctga

SEQ ID NO: 264434 - DNA, 318 bp, Klebsiella pneumoniae
  misc_feature (286)..(295): n is a, c, g, or t
atgctgacccgtgaacaaatggcgatgcgcgtcgcccaggagctgcgcgacggcgactacgtcaacctcgggatcggtatcccgacgctggtggccaactacattcccgccggcattgaagtgatgctccagtcggagaacggcctgctggggatgggcgaatttcccgatgaggaaaccatcgacgccgacatgattaacgccggtaaacaaaccgtcaccgcgcaaaccggggcggcgatcttcgattccgcacagtcgttcgccatgatccgcggcggccacnnnnnnnnnngggcaacatcgcctcatggatga

SEQ ID NO: 264435 - DNA, 378 bp, Klebsiella pneumoniae; identical to SEQ ID NO: 210183

SEQ ID NO: 264436 - DNA, 153 bp, Klebsiella pneumoniae
atgattttgctgatgagtttatggctgattacaaccggcgctttgcgaaagcgccccggcatgactttgatgttcaccggccacttgaaactgacgatgacctggcagcgtttttcacatggcgggaaccgcgccgtgtttcaaaatccctga

SEQ ID NO: 264437 - DNA, 231 bp, Klebsiella pneumoniae; identical to SEQ ID NO: 222286

SEQ ID NO: 264438 - DNA, 525 bp, Klebsiella pneumoniae
atgcggaataatttttcgctcgttggtttgaaagcggacgatattgttacccgtccacgaattggtgtttcgttgtcactgccattagaaccgttcaaaaaacaacgttcggaagcaggcgaacagaccagcgatacagcgcggggtaaagacagtcgtcagactcatctcgcggagggtaaaaaatttaccgccaaaatacgtcttctggtgctgacaatgttgttgatgctgttaacggctatagcgatgctatttcaacatgcacctgtgcaaaataaacacaaaagcaccttcaggatgcttggtgataaggatggctatatcttcttcaaaatggcgagcgataaagtgacatttaaggaggtggtttcggcctataacaccctgacgctaccgctatgtcgccagaacggacattatctttattacctccgggagccgaacatgaatctttttttgcagtgcctgaatcctgttgaaacggcggtaccaaaatgcattaccatcaaagagcgttactaa

SEQ ID NO: 264439 - DNA, 654 bp, Klebsiella pneumoniae
atgagcgatgcggcgctggagaaggccaagggcattgcgcgcgggatgaacggcagcctgtcgctaggcattaccagttctgatgctttccatccgcaaatcttcacgctgctgcaccgttttcagctcgaccaccccggggtgaccctgcaccagatggaagacaatatggccaatctgatgaccgccctgagcgaggccgagctggatatcgccttcgtccgcctgccgtgcgagagcagtaaagcctttaatctgcggattatcgatgaggagccgatggttatcgcgctgccgcgcgataacccgctggcgacgcagccgaccctggccctggagcagctgcgcgacgtggcgccgatcctcttcccgcgggaggtggcccccgggctgtatgagctggtgtataacagttgcctgcgcgccgggatcgatatggagcgcgcctggcagtcgtcgcaaatttcgtcgtcgctgagcatggtcaatgctggcttcggcttcgcgctggttccgcagtcgatgacctgcatccagcagccgaacgtcagctatcacccgcttagcggggcgccgctgaagaccgatatcgccatcgcctggcggcgcttcgagcgctcgcgtacggtgaaacgctttctggcgatgttctga

SEQ ID NO: 264440 - DNA, 144 bp, Klebsiella pneumoniae
gtgtggccggagaaggcgattttcttcacgcaacgtttgctgtcgttatcgctattgatgttgatccagccggtggtgctgccctctttgatcccggcggggacgttcagcgtgtggctggcgccgcggctggccttaaagtag

SEQ ID NO: 264441 - DNA, 315 bp, Klebsiella pneumoniae
atgccgaaaatgggcctggcagacgcgccaaacgcgcacttcctcggtatgtacctcggcctgtggggcgtctttaccctgtttatgttctttggcaccctgaaggcagcccgcatgctgcagtttgtcttcctgagcctgaccgtactgttcgcgctgctggcgattggccatttggccgataacgaaggcattgtgaaggtagccggctgggtcggcctggtttgtggcgccagcgctatttacctggcgatgggtgaagtgctgaacgaacagttcggccgcaccgtgctgccgatcggcgaaccgcgctaa

SEQ ID NO: 264442 - DNA, 138 bp, Klebsiella pneumoniae
atgctgatgggggtgtcgccgatggcgccggcctggtatgtgctggccctgtcgctgatggggctaggattaggtatctggctgcgtcaggagctgacggcgccgacggggatgccggaaggggagctgcagcgttaa

SEQ ID NO: 264443 - DNA, 435 bp, Klebsiella pneumoniae
atgctgaaggaaatcggctacctgttctgcggagatctctggcgagatggcgcaacagggcaacgttcccgcaagcgtgtgccacgcctgcggcagtgccgggttccgatgatcggtaacgcaaaaagcctcgccctgaggaacaacgtatgccgccagcgttttttctttttcgccgatcgccagaacggttgcttgtttcacccccgccagctggctgagcgcgctttcgatttcgcccagctcgatgcgatatcctccgactttgacctgcttgtcgcgacgaccgaggaactcgattgtgccatctggccagtagcagccgagatcgccggtgcgataccagcgctcgtccgggagcgtcaaaaattgctgctcgctacgcaggggatcgttgaaatagccttccgcgaccccaatgccgccaatccataa

SEQ ID NO: 264444 - DNA, 303 bp, Klebsiella pneumoniae
  misc_feature (209)..(218): n is a, c, g, or t
atgcaggagcaggcgctaacccagtttctgcagcagcggcaggcgcagggcgaactgcccgcgggccgcgatgtcgcgcagctggcgcaatttcttaactgcgttctgcaggggatgtcgattagcgcccgggaaggtgcggatttcgacaagctgatgcaaatcaccgacaccactctccgtctctggccgcaggtcctcgagtcctnnnnnnnnnntcgagtcctgatgcgccctgcttccggcggtattctgccgccggatccgctctcctgttggctttatccccacaaaatagattga

SEQ ID NO: 264445 - DNA, 138 bp, Klebsiella pneumoniae
atgaaggcgctggcgcaggagtttggcacggttaaacaggttgcagacccctttatccgacccgccctggattacaacctccagaccgttttgcgcgtgttaaccgtggaaatccgaaacggcattgaaaacaggtag

SEQ ID NO: 264446 - DNA, 765 bp, Klebsiella pneumoniae
ttgcccgaccagctcatccagtttgtagcccgtgatgacctccgccgccgggttcatggtggtgacattcccctctctgtcgatggcgataacgccgtcggcggcgttatcaataatcaggtcgttaagggttttggtctcccgcaatgtttgcgccagcgcgttgacgctgcggctgatctgccccagttcgccgggcagatcgggcaactgcgcgggaattttttgcgccagcgtaggcagaccgtcggtgatgatgtcgatattggcgctcaggcggcgcgaaaagaggacgatcagcaacaggctgctgataagcccggccgccagaacagcaatgatccggacatccatcttccaggcctgctggcgaatatcctccgtcagctcattggcccagatataaccgagaacttcgccatggcgcgctatcggaatcatggaattgaggatatcgccgcgcacctgcctgccggaaaacacccgcggggcgttggcgcgcataacctcccgtccgggatgatcggcggcgatagtcaccccgacgttgttttgatacagcgccgaaggggcgtaggtgataatggcgtccagcgccttgttgtaatagccggcgccaatccccggaaacgcgtgggtgatgcgttcggtgactggcgacaattccgcattcagcatgcggatccgttcagcgcgcgacagctgactatgctggctgaagcgttcgcccagcgcctcgtcgagcaggtgtacgacggccgataa

SEQ ID NO: 264447 - DNA, 480 bp, Klebsiella pneumoniae
atgcgggaagcgcatgcttacctgctggctgacggtggtgggggtcagcttgacatatttatcgctaaattcgccgttactgtcggcggccaccttactgctgtggctgtaatagaggcgcacaatgggtttattttccccacccggccacagcagagtagtcttatcgacccagtgcgcatcggccagcgccacgccaaaggcggcgcggaaggcgtcggcgcgggagtcatagaccgcgctgttgccggcgatgaccgataccgtccgatcggtgaaatcactgaaagagacgcgcaggtcgctgtcgataagcttattggtgccatcgcggacgataacgttgatgcatccgctctctttagtcagcgggatcacccagtaagggccatatttgtcgctgccggtcggcgtggtgctgacatcattccagtccgccaccggcgcgctcagcgcgtcacaggtttcgttgttccataa

SEQ ID NO: 264448 - DNA, 678 bp, Klebsiella pneumoniae
atggcggtaaaactcgcgccagatcagctcgttaagccaggtggcgccggctccgccgtccagcgcggcgggatgttccgtcagcagacgatgcaggcactggcggggggacagcacgccgatggccaggcagggcgacaggcgactggtcccttccacggccgggaagtcgcgctgctcctcgtaatccgccgccgcttgctgacaaaacgtgcgcagacgcgccagcgccgttttttcatccgcggcaaacagcagcccgtcaaacggcgtttgcgggtagttaagctcaggcagcggcggcgcctggcgggcaggcgcctggcgcggcttcggggccgccacgcacgccggcagcccgtcccgcagacggcgaataaacgcatttttaaacggggtgaagactttatacatttcgccgccaccggtcagtacgctgccgggcggcaacaggacgctgtcgtcaaagccctggcaaatcacgtcgcgcaaggtgttctcaacggcggcatcgcgctggcgttcattgaattcgtactgatagttgtagaacaggtgactgacctgatgctgctggcaaaaatcggccagccgttcgacgctggcggtaaaatcgtccgcctcttctacccacagcggtatgccccgttccgccagcgcggcatgcagactctgtaa

SEQ ID NO: 264449 - DNA, 378 bp, Klebsiella pneumoniae
atgaagatggataacccgcattttgttccgctgtcaaagcaggcgctggcgatgttcgaagagctaaaatttcttgccggagattccccttacgtcttccccagccgaaacgaccaccgacgcccgatctccaaaacaacgcttaactgcgcggtgcgtacgttggatctgaacgtcagggattttgttattcatgacttccggcgtactgccagcacattgctccataagcaaggctacaactccgactgggtagagaaatgcctagcgcataagatcggcggcgttcgcggtgtctacaacagtgcggagtacctgaatcagcgccgggagatgcttcagtccttggctgattttgttgatgcgcagattgagtag

SEQ ID NO: 264450 - DNA, 618 bp, Klebsiella pneumoniae
atgaaacaaccatgggaactaaaccctgaacttacacaagaacgcctaaagaaactggcctctctcatccgcgacgttagagatgatgtggtcgacagacatgatgatgatttaggcgactcagcgcgcgcaaccggtatgcgggcatatgaatgttgcagaacacggatagctcgtgcttctatggactcagaagaatggccctggcttggaattataaaaaaagatggtaaatttacgttttccatcaaatcagtaccagtgagactctatagaggtaagccagatagtcctgaagaacgtcgattaattccatgttatgaagctctaagccaggctagtttcttatttgaagaagttggtgatgcagcagatatcatatggttttttgcaattgaagttgacgaattcagatatgtggatcgggtaacattcacaggtttccttgaaggtgcccaagtttcatgctgggagattccactcaatgagaaagtgccagctatcagctcaattgatgcagaacttcctgagcctgtgaaaatcgagaaaccagtcgtttctgttaaaaagaaagaagagaaaaaagcaaaaaatgatgatacgaatgatggtcagtaa

SEQ ID NO: 264451 - DNA, 516 bp, Klebsiella pneumoniae
atgataatagggtatttcctgttaatagaaagagcgtcaactttatctgaaaccccatcaaaagtcgtaactattgctccttggttttcaacaacattaaccatattgtctataggggcatcatctgttaacccccagcgaactcgagcaccctctgcaatcttttcaataataggagcagtgagttcagggatcttctcattatcaattagattaaaacggttctcaggtaagtctaagtgctcatataattcagatactaattgttcaagaatagtactatacgattgcaccctttccttcacaccagcaggtgttgtctggcgtttacgaaaatggcactgttctggttttacatcaccagccagaggatattcaaaaaatttaggcgatacctgcaagagctctgccaaagcattgcgtatatcatatgcaggtgctctggcatcactctcatactggtggatgctttgtcttgtaaccgcaacggcatcccccaattcttgtagggtataa

SEQ ID NO: 264452 - DNA, 126 bp, Klebsiella pneumoniae
atgctcagcagtacagaagtgccaatgtttggtttagccagactagacaaactaaaaaagaaaaatatgatgattccatcccaatggaagaacctcatatactacaagagagtttattggttttaa

SEQ ID NO: 264453 - DNA, 2268 bp, Klebsiella pneumoniae
atggcaaacggcttgaaattttctcctcgtaaaaccgcgctggcgctggccgtggcggtggtttgcgcctggcaatcaccggtcttcgctcacggtagcgaagcccacatggtaccgctggataaaacgctgcaggaattcggcgccgatgtgcagtgggatgactacgcgcaaatgttcaccctgataaaagacggcgcttacgtcaaagtaaagcccggcgccaaaacggcgatcgtcaacggtaaatcccttgacctacaggtgcctgtggtaatgaaggaaggtaaagcctgggtttccgatacctttatcaacgatgtcttccagtccggtctcgatcagaccttccaggtggaaaagcgcccgcacccgttaaactcgctctcggcggcggaaatcagtgaagcggtgaccattgtcaaagccgcgccggagtttcagccgaatacccgctttactgagatttccctgcacgagccggacaaggcggcggtatgggcctttgccctgcagggaacgccggtcgatgctccccgcactgccgatgtggtgatgctcgatggcaaacacgtcattgaagccgtggtcgatctgcaaaacaaaaaaatcctctcctggacgccgatcaaaggcgcccacgggatggtgctgctcgatgattttgtcagcgtgcagaacatcatcaataccagcagcgaattcgctgaggtgctgaaaaagcacggtattaccgatcctggcaaagtggtcaccaccccgctcaccgttggcttttttgatggcaaagatggcctgcagcaggatgcgcgtctgctgaaggtggtcagttatctggataccggcgacggcaactactgggcgcacccgattgaaaacctggtggcggtggtcgaccttgaagcgaagaaaatcatcaaaatcgaagaaggtccggtgatcccggtcccaatggagccccgtccgtatgatggtcgcgaccgcaacgccccggcggtgaaaccgctggagataaccgaaccggaaggcaaaaactacacgatcaccggcgataccattcactggcagaactgggattttcatctgcgcctgaactcgcgcgtcgggccaatcctctcaacggtgacttacaacgataacggcacaaaacgccaggtgatgtatgaaggttccctgggcgggatgatcgtcccctacggcgacccggacgtcggctggtatttcaaagcctacctcgactccggcgattatggcatgggcaccctgacctcgccgattgtacgcggtaaagatgcgccgtcaaatgcggtactgctggacgaaactatcgccgattacaccggcaaaccaaccactattccaggcgcggtggccatattcgaacgctatgccgggcctgagtataagcacctggagatgggcaaacccaacgtcagcaccgaacgccgggaactggtggtacgctggatcagcaccgtcggcaactacgactatatctttgactgggtgttccacgacaacggcaccatcggtatcgatgccggcgccaccggcattgaagcggtgaaaggcgtgctggcgaagaccatgcatgaccccagtgccaaagaggatacccgctacggaacgttgatcgaccataatattgtcggcaccactcaccagcacatctataacttccgcctcgacctcgatgtggacggcgagaacaacaccctggtggcgatggatcctgaagtgaagcccaacaccgccggcggcccgcgcaccagcaccatgcaggtgaatcagtacacaatcgatagcgagcagaaagcggcgcagaaattcgacccgggcactatccgcctgctgagcaacaccagcaaagagaaccgcatgggcaacccggtctcataccagattatcccttacgccggcggcacgcacccggcggcgaccggtgccaaattcgccccggacgagtggatatatcatcgcctgagctttatggataaacagctgtgggtgacgcgctaccacccgacagagcgatatccggaagggaaatacccgaaccgttccgcccacgataccggcctgggccagtacgcgaaggatgatgagtcgctgactaaccacgatgacgtcgtgtggatcaccaccggcaccacccacgtggcgcgcgccgaagagtggccgatcatgccgaccgagtgggcgcacgcgctgctcaagccgtggaacttctttgacgaaacccctactctgggcgaaaagaaaaagtaa

SEQ ID NO: 264454 - DNA, 1116 bp, Klebsiella pneumoniae
atgatcaccaccgacgatggcctgcgcgctgtttgcgaagcggcaagcgcggcctccgccgtcgctctggatacggaatttgtccgtacccgtacctactatccgcagctgggcctgctgcagctgttcgacggcacccaggtctctctgatcgatcccttgacgattagcgactgggcgccgatgcgtgagctgctgctcaaccaggatgtgactaaatatctgcatgccggtagtgaggatttagaagtcttcctcaatgcgttcaacctgatgccgcagccgctgatcgacacccagatcctggcggcgttctgcggccgcccgatgtcctggggctttgcctccatggtggaagagtattccggagtggcgctggataaaagtgaatcccgcaccgactggctggcgcgcccgctgaccgagcgtcagtgtgaatacgccgcagctgacgtctggtacctgttgccgatcgccagccaattaatggcggagaccgaccgcgcaggctggctatcggcggcgctggacgaatgtcgtctgatgcagcagcgtcgtcaggaggtggttgacccggccgaggcctggcgcgacatcggcaacgcctggcagctgcgtacccgccagctgggctgcctgcagctgctggcagagtggcgtctgcgcaaagcgcgtgagcgcgacctggcggtgaactttgtggtgcgggaagagcatctgtggagcgtggcgcgctatatgcccaccagcctcggcgagctcgacagcctcgggttgtccggcagtgaaattcgcttccacggcaaaacgttgattagcctggtcgagaaagcccaggcgctgccggagtcggccctgccggcgccgctgcagaacctcattgacatgccgggttaccgtaaagcctttaaagatattaaagcgctggtgcaggaagtgagcgccgataagggcgtgagcgcggaactgctggcctcgcgtcggcagatcaaccagttgctgaactggcactggcagctgaaaacgcaagccggtgagcctgagctgatttccggctggcgtggcgaactgatggccgggcggctgaagtcgctgttaaacgactatccgcgctag

SEQ ID NO: 264455 - DNA, 483 bp, Klebsiella pneumoniae
  misc_feature (16)..(25): n is a, c, g, or t
atgggttttctaaagnnnnnnnnnntgatgcaaaatctggcagggctggatgaaagtttggtgggcgtgggggatttgcgatttatcaatggcattttaggcaactattcgcgcaccgtcgcatttcgtttgtctgagcaagaaaaccgcattgaacccaacattgaagctaagcaagggttaattggttttcacttccgtagtgcccgaggtggacagataaaaatggtgcaattagcgggtgacgaaccagaatggaaaagtgctgatctcgatttagttgcctctcgcctgatagtgctggatatgcaaaacaaaggtaatgcaatgccgttgccacaattacttggctatcaacagcttggcattttacctaaatttgctacgttttatcgccagggtttacaccaggctctaaagaataatgatattgaggcagggtggttggcaggcctcgatgagggattgaataatggcttataa

SEQ ID NO: 264456 - DNA, 303 bp, Klebsiella pneumoniae
atgcgcagcccggtgttccacaccggccagccaatcggcacgctgctgccggtcaccgccgccagctcagatccgcaggccgggtaccagctgacgtccaccgccgcctccgtcgggccgtacaggttatgcagcggcgcgccggttaagcgctcccactcgcggcacaattccgtcggcagcgcttcgccgctgcagaatacccgccgcagcgtgcggcaggcagcgacgctgtcggcatccagcgaggcgacaaacgccgccagcatcgacggcacaaagtgggtggtggtcacgccgtag

SEQ ID NO: 264457 - DNA, 429 bp, Klebsiella pneumoniae
atgaaggatgagcatctggtgccgctgtctgcacaggccgtcgccctgctggagcagattaaggaaattaccggagagtcggtatttgtctttgccggtgcgcactccatgaacaagccgatgagtgaaaacaccatcaacaaggcgctgcgcgttatcggttacgacaccaaaaccgaggtctgcggtcatggtttcagaacgatggcctgtagtgctctgaacgaatccgcactgtggtcgaaggacgccattgagcgccagatgagccacaaggagcgcaacggtgtgagagcggcgtatgtgcataaggcagaacatctggaagcccgtatggagatgatgcaatggtggtcggattatctggatgtgagccgtgagggctacgttgcgccatatatttatgcgcggcgacataaggcggcctga

SEQ ID NO: 264458 - DNA, 618 bp, Klebsiella pneumoniae
atggttggcggcgagctgcaggaagcgctgcagcaggtcactgcgggtggtgacgccggtgtgcaggatcacctgccagcccatcgccgccagccagctaaaaatctgctgcaagttgtaccagcaggcgtagccggccatctgcggatcgtcccagccggtgccgaacagccgactgctgagaaagggatcgttgatatcgatggcatacaccggcagggcgtggtgcagctgttcgagttcccggcgcacatcttcgcgcagcagatcgtccagttcgcgcacggtcaccaccatccgggtatggcgcagcgctgcggggcgcgctggacgatcgcgcagattgatctcccgggtctgcggtgggttgatcggcaggggggggctttcccggtcgcgtggttccggctcattgagtcgcgcatacagtcggtcggccgccaccggctgccagcgatcggcctgcggcgggcgcggtctggcaagctccagaggatgctgttcacgatactggcgcggcgtcacgccgtgctggcgcttaaacaaatcgctcatcattcgcgtactggcgaatccctgttcgcgggcgatttgctggacggttttgcgggtggttaa

SEQ ID NO: 264459 - DNA, 423 bp, Klebsiella pneumoniae
atgaacggcgatcccgccgccgcagccggtaccgataatcaccccgaagacggtggtagctccggcgccggcgccatccaccgcctccgaaagggtgaagcagtcggcatcgtttgccatccacaccggctggccaagctgctgcatgatatcccggcgcagatcgtgaccgttgagcaccaggcagttgcagtttttaatgcgtccgctttgcggatcgatagccccgggcaggccgatccccagggtgaacggctgcgggctgaccgcgcgaatatcggcaatcagggtcagcagctgacgcataaaggcgtcatagctctctttgtgggtcggccggcgcaggcgctggacgcattcgcccgccgggtccagcagtacggcttccattttggtgccgccaatatctattccaagatgtaa

SEQ ID NO: 264460 - DNA, 1788 bp, Klebsiella pneumoniae
atgcgtacagaatattgcggacagcttcgacagtcccacgttgggcagcaggtgactctgtgtggttgggtcaaccgccgtcgcgatctcggtagcctcatttttatcgatatgcgcgaccgcgaaggcatcgttcaggtgtttttcgatccggatcgtgcggatgcgttgaagttagcctctgaactgcgtaatgagttctgcattcaggtcactggcaccgttcgcgcgcgtgaagagaaaaacatcaacgcggacatggccaccggcgctatcgaagtgctggcttccgatctgacgatcattaaccgctcagaatcgctgccgctggactccaatcacgtcaacaccgaagaagcgcgtctgaaataccgctacctcgacctgcgtcgtccggagatggcgcagcgcctgaaaacccgcgcgaaaattaccagctttgtgcgccgctttatggacgaccatggtttcctcgacatcgaaaccccgatgctgactaaagccaccccggaaggcgcccgcgattacctcgtgccttcccgcgtgcacaaaggcaaattctacgcgctgccgcagtcgccgcagctgttcaaacagctgctgatgatgtccggcttcgatcgctattatcagatcgttaaatgtttccgcgatgaagacctgcgtgccgaccgtcagcctgaattcacccagatcgacgtggaaacctcctttatgaccgcgccgcaggtgcgtgagatcatggaggcgatggtgcgtcagctgtggctggaagtgaaaggcgtcgacctgggcgagttcccgatcatgaccttcgccgaagccgaacgtcgctatggctccgataaaccggatctgcgtaacccgatggagctggtggacgtcgccgacctgctgaagtctgtggaattcgcggtctttgccggcccggccaacgatccgaaagggcgcgtggcggccctgcgcgtcccgggcggggcctctctgacccgcaagctgattgacgaatacggcaactttgtgaagatctacggcgcgaaagggctggcctatattaaagtgaccgagcgtgccaaaggcatggacgggatcaacagcccggtggccaaattcctgaccgctgaaatcgtggaagcgatccttgaccgcaccggcgcgcaggatggtgacatgatcttcttcggcgccgacaacaagaaagtagtggccgacgcgctgggcgcgctgcgtctgaagctgggtaaagacctgagtctgactgacgagagcaaatgggcgccgctgtgggtgatcgacttcccgatgttcgaagacgacggcgaaggcggcctgacggcgatgcaccatccgttcacctcgccgaaagatatgaccgcggatgagctgaaagccgcgccggaagaggctgtagccaacgcctacgatatggttattaacggttatgaagtcggcggcggttcggtgcgaatccaccgcggcgagatgcagcagaccgtatttggtattctgggcattaacgaacaggaacagcgtgagaaattcggcttcctgctggatgcactgaagtacggtacgccgccgcatgcgggtctggccttcggtcttgaccgtctgaccatgctgctgaccggtaccgataacatccgcgacgttatcgctttcccgaaaaccaccgcggccgcctgcctgatgaccgaagcgccaagcttcgccaatccggcggcgctcggtgagctgggtattcaggttgtggagaaagaggcaaaagcgtctctggagaacaagtaa

SEQ ID NO: 264461 - DNA, 216 bp, Klebsiella pneumoniae
atgtcggtagcgtcaggaggcgctaccgattaccttcagttcgtcgtagctgaccatgacgtgttctggggtatcacaacgtacggccaggagagtaggggcacaatagagatgagtcgcctggtggtggatgagctgtgggggctggctagccttgcgataacgcaatttcatccctacaaaggtataatgaccatcaatatggcgcttgtataa

SEQ ID NO: 264462 - DNA, 498 bp, Klebsiella pneumoniae
atgatgcgtgcgctgttggcccgggaactgcgcctggcgtggcgcagcggggcggagatcctcaatccgctctggttctttctgatcgtcatcaccctgtttccgttcggcgtaggcgccgcgccgcagctgctggcgcagattgcgccgggcgtggtgtgggtcgccgcgctgctggcggcgctgctggtgatggatcggttgtttcgcgacgactggcaggacggttccctggagcaactgatgctcctgccgacgccgctggtggcggtggtgctggtgaaggtggttgcccactggatgatgagcggcctgccgctgctgatcgtctcgccgctggcggcgctgctgctggggatgagtctgcatgacgcccaggcggcggccgccgggctcccggtcagcggctatctggcgatgctggcggcgttcttaaccgccagcgccaccctgtgtccgttcgccaccgccgctgcgctgcggctgaccgtgcgataa

SEQ ID NO: 264463 - DNA, 717 bp, Klebsiella pneumoniae
atgcagcgggcgacggcgatattcgtaaatctgcaccccacccttaacgagatagtgatagagcaggtgggcgccaaacttcacaatgggaatatccggttcgccctgcacgatcagcttaacccgtactccgcgccgcgcggcattgcgcatcgcatgcagcaggcggtagccggggaaaaaataggcgttagcgataatcacttcccggcgggcgctggtcagcatcttcaggtagtggcgttcaatatcgtcgcggtgatcctggttctgcaggatgtcgagcaccaccggcccttcgacctgcaccgcataatcctgcttcgcctccggaccgtagtcgctcatatgttcggcggagtagttaataccgccgacaaaggcggtggtgtcgtcgattaccacgattttacggtgcatgcgacggaacagattggtgcgcatccccatcagcttaggacgcggatcgtagtagcggaaaatcacgccagcggcggtgagctcgccgacaaattcatcgctgagatccggggaaccatagccgtcgaggagcacctccacctggatgccgcggcgggcagcctcgagcaggaccgcgtgcagccgccggcccacctcatcttcaaaccagataaaggattcgaggatcacccgccggctggcgcgaccgatggccgcaaacagcgccggatagtactggtcgccattctccagtag

SEQ ID NO: 264464 - DNA, 570 bp, Klebsiella pneumoniae
  misc_feature (555)..(564): n is a, c, g, or t
gtgaaaaatgacaatgcagtgcaacacaacaaccagactgcttctgagcagacattatccccggacgagggccacgtattgcataaggtgagagatcccgtgtgcgggatggccatcctgcccgacagggcgcacagcagcattcgataccaggaccaccaactttatttctgctccgccagctgtgagagtaaatttaaagcccatcccgatcgttatcttaccgaagatgccagtgaacattcccatcaccatcaccacgatcatcacgaagtcagccctgatcagataaaacagcctcacaaccaggcggaaaaagagaattctgaaggtgtgtggacatgtccgatgcacccggagatacgccgcagtggtcccggaagctgtcctgtctgtggaatggcactggagccgctcgtagctacggcatccacggggccgagtgatgaacttcacgacatgacaagacgcttctggctggggttgttgctggcgtttccggttctggtactcgaaatgggatctcatctgtttcccgacttgaggaatacagtnnnnnnnnnnacctga

SEQ ID NO: 264465 - DNA, 138 bp, Klebsiella pneumoniae
atgagtgaagatagcaatgtactcttcatcggttatgtagcggtcgcgctggggtttaggaaacttatcgacaccaacacacggattacctggtacataaccacgctgatacccccagcggtatacacgagacattga

SEQ ID NO: 264466 - DNA, 522 bp, Klebsiella pneumoniae
atggcggttgatcagggtgacggggatcttgcgcgccagatactcctccgccagcgacagcggcggcgcgccggaggtgatgatcaccccggcgacgtgatagctcagcagttgtttaagcgagggggcgagctgctgcggatcgtcagcgttcatcagcagcggcataaagccattgagcgccagctgatggaccagcggcgccagcagtttgctgcgaaacgggttgtcgaaaccggcggtgacgatgccgataaaattactgctgccggtgatcatcgtccgggcgatgatattcacctgatagcccagggcttccgcggcgctcagcaccttctgccgggtcttctccgacaccgaggcgccgggggtgaaggtgcgggagaccgccgagcgcgagaccccggccagtctggccacgtcctcggccttaatccattttttatcgctcatcgtcgtttcgcgccgtctgttttccaggaagccgacgcccgggcgggcgtcggtcacgcacacagctga

SEQ ID NO: 264467 - DNA, 1017 bp, Klebsiella pneumoniae
atgaacggtaaaaaactttatatctcggacgtgacgctgcgcgatggtatgcacgccattcgtcaccagtattccctggcgcaggtgcagcagatcgccagcgcgctggataaggccggggtcgactccatcgaagtggcccatggcgatggcctgcagggatccagcttcaactatggctttggcgcccacagcgacatcgcctggattgaagcggcagcggatgtcgtgagccaggcgaaaatcgccaccttactgctgccgggcatcggcacgctgcacgatctgaaagcagcgtatcaggccggggcgcgggtggtgcgggtcgccacccactgtagcgaagcggacgtcgccgcgcagcatattgcctttgcccgcgagctggggatggacaccgtcggttttctgatgatgagccatatgatctccccgcaggcgctggcgcagcaggcgctgaagatggaatcttatggcgcgacctgtatctatgtggtggattccggcggggcgatgaacatgaacgacattcgcgaccgcttccgcgccctgaaggcggtgctgaagccggagaccgccaccgggatgcatgcccatcataatctgagcctcggggtggcgaactcgatcgtcgcggtggaagaggggtgcgatcgcattgacgccagcctggccgggatgggggcgggggcgggcaatgcgccgctggaggtgtttattgccgccgccgacaagctaggctggcagcatggcaccgatctctacgccctgatgaacgcggccgatgagctggtgcggccgctgcaggatcgcccggtgcgtgtcgaccgcgaaacgctggcgctgggctacgccggagtctactccagcttcctgcgccacagcgaagcggcggccaagcgctatggcctcagcgcggtggatattctcgtcgagctgggcaagcggcggatggtcggcggccaggaggatatgatcgtcgacgtcgcgctggatctgcttaaccgcaataaataa

SEQ ID NO: 264468 - DNA, 726 bp, Klebsiella pneumoniae
atgacctggggcgtggcggatcgggcggcgctggatgcgctgcgcccgaagctggaacgccagcccgctttccgtgaaatcgacggcgcgctggagtgccgcgatcccaacggtatgacgctgcgggtgcaggttagccagcaaacggcggttgaactgaacgttgaaccgatcaaccagtggggcgatgtgcgtcgcatcgacaccccgagcccggtctacgaccgcgcgcagccgattaacgtcggccacgtggtgttcttcgtggaagaactggcggcggtggaaagtttctatcgcgaagtactcggctttcaggtgtcagaccgctacatcaatcgcgcggtgttcctgcgctgcggcgtgcgcggcggacaccataacctcttcttattgcagttgcccaaccgcaagcgcgggctaaaccacgtcgcgtttaccgtgcgggatattcatgaagtgatcggcggcggcattgcgatgaataaaaacgcgtggagcacgtttatcggtcccggccgccatccggtctcctcggcctacttctggtatgtcaacagcccgaccggcggcgcttttgagtactacaccaacgatgactatctgacggaaaactggcagccgcgcgagcttgagcattcactcgtgtcctttaccgaatgggcggtggaaggcggtatcgatcacgatacccgtcgccagcagaaaaaaccggaggcggtatga

SEQ ID NO: 264469 - DNA, 459 bp, Klebsiella pneumoniae
atggaaagggttgcgtttaagtcccgcgcgttcggcggcggtcatggtgaagctgtggtcaaaggtggcattgtgcgccaccatgattgcccggctgcagtcgctctctttcatccctttgcgcaccattttgaagatggcatgcagggcatcgtattcgctgacggccccgcgctgcgggtcatgcgggttaatcccgttaaaagccagcgcttcgggctgcagattggcgccctcgaaaggttcaacatggaaatgcagcgtttcatcgggcatcagccagccgtgctcatccatcttcaacgtaatggcggcgatctccagcagggcgtcggttttggcgttaaatcctgcggtttcaacatcgatcaccaccggataaaaaccgcggaaacggtcgcacagaccattcagttgagcgttctcggacatcagattctcttagctggaaaaaagtag

SEQ ID NO: 264470 - DNA, 1347 bp, Klebsiella pneumoniae; identical to SEQ ID NO: 217127

SEQ ID NO: 264471 - DNA, 435 bp, Klebsiella pneumoniae
atggaaagtaataccttacatcgtggcagattgatcgatcatattctgctggttgtcgaagactttgaggcaagcaaaaacttctataccgccgtactgtcggcgctggagatcccggttatcaccaccgccaatgaatacttgctggccgacgaactggtggtggcctcacgccacagcccggaggctgccgggaaactgactgggcgccaccacctggcattccaggccagagatcgtgacatggtggacgctttttaccatgcggcgctgacccatggcggacgtgataacggcgcgcctggcgaacgacactatcatcctggttactacgccgcttttgtgctggatccgcaggggaataatattgaggcggtgtaccatggcaaggctgagcgcagcgccgggtctgttgcgatcagcttcacgcagtaa

SEQ ID NO: 264472 - DNA, 1200 bp, Klebsiella pneumoniae
atgtttaacccagaccagaatcgtcttgcccccacgctggcgatgatcatggccgcgtcgcttgtgggatttatcaccggctatacggtgccgttaatcagtcttgagctggcgcagcagcagatcgcgccgctgtacgtcggcctgctggccgccctgccgcccgccggcatgatgatctcctctttcctctctcctgcgctgtgccggcgcgttgaaatgggcgtgctgctgagcggcagtctgatcctgctggcgctggcgaccatcgcctcatgcatgactaccgatatgacgctgcttttgctgccgcgcctgctgaccggcctggcctccggggtcattatcgtacttggcgaaagctggatcaccggcggcgcggcgggcagccagcgcgctaccctcaccggtctctacgcctcggcctttaccggctgccagctggccgggccgctgctgatctccgtcggcccagcctggcagacctcagcgctgatagcgattgtcgcggtcaccgccgtctgcctgctgatgctgcgccatctgcccaccggcactcgtgaaagcctcggggagcgcgccagctggcgcagcctcggcgcctttctgccggtactggcctccggggtcttctgcttcgccttctttgacgccagcattctcgccctgctgccgctgtacggcatggacaaagggctgaatgaagggctggcggtgctgctggtcaccgtggtgcttaccggagatgcgatgttccagaccccgctcggctggctggccgaccgggtcgggattcgtcgcgtgcatctgagctgcgcggtggttttcagcctgtcgctgctggccctgccgctgatgctcggctcgcgcattcagctgatggccatttgtctgctgctgggcgccgcggcgggcgcgctttataccctgtcgctggtgcgggcggggaaaaccttcaatgggcagaagctgattatgattaacgccctgttcggctttttctggtccgccggcagcgttgccgggccggtagtcagcggcatgctgatcggcatcactggttacgatggcctgatcgtcaccctggtggccagcggcgtgctgttcctgttgattcagtgtctgtgcaaaaacgagaaaaccctgcttgccagtgagcaggaagatgacatggacgaggcgacggagtccgcacggtag

SEQ ID NO: 264473 - DNA, 1158 bp, Klebsiella pneumoniae
atggccgtatcgccgtcactgatcgccgaagccgttggctggcgacgtgaatttcacgccgcgcctgagctcggatatcaggagcaggagacctcgcgccgcgttgcggagctgctgtcctcgtttgggctgcaggtgcatcgcgggctggccggcaccggcgtcgtggcgacgctggagaacggccccgggccggttatcggcctgcgcgccgatatggacgccctgccaatcaccgagctggggagcgtcagctaccgttcacgccgtcccggggtgatgcacgcctgcggccacgatggccataccgcgatgctgctggcggccgccgcccatctggcgcagacccgccatttcagcggcaccgtccactttgtctttcagccggcggaagagaacctcggcggcgcgcgcaaaatggtggaggaggggttgtttgagcgcttcccgatggacgccatctacgcgctgcataactggccggggatccctcttggcgaagtggcgctcagcgatggcgcgatgatggcctcgctggacgccttcgagatcaccctgcgcggaaagagctgtcatgcggcgatgccggagagcggggccgatccgatcgtcgcggcggcgcagctgataatggcgctgcagaccattccttcccgccgcttgtcgccgcaggattccgcggtggtaagcatcacccagataaacggcggcgaggcgatcaacgtcctgccggacaccgtggtgctgcgcggtaccttccgctgcctgagcaatcgcgttcgcgcccgcgtgcgggagcttatcgaaagctatgtggcgacccagccgcaggtgtccgatgtgcagggcgagattagctggttcccgggttatccggtgaccaaaaaccatgcgctgcaggcgcagcaggtgcgcgaggtggccgtcgccactctcggcgcgcaagcggtgcgctggaatcaggcgccgtcgatggcctccgaagattttgcctgcatgctggaggcctgtccgggggcctatttctggataggcaccgacggcgaaaccccgtcgaagccgctgcataacgccagctatgactttaacgatgcgctgatcggccccggcgtcgccatgtgggtggggctggtggagaaacagctgccggcggcgtaa

SEQ ID NO: 264474 - DNA, 2151 bp, Klebsiella pneumoniae
atgaaaaaaatcacgagcgtgtgcccctactgcggggcgggttgcaaacttaaactggttgtcgacaacaataaaatcattcgcgcggaggccgccgacggcgtcaccaaccagaaccagctgtgcctgaaaggctactacggctgggattttcttaacgatacgcagctcctgacgccccgtcttaaacaaccgatgatccgctaccagaaaggcggcgccttcacgccggtcagctggcaggaggcgattcgctataccgccagcaagctaagggagatcaaagagaagcatggcccgcgcgccatcatgaccaccggctcctcgcgcggcaccggcaacgaaaccaactatgtgatgcaaaagttcgcccgcgcggtgctgaacaccaataacgtcgactgctgcgcccgcgtctgccacggcccctccgtcgccgggctacagcaggcgctgggcaacggggcgatgagcaactcgattagcgacatcgaaaactcgaaatgcctgctggtttttggctacaactgcgccgactcccatcccatcgtcgcccgccgggtaatcaaggcccgggacaacggcgccaaaatcatcgtctgcgatccgcggcgcattgaaaccgcgcgcattgccgatcgtcatctgcagctcaacaacggcagcaacatggcgctggtaaatgccttcggctatgtgctgctggaggaggagctgtacaacaaaacctatgtcgaacgctataccgaagggctggatgcttaccgcgaggcggtgaaggattacgccccggaagcggtggaagggattgtcggggtcagcgcgcgggaaatccgggaggcgatgcggatgttcgccgccgccccatccgccaccattatgtggggcatgggggtcacccagtttggccaggcggtggacgtggtgcgcggcctggcaagcctggcgctgctcaccggcaacctgggacggcccaacgtcggcgtggggccggtccgcgggcaaaacaacgtacagggcgcctgcgatatgggcgtgctgccgaacctttttcccggctatcaggaggtcaccgaccccgccgtgcgggcgaaattcgccgccgcctggggcatcgacccggcgctgatggacgaccagatcggcacccgcatcaccgaggtgccgcataaagcgctgaccggcgagatcaaagcctattatatcatgggcgaagatccgctgcagaccgaagccgacctcggcctggtgcgcaaaggcatcgaggcgctggacttcgtggtcgtgcaggacatcttcatgaccaaaacagcggaaatggccgatgtcctgctgccggccacctcctggggcgagcacggcggcgtcttcacctgcgccgaccgcgggttccagcggtttgaacaggcgatccctccggcggggaatgtgaagcgcgactgggagatcattagcctgctggccagcgaattgggctatccgatgcactatgagaacaaccagcagatctgggacgagatgcgcgagctctgcccgctgttctacggcgtgacctgggagaaaatgggcgatatgggccatgtccagtggccgtgcccgaccctcgatcatcccggcacgccgtggctgtataaagacaaccgcttcgacaccccctcgggtaaagggcagctgttcgccaccgcctggcgcgcgccggcggagcgcccggatgacgagtggccgctggtgctctgcaccgtgcgggaagtcgggcattattcctgccgctcgatgaccggcaactgcgccgcgctgcagtcgctggccgacgagccgggacgggtgcagatgaatcccgcggatgcgcaacgactggggatcgccgacaaacagctggtgtgggtcagctcccggcgcgggaaggtgatctcccgcgccgacctcagcgatcgcatcaatccgggggcggtctatatgacctatcagtggtgggtgggcgcctgcaatgaactgacccaggataacctcgatccgatctccaaaacgccggaaaccaaatactgtgcggtgaaagtggaagcgattgccgaccagcaatgggcggagcgctatgcctggacggcctacagcgacatgaaagcgcgactgaaagccgctgccgacgtctga

SEQ ID NO: 264475 - DNA, 1080 bp, Klebsiella pneumoniae
gtgcctacaggacaccgctttctggcgacggatctgcatcagtttgtcgtctcactgtttacccatctcggcagtaccccaggggaagccaccctcgtcgcggaccatctgatcgccgccaatcttgccgggcatgactcccacggcgtcgggatgatccccagctacgtcaaatcccacgccggtggttttctgcagctcaaccgccacgccacggtgaccaaagacgccggtgccgtggtcaccctcgacggcaacgccggcttcggccaggtggtcgcccacgaggcgatgcagttgggcattgaaaaggcgaagcagcacggtatggcggctatcgccctgcgcaatgcgcatcacgtcggtcgcatcggctactgggccgaacagtgcgccgccgccgggctgatctccattcacttcgtcagcgtcatcggcgacccgatggtcgccccgttccgcgggaaggacagccgcttcggcaccaacccgctgtgcgtggtgtttccccgcgcgggccatccgccgctgctgctggactacgccaccagcgccatcgcctttggtaaaacccgcgtcgcctggcataaaggcgaagccgtggcccccggctgcctgattgacgccgagggtcgacccactaccgacccggcggtgatgcagacctcgccgctgggcgccctgctcaccttcgcccagcacaaaggctatgccctggcgacgctgtgcgaagtgctcggcggcgcgctctccggcgggcaaaccacccatcaggagagcctgcagaccagcgtcgacgccatctttaactgcatgaccacggtgatcctgcgcccggacgcgttcgatgccccggacagccaggcacagacggaggcctttatcgcatggtgtaagcagtcgccgcacgatgccgatgccccggtactggcgcccggcgaatgggaggccgccaaccgcgaagcgcggctggcgcaggggatcccgctggatgccggcagctggcaggctatctgcgccgccgcgcgcgacgtcggcctgagcgaatcgcacttcgaccgctgccgccctctcgcctag

SEQ ID NO: 264476 - DNA, 726 bp, Klebsiella pneumoniae
atgctgtggggcaacgaccagcagcagctccagctcgccgagggggagatagtcataaccgctcagcggcggcggctcgccgagcgcccccagcagcagatcggcctgcccgtcagtcagcggccgccagtccagcagggaggggttcagcgtgaagtgcagccgggtcagcggctgttgttgataaaatgcagcgattggcggcgagagcagcgctacgggaaaggtgctatccaccgccagacgaaggctattctcccacccctgctgcagcttaaccgcccggttctccagttcgcgggcaatatgcagcacctcccgccctttctccagcagcatctgtccgctgggggtaaagcgcgcgcgatggccgctgcggtcgagcagctgaatattgagatcgctttccaggcggtgaatggtgtagctcagcgccgagggcgttttaaagagctttgccgacgcggcggcaaagctcccctctttttccagggcatccaggatcacgaggacatccagcagtggtttcatcgctacccccttacggtatgcgaatcaccgctggcggatcactccatcggcatcaccagcggatcggggtactggtactcaaaccccagctcattgcagatacgattgccatccacaatcttgccctggccgccgtccgggctgtcgctgaacaccggcggcggcagaccgagctcgcgggccatctgcggataa

SEQ ID NO: 264477 - DNA, 225 bp, Klebsiella pneumoniae
atgccggtaaacaaccagccgccaatcggcatgatcaccgtaaaggtcaccgcgcccatgatcagcagcgtcaccgccgaagtgaggatcatatcgaggttggccggcatcacccgccgcacctggcgttcaacccacgcgccaaggatagcggcgatcagtacgccgatgatattgccgcgcggatcgatgccatggccgaagaaggtggaaatgccggcgtag

SEQ ID NO: 264478 - DNA, 204 bp, Klebsiella pneumoniae
atgaagaatattgagcaactgacgcttatattcatgaatacgtttgacctgacaatcaaacatcgccagcggatcgagggcgatgccatagcgttgagcgaccagctggctgagcgcggttttgttggcaaatttaatggcccggatattatcaataacagcagtatcatcggccaggctttccagactggacagcaagggtaa

SEQ ID NO: 264479 - DNA, 543 bp, Klebsiella pneumoniae
gtgattggcgaattgctcaaagatccgcagctcaactttgtcgcctgcggcctgcagagcgcctacgtcagcgataaagctccggacgcctttgttgagctgatgtcgaagcactaccatcgcctacagcgggtgagcgactatcacgccatcgacgatacgctgtttaaattctctctcaacctgccggacagcgagatcccacagctgattgataaactgcacgtgtcgctcgacggcatcatgaagccggtcaccagcggctttggctttgtcgatttgattatccctggcctgcataaagccaacggcatcagccgtttgctcaagcgctgggatctttcgccgcagcaatgcgtcgccatcggcgacagcggcaatgacgccgaaatgctgaagctggtgaaatacgctttcgccatgggtaacgctgccgacagcatcaaggccatcgccggctacgctaccgacgataataaccatgacggcgcgctgaacgttatccaggccgtcctcgataacaccccgcccttcaacgcctga

SEQ ID NO: 264480 - DNA, 1245 bp, Klebsiella pneumoniae
atgttggaccaattcaggctagggcagaaaaatcgtctggcaaagcgctatttatgcaagttttttcatgaaatgagcgagatcgcatatttgacagcggaatttgcttgtaacgtgtgctttggcgattatgaaaattctttcatttttcaatcggagctggatcacaaaatggataaaaagctgcgcgtcgccgaaattgccgcccgcaccgggctatcgcccagcaccgtttcacgcgtcctggccgggaaagcgaataccagcgacaaggcgcgccgggcggtgctggactgcgcccgcgagctgggtgtcatgcaggggttggccgccgggcgtctgctgctcaatcatctgctggtgtttgccccgcagcgcgcattcgatgagcgatcggatatcttctactaccgggtgatccagagtatcaataacgcgctggcggcgcatgaagtgcgcctgcgctactgcgcgctggatgagaacgacagcgacgccaacctgtttcttgcccgcatgaatgaacctgagacccaggccgcggtgctgctggggatcgacgatccgcatattcatggcctggcggcggatctgggcaaaccctgcgtattgatcaactgtcgggatgaagggatgcggctgccgtccatcgctcccgatcatcggctgatcggccagtgcgcggcccgctatctgtttgatatggggcatcgggcggtgatgaacgtgatgtgcctgcgccgctataccatggagctgcggctgggggggattcaggaggcgtggcgcgcgcgtaatctgcgctttaccgccagccgggatcttatcagcgtcgccaactttagcgccagagagacggaagagcaggtgggcgcctggcttgacggcttacagggcaggccgttgcccaccgccttcctggtgggcggcgattttatggccgccggcaccgtcagcgcattgcaaaagcgtggcctgcgggtgccgcaggatgtctcggtgatgagcattgacggatttaatctggcggcgattcaggaggtgccgctaaccgcggtgcatgtgccgcgggatgagctgggcagcgaggcggtgcatctcctgcagcagcgcctgctgcgcccggaggcgccgcacggctcgctactgctgcatggcacgctggtggtacgcgattcggtacggcggatccggccgggcaaaggccataccgccgtcgagccgcaggggctgtatgacgattag

SEQ ID NO: 264481 - DNA, 2364 bp, Klebsiella pneumoniae
atgaagacgctgaaacactggagtttgcatcaacagctgaagcatcacgttgaactgacggtcgatggccagcacaccctgtgcctgtacgtactggaagagaatttgttccgcgtcctgctaaaacgccagggccagctggcgctggatcgcacctggagcatcgctccgcagcaggatgtgccgtgggaaggccgcgcccgggatgacctcagcggttttagtctcccggcctggcagctgacccgggagggcgatacgctgactatcgccacacgccagctgcgcgtcaccgttcaccagccgctgtggctggagtggagctatcgcgacgaggccggcgaatggcagccgcttgccaatgaccgtccgaccagcgcctacctggcgaatgcccacggcgacggcgtcgcccattatctgagccgccgcaaagacgagcgtttttacggcctgggcgaaaaggccggcgacctgcagcgcaccggtaaacgctatgagatgcgtaacctcgatgccatgggctacaacgccgtcagcactgacccgctgtataaacatattccgttcaccatcacccagcgcagcgatatcagctacggcctgttctatgacaacctgagcagctgctggctggatctggggaacgagatcgacaactaccacaccgcctatcgccgctggcaggcggaagccggcgacatcgattattacctgtttaccggtaagcaggtgctggatgtgaccaaagccttcgttcgcctgaccggtaaaacgctgtttggacccaaatggagcctcggctacagcggctccaccatgcactataccgacgcgccggatgcgcaaaatcagctgatgaactttatccgcctgtgcgagcagcacgcgatcccctgcgattcgttccagctctcttccggctatacctcaatcaacggcaagcgctacgtctttaactggaactacgacaaggtgccgcagcccaaagtgatgagccagtcgtttcacgatgccgggctgaagctggccgccaatatcaaaccgtgcctgctgcaggatcacccgcgttacggcgaggtggcggagcgcggtctcttcattcgcgattcgcaaactgacgctccggagcgttccagcttctgggatgatgaagggtcgcatctcgatttcaccaatccgcaaaccgtggcctggtggcaggaaggcgtgaccacccagctactggagatgggcatcgattcgacctggaacgataataacgaatacgaagtatgggacggcgaagcccgctgctacggctttggccgcgaaatcgccatcaaacatattcgcccggtgatgccgctgttgatgatgcgcgcctcgctggaagcccagcagcgctttgcgccgcaaaagcgcccatatctgatctcccgctccggctgcgccgggatgcagcgctacgtccagacctggagcggcgacaaccgcaccaactgggatacgctgcgctataacatccgcatgggcctggggatgagcctttccgggctgtttaatgtcggccacgacgtcggcggtttctccggcgataaacccgagccggaactgtttgtgcgctgggtacaaaatggcgtcatgcatccgcgctttactattcactcgtggaatgacgaccagacggtaaacgaagcatggatgtatccggccatcactccggcgatccgctcagccattgagctgcgctaccgcctgctgccctatctgtacactctgctatggcaggcgcatgctgatgatgagccgatgctccgcccgaccttcctcgatcaccagcacgatgcgcagaccttcgccgaatgcgatgacttcctgctgggccgcgacctgctggtggccagcgtggtcgagccgggcgcccgccagcgtgaagtatggctgccggataatcaggccggttggtacgatttctacagccatcagtggttcgccggcggccagtgggtgacgctggacgcgccgctggaaaaactaccgctgttggtccgcgccggcgctggtctgccgcttagtgaacgtatcagccatgtcgatgcgcaaaaagacgatagtcgcgaactgcagctgttcccgctgaaaggtaccggctcaacccgcggtctgctgtttgaagacgacggcgaaagctggggctataaacagggggatgcgctatggctggagtgggaaatgacctgcagcgccagcagcataaacctggatatcaacgcccgcggcaactatcgcccggcgtggaaagcgctgaagctgtcattaccggtaggagaaaagcgtaagctgctggtgaatggcgttgaaggaacggagtggaggttctga

SEQ ID NO: 264482 - DNA, 1569 bp, Klebsiella pneumoniae
atgcagtttggcagtaagccgctgttcgaaaatatctccgttaaatttggcggcggcaaccgttatggtctgatcggcgccaacggcagcggtaaatcgacctttatgaagatcctcggcggcgatctcgaaccgacgctgggcaacgtttctctcgacccgaacgagcgcatcggtaagctgcgtcaggatcagttcgcctttgaagcgttcaccgtgctggatacggtcatcatgggccacggcgagctgtgggaagtgaagcaggagcgcgatcgtatctacgccctcgctgagatgagcgaagaagatggctacaaagtggccgacctggaagtcaaatatggcgaaatggacggctactcggcggaagcgcgcgccggcgagctgctgctcggcgtcggcattccggttgaacagcattatggcccgatgagcgaagtcgcgccgggctggaagctgcgcgtcctgctggcgcaggcgctgttttccaatccggatatcctgctgctcgatgaaccgaccaacaacctggacatcgacaccattcgctggctggagcagacgctgaacgatcgcgacagcaccatgattatcatttcgcacgaccgtcacttcctgaacatggtctgcacccacatggcggatctcgactacggcgagctgcgcgtgtatccgggcaactacgacgaatacatgaccgcggccacccaggcgcgtgaacgtctgctggcggacaacgccaagaaaaaagcgcagattgcggacctgcagtcgttcgttagccgcttcagcgccaacgcctctaaatcgcgtcaggccacctcgcgcgcgcgccagattgacaaaatcaagctggaagaggttaaagcctccagccgtcagaacccatttatccgcttcgagcaggataagaaactgttccgtaacgcgctggaagtggaagcccttaccaaaggctttgatgaaggtccgctgttcaaaaacgtcaacctgctgctggaagtgggcgaaaagatcgccattctgggcgccaacggcgtgggtaaatccaccatgctgaaaaccctggtaggcgaactgcagccggacaacggcagcgtgaaatggtctgaaaacgcgcaaatcggctactacgcgcaggaccatgagtacgagttcgaaaacgacctgacggtcttcgaatggatgagccagtggaagcaggaaggcgacgacgagcaggcagtacgcagcatcctcggccgtctgctgtttagccaggacgatatcaaaaagccggcgaaggtgctttccggtggcgagaaagggcgcatgctgttcggtaagctgatgatgcagaagccaaacatcctggtgatggacgaaccgaccaaccacctggatatggagtcgattgaatcgctgaacatggcgctggagatgtatcagggcaccctgatctttgtctcccacgaccgtgagtttgtcagctcgctggcgacccgcgtcctggagatcactccggaccgcgtgatcgacttcagcggcaactacgaagactacctgcgcagcaaaggtatcgagtaa

SEQ ID NO: 264483 - DNA, 480 bp, Klebsiella pneumoniae
atgcagaacgtggatctgtttcggcacaaacttgccttcatcatcaacagtaatcacgcgctgttctttgccggtatcgataacggcctggcttggtatcagcagcatctcctggctcctggtattcagtttcagataggcattcatgcccggcttgagaaactcatccttattagaaacctggagacggacctgaagcgtacgggttgtctgatccacgctgggaagaatgttccatttttcgacatggaatgttttatccggataagccggtaccgaaatttcaaactgcgacgtatctttcagcagataggcgatagattctggcactgcagcgctgatccagaccgggtccatcccctgaatctgagccactactttatctttcgaaatattcattccggtgcgcaggtcaaacgcagtaatgacaccatcaataggtgctttaatggtaaaacgggtctggattgtgcgggttga

SEQ ID NO: 264484 - DNA, 588 bp, Klebsiella pneumoniae
gtgaacatggccaagaaaccccaacgacgctgcaaaatctgccgggagaaattcactcctgcattcgaaaaccatcgttggtgctgtcctgagcatggcgctgaatttgccatgcaggagcttgagaagaagcgcgataagcaggccaaggcgaaagcgaagaaagagcgcgcagcctggagaaagcgcaaagccgcggtgaaacctctccggcactgggaagacatgacccagcgtgtcgttaacgactatatccgcgagcgtgaccacgatctgccgtgcatcagctgcggcacgttcgacactgttcagtgggaggccgggcattaccgatcccgcggtaaagcatctcacctgcgctacaacgaggacaacattcataagcagtgccatcactgcaatgtgcagttatcaggtaatcagcagcagtaccgcgtcgctctggtagagaaaatcggcgctgagcgtgtcgaggcgctcgaaaacaacaacacccctcaccgatacaccatcgaagaactggaaggcatcaggcgccattacagcgcgctacgccgtgcactcataaaacaacgggaggccgcatga

SEQ ID NO: 264485 - DNA, 591 bp, Klebsiella pneumoniae
atgttatttattgacagcagtaaaataaatactcttggcagtacgctgttaaaaagataccgtagagctactgccgttatggccgttatactgctgttgtgtgcgctggcctgtatgctcttcccaatatatagcggtgtggtcattagcaccctgactggtgctttaatgttcatctgtggcatgtactctgtggcgatggcattgatattcattaaatacaatactcgttcttacatctcatcgttattatttggaattatttattttggcgtcggctgtggttttatctttagcacgacattcggtattaatactttgtcattgctgttttgtgttttatttatccttgccgggtatagtcgcatcaccatgggatttaaagatcgggctatgaagggtcgttattggtgtattttcattggcataatagacctcatcgtcgccctggcctggctccgcgctagcgaagacgccaactatatcatcactgtcaccttcattggtctggaaatgctgttctgtgccggattcttcttagtgctcagctatgcactgaataaagcacaaaaaaaattaattaccacgtaa

SEQ ID NO: 264486 - DNA, 906 bp, Klebsiella pneumoniae
gtggatgcccactttggccagatcctgctggatagactgagcgatacgcggctgcggatcggtattcatcacgtacagttcggtagcaaaaccgttggggaaacccgcttcgctgagcagttgcttcgcttttgccgggtcgtagctgaaaccctgatatgccttgtcataaccgggcatggcgggtggcagtggctggttggccggcgccgcgcgtccattaatgatgcgcacgatgcgatctttgttgaccgccatgttcaccgcctggcggactttgagattatcgaaaggcggcagcgtggttttcatcgtcacgtagccggtctgcaactggtcgccggtgaccatcaggcccttataggccgggttgtttttaaacgacagaaactgtgcgggcggtacgccgtcgccggcaatatccacttcgcctttttccagccgcagcagagcgaccgagggatcctgtcccatttcgaactttatgtgatccagccgcggcacgccggctttaaagtagttcgggtttttgcggaagatcagctcctggcccagcttccactcctggagctcaaacgcgccgctgccgaccggatgcttgccgaagtcggcaccccatttctccacctcctcacggggaaccaccgaggcaaagttcagcgccagcacatgcaggaaggtggcgttgggctctttcagagtgatttttaccgtatgatcgtcgacgacctcgataccgctcagggtcgtgcttttaccgctggcctcctcgtcatagcccgcgatgggactgaagaacccggcgcccggactttgggttttcgggttgactgtgcgttccagagaatatttcacgtccgccgccgtgacctcgcggccgttgtggaatttcacccctttgcgtag

SEQ ID NO: 264487 - DNA, 1173 bp, Klebsiella pneumoniae
atgacgcagcaagctcccgacaagatcaatgtcttctggttcttacctacccatggcgatggccgttatctgggtaccaccgagggtggacgcccggtcgatttaccttatctgcagcaggtggcgctggcagccgacagcctgggctactacggcgtgctgatccccaccggtaaaagctgtgaagattcgtggctggtggcctcggcgctggcgccgttgacccgccgtctgcgctatctggtggcggtcaggccgggcctgcagccgccaaccctggcggcgcggatggcggccaccctcgaccgtttatcggaaggtcggctgctgatcaacgtcgttaccggcggcgacccggtggaaaacaaaggcgacggtatcttcctcagccacagcgagcgctatcaggtgacccgcgaatttcttgatatttacacccgcctgctgcgcggggaaaaagtggattatcacggcgagcatattcacgtggaaggcgctgaggtgttgttcccgccggtgcaggagaatggcccgccgctctatttcggcggctcttctgatgcggccattgatgtggcggccgagcagatcgacagctatctgacgtggggcgaacccccggaactggtggcggagaagctggcggtggtgcgcgagcgcgccgcggcccgcggacgcatcctgcagtacggcattcgtctgcacgtcattgtgcgcgaaacggaagaagaggcatgggccgccgccgaccggctgatcgcccatcttgacgacgataccattgcccaggcgcaaaagatcttcgcccgcatggactcggccggccaggcgcggatgagcgccctgcatcagggatcgcgcgataatctgcgcattgcgcccaatctgtgggccggcgtcggactggtgcgcggcggcgcgggtaccgcgctggtaggtaatccgcagcaggtagcggaacgcatccgcgaatatcaggcgctcggcatcagcaactttatcttctccggttacccacatctggaagaagcgcaccgctttgctgagctggtgatgcctctgttgccgctggaaaacggggcctcgtcgaaggcgcgtagcgtgaacaccggtccgtttggcgaaaccatcggcggcgataagcgcccggtgcgccaggtcagcgccagctga

SEQ ID NO: 264488 - DNA, 1146 bp, Klebsiella pneumoniae; identical to SEQ ID NO: 219206

SEQ ID NO: 264489 - DNA, 942 bp, Klebsiella pneumoniae; identical to SEQ ID NO: 136204

SEQ ID NO: 264490 - DNA, 1224 bp, Klebsiella pneumoniae
atgaccctgctctctactggcaccgattatgacgcgctggcggccgccttccgcccgatattcacccgtatcgcccagggcgctgcggagcgcgaacagcagcgcattctgcccgatgagccgatccgctggctgaaagaagcgggcttcggcacgctgcgtatcccgcgcgagaagggcggctggggcgcttcgctgccgcagctcagcgcgctgctgatcgagctggcgcaagcggactctaacctgccgcaggccctgcgcgcgcactttgcctttgtggaagatcagctgaatcagccggattccgccgggcgcgaccgctggtttcgtcgcttcctcgacggtgagctggtgggcagcggctggacggagatcggcgcggttaagctgggagaggtgaacaccagagtgacgccggcagagggcggctggcgactcgacggcgagaagttttacagcaccggcgcgctgtacgccgactggatcgatgtgtttgcccggcgcagtgataccgccagcgatgtgatagccctggtcagcacccagcagaccggcgtggtgcgggaagatgactgggatggctttggccagcggttgaccggcagcgggaccacccgctttaccggcgctcgggtggaaaccgaacatgtctatgattttgcccagcgctttcgctatcagaccgccttctaccagcatgtgctgctggcgaccctcgcgggcattggcctggcggttgagcgggatgccgcgcagggcgtcaaacatcgctcccggatgtacagccacggcaacgccgccgtgccgcgcgatgacgcccaggttctgcaggtcgttgggcagatcagcagctgggcatgggcgacccgggccgcggtcctgcaggccgcggaatcgctgcagcaggcctatgtggcgcacgtcagcgacgacgaagcattgattgcccggcgtaaccagctggcggaagtggaagcggcgcaggcgcaggtgatcgccagcgactggatcccgcgggcggcgacggagctgtttaatgccctcggggcgtcggatacgcgaactcgccttgcgctggatcgccactggcgcaatgcgcggacggttgcctcacataatccggtgatttataaggcacgtaatatcggtaactggctggtgaacggtgaagcgcccacctttatctggcagataggcaatggtgagaaaacggcggggtaa

SEQ ID NO: 264491 - DNA, 243 bp, Klebsiella pneumoniae; identical to SEQ ID NO: 235988

SEQ ID NO: 264492 - DNA, 456 bp, Klebsiella pneumoniae
atgctggcggcgcccaccgacgccgagcgtgaggtgctgggggatatcggctggcagcgcaacgaggtggtgctgcacagcgatccgcgctggctgccggagcgccagcgcgcctgggccagctggaactatcgcctgagcgacggggatcgggcccgggcctgcgtcacctacaacatgaatattctccaggggctgcccgcgggcgcgccgctgttctgcgttaccctgaacccggacgcgccggtggacgatcgctacgtctggcagcgcttcgtctatgagcatccgctgtttaacccgcaaagctggtcggcccagctgcggcgcgaagagattaacggccagcagcggagctggtactgcggcgcctactggtacaacggctttcatgaggatggggtgcgcagcgcgctcgacgtggtgcagggcatcgccgcggcggagggcaactga

SEQ ID NO: 264493 - DNA, 624 bp, Klebsiella pneumoniae
gtggtgattcaggagtcggtcttcacccgccgcggcgttgaccggatcctgcgctacgccttcgaactggcgcaaagccgcccacgcaaaacgctgacctccgcaaccaaatccaacggtctggccatcagcatgccctactgggatgagcgggtggaggcgatggctaaacactatcccgaggtccactgggacaaacagcatatcgatatcctgtgtgcccgcttcgtgctgcagccggagcggtttgacgtggtagtgggttccaacctgttcggcgatatcctctctgaccttggcccagcctgtaccggcaccatcggcattgcgccgtcggccaatctcaatccggaacgcatcttcccgtcgctgttcgagccggttcacggctccgcgccggatatctacggtaaaaatatcgccaatccgctggcgacgatctgggccggggcaatgatgctcgacttccttggcaacggcgacgaacgctaccgcgccgctcacgatggcatcctggcggcaatcgaacagacgatcgccagtggtccgaagacgccggatatgcaaggaacagcgtctacccggcaggtcggggaagcagtttgcctggccttaacccaataa

SEQ ID NO: 264494 - DNA, 624 bp, Klebsiella pneumoniae
gtgtcaatacggcgtccggttaacgcttacgatatttcagccgcggttaaagtatggcttgccccaaatggtgatgtttacgcgcgttcccgattctggatacctgagggacggctggaagcctgcacaaaacagcaggcggaactttaccgcaaatggaatcaagcgggatatctggaatttactgatggggatgttattgaccatgccgtgattaaagaggaaacgatcgagtgggcacgcggtgaattactgaatgaattcgcgtacgacccctggagtgccactcagtttgctttgtcggtagcagctgaaggaataccgattgttgaagtccctcagacggtgaaaaacctgtcagaagcgatgaaggaagtcgaggccaagatttacgccgggcgttttcatcacgacggtaatccggtaatgacctggatgatgtcaaacgtcaccgtcaaaccagacaaaaacgagaatattttccccaacaaggccaccccagaaaacaaaattgacggccctgtcgcgatgtttattgcgatgagtcgcctgcttgttaacggtggtggtgaagttgacttcctgtccactatcgatcctgacgaagaccttttacttctatga

SEQ ID NO: 264495 - DNA, 390 bp, Klebsiella pneumoniae
  misc_feature (370)..(379): n is a, c, g, or t
atgacgacttttattcagcttcacttactgactgcttatcctgtcgctaacctcaaccgcgacgataccggcgcgccgaaaacggtgatgcttggtggggcgacccgtttgcgcatctcttcacagagcctgaaacgcgcatggcgtacctccgaactttttgagcacgcactggccggccatattggcatccgcagcggccgcatcgcccgcgaagccgcggaaattctggtgaagagcgggattgaaccaaagaaagcggtggattacgtcaaagctattggcgaatgctttggcaaagttaaaactaaagcggatcaaaacgatccgctgaagtgttcggaaacggaacagctggcgcacattagcnnnnnnnnnncatggcggtag

SEQ ID NO: 264496 - DNA, 1140 bp, Klebsiella pneumoniae
  misc_feature (1122)..(1130): n is a, c, g, or t
gtgtacacaattgacttccctccttcccctgatactgaaaccagtacatatctagacatcgatatagaaaatgcccctgaagttaatgatgcatatgaagacttgcccataataggagtaatagatagtggtgtaaacaatcacccgttcctagatggtgcattaattggcggaatatctttcttatcagatgatggcgaagatattttaggtcatgggacttcggttgcagggatagcagcatttggtgattttaggaatcaattcagcagcggaaaccaacttactcgctacgctaaaatttgttctgcaaaggtagttaacaatgaaggtaaatttcctgatgaaattgtgattccaaaattaatgtcgcaggcaattaatgcacttcatgagagatttggatgccgaatatttaacatctctttgggagatcctaaagcaccatttaacggcaagagaaatggccaatgggcttccatactcgacgatttggcacgtagcctcgatattctaataatagtttcagctggcaatggtaatgcgtggggcagcaatccagaggatgctataaatgaatatccacactttctcgtacatgaaaaaaacagattccttgagccagcaggtgcagttaatgcaattaccgtaggttctttatcttgtggtgatggtttgccaccgagcctagcaccttatgtaggagtccaaccgacagcaaaaatggatgaaccttctatcttcacacgtacaggcccaggggtgttggggatatgtaagcctgatatggtcgattatggtggcaccgctatatatgactctgcaataccaggcatacgatctggtggggatatttctgaggctggtatgataagccttaacaataaatttttaacttcgctactcaaaacatcttctggtacatcggtggccgcccctatggtggcccacaaagcagctatattattaaaacaaataccagattgcaccgctaatttacttagagctcttttaataaactcatcgacttatccagaaattaaccaacaaaggattaatatattagacgagatatctaaaaacaaaatatatggaaagggaatcccaaagctaagaaacctnnnnnnnnncccaagctaa

SEQ ID NO: 264497 - DNA, 585 bp, Klebsiella pneumoniae
  misc_feature (552)..(561): n is a, c, g, or t
atggcagagtatgaacatttgcgtttggttaaaatgccacagcaattcgaaagacggaaaaaacccggatttggttccgcacctagccgtaacaatcagcaaaggattacacatggtacttcccttataactcagctagattctactgttgcttatatccgaagcaagcgaagacctggtaatattgatccctcactaatcatgaaagtcaagtatgagggttcagcagccgatgaagactgggaaagacttggattacatgtactttcacatgatgaagacaaaactttagtgttattttcatcaaacgactctctattatctcttaaagaaagaataaacgcatactcaggccccattcctgccaatcagaggaatccagcttacaataattttgtaggcaacttaacatctattgaacaaattactgcaacagatagaatcggaataagactcagggaagaggggttcgtttctttagatcactttgatgaaaacgaaagctatattattgacatcgaactttgggaatttggtggcagaatagagagnnnnnnnnnnaatagagagagaggcaaaagttga

SEQ ID NO: 264498 - DNA, 990 bp, Klebsiella pneumoniae
atgggatgggaacctgtctggccgtttaagccagatgtagtttttgagggggggaatgcagctgctaacacagaatttgtcgataactttgcgagtttagaattactaacaacaagtgcttcatcccaccgccaattttggacaactaatgcaactagtgcagcttctgcgctgtgtgccagaatggctgcaaggttaatggcacaatatcctgagtatcgcccagaaacgatccgtgctctgatcacacactctgcgcaatggacacctgctatgttgcgtatgtatcctgctcgcaataaaagtggcttcgcacagcttatacgccattgcggctggggctcaccagatgttgaacgtgcgctctggagtgtgaaaaatagtctgacactggtagctgaagacagcttgtacccctatcgtaagactcgcgacggtattaaaactcgtgacttgaatttacatgcgctaccttggccactggaacagctccaggagttacaggatacgcaggtagagctcagggttacattgtcttatttcatcgaacctaacccttcagcacgggggagttcatcaagatatcattacccatcccaccgtctacgctttgcgatgaaaagacaaacagaatctttagacgaatttaaaactcgcatcaatgcagcagctgagtctgaagagagtgagcatgggactaccggtaacgatgataactggtcattaggtgctactcaacgacataaagggtcgttgcatcaggatatatggcggggggcagcagcagagcttgctagttgtggttatttggctgtttatcctgcacaaggttggtggagaaccagaggcgctttgcaacgatttgattctgaagctaaatacagtctggttgtatcgattcatgcacccgaagcagacgtagacctttatgccgcagtggaaaccttggtcgaaaatatggttgaaaatcctgttgaaataatgggttag

SEQ ID NO: 264499 - DNA, 1200 bp, Klebsiella pneumoniae
  misc_feature (1162)..(1171): n is a, c, g, or t
atgtcggcccaaattcgtgaagggcaagaaaaccttgagctaattagcggtctcggaatgcaaattgagtttattgggcaacctgatgttgaattagcatttgaaagcttgggtaatgagagggggcggaacaaagatcagcacatagaagttttaagtatacataaggagggcgatataacctctgcaaatgtatttgtgcctgatggaaagctagtgcatttcgaaaattacattcaggattatttgactgagaaacgccgcgcagacggggtttccgctgaccataaatcgttaataaatacattatcagcaatacgtcttgcagaaattaaatctctttggacagacgatttgagtttattgccatctgacccggatgaggcattttggtgggaagtatggctaccagtgaggggtaatagaaatgccgttgttactgattttcatcgaataagccatgcgactggatgccaggtcagcgaacacaaagtcgattttcctgagcgaaccataacctggatgtatggttctcagagccaattttctcaagctaggttggttttaaactgtgtagcagaattgcggcgtgcaaaagatacagctgagtttttcgaaggactaccagcattggaacaacagctttgggtggatgatgcactgcgacgtctccaggttccttcacccgaagacaatgtaccttatatctgtttgttggattcaggcattaatcgcgggcacgctatgcttgcacctgttttgcaccagcaggacatgcatacagtcaatgacgcgtggggagtcaatgacaccgcaaaccatggtacggggttggctggagttgcaatctatggcgatatgattgacgctttgtcttctactgatgcaatagaagtaggacaccgactcgagtcagttaagcttactccaaattatggggccaacgttggtgacgcaaaacagcatgcatatctgttcagctcagccgttacacgtcctgaaattctcaatggtcagcgcaaacgtatttttagttcagcagtaacagcaactgcttatcgtgactttggtcgcccttcagcttggtcatcaatggtcgattcactggcagtagatgcgctagcagaaaccccttttccccggttctttgttctttccgctnnnnnnnnnngttgtttgttctttccgctgggaacatag

SEQ ID NO: 264500 - DNA, 948 bp, Klebsiella pneumoniae
gtgcaggaaatcgaagtcatcgggctgcgcgagcgtctgcgcctcggtgacgctctcggcgaaagcgtcccaggacatgacagcctcaatggcggcgaacggatcgccgccattctgcttggcctcgatcagcgcctgcccgatgcggccgaacagccgcaccttggcattgatcgccttgccggacgcctggaattgctgctgatgcttgttcttggcggcattgaacagcttgcccaggatgcggtcgtgcaggtcgatgatttcgtcggtgacggtggccatgccctcgattgccagcgccacgagcgtggcgtagcgccgctgaggctcgaacttggccaggtcggcgggcgtcatctggccaccctcgcgggcgatcttgagcagccggttctggtgaataagccgatcgatgccggaaggcaggtcgagcgcctgccaggctttgaggcgttcgatgtgttcgagcatgtgccgcgagttcggcttggccggggactggcgcagccaggccagccaagtggtcttgccgttgtcgcggcgtttgagcagatcgtcgaggcggcggcgatgtgcgtccgacagcggttcggccaaggagtcgtagatgcgccggttggcgcgggtgatcgcttcggcacagacgcgctcgacaacatccagcgtcggcaagatgatgtgttggtgtcgcagagcgtcgaggacgctgctggccaacacgatgcccttgtcggtctgcaaggccaagtcggtcgtggcatggacagcctgccgatagtgcgccaggccgaacggctccatgcccaggtacgtccgcagttcgagcaggtgttcgcgccgggtttcctcccgctcggcatactgcggccaacacgtcgcgtcgagtcgcagttgccgtccgatccattgcagcagaggaaccggcacgacggcatcgggcagtag

SEQ ID NO: 264501 - DNA, 429 bp, Klebsiella pneumoniae
atgcaaatccagcagcgccgtcatagcctgagggtcagcaagccgccgatcagcaccgactacgccgagcccgcgccggattatgccagcgcgctggcggaccggcagccgcagagcgccttcgccccgcgcagtgccaccccggagcaaacggcgatcacctctacccgcaccgcctttgcctggtacgccctgttccgcaatagctggagcgaagcgcttcgccagcaggtccagacgctgcaggtcccgggcaagggctggcagcgtgggttaaatctcaaccgcagcgtcaacgacgttgttgacggcgataccaacgcgatcgtgctggaaagcctggcctacatttcccgggggcagatgctgtgtctggcctgcctgagccctgcccctctaccctcgtcctcagcaggagcaacgccatga

SEQ ID NO: 264502 - DNA, 1548 bp, Klebsiella pneumoniae
atgaagctgacctatttttcccgttttcctctgctggccggactcatggcgctgtggctctcactatccggcgcgcaggccgcgaccggtctgccggctgcggaatacgccccgcgtagcggggagctgacgccgagggagatgactatcgccagaaatgcctggcaatatttcgtcgccaactttcagcccaccaccgggctggtgaatgcggtaaacaaatacccctccaccaccatgtgggacagcgcctcctatctggccgcgatgaccgcagcccgtgagttggggattattgataaggcggagtttgaccgtcggatgctgaagtttctcgccacgttgaataagatcgatttattccgtaacgaactacccaacaaagcctataacacgataagcggacaaaaggttaactaccagaacaagccgggtgaaatcggcttttcggcgctggatatcggcagaatgctgatctggctgaaggtgatcaaggagcgctatccggaatacagcaacagcatcgataatgtggtgctggggtgggattttagccatgttgtcgacccctgcggcacgctgtacggggcgtatctggaaaacggccagcccaaatacgttcaggaaggccgtctgggatacgaggagtacggcgcggcgggctttcagctgtggggatttaacacctgtcaggccagccggccgcagccctacgagctggcggagatttactgcgtgctggtcccctatgattcgcgcgacccacggcaaaccagccagcataactatgtggtcagtgaatcctacgtgctgtatggcatggagtttggctttgataaccctggtgaccggaacaacagcccgcgcgagtactcccatccatggatgaaaaactttgccgaccgggtctaccaggcccaggagaatcgctacgccatcaccgggatcctcaccgctcgctccgagcatcagctcgataaatccccgtactttgtctatgacaccgtgttcagcgacggttttaactggaacaccataaccgacaaaggccagttcgtaccgaacagcgccgcggtgtcgctcaaagcggcgatggggatgtgggtgctgtggaactcgccctataccgatcgtttgctggacgccattgaaaatgcgaacgaagcgggaaaaggctattacgagggactgtatgaaaacggcgacgggccaatcaatgagttcaccgccaacaataacggcatcatgctggaagcgctgctgtttaaaaaagaaggcaaactgctgcagttttccagcgacaatccaaaaaaccgcgatttcgccccgtcgctgtgggacaagaagctggtggatctctttgaacccaataacggcccgcgcaaccgccccttcctgagcaatacccctgccgtcaagacatggtgcgaacagaccggaaccacgcagcgcacccaacccgcctgccaggcctgccagtgcgccgcctgcaaggctgacgagcccgttaaacttccgccggtgaccgcgcaatgcttaaaaccctag

SEQ ID NO: 264503 - DNA, 486 bp, Klebsiella pneumoniae
atgctggcgctgaagggtgagcaggcgactctcgactggctgaaggcgatgaaaaccaactttgtcgcttacaaaggcaatagcacggtgatgaaagcggtcaacgccgggcagatcgacggcggggtgatctaccactattaccgcttcgtcgatcagtcaaaaaccggcgaaaacagcaaaaacacccaactgtattacttcaaacaccaggatccgggcgccttcgtcagcatttccggtggcggtgtgctggcttccagcaaacataaagcgcaggcgcaggcctttattaaatggatcaccggcaagcaggggcaggatgcactgcgcaccaataacgccttcgaatatgccgtgggggtagatgcggcctctaacccgaaactgaccccgctgaaagatctggatgcaccgaaggtagaaccttcctcgctgaacagtaaaaaggtcattgagctgatgacgcaggctggcctgctctga

SEQ ID NO: 264504 - DNA, 510 bp, Klebsiella pneumoniae
  misc_feature (464)..(473): n is a, c, g, or t
atgaaatttcgcttatcgcccctccgtacggcagcgctggttgccgcttctctgtttctggcgccgcaggggatggcggctgacgctcagaacgggattgtggtttacaacgcccagcacgaaaatctggtgaagtcgtgggtggatggattcaccaaagagaccggtattaaggtcacgctgcgcaatggcgatgacagtgaactgggtaatcagctggttcaggaaggctccgcgtcgccggccgatgtgtttctgaccgagaactcgccgtcgatggtgctggtcgataatgccaaacttttcgccccgctggatgccgccaccctgcagcaggttccggcgcagtaccgtccgcagcatgggcgctggatcggcattgccgcgcgcagcaccgtttttgtctacaacccggcgaaaatcagcgaggcgcagctgccgcattccctgatggatctggcaannnnnnnnnnaggctatcgtcagcgcgatgctggcgctgaagggtga

SEQ ID NO: 264505 - DNA, 135 bp, Klebsiella pneumoniae
atgttacctttgtcagcctggacaataccatcccagccgctggttgaaacagaatcaccgccgggcatgctcaatgctgttattgttgtggtcgcactgattaatcgccggatcaaaatgggcaacattccctga

SEQ ID NO: 264506 - DNA, 288 bp, Klebsiella pneumoniae
atgccggccgtggtgttcaccgacccgcaggtcgccaccgtgggctacagcgaggcggaagcacatcacgacgggatcgagaccgacagtcgcctgctaacactggataacgtgccgcgtgcgcttgccaacttcgacacacgcggcttcatcaagctggtcatcgaggaaggtagcggacggctcatcggcgtgcaagcgccctacctgaccatggtcgaagggctgaagctcgcggcgcagaccttcagcaaggacgtgaagcagctttcgtgctgcgccggatga

SEQ ID NO: 264507 - DNA, 249 bp, Klebsiella pneumoniae
  misc_feature (107)..(116): n is a, c, g, or t
atggacttcaatattgtcgccgtcaccgcctgcgtcagcggcgtggcgcatacctacatggccgccgaacgactggaaaaggtcggtcatcatgaaaaatggcaccnnnnnnnnnncgaccctcatcgctttcgcggcctgcggacgattaaaaccagcatcaagagcttcctgctgcagccgcagcagatcgtcgaggccgtgaaaagcatcatgaaaaagccggtcgtctatgtagaacttccctga

SEQ ID NO: 264508 - DNA, 795 bp, Klebsiella pneumoniae
atgaccgccgcgcgggttctgatactgctcgacttctttgcagtaaaaacgcagcagatcggcgctaatattgtcgacatcgtcgatatcgttgccgtacttgtcaaaacggttaatcagccgggcacggatctttttcccttccggcgtctggaaattggctttcagcacggccatcagttggtcaaagctgagacgctgctggtcgaagaccatacccttcagggcgtacagcgaatcgctcaggttagcgattccgataccctgaacgccggagaagttatagcgcgcgccgccggcggtgatatctttgccgtgctgcacgcaatcttcaatgaacgaggagagcagcgggaccggcgcccagtcgcggtggccgatatcgcaaatgttgctgccctcgaccatcagcttgatgtaatggcggattttgtcgcggatctggcagataaggccgtcccagctgacgtcaggctgatgttcattttcctgcagcacaatttccatcaccttcagcagattaaacatggcgatatcatgcaggccgtaggtgcgccctggaatagagagctccacgcagccgaccaccgcgtaatctctggcatcttccagcgacacgccgcggttaaggaaggccggcacgaccacctcatcgttgaaaatctgcgggatgccggtgcccaggcggatggtttcggcagttttgcgcaggaacgggcgatcaatcagctcgttgacccgcacgcccagattcggctgcggcagctgaacgttttgataggcgtcgaggcataa

SEQ ID NO: 264509 - DNA, 1326 bp, Klebsiella pneumoniae
atgagcaatccacaagacaacactgcatccattctgcagaaaaacaagaaggtactgatcgcgagcctgacaggcagcgccatcgaatggttcgattattttctctatggcaccgccgccgcgctggtgttcaacaaaatcttctttccgatggtcgacccggttatcggcctgatcctctcctggctctccttctcgctgacgttttttatccgccccatcggcggcgtgattttcgcccatatcggcgatcgcatcggccgcaagaagacgctggtgctgaccctgtcgctgatggggagcgccacggtggcgatcggcctgctgcccacctacgagatggtgggcctctgggcgccggccctgctgattactctgcgcattattcagggcatgggtatcggcggcgaatggggcggcgcgctgctgctggcctatgaatacgcgccggaaaagcggaaaggctttttcggcagcattccccaggccggggtgaccatcggcatgttgatggcgacatttattgtctcgctgatgacgctgttcgatgaggcgcagtttctcgcctggggctggcgcataccgttcctgctcagctccgtcctcgtttttctcggcctgtggatccgcaaagatatcgacgaaacgcccgcctttaagcaggtgaaaaaatccggccaggtggcgaaggccccgctgcgcgatacgctcaagcaccactggcgggaagtgctgatcgccgccggcctgaaagtggtggagaccgcccccttctatatcttctccacctttgtggtcagctacgccaccaccaccctgagctatcagaagtcgcaggcgctggaatccgtgaccctgggcgcgctggtggccaccgtgatgatcccgctgatggggctgctgtcagacaaggtgggtcggcaaaagatgtacaccctgagcgtggtgctgctggggctgtttatcgtcccgtggttcctgctgctcgacaccggcaccggctggggcatcatgctggcgacgatcgttgccttcggcatcctgtgggcgccggtaaccgcggtgctcggcaccctgtgctctgagattttcagcgccaatgtgcgctataccgggatcaccctcggctaccagctgggcgccgcgctggccgggggcaccgcgccgcttatcgccaccggtctgctggcgaaatatgacggtgactggcggccggtggccatttatctgggcattacggtggcgatttcgctcctggcgatattctgcgccagccggatgaagtccgcgctgggcacggccccctcccgggcggaaagcgcctga

SEQ ID NO: 264510 - DNA, 447 bp, Klebsiella pneumoniae
atgggcctgataaaaatccggcagatgcgggatcaccagcagccgggcaaaggcgatcggcatatcaacgcgcagctgaccgcggatcggccggtccggcgcgaacgactccagcagatcgtcggcctgggagagcaacggtttgctgcgacgataaaactcttccccctccggcgtaagatacagacgccgggtggtgcgctgcagcagccggaccccgctctcctgctccagctgctgcagtgctttggtcaccgccggtcggtggatctgcaaattttccgccgcctgggcaaagctgccggcatcgacgatttcaataaaaattttaatattttcaaacagattcatttgcatgatgacccgcctcccacctcttcatcagttcacattattactaatttaataacagtgatgaaagtttttgctcattttttaaaacaataa

SEQ ID NO: 264511 - DNA, 390 bp, Klebsiella pneumoniae
atgaaaaatcaggttactggcgcatcccgcacctttgtctgctgcgacgacgcgaaggtgatggcttactactcactggcttccagcgctgtgacgacaaatactgcgccgggtcgttttcgccgcaatatgcctgacccgatcccggttgtggtactgggtcgtctggcggtggataaatcactacatgggaaaggtgtcgggcgggccctggtacgtgatgccgggctgcgtgtgattcaggtggcggagactatcggcattcgcgggatgctggttcacgccctgtcggatgaagcacgggatttttacctgcgggtggggtttgagccgtcgccgatggatccgatgatgttgatggtgacgttgagggatttagttaatgcctga

SEQ ID NO: 264512 - DNA, 954 bp, Klebsiella pneumoniae
atgatgacacgtcctttgggcaaaaccggattttccatcgccccattagtctttggcggcaacgtctttggctggaccatcgatgaaaaaaccagttttgctcttcttgatgctttcgttgaccacggttttgacgctatcgatacggcggatgtttattcccgctgggcggagggcaaccagggcggcgaatctgaaaccataatcggccgctggctacaggcgcgccccggcatgcgcgataaagtcaaaattttcaccaaagtcggctccgatctcggcctccccggccataaagggctcagcaaagcctggatccaacaggcggttgacgactctctgcgtcgcctgaataccgattatatcgacctctacttctcccactggccggatccgcaaaccccggtggcggaaacgctggaggccttccacagcctgcagcaggccggaaaaatccgcgcgatgggggcctctaacctcgatgcgatgcagctggcgggggcgctggaggtggcgcgcaagggcggcttgcctgcctggcaggtgctgcagccggaatataacctctaccaccgctccgcctttgaaggcgcgctgtgcgatctctgcgtcagccgcgatatcggggtggtgacctactacagcctggcctcggggttcttaaccggtaagtaccgtcagccgtcggatctggcgcagagccagcgcggaggcaagattggtaagtacctgaatccgcgcgggatgcggattatcgataccctggcggcggtcgcggaggagcagggggcgaagccggcggaagtggccctcgcgtggctgatcggccgcgaaggggtgaccgcgccgatcgccagcgccaccagcgtggctcaggtggagagttttgcccgcgcggcggcgctgagcctgagcgcggagcaagtggcgcggctggacggcgccagcgcctga

SEQ ID NO: 264513 - DNA, 969 bp, Klebsiella pneumoniae
atgctggggatcggcaacgccgggaacgccattaccgggcgcgagctggaggtgatggacgatacccaactgagtgaagcggcgcagaaattcgatatttttgcccgtaccagtccggaagataagttccgtctggttcaggcgctgcaaagcaggaaagaggtggtcgggatgaccggtgatggggtgaacgacgccccggcgctgaagcaggccgatgttggtatcgcgatgggcatcaagggcaccgaagtgaccaaagaggccgctgatatggtgctgaccgatgataacttcgccaccatcgccagtgcagtcagggaagggcggcgggtttacgataacctgaagaaaacgatcttgttcattatgccaaccaacctggcgcaggggttgttaatcattatcgcgctgctggcggggaatttgattccgctgacgccggtgttgattttgtggatgaacatggcgacgtcggccacgctgtcgtttggtctggcgttcgaagccggtgaaaagaacatcatgcgccgtccgccgcgcgatcctaagctgcatgcgatggacggctttgccatctggcgggtaatttttgtcggttcgatgatcgccgtgagcgcctttgtgctggaggcctggctacagccgcgaggctactcacctgagtttatccgcaccgtactgttgcagacgctggtcaccgcacagtggttttatatgctcaactgccgggtggcggatggtttctcactgagcaaagggctgctggcgaaccggggtatctggattgtcagcggcgtgttgctggtgctgcaactgctgattatctacgcgccgtttatgcagatgctgttcggtaccgaagcgctgccgttccgctactgggtgatcacctttattatcggttttgtgatgttcctgattgtggaaattgagaagccgctgacgcgcaagtggcgcacggcctga

SEQ ID NO: 264514 - DNA, 297 bp, Klebsiella pneumoniae
atgcgggcggatcagcgactggataaaggggcggatctccagcgggtactcccgctgctccgcggtcagcggcgtatcgaggcagagctgcgtcatgccgagaatgccgttcatcggggtgcggatttcgtggctcatattggcgaggaaggcgcttttcgcttcgttcgcctcgcgggcctccttcgccgcctcaatggccagcagctctgcggctttgcgccgggtaatatcctgcaaggtgccgatcacccgctctgcctgctgctgcatgttgagggtgacgatctgccctga

SEQ ID NO: 264515 - DNA, 300 bp, Klebsiella pneumoniae
atgctcattgttattactgtcgctacacacctcatccatcgcctgggaaaaagcaaaagcagaccccatatttttatcattctcaattatattaaaatctgcatgagcataatgtacctggagatcatgaataatattcttactatcattagaactaccattatcaacgataaaaaaagtattacaaccagcattaatacattcatagacaactctttttacaaactctccacggtttgcatacgtcaccattacagctgtgaaattaatcattatacaatccctgctttttttgaataa

SEQ ID NO: 264516 - DNA, 282 bp, Klebsiella pneumoniae; identical to SEQ ID NO: 252437

SEQ ID NO: 264517 - DNA, 264 bp, Klebsiella pneumoniae
atggaaaagttcatcaccaatcccggaagagtgggggaagatgcgccggtgtatctgacctggaaagccgatgccccactatctgacaagggcgataccggaataacagctggtagtcgtaaaacaaaggcgccgggtattctgacgctggcaaaagtccctggcgttgatgctgaggggaatacgctgtccggtaaccaggatgcggcatattatcagatacgtcctgaaggtggctggctggctggccgcagccagtgttaa

SEQ ID NO: 264518 - DNA, 213 bp, Klebsiella pneumoniae
atgatgtacaaaggcattcgctttgatatccaccaccacatacgcgccgtagcgggtaacgttaatatgcatcacgttgcgccacggggtacgcgactggcactgtaccgcgcgaaacgaggtaaagtcattctctcccagcagacactgcgcggcgcgctgcatacgctcggcgtcgagcggctggtgaaaatgcgtcacgccatgacttaa

SEQ ID NO: 264519 - DNA, 162 bp, Klebsiella pneumoniae
atgctagcgccgttttttaatcagttggcgcagggcagcgcggcacagtcgcggcagttaaatcaggcgaacatccgctggtctgaagctcagcagcgcagtccgcaatttaatgaggcgatctgtcaggcgttggccgccgcggtggcagagaaaaaatag

SEQ ID NO: 264520 - DNA, 444 bp, Klebsiella pneumoniae
atgtcttcgcgaattttaacctcccattttagcggcctggaagagttcctccagcagcacgcggcgctgctggcaaaatcgactgacggcaccgttgccgtttttgccaataacgcgccggcattctatgcgctgacgccagcgcggctggcgcaactgctggagctggaagccaggctggcgcgccccggcagtgacgccgattttcagcgcctggccgcgctgtggggcattgccctgagccagccggttacccccgaagagctggccgctttcgtcgcttactggcaggcggaaggtaaagtctttcaccacgtgcagtggcagcagaagctggcgcgtagcgtgcaaatcagccgcgccagcaacggcggacagccgaagcgcgatgtgaacagcgttagcgaacccgacagccatattccgcgaggtttccgaggatga

SEQ ID NO: 264521 - DNA, 339 bp, Klebsiella pneumoniae
gtgaaactcatcgaggatcaccagccccacgcccgtcagctccggatcgcgctggatcatgcgcgtcaggatcccctccgtaaccacctccaggcgggtctgcggtccgacgcaggtttcggcgcgcatgcggaaacccacggtctcccccggcttttcgccaagcagttcagccagccgctgcgcgacattacgcgccgccaggcgcctcggctcgagcaggataatgcgtcccgcgatgttgccctcggcgaggatctgcagcggcagccaggtcgacttcccggcgccggtcggcgcgttgagcaaaacctgcggcgcatgctgcagggcggataa

SEQ ID NO: 264522 - DNA, 378 bp, Klebsiella pneumoniae
atggttgggctgcaggcgtacgctgaggtggccgggcaggccgatggtgttgcgaaagcgcgtcaccacctggcatttgctggcggcaaggatcagatcctgattgcgcatcagcttactgaccgccgccgccatctccggggtgatggcgcgggcgacccgctgcagcgtggcggtatcggtagcatcatccagcagccagtcgcgaaaatcgccgaccgtcaggtgacgcagggcggcaaagccctgcgcatcatgggtgtcgaggatcaggcgagtcacttcgtcctgctcgtaagggataagcgggttgtcgagaatgtcggtcagcggcacctcggcgagggccattttcgccgccatccgctcttcggctga

SEQ ID NO: 264523 - DNA, 765 bp, Klebsiella pneumoniae
  misc_feature (611)..(620): n is a, c, g, or t
atgccaatggatttcgatatctacaatttccccgcatcaattcaccgccgggccaaagagatcgtccagaagaaagaaagtccgttcaaggaatggtctgcagcgctgcgcaaggttgcaggcatcctggattattcccgcgctgccatttttgctcttattcgtggcgccaccagcgatattcaccatttcccggtaagtctgcagacctatatcaatgcgaacctgacggagcataagcatgacgccccttctgctgaaacgcttgagaaagccggtcatgtttcatctgccgccgtcactctggacgctgtgaaaaaggctatcgatggagatgaaggtgtgcctgacctggaaactctcccaactgactttcaggtaattggcaccgaactggtgaaagaagctcaaaagaaacgccctgacgctaatcaggttctggccgccgaacgtggcgaatatgtcgaaggcatcagtgaccccacggatccgaagtggataaccgaagacctgaccaaacccaaacagcctgaagtttcaaacatgggcaatggtgttttttcgattgatggtctgatggatagccagccagcaccagcactttctatcgnnnnnnnnnngaagaaaaattacatcaagctaattccggggaaaccaccagcgatgtgcagatggaaacggctcagccggtcgaagacgaaaatgataatgcggtatcaacaggcgaaggcgctgatgaacctcctgcgcaaacaactgccgtga

SEQ ID NO: 264524 - DNA, 1716 bp, Klebsiella pneumoniae
atgtctgaaattttctgttctgtgctccacctgtcggcgccgggggcgcaaaacggggagaataacaatttaatgtctatctacccaatgtatacccgaaaaatcacccactggtttgccagacgatcgtttcagaatcgcatcttcctgctgatcttattcacctcgacgatcgtcatgctggcgatgtcatggtatctgacagacattaccgaggagcgtttgcattatcaggtcgggcaacgggcgctgattcaggcgatgcagatttcggcgatgccggagctggtggaggcagtgcagaaacgcgatctcgccagaatcaaagcccttatcgaccccatgcgttcgttctccgacgccacctacatcaccgtcggtgatgccagcggccagcgcctctatcacgtcaatcctgatgaaatcggcaaatcgatggaaggcggcgatagcgatgaggcgttgataaacgctaaaagctacgtgtcagtgcgcaaaggctcgctgggatcgtcgctgcgcggtaaatcgccgattcaggacgcaaccggcaaggtgatcggcattgtgtcggtaggctataccattgagcaactggaaaactggctcagcctgcagataagttcgctgctgatcccgatggccatcatgttactgcttctgctcttttgcgcccgccgcttctcactgcatatcaaaaaacagatgctcaatatggaaccccagcagctgtcacagctgttgatccagcaaagcgtgctgtttgaatcggtgttcgaagggcttatcgccatcgactccgattataaaatcactgcgattaatcagactgcgcgtcgcctgctcaatttgagtcagccggaaccgacgcttatcggcaaacggatcagcagcgttatctcgcaggaggtcttcttctacgatgcgccacagaccaataaaaaagacgagatcgttaccttcaatcagatcaaagtgatcgccagccggatggcggtgatcttaaacaatgagccacagggctgggtgatcagctttcgcagcaaagacgatatcaacacccttagcctgcagcttagccaggtacaacaatatgccgataacctgcgcgccgtacagcatgagcatcgcaatctgatctccactatcgccggtctgctgtttcttaaacgctataaccaagcgctggaactgatccaacagcagtcggaaagtcaccagaaggtgatcgattttattgcacgcaatttccaggacaaccacctggccgggctgttgatcggcaaatattaccgggccaaagagcttggacttgagctgattttcgatccggcctgcttcgttgatagattacctaccgccctttcgcacaacgaatggatctcgatcgtggggaatctacttgataacgcctacaatgccagcctgcgtcaaccgcagggttcaaaacagatcgaatgcctgatcaacagtgatggccaggaggtgatcattgagatcgccgaccagggatgcggcattgacgaggcgctgcgcgatcggatcttcgagcgcggcgtcaccagcagcgccagcaaagatcatggtatcggactctggctggtacgcagctacgtggaacaagcaggcggcagtatcgtcgtcgaaaataatattccttttggcaccatttttacgctttatatccccctgacccgagatgaacatcatggatag

SEQ ID NO: 264525 - DNA, 630 bp, Klebsiella pneumoniae
atgactgaacgggtttattacaccagcgatgctaccgacgggcgcgcccagatcatcgcctgcactgcagaagcggatggccgttacgccatcgaactggatcggacgctgtttcacccgcaagggggcggtcaaccggcggaccgtggatggattgccgggcaggtggttgagacggtggctgtgcgcggcgaaagggtgctgcatattctgtcgcaaccccttcccctcggtgaagtggagatgaaaattgatgcctccgcgagacagctgcatgctcgtctgcattctgccggccacctgcttggcctggcgggcgaacagcttggctggcaaccggtgaaagcgcaccactggcccggcgaagggcggataacctttaccagcaggaatagcgccgcgctgccggacgccagtgcgctactggcgctagtaaaggcatggcaggcgcaggacttaccgcgtcaggtgacgttcgctgatggcatgcgcaaggtgggattcggcgagctgccagcctatccctgcggaggcacccacgtcgcccgtctggcggagctgggcgacattgtcattagtcagattaagatgaagaaggggcagctggtggtcagctacaccctggcgtaa

SEQ ID NO: 264526 - DNA, 930 bp, Klebsiella pneumoniae
atgaatctgaacctcctgcccgacctcgctcttttcgttcagatagtcgaccagggcagcttctccgccgtcgcccgccagaacggcattaccccttcagccgttagccgcagcgtgtcacggctggagcgagagatgggctgcaaactgctgcagcgtaccacccgcaagctgcgtcttagcgatgccggggaaacgatatatcagcatgcccagcagatgctggaagcggcgcgacaggcaatggattccgcaggcagtcgccaaacggtcgcccagggaaagctgacgctcagcgtcccgaaagccgtcggccgctttgtgatccacccgctgatgatggcgtttttccaccgctacccgcaggtggacgtctgcctgcggctggaagatcgccctctcgattttatcgatgacggtattgatctggcgctacgcatcaccgataccccctcccccggcctgcatggcaaaccgctgatgccaatcaggcacgttatctgcgccactgaggcctatttacagcagcacggtacgccgtacacgccgcaggatctgcgcgcgcatagctgcattagccttggcgaaacgcccgccgatgcgcgctggaagttccgtcgggaaggcaaaacagaaacggtgcaaacctacgggcggtacgccgccaaccataccgccgtacgcctcgacgcggtgagacagcatttagggatcggcagcctgccgctgttcaccgcccgtgaggcgctggcgaacggcgacatcgtgcaggtgctgcccgagtgggaatttatcagcagctactccggcgacctgtggctactgtgggcgggagataagcatatgcccgccaggatgcgggcgatgatcgattatctcagcgagatggtgccggcgctgaacgcaggaagcacagagccagcgaaataa

SEQ ID NO: 264527 - DNA, 366 bp, Klebsiella pneumoniae
atgacctatggacaggcgtatttgagcggctggaaagaggcctttaattttagtggccgcgccagccggcagcagttctggacgttttttctcatcaatgtattgatcgccgccgcgccagtggccgcctggagtctggccacccttgttgaccctcactacgggctcctcagttttgttgtcataccctttgcggcgctgtggctgctgttgatggcgatccccctgctggctgtaggctgccggcggatgcatgatatcggccgctccgggatctggtttgtgttgggagttatcattccgtggtttgcaattatttcgctggctctgtgcttcctgcgttcagcgccggcaccatctcgctga

SEQ ID NO: 264528 - DNA, 915 bp, Klebsiella pneumoniae
atgcgcttaccaatcattcttgataccgatccgggcatcgacgatgccgccgccattgccgcggcgctgttcgcgcctgagctggatctgcagttgatgaccaccgtagcgggcaatgtctcggtggagaagacgacccgtaacgcgctgcaattgctgcatttctggaatgccgatgtaccgctggcgcagggggcgtcgatgccgctggtgcgtccgttgcgcgacgccgcctcggtgcatggcgaatccggcatggaggggtatgactttgttgagcatcaacgtcaaccgctggcgaagccggccttccaggctatccgtgatgcgcttatgcatgctgccgagccgatcaccctggtggcgattggtccgctgaccaatatagcgctgctgctgacccagtacccggaatgcgtgtttaatattcgccggctggtgatcatgggcggctcggcgggccgcggcaacttcacgccgaatgcggaattcaatatcgctatcgacccggaggccgctgcgaaagtgttccacagcgggctggagattgtgatgtgcgggctggacgtcaccaaccgggcgttgctggcggcggattatctggcgacgctgccgacgctgaaccagaccggtaaaatgctccatgcgctgtttagccactatcgcagcggcagcatgagcagcggtctgcgcatgcatgacttgtgcgctattgcgtggctggcccgcccggaactgttcactctccagccgtgctttgtggcggtggagacgcaggggacctggaccgccggcaccacggtggtggatatcgaaggacgactgggccagccggcgaacgcccaggtggcgctggatatcgacgtcgaagggtttcagcgctgggcggcggaggtgattgccctggcgccgtga

SEQ ID NO: 264529 - DNA, 951 bp, Klebsiella pneumoniae
atgcagatcctgttggctaacccgcgcggtttttgcgctggcgttgaccgcgctatcagcattgtagaaaacgcgctgacgctgtatggcgcaccgatctatgttcgtcatgaagtggtgcacaaccgctatgtggtggatagcctgcgcaagcgtggcgccatttttatcgaacagatcagcgaagtgccggacggcgcgatcctgattttctccgcccacggcgtgtcgcaggcggtacgcaacgaagcgaagagccgcgacctgacggtgttcgatgctacctgtccgctggtgaccaaagtccatatggaagttgcccgcgccagccgccgcggcgaagagtcgattctgattggccatgccggccacccggaagtcgaaggcaccatgggacagtacaacaacccgcaaggggggatgtacctggtcgagtcgccggaagacgtgctgaagctggaagtgaaaaatgacgcccggctgtcgtttatgacccagaccacgctctccgtcgacgatacctcggatgtgattgacgccctgcgcgcgcgttttccgaaaatcgtcggcccgcgcaaagacgacatttgctatgctaccactaaccgtcaggaagccgtgcgcgcgctggcggagcaggctgacgtggtgctggtggtcgggtcgaaaaactcctccaactctaaccgcctcgccgagctggcgcagcggatgggtaaggcggcttacctgattgacgacgcctccgatatccaggaagcgtgggtcaaggatgcggcctgcgtcggcgtgacggcgggcgcgtcggcgccggatattctggtgcagaacgtcattacccgcctgcaggagctgggcggcggcgaagccgtgccgctggaaggccgggaagagaatatcgtctttgaagtgccgaaagagctgcgtgtggatgtccgtgaagtagagtaa

SEQ ID NO: 264530 - DNA, 450 bp, Klebsiella pneumoniae; identical to SEQ ID NO: 210166

SEQ ID NO: 264531 - DNA, 501 bp, Klebsiella pneumoniae
atgagtaaatcgatctgttcaacggggctacgctggctgtgggtggtcgtagccgtgctgattatcgatctgggcagcaaattcctgatcctccagaacttcgctctgggggagacggttccgctgttcccgtcgcttaatctgcattatgcccgcaactatggcgcggcctttagctttctcgccgacagcggcggctggcagcgctggttcttttccgggatcgcgatcggcatttgcgtagtgctgacggtgctgatgtaccgttcgaaggcgacgcaaaagctgaacaatattgcctacgcgctgattatcggcggcgcgctgggcaacttgttcgatcgcctgtggcatggctttgtggtcgatatgatcgacttctacgtcggcgactggcattttgccaccttcaacctcgccgatagcgcgatctgcatcggcgcagcgctgattgtgctggaaggcttcctgccgaaaccgactgtgaaagagcaggcgtaa

SEQ ID NO: 264532 - DNA, 2853 bp, Klebsiella pneumoniae
gtgtttatcaaaccgaaatacggaaccgagaatctgatgagtgactataaatcgaccctgaatttgccggaaacagggttccctatgcgtggcgacctcgccaaacgcgaaccgggaatgctggcgcgttggaccgatgatgacctgtacggcatcattcgtgcagccaaaaaaggcaaaaaaaccttcattctgcatgatggccctccttatgcgaatggcagcattcatattggtcactcggtaaacaagattctgaaagacattatcgttaagtccaaaggactgacgggctatgactcgccttacgttccgggctgggactgccacggtctgccgatcgagctgaaagtggagcaggaatacggcaagccgggtgagaaatttaccgctgccgaattccgcgctaagtgccgcgaatatgccgccgagcagatcgatggccagcgtaaagactttatccgtctcggcgtgctgggcgactggtcgcatccgtacctgaccatggacttcaaaaccgaagccaacatcatccgcgcgctgggcaaaatcatcggtaatggccacctgcataaaggcgccaaaccggtgcactggtgcgtagactgccgttccgcgctggcggaagcggaagtggagtattacgacaaaacctctccgtctatcgatgtcgcgttccacgcggtagacaaagccgcggtactggcgaaattcggcgtagccgacgtcaacggtccggtgtcgctggttatctggaccaccacgccgtggaccctgccggccaaccgcgctatctctctgtctcctgagttcgactatgcgctggtgcaggttgacggccaggcgctgatcctggcgaaagacctggttgagagcgtaatgaagcgcgttggcacgacggactacactattctggcggcggtacaaggttctgagcttgagctgatgcgctttaagcatccgttcctcgatttcgacgtgccggcgatccttggcgaccacgtgacgctggatgccggtaccggtgcggtgcataccgctggcggccacggtccggacgactacaccatcagccagaaatacggtctggaaatcgccaacccggttggcccggacggcgcttacctgcctggcacctggccgtccctggacggcattaatgttttcaaagccaatgacatcatcgttgagatgctgcgtgagcgtggcgcgctgttacacgttgagaaactgcagcacagctatccatgctgctggcgccacaagtcgccgatcatcttccgcgccactccgcagtggttcgtgagcatggatcagaaaggcctgcgcgcgcagtcgctgaaagagatcaaaggcgtgcagtggatcccggactggggccaggcgcgtatcgaatcgatggtcgctaaccgccctgactggtgtatctcccgtcagcgcacctggggcgtgccgatgtcgctgttcgtgcataaagaaacccatgaactgcacccgcgtacccttgagctgatggaagaagtggcaaaacgcgttgaagttgacggcatccaggcgtggtgggatctcgattcccgcgacattcttggcgatgacgccgacagctatgagaaagtgccggataccctcgacgtctggtttgactccgggtcgacccactcttccgtggttgacgtgcgtccggaattcgccggtcacgccgccgatatgtatctggaaggttctgaccagcatcgcggctggttcatgtcctcgctgatgatttccacggcgatgaaaggcaaagcgccatatcgccaggtactgacccacggcttcaccgtcgacggtcagggccgcaaaatgtccaagtctatcggcaacaccgttagcccgcaggacgtgatgaacaagctcggcgccgatatcctgcgcctgtgggtggcttccaccgactacaccggcgaaatggcggtctctgacgagatcctcaaacgcgctgcggacagctatcgtcgtatccgtaacaccgcgcgcttcctgctggcgaaccttaacggtttcgatccggcgaaagacatggttaaaccggaagagatggtggtgctggaccgctgggcggtcggctgcgcgcaggcggcacaggaagatatcctgaaagcctacgaatcctacgacttccatgaagtggtgcagcgcctgatgcgcttctgctccatcgagatgggctcgttctacctcgacatcatcaaagaccgccagtacaccgccaaggcggacagcgtggcgcgtcgcagctgtcagaccgcgctgttccatatcgtggaagcgctggtgcgctggatggcgccgatcatgtccttcaccgcagatgaaatctggggctatctgccgggcgagcgtgagaaatatgtcttcaccggcgagtggtatgaaggtctgttcggcctggccgacgacgaagcgatgaacgacgatttctgggatgagctgctgaaggtgcgtggcgaagtcaacaaggtgatcgagcaggcgcgtgcggataagaaagtcggcggctcgctggaagcggcagtcacgctgtatgctgatgccgatctggcggctaagctcaatgcgctgggcgatgaattgcgatttgtcctgttgacctccggggcgaacgtcgcagactatgcgagcgcgtccgctgatgcgcagcaaagcgaactgcttaaagggctgaaagtcgcattgagtaaagctgaaggtgagaaatgcccgcgctgctggcattacaccaccgatatcggcaaggtggcggaacacgcggaaatctgcggacgctgtgtgagcaacgtcgccggtgacggcgagcaacgtaaattcgcctga

SEQ ID NO: 264533 - DNA, 939 bp, Klebsiella pneumoniae
atgaagctgatacgcggcatacataatctcagtcaggccccgcacgggtgcgtgctgaccattggtaatttcgacggcgtgcatcgtgggcatcaggcgctgctgcagcggttgcgcgaagagggccgccagcgcggtttaccggtcgtggtgatgatttttgaaccccagccgctggagctctttgccgctgataaagccccggcgcgattgacccgcctgcgtgaaaagctgggctatctggctgaaagcggggttgactatgtattgtgcgttcgctttgaccgccggttcgccgcgctaaccgcgcaggattttatcagtgaactgctggtgcgtcgcctgggcgtgcagttcctcgccgttggtgacgatttccgctttggcgctggtcgccagggggatttcttgttattacaaaaggcgggggcggaatatggcttcgacgtcaccagcacccagaccttctgcgaaggcggggtgcgaatcagcagcacggcggtacgccaggcgctggccgatgacgatctcctgctggcggagacgctgctcggccatccgtttagcatctccggacgcgtcgtgcatggtgatgaactaggccgaaccataggttttccgacggcgaacttaccgctgcgtcgtcaggtttccccggttaaaggggtctatgcggtagaagtgacagggctgggcgacaaaccgatagcgggcgtcgccaatattggcacccgtccaacggttgcgggcgtgcgtcagcagctcgaagtacatctgttggacgttgtaatggacctctacggtcgccatatcaatgtaatactgcgtaaaaagatacgtaacgagcagcggtttgcgtcgctggacgagctgaaggcgcaaatcgcacgtgatgagttaacggcccgcgaattatttgggctgaccagccaggcctga

SEQ ID NO: 264534 - DNA, 210 bp, Klebsiella pneumoniae; identical to SEQ ID NO: 138792

SEQ ID NO: 264535 - DNA, 897 bp, Klebsiella pneumoniae
atgtcacatattaactacaatcatctgtactacttctggcacgtgtataaagaagggtccgtcgtgggcgcggcggaggcgctgtttctgacgccgcagaccattaccgggcagatcaaagccctggaggagcgcctgcaggggaaattatttaagcgaaagggaagggggcttgagccgagcgagctgggggagctggtttttcgctatgccgaccggatgtttaccctcagccaggagatgctcgacatcgtcaactatcgcaaagagtcgaacctgctgtttgacgtcggcgtggccgatgcgctctcgaaacggctggtcagcggcgtgctggatgccgccgtcgtagagagcgagcagattcatctgcgctgttttgaatccactcatgagctgctgctggagcagctgagccagcataagctcgacatgattatctctgactgcccgatcgactcgacgcagcaggaagggctattttcggtgaagattggcgagtgcagcgtcagcttctggtgcatgaatccggcgccgacgaagccgttcccggcctgcctcgaagagcggcggctgctgatccccggccggcgatcgatgctgggacgtaagctgctgaactggattaacgtgcagggcctgaaggtggagatcctcggcgagtttgacgacgcggcgctcatgaaagccttcggcgccgcacataatgcgatatttgtcgcgccgacgctctacgcgcatgatttctaccatgatgaatcgattgtcgaaattggccgtatggatagcgtgatggaggagtatcacgctattttcgctgaacgaatgattcagcacccggcggtacagcgtatctgtaatcgcgattattcgtcgctgttcaccgaaccccgatag

SEQ ID NO: 264536 - DNA, 1224 bp, Klebsiella pneumoniae
gtgtattatgcttttatcgagttattcaccaacaggatgaaagtaaaagtgaaacatctgcaacgattctttagtagcgatgcttccggcggcattgtcttaattatcgccgccgcgctggcgatggtgatggccaataccagcgtgaccagcggtctgtatcactccttccttgagacgccagtacagctgcgtgtgggcgcgctggagatcaacaagaacatgctgttatggatcaatgatgccctgatggcggtgttctttttgctgattggcctggaggtcaagcgtgagctgattcaggggtcgctggcgagccgccgtcaggcggtcttcccggtgatagccgcgctgggcggcatgatcgtcccggccctggtctacctggcctttaacgcccaggatcctgtcgccagagaagggtgggcgatcccggcggcgacggatattgcctttgccctcggcgtgctggcgctgttaggtagccgggtcccgacggcgctgaagattttcctgatggcgctggcgattattgatgacctcggggctatcgtgattatcgcgctgttttatacccacgacctgtccatgctctcgctgggcgtggcggcggcggcgatcgcggtgctggtggccctgaatctgagcggcgtgcggcgtatcgggatctatattctggttggcgcggtgctgtggacggcggtgctgaagtctggcgttcacgcgacccttgccggggtgattgtcggctttatgatcccgctcgaggaaaagcatggcaaatcgccggccaaagcgcttgagcatgtcctgcacccgtgggtggcgtttatgatcctgccgctgtttgccttcgcgaacgcgggggtctcactgcagggggtcacccttgccgggctgacgtcgctcctgccgctgggcattatggctggcctgtttatcggtaagccgctggggattagcctgttctgctggctggccctgaagctgaagtgggcttcgctgccggagggaaccacctgcaagcaaattatggcggtggggatcctgtgcgggattggctttacgatgtcgattttcatcgccaccctggcctttggcagcgtggatcccgcgttgatcaactgggccaagcttggcattctgatcggctcagtgctatcagcggtcgtcggctacctcatactgcgtcagcgcgtgacggatactcgcctcgcggtataa

SEQ ID NO: 264537 - DNA, 1134 bp, Klebsiella pneumoniae
atggcaaagcaagattactacgagattttaggcgtttccaaaacagcggaagagcgtgaaatcaaaaaggcttataagcgcctggccatgaaatatcacccggaccgcaaccagggtgataaagaggctgaagccaaatttaaagaaatcaaagaagcgtatgaaatcctgactgatgcccagaagcgtgcggcctacgatcagtacggccacgcggccttcgaacagggcggcatgggcggcggcggcggttttggcggcggtgccgacttcagcgatatctttggcgatgttttcggcgatatctttggcggcgggcgtggtcgtcagcgcgcggcacgcggcgccgatctccgttacaacatggagctgacgctggaagaagcggtgcgcggcgtcactaaagagatccgtattccgacgctggaagagtgcgacgtctgccacggcagcggcgccaaggccggcagcaaaccgcagacctgtccgacctgtcatggcgcgggccaggtgcagatgcgccagggcttttttgctgtacagcagacctgtccgcactgccagggacgcggtacgctaattaaagatccgtgcaataaatgtcatggccatggccgcgtagaaaaaaccaaaaccctgtcggttaaaattccggcgggcgtggataccggtgaccggatccgtctggcgggcgaaggcgaggccggcgaacatggcgcgccggcaggcgatctgtacgttcaggttcaggtgaagcagcacgctatctttgagcgtgaaggcaataacctgtactgcgaagttccgatcaacttcaccatggcggcgctgggcggtgagatcgaggtcccaacgctcgacggccgcgtgaacctgaaaattccaggtgaaacccagaccggcaagctgttccgcatgcgtggaaaaggcgtgaaatccgttcgcggcggcgcgcagggcgatctgctgtgccgcgtagtggtggagacgccggtggggctgaatgagaagcagaagcagctgctgaaagagctgcaggagagcttcggcggtccgaccggggaaaacaacagcccgcgttcgaaaagcttctttgacggcgtgaagaagttcttcgacgacctgacccgctaa

SEQ ID NO: 264538 - DNA, 1917 bp, Klebsiella pneumoniae
atgggtaaaattattggtatcgacctgggtactaccaactcttgtgtagcgattatggatggcactactgcacgcgtgctggagaacgccgaaggcgatcgcaccacgccttctatcattgcctatacccaggatggtgaaactctggttggtcagccggctaaacgtcaggcagtgacaaacccgcaaaacaccctgtttgcgattaaacgcctgattggccgccgcttccaggacgaagaagttcagcgtgacgtttctatcatgccatacaaaattgttgccgcagacaatggcgacgcatggctggatgtgaaaggcaccaaaactgcaccgccgcagatctctgctgaagtgctgaagaaaatgaagaaaacggctgaagattacctgggtgaaccggtaactgaagcggttatcaccgtaccggcttacttcaacgatgcgcagcgtcaggcaaccaaagatgccggccgtatcgccggtctggaagtcaaacgtatcatcaacgaaccaaccgcggccgcgctggcttacggtctggataaagaagtgggcaaccgtactatcgcggtttacgacctcggtggtggtactttcgatatctcgattatcgaaatcgacgaagttgatggcgaaaaaacctttgaagttctggcgaccaacggtgatacccacctgggcggcgaagacttcgatactcgtctgatcaactacctcgttgatgagttcaagaaagatcagggcattgacctgcgcaacgacccgctggccatgcagcgcctgaaagaagccgctgagaaagcgaagattgaactgtcttctgctcagcagaccgacgttaacctgccgtacatcactgcagacgcgaccggtccgaaacacatgaacatcaaagtgactcgcgcgaaactggaaagcctggtagaagacctggttaaccgttccatcgagccgctgaaagtcgctctgcaggatgccggtctgtccgtttccgatatcaacgacgtgatcctcgttggtggtcagactcgtatgccgatggtgcagaagaaagtggccgagttctttggtaaagaaccgcgtaaagacgttaacccggatgaagccgtggcgatcggtgctgccgttcagggcggtgtactgactggcgatgtgaaagacgttctgctgctcgacgtaaccccgctgtcgctgggtatcgaaaccatgggcggcgtgatgactgcgcttatcagcaaaaacaccaccatcccgaccaagcacagccaggtgttctctaccgctgaagacaaccagtctgcggtaaccatccatgtgctgcagggtgagcgtaaacgcgcgtctgataacaaatctctgggtcagttcaacctggatggtattaacccggcgccgcgcggcatgccgcagatcgaagtgaccttcgacatcgatgctgacggtatcctgcacgtctccgcgaaagacaaaaacagcggtaaagagcagaagatcaccatcaaagcgtcttccggtctgaatgaagaagaaattcagaaaatggttcgcgaagcagaagctaacgccgaatctgaccgtaagttcgaagagctggtacagacccgcaaccagggcgaccatctgctgcacagcactcgtaagcaggttgaagaagcaggcgataaactgccggctgacgacaaaactgccattgagtctgcgctgaccgcgctggaatcttctctgaaaggcgaagacaaagcggatatcgaagcgaaaatgcaggcgctggcgcaggcttctcagaagctgatggaaattgctcagcagcagcacgctcagcagcaggcgggttccgctgacgctcaggcgagcaacgcgaaagacgacgatgttgtcgacgctgagttcgaagaagtgaaagataaaaaataa

SEQ ID NO: 264539 - DNA, 405 bp, Klebsiella pneumoniae
atgaaatcgctataccggctttccgtagggcttatcctcggcgtgtcatttatcacctcggcggccgctaacgaccataaaattatcggcgtgatagctatgccgcgcaatgaaaccaacgacctgacgctgacgctccccgtctgccgggtggtcaaacgcattcagctcagcgccgaccgcggcgatgtacaactctccggggcgacggtctactttaaggccagccgcggcgccagccacacgctgaacgtccccgccgggatcaaagagggcagcaccaccggctggatcaacatcaatagcgataacgacaacaaacgttgcgtgaagaaaatcgccttctccggccacacggtgcactcctcagatatggcatcactgaaaattatcggcgatgactaa

SEQ ID NO: 264540 - DNA, 750 bp, Klebsiella pneumoniae
atgcatattaattacctggaggatgacgatctcgcctttctgcctgagtgcagcgaggcgcatctggaagcctttacccgcattctgacccatggggaaaatggcaaaccccgtctctccagcacgctcctgcgcaacgagacatttttagcgatggagggtcacccggagcgttatcgccgcaactggcagctaatcgccggtgagctacagcattttggcggcgatagcatcgccaacacgctgcgccgccatggcaaattttatcgcgcgatcctgctggatgtatgtaaacgactgaaagcgaaggtcgacaaacagctgtcgacgccgcagatcgagcagcagttgctggcgcattttctgcagcacagctggaataaactgaacgcggagcaaaaagcgcactttctcgccgcggtggagtgccggagccatgagctggacagcctgatggctcatccgctgaggcatcgcaagctaagcgaaggcgtcactttgttgctggacgaacgcttaaccgccatcctgcgcacgcacgccgcggtgagcgtcatcggtcatggcctggtgcgcggcgccgggctgggcggaccgctcggcgccgcactgaacagcgtgaaagcggtgagcggcagcgcctaccgggtcaccatccccgcggtcctgcatattgcctgtttacggcaaatgctccagccgccgtcagacaccgcggaaattggtgaaaaataccccgccagatcatag

SEQ ID NO: 264541 - DNA, 567 bp, Klebsiella pneumoniae; identical to SEQ ID NO: 138496

SEQ ID NO: 264542 - DNA, 1305 bp, Klebsiella pneumoniae
atgtcatatgcaaaccgaccgctcaaccgccaggattataaaacgctgacgctggccgccctgggcggcgcgctggagttttatgactttatcattttcgttttcttcgccgccgtcgtcggcgagctcttcttccctgcggatattcccgaatggctgcgccaggtgcaaacctttggcattttcgccgccggttacctggcgcgtccgctggggggcatcatcatggcacactttggcgatctggtggggcgcaagaaaatgttcaccctcagcatcctgctgatggcgctgccaaccctggcgatcggtctgctaccgacctatagctcggtaggtatcatcgccccgctgctattgctgctgatgcgtattctgcagggagcggcgatcggcggtgaagttccaggcgcctgggtgtttgtcgctgagcatgtcccggaaaaacgcattggtatcgcctgcggcacgctgacggccggcctgacggttggcattctgctggggtcggtggtggccacgcttatcaataccagtctgacgccgcaggggatccacgacggcggctggcggatccccttcctgctgggcggcgtatttggtctgatagcgatgtatctgcgccgctggctgcaggagacgccgatttttcttgagatgcagcagcgcaaagcgctggcgcaggaactgccggtaaaagcggtggcgctcaagcaccagaaggcggtggtgatctctatgctgctgacctggctgctgtcggctggcgtggtggtggtgatcctgatgtcgccggtctggctgcagaagcactatggttttgcgccggccattaccctgcaggccaacagcatcgccaccattatgttgtgcatcggctgtctgctcgccgggctggcggcggaccgcttcggcgccagccgcacttttatcgtcggcagcctgctgctggcggttgccagctgggcattttaccatcttgccggcgccagcccgcagcggctgtttctgctctacggtacggtggggctttgcgtcggcgtggtgggggcggtgccctatgtgatggtgcgggccttcccggcggaagtacgcttcaccggcatctctttctcctacaacctgtcgtacgcgatctttggcggcctgacgccgattgcggtcaccatgctgatgggggtgtcgccgatggcgccggcctggtatgtgctggccctgtcgctgatggggctaggattaggtatctggctgcgtcaggagctgacggcgccgacggggatgccggaaggggagctgcagcgttaa

SEQ ID NO: 264543 - DNA, 588 bp, Klebsiella pneumoniae
atgaataccttacgaatcggcttagtttccatttccgatcgcgcctccagcggcgtctatcaggataaaggcatcccggcactggaagagtggctggcacgtgccctgaccacccctttcgagctgcaaacgcgtctgattccggatgagcaggccatcattgagcaaacgctgtgcgaactggttgacgaaatggggtgccatctggtgctgaccaccggcggaaccggccctgcgcgtcgcgatgtgacgcccgacgcaacgctggcgatcgccgatcgcgagatgccgggcttcggcgagcaaatgcgccaggttagcctacactttgtgccgacggctatcctttcccggcaggtcggtgtgatccgcaagcaggcgctgatcctcaaccttcccgggcaaccgaaagcaattcaggagactctggaaggggtgaaagatgctgacggcaacgtgctggtgcacggtattttcgcaagtgtaccttattgtgtacagttgcttgaagggccttatgtggaaaccgatggccgtgtagtagaagcttttcgtcccaagagcgccagacgcgaaactttatcctga

SEQ ID NO: 264544 - DNA, 954 bp, Klebsiella pneumoniae
atgacggataaattaacttctctgcgtcagtacaccactgtcgtcgctgacaccggagatattgcggcaatgaagctgtatcagcctcaggatgccaccactaacccttccctgattctcggcgcggctcagatccctgagtaccgtaagctgattgacgacgctgtcgcctgggctcgtagccagagcagcgatcgcgcgcagcagatcctcgatgcttccgataagctggcggtgaacatcggtctcgaaattctgaaactgatcccgggccgtatctccaccgaagtggacgcacgtctctcctatgacaccgaagcgtctatcgcgaaagccaagcgcatcatcaagctgtacaacgacgcgggcatcagcaacgatcgcattctgatcaaactggcctccacctggcagggcattcgcgccgctgaacagctggaaaaagaaggcattaactgtaacctgacgctgctgttctccttcgctcaggctcgcgcttgcgccgaagcgggcgtcttcctgatttcgccgttcgttggccgtatcctcgactggtacaaagccaacaccgacaagaaagagtacgcaccggcagaagatccgggcgtagtttccgtcagcgaaatctacgagtattacaagcagcacggctatgaaaccgtcgtgatgggcgcaagcttccgtaacgttggcgaaattctggaactggctggctgtgaccgcctgaccatcgccccggcgctgctgaaagagctgtccgaaagcgaaggcgccgttgagcgtaagctggtatataccggtgaagtgaaagcgcgtccggagcgtattaccgaatctgagttcctgtggcagcataaccaggatccgatggcggtagacaaactggcggaaggtatccgtaagtttgcgatcgaccaggaaaaactggaaaaaatgatcgacgaactgctgtaa

SEQ ID NO: 264545 - DNA, 1431 bp, Klebsiella pneumoniae
atgcctgattttctctcattcatcaatgaaatactctggggctcagtgatgatttatctgctactgggcgccggtatctggtttagctggcaaacccggggtattcagtttcgttacgtgcgcaaattcggccgcagtctaaaaaaaagcctgcacccgcagccgggtggtttaacgtcctttcaggcgctctgtaccagccttgccgcccgggtcggcagcggcaatcttgccggggtgacgctggcgatcgccgccggtgggcccggcgccgtattctggatgtgggtttccgccctgctcggcatggccagcagctttgctgaatgttcccttgctcagctgtataaagaacgcgatagccgcggacagtttcgcggcggcccggcctggtacatggcgcgcgggctcggcatgcgttggatgggcgtcctgttttcgatcctcctcctgctggcctatggttttatcttcaataccgtgcaggctaactccgtggcccatgccttgcgctatgcgttcgatctgccggcggcggtcagcggcggcgtgctggccgttgtcgttttgctggcgatcctccgtggtttacgcggcgtggcgcgtctgatgcaatggatcgttccctttatggcgctgttgtggatcgccaccagcctgctcatcggcctgtggcacatcaccgccctgccgacgattttcgccaccatctttcgctgcgccttcggctggcaggaggccgccgccggcgcggtgggctacaccatcagccaggcgctgaccagcggcttccagcgcggcatgttctccaatgaagcagggatgggctcttcgcctaacgccgccgcggccgccgcctcctggccgccgcacccggcggcgcaggggatcgtgcagatgattggcgtgtttatcgatactatcgtgatctgtaccgccagcgcgattatcgtcatgctggcgccgcggcccgacaatgaatatacgctcaacggtattcaggacttgcaacacgcgatgagcgtgctggtcggcggctggggagcgggttttatcgccctcatcgtgctgctgttcgcctttagctctatcgtagccaattacgtgtacgcggaaaataatctggtcttcctgcgcctggataagccccgctatatctgggggctgcgaatactcaccgtcctgatggtgctgttggggaccatggttagcctgcctgtcgtctggcagagcgcggatatcatcatggcgctgatggcgatgaccaacctgacggccattctgctgctctccccgacggtgcggattatcgccagcgattatctgcgtcagcggcggctgggtatccagccgactttcgatgccactcgttacccggatattgaccaacagctggccccgggcgcctggaatgaattgccgcgcgaatag

SEQ ID NO: 264546 - DNA, 774 bp, Klebsiella pneumoniae
atgctgattctgatttcacctgctaaaacgctcgattatcaaagcccgctggcaacgactcgctatacccagcccgaactcctcgagtattctcagcagcttatcggcatcgcccgtaagctgaccgcgccgcaaatcggcaagctgatgagcattagcgacaagctggcggatctaaacgccacccgcttccacgactggcaccctgactttacgccgcaaaatgcccgccaggcgatcctcgcctttaaaggcgatgtctacactggcctgcaggcagagacactcaccgaggacgactttgacttcgcccagcaacacctgcgcatgctctccgggctgtatggcgtgctgcgcccgttagacctgatgcagccctaccgcctggagatggggatccgtctggaaaatccgcgcggcaaaaatctgtaccagttctggggggataccattaccgagaagctgaatcaggcgctgcgcgaccagggcgacgatatcgtcatcaacctggcttccgatgaatattttaaatcggtgaaaacgccaaaattgcagggtcagctgatcaagccggtattcctcgatgagaagaacggcaaattcaaagtgatcagtttttatgcgaagaaagcccgcggcctgatgagtcgctacattattgaaaaccgcttaacccagccggagcagctcaaagcctttaatagcgaaggctatttctttgatgcggatgcctcagagaaaggcgaactggtgtttaaacgccacgagcagtaa

SEQ ID NO: 264547 - DNA, 378 bp, Klebsiella pneumoniae
atgcgtattttatctctttttttggtggtgttcgctttaacaggctgctccgggacaacgattggcggtaatgaagataaattaacgccagcctatctgaaacaacatctcattgtcggaaaaaccaccaaggccgaggttcgtcagtattttggtgccccggattctggtcatacgacggtgacggcgttgggtaaagagagctggtattattcagtagataaagggatcaacctggtcagcctcgcgggttccatgatcccggtaaccggggcatcgcaagctgccgatgcggtcgataagtccagccaaaaagattcgaactcgctgatgattttcttcgatgaaaaaggcgtggtggaaaactgggtgcgttaa

SEQ ID NO: 264548 - DNA, 1281 bp, Klebsiella pneumoniae
atgaaactgtataacttaaaagatcataacgagcaggtcagctttgcgcaggccgtcacccagggacttggcaagcatcagggcctgttctttccgcacgatctgccggaattcagcctgactgaaatcgacgacatgctggcgcaggactttgtcacccgtagcgccaaaattctatccgcctttatcggcgatgagatcccgcaggatgtcctgcagcagcgggtgcgcgcggcgtttgcgtttccggcgccggtaagcaaggttcaggaagatgtcggctgtctggagctgttccatggccctacgctggcgttcaaggatttcggcggccgctttatggcgcagatgctgacccacatcgcaggcgataagccggtcaccatcctcaccgcgacctctggcgacaccggggcggcggtagcgcatgctttctacggcctgccgaacgtcaaggtagtgatcctctatccgcgcggcaagatcagtccgctgcaggagaagctgttctgtaccctcggcggcaatattgaaaccgtggcgattgatggcgactttgatgcctgccaggcgctggtgaagcaggcgtttgacgatgaagagctgaaggcgacgctgggtctcaactcggctaactccatcaacatcagccgcctgctggcgcagatctgttactacttcgaagcggcggcgcagctgccgcaggaagcccgcaatcagctggtgatttccgtgccgagcggcaacttcggcgatctgaccgccggtctgctggccaagtcgctggggctgccgatcaagcgctttatcgccgccaccaacgccaacgacaccgttccgcgctatctgcagggcggcgagtgggcgccaaaagccacccaggcgacgctgtccaacgccatggacgtcagccagccgaacaactggccgcgcgttgaagagctgttccgccgtaaaatctggcgcctcagcgagctgggctatgccgcggtcgatgatgagaccaccaaagcagcgatgcgcgagctgaaggccatcggctacatctctgaaccgcatgcggcgattgcctggcgcgcgctgcgcgatcagctgcagccgggagagtacggcctgttcctcggcaccgcccatccggcgaagttcaaagagagcgtggaggagatcctgcaggagactctgccgctgccgaaggagctggccgaccgcgccgacctgccgctgctgtctcacaacctgccggcggatttcgccgcgctgcgtaagctgatgatgggctaa

SEQ ID NO: 264549 - DNA, 930 bp, Klebsiella pneumoniae
atggtcaaagtatatgccccggcttccagtgccaatatgagcgtcgggtttgatgtgttgggcgcggcggtcacgccggtcgatggcacgctgcttggcgacaacgtcactgtcgaagcggcggagcaatttagcctgcagaatcttggacgcttcgccagcaaactgccgacggcgccgcaggagaacattgtttaccagtgctgggaaagcttttgccgggagatcggcaagacggtgccggtggcgatgacgctggaaaaaaacatgccgattggctccgggctgggttccagcgcctgctcggtggtcgctgcgctggtggccatgaacgagttctgcggcaagccgctgaacgagacgcgcatgctggcgctgatgggagagatggaagggcgtatctccggcagcattcactacgacaacgtggcgccgtgctatcttggcggcatgcagttgatgatcgaagagaatgggattatcagtcagcaggtgcccgggtttgatgagtggctgtgggtgctggcctatccggggattaaagtctctactgctgaagcgcgggcgattctgccggcgcagtatcgccgccaggattgtatcgcccatggtcgccacctcgcgggctttattcacgcctgctacacccgccagccgcagctggcggcaaaattgatgaaagatgtgattgccgaaccgtaccgaaccaaactgctgccgggctttagcgaagcgcgtcaggcggccatggagatgggcgcccaggcttgcggcatctccggctctggcccaacgctgttcgcgttgtgtgataaaccggataccgcgcagcgcgtcgccgactggcttggcgcgcactatctgcagaatcaggaaggctttgttcatatttgccggctggacacggcgggcgcacgcgtagtgggataa

SEQ ID NO: 264550 - DNA, 2463 bp, Klebsiella pneumoniae
atgcgagtgttgaagttcggcggtacatcagtggcaaatgcggaacggtttctgcgggttgccgatattctggagagtaatgccaggcaggggcaggtagcgacggtcctgtctgccccggcgaagatcactaaccacctggtagcgatgattgaaaagaccattggcggccaggatgccctccccaatattgccgacgccgaacgcatttttgccgaacttcttcagggccttgccgacgcccagcccgctttcccgcttgcccagttaaaagccttcgtggagcaggaatttgctcagattaagcatgttctgcacggcatcagcctgctgggtcagtgcccggacagcgtcaatgccgcgctgatctgccgcggcgaaaagctctccatcgccatcatggcgggtctgctggaagcccgtggacataaagtcagtgtcattaacccggtcgaaaaactgctcgccgtgggccactatctggaatccaccgtcgatatcgccgaatccacccgccgcattgccgccagccagatcccggcagaccatatgatcctgatggccgggtttaccgccggcaatgagaaaggcgagctggtggtgctggggcgtaacggctccgactactcggctgcggtactggccgcctgcctgcgcgctgactgctgcgaaatctggaccgatgtcgacggagtgtacacctgcgatccgcgtcaggtgccggatgcgcgcctgctgaaatcgatgtcttatcaggaggcgatggagctctcctactttggcgcgaaagtgctgcacccgcgcaccattgcccctatcgcccagttccaaatcccatgcctgattaaaaataccggcaacccacaggcgccgggaacgcttatcggcgccagccgcgacgaggacgatttgccggtgaaaggcatctctaacctcaacaacatggcgatgttcaacgtctccgggccggggatgaaagggatggtcggcatggcggcccgcgtcttcgccaccatgtcccgcgccggcatctcggtggtgttgatcactcaatcttcttcggagtacagcatcagtttctgcgtgccgcagagcgactgcgcacgtgccaaacgggcgatggaagatgagttttatctggagctgaaagaggggctgctggagccgctggcgattatggagcgtctggcgatcatctccgtggtgggcgacggaatgcgtaccctgcgcggtatctcggcgaaattctttgcggcactggcccgcgccaatatcaatatcgtggcgattgcccagggctcttccgagcgctcaatttcggtagtggtcagcaatgacgacgccaccaccggcgtgcgcgtgacccatcagatgctgttcaacaccgaccaggtgattgaagtgtttgtcatcggcgtcggcggcgtcggcggcgcgctgctagagcagatcaagcgccagcaggggtggctgaagaacaaacatatcgatctgcgcgtctgcggtgtagccaattctcaggcgctgctgaccagcgtgcatggcctgaatctggaaaactggagtgcggaactggcggaggcgaaagagccgtttaatcttggccgcctgatccgcctggtgaaagagtaccacctgctcaatccggtgatcgtcgactgtacctccagccaggcggtcgccgatcagtatgccgacttcctgcgcgaaggtttccatgtggtgacgccgaacaaaaaggccaatacctcttcgctggattactatcaccagctgcgccatgcggccagcagctcgcggcgtaagttcctctatgacactaacgttggcgcgggcctgccggtgattgagaacctgcagaacctgctcaacgccggcgatgagctgcgccatttctccgggatcctgtccggctccctgtcgtttatcttcggcaagctggacgagggggtgagtttctccgcggcgacggcgatggcccgtgagatggggtataccgagccggatccgcgcgacgatttatccggggtggatgtggcgcgtaaactgctgattctggcccgtgagaccgggcgtgaactggagctggcggacattatcgtcgagtcggcgctgccgccggacttcgacgccagcggcgatgtcgagacctttatggcccgcctgccgtcgctggacgatggttttgcctcgcgggttgctaaggcgcgcgatgaaggtaaagtcttgcgctacgtcggtaacatcgaagaggatggtacctgccgggtaaaaatagccgcggttgacggcaacgatccgctgttcaaagttaagaatggtgagaacgcgctggctttttatagccattattatcagccattgccgctggtgctgcgcggctatggcgccgggaacgacgtcacggcggccggcgtattcgccgacctgctgcgcaccctgtcctggaagttaggagtttaa

SEQ ID NO: 264551 - DNA, 687 bp, Klebsiella pneumoniae
atgcgtttaacgattattttagtcggccctgcccgggccgagaacgtcggcgctgccgccagggcgatgaaaaccatgggatttcgcgaactacggatcgtcgatagcgaagcccacctggcgccgccggcacgctgggtggcgcatggctcaggcgacatcctcgatggtatcaccacctatcccacccttgccgaggcgctgcgtgacgttgattttaccgtcgccaccaccgcccgcagccgcgcgcgttttcactattacgccacgccgcagcagctgttgccgttgctggaggagaaggcgcagtggatgaaccatactgccctggtatttggtcgtgaggacgccggattgaccaatgaggagctggcgctggctgatgtgttgaccggtgtgccgatggctgcggattatccgtcgctgaatctcggccagtcggtgatggtctactgttatcaattagcatcgctaatgcaacaaacggcgcccgccgccgctgcggcagaccatcatcagctgcaggccttacgtactcgtaccctggcgttactttcgcgtttgggcgtggaggatgatgccaaactggccgactggttgtcgcaacggctgggcctgctgcagcagcgcgacacggcaatgttgcatcgtttgctgcatgatattgaaaaaaacctgccagaataa

SEQ ID NO: 264552 - DNA, 717 bp, Klebsiella pneumoniae
atgcagaccccgcacattcttatcgttgaagacgagttggtaacacgcaacacgttaaaaagtattttcgaagcagaaggttacgatgtattcgaagcgaccgatggcgcggaaatgcatcagatcctgtctgaaaatgatatcaacctggtgatcatggatatcaacctgccgggtaaaaatggtcttctgctggcgcgcgagctgcgcgagcaggctgacgtcgcgctgatgttcttaaccggccgcgacaacgaagtggataagatccttggcctcgaaatcggcgctgacgactatatcactaaaccgtttaacccgcgtgaactgactatccgcgcgcgcaacctgctctcccgtaccatgaacctcggtaccgtgagcgaagagcgtcgcagcgtggaaagctacaagttcaacggctgggaactcgatatcaacagccgttccctggttagcccgaacggcgaacagtacaagctgccgcgcagtgaattccgcgcgatgctgcatttctgcgaaaacccgggcaaaattcagtctcgtgccgagctgctgaagaaaatgaccggtcgcgagctgaagccgcatgaccgtaccgttgacgtgaccattcgtcggattcgtaaacacttcgaatccactccggataccccggaaatcatcgctaccattcacggtgaaggctaccgtttctgtggcgatctgcaggaataa

SEQ ID NO: 264553 - DNA, 1425 bp, Klebsiella pneumoniae
atgcgcatcggcatgcgcctgctgctgggctattttcttatcgtcgcgatcgccgcgtggtttgtgctgtcgatctttgtccaggaagtgaagccgggcgtgcgccgggcgacagaggggaccctcaatgataccgctaccctgttggcggcgctggcgcgtgaggatctgctggcggcaaacccgcagcagggcaggctggcgcaggcctttcaccagctcaaccagcagccgctcaacgccaatattggcggaattaaaaaggtacgtaatgagtaccgcgtctatctgaccgatgcccggggcaaggtggtgtttgactccagcgggcaggcgacagggcaggactattcgcgctggaacgatgtctggctcaccctgcgcggccagtacggcgcgcgcagtacgcgcagcgatccgcatgatgaagccagctcggtgatgtatatcgccgcgccggtgatggataaggggcggattatcggcgtgctgagcgtcggtaaacccaacctggcgatgacgccggtcattaagcgcagcgagcggcggatcctctgggccggcggcgccctgctgggcattgcgctgttgattggcggcggcgtcgtctggtggatcaatttctctatcggcaagctggtgcgctatgcggactcggtgaccgctgagcgcccgctgccgctgccggaggttggcagcagcgaattgcgcaagctggcccaggctctggagagcatgcgggtaaagctcgaaggtaagaatgccatcgaaaactatgtctatgacctgacccatgaactgaaaagcccgctggcggccatccgcggcgcggcggagatcctgcgcgaagggccgccgcctgaggtggcggcgcggtttactgataatatcctcgcgcaaaacacccggatgcaactgctggtggagcggctgctccagcaggcgagactggaaagccggctggagataaagcagcagccggtgtcgatagatgcgctataccaacggctgacggaggagcgcaacatcgctctggcggcgaaagctatcaccctgcgctggcgggagagtgggatgctggtcaatggcgatggcgagctgctggcccaggcgctgggtaatctgctcgacaacgcgattgactttaccccccagggcggtgagatcgccctggctgcggagaagcgaaatgaagaggtgcaattgagcgttatcgacaacgggtgcggtattccggactatgccctggaacgaatctttgagcgattctattcgctgccgcgcgaagacggccataagagcagcggccttgggctggcgttcgttcgtgaagtcgcgcgcctgcatcacggcgatatcaatctgcacaatcggcccgaaggcggcgtggtcgccacgctgcgacttcaccgtcccttcacatag

SEQ ID NO: 264554 - DNA, 690 bp, Klebsiella pneumoniae
atgcagcagccacggatttggttagttgaggatgaacagagtatcgctgataccctggtttacatgctgcagcaggagggcttccaggtcagcgtctttggccgcggtttgcccgcgctggaggcggcggcgcatcaggcgccagatgtcgccatcctcgacgtcggcttgccggatatcagcggcttcgagctctgtcggcgtctgctgacgcgttatccggcgctgccggtgctgtttttgacggcgcgtagcgacgaggtcgataagctgctggggctggaaatcggcgctgacgattacatcgccaagccgttttcaccacgcgaagtctgcgcgcgggtgcgaaccgtgctgcggcggctgcagaagtttgccgcgccatcgccggtggtacgcgtcggcgagtttgtgctcgatgagcaggcggcggcgatcagctggttcggccagccgctgaatctgacgcgctacgaatttctgctgctgaaaaccctgcttcacgcgcccggtcgcgtcttctcccgtcagcagctgatggagctggtgtggatcgatgcctgggaaagcctcgaccgtaccgtcgatacccatatcaaaaccctgcgcgctaagctgcgggctgtgaatcctgaaaaggcgccaatcaatacccatcgcggtatgggctacagcctggggcgcggctga

SEQ ID NO: 264555 - DNA, 474 bp, Klebsiella pneumoniae
atgaaatacaagaagtttgcgatggggctgctcctgctggccggtagccagctggctcaagcggagcagattggttccgtggatacggtcttcaaatggttagggccggatcacaaaatcgtcgtcgaagcctttgacgatccggatgtacagaacgtgacctgctatatcagccgggcgaaaaccggtggcatcaaaggcgggctggggctggcggaagatacctctgacgcggcgatttcctgccagcaggtcgggccgattgagctaacggacaaaatcaaaaacggcaaaagccagggcgacgtggtgttccagaagcgcacctcgctggtgtttaaaaaactgcaggtcgtgcgattctatgatgcgaagcgcaatgcgctggtctatctgacctactcggataaagtggttgatggctcgccgaagaacgccatcagcgccgtgccgatcatgccatggaataaataa

SEQ ID NO: 264556 - DNA, 870 bp, Klebsiella pneumoniae; identical to SEQ ID NO: 138329

SEQ ID NO: 264557 - DNA, 648 bp, Klebsiella pneumoniae
atgttacaagtataccttgttcgccacggtgaaacgcagtggaacgccgagcgacgtattcagggtcagtccgacagcccgctgaccgcccatggtgagcgccaggcctggcaggtgggcgagcgcgccagaacgctggggatcacccatatcattaccagcgatctggggcgaacccgccgcacagcagaaattatcgccgaagcctgcggctgcagcgtgatcgccgatgcgcgcctgcgcgaactggatatgggggtgctggagaagcgccatatcgactcgctcagcgaagaagaagaaggctggcgtcgccagctggtcaacggcacaccggacggtcgtattccgcagggcgaatcgatgcaggagctcagcgagcgtatgcatgcggcgctggcatcctgtctggaattacccgccggtagccggccgctgctggtgagtcatgggatcgcgctgggctgcctggtgagcacgatattagggctgccggcgtacgctgagcgtcgtctgcggctgcgcaactgctctatttcgcgcgtcgactatcagcaaagcccgtggctggcttccggctgggtggtggaaacggcgggcgacgtctcgcatcttgacgcccccgcaatggatgagctgcagcgttaa

SEQ ID NO: 264558 - DNA, 516 bp, Klebsiella pneumoniae; identical to SEQ ID NO: 210195

SEQ ID NO: 264559 - DNA, 330 bp, Klebsiella pneumoniae
atgacccaacaatctccctattccgcggccgttgccgaacaacgtcatcaggagtggctgcgctttgttgccctgcttcagcaggcctatgctgaggatctgcatctgccgttgctgcagctgatgctgacgcccgacgagcgcgaagccctgggtacccgggtgcgcattatcgaagagttgctgcgcggcgagatgagccagcgtgagctgaaaaatgagctcggcgccggaattgcgaccattacccgcgggtccaacagcctgaaatcggcgccggtagagctgcgccagtggctggagcagacgctgctggctagcgataaatag

SEQ ID NO: 264560 - DNA, 1938 bp, Klebsiella pneumoniae
gtggaaaaagccaaaaaaatggcgtggcatcttttggctgccagcgttggtttgttgacgttgagtcagctggcgcatgcggattcactggatgaacagcgcagccgctacgcacaaattaagcaggcgtgggataaccggcagatggatgtagtcgaccagctgatgcccacgttaagcacctatcccctgtatccctatttgcagtaccgacagatcaccgacgatctgatgaaccagccggcgctggtggtgaaaaactttattgacgccaatccgacgctgccccctgcgcgttcattacgttcgcgcttcgtgaatgaactggcccggcgcagcgactggcgcggcttgctggcgtttagcccggataagccgaccagcaccgaggcgcagtgcaactattactacgccaagctgagcgtggggcagtcgcaggaggcctggagcggggcgaaagagctgtggctgacgggcaagaatcagcccggcgcctgtgaaccgctgttcagcgcctggcgcgactccggtcagcaggatccgctggcctatctcgaacggatccgcctggcgatgaaggccggcaatatcgggctggtgaaatcgctggcccagcaaatgcccgccaactaccagagcatcgccagcgccgtggtcgccctggctaacgatccaaacagcgtcctcaccttcgcccgcaccaccggggcgacggactttacccgtcagatggccgccgtcgccttcgccagcgtcgcccgccaggacgtggaaaatgcccgcctgatgatcccttcgctggtacaggctcagcagctcaatgaggatcagacccaggaactgcgcgatattgtcgcctggcgcctgatgggtagcgatgtaaccgaagagcaagccatctggcgcgatgacgcaatcatgcgttcgcagtccacgccgctggtggagcggcgggtacggatggcgttggggacgggcgatcgccatggcctcaacacctggctggcgcgcctgccgatggaggcgaaagagaaagacgaatggcgctactggcaggcggatctgctgctggagcgcggcagggatgaggaggcgcaggcgatccttcgctcgttgatgcaacagcgaggcttctacccgatggtcgccgcgcagcgtcttggcgaggagtataccttccgcatcgataaagcctcgggcaccatcgatccggcgctggcctccgggccggagatggcgcgggtacgtgagctgatgtactggaatatggataacaccgcgcgcaccgaatgggccaacctggtcactagtcgcaccaaatcccagcaggcgcagctggcgcgctatgccttcgatcagcactggtgggatctgagcgtgcaggcgacgatcgccggtaagctgtgggatcagctggaagaacgtttcccgctggcctataacgacctgtttgcccgctatgttagcggcaaagatattccgcagagctacgcgatggcgattgcccgtcaggagagcgcctggaacccgaaagtgcgctcgccggtcggcgccagcggactgatgcagattatgccgggcaccgcgacgcataccgtcagtatgttcagcattcccggctacagcggcccgtcgcagctgttggatccggaaaccaacatcaacatcggcaccagctatctgcagtacgtttatcagcagttcggcaataaccgtatctacgcctcagcggcctataacgccgggccgggccgggtacgcagttggcaggggaacagcgccggacggatcgacgccgtggcgtttgtcgagagtattccgttttcggaaacccgcggctacgtgaagaatgtcctctcctatgacgcctactaccgctactttatggggcagcaggataagatcctcagcgatgcggagtggcgccagcgttactga

SEQ ID NO: 264561 - DNA, 1668 bp, Klebsiella pneumoniae
gtggctcaattcgtttataccatgcatcgtgtcggcaaagtggttccgccgaaacgtcatattttgaaaaatatctccctcagctttttccctggcgcgaaaatcggtgtgctcggtctgaacggcgccggtaaatctaccctgctgcgcatcatggccggtatcgacaccgagatcgaaggtgaagcgcgtccgcagcccggcatcaaaatcggctacctgccgcaggagccgcagctcaacccggaacacaccgtgcgcgagtccgtggaagaagcggtcaccgaagtggttaacgcgctgaaggggctggacgaagtctatgccaaatacgccgagccggatgcggacttcgataagcttgccgcacagcaaggcaagttcgaagagattatccaggcgcacgacggccataacctgaacgtccagctggagcgcgcggccgacgccctgcgcctgccggactgggatgcgaaaatcgctaatctttccggtggtgaacgccgccgcgtcgcgctgtgccgtctgctgctggaaaaaccggatatgctgctgctcgacgaaccgaccaaccacctcgacgccgagtccgtcgcctggctggaacgcttcctgcacgacttcgaaggcaccgtggtggcgattacccacgaccgttacttccttgataacgtcgccggctggatcctcgagcttgaccgcggcgaaggtattccgtgggaaggcaactactcctcctggctggagcagaaagaccagcgtctggcgcaggaagcttctcaggaagccgcacgccgcaaatctatcgagaaagaactcgagtgggttcgccagggcgcgaaaggccgtcagtctaagggcaaagcccgcctggcgcgctttgaagagcttaacaacgttgaatatcagaaacgtaacgagactaacgaactgttcattccgccaggcccgcgtctgggcgataaagttctggaagtcagccatctgcgcaaatcctacggcgaccgcgttctgattgacgatctgagcttctcggtaccgaaaggcgctatcgtcggcatcatcggtccgaacggcgcgggtaaatccaccctcttccgcatgatgtccggccaggaacagcctgattccggcaccatcaccctgggtgaaaccgttaagctggcttccgtcgatcagttccgcgacgcgatggacaacagtaagaccgtgtgggaagaagtgtctggcggcctggatatcatgaagatcggcaacaccgagatgccgagccgcgcctacgtgggccgctttaacttcaaaggcgtcgaccagggtaaacgcgttggcgagctgtccggcggtgaacgtggtcgtctgcacctggcgaaactgctgcaggtcggcggtaacgtcctgctgctcgatgaaccaaccaacgacctggatatcgaaaccctgcgcgcgctggaaaacgccctgctggagttcccgggctgcgcgatggttatctcgcacgaccgctggttccttgaccgtattgccacccacattctggattaccaggatgaaggtaaggttgagttcttcgaaggtaactttaccgagtacgaagagtacaagaaacgcactctcggcgccgacgcgctggagccgaagcgaatcaagtacaaacgtatcgcgaaataa

SEQ ID NO: 264562 - DNA, 1233 bp, Klebsiella pneumoniae
atgtcgtcatttgactatttaaaaagcgccattaagcagaaaggctgtaccctgcagcaggtggcggaagccagcggaatgaccaaggggtatctcagccagttgctgaatgccaaaatcaaaagcccgagcgcgcagaagcttgaagcgctgcatcgtttcctcgggctggagtttccccgccgacagaaaagcgtcggcgtggtgtttggtaagttttacccgctgcataccgggcatatctacctgatacagcgcgcctgtagccaggtcgatgagctgcatatcattatgggctatgacgatacccgcgaccgcgagctgtttgaagagagcgccatgtcgcaacagccgacggtgcctgaccgcctgcgctggctgctgcaaacctttaaatatcagaagaatattcgcatccacgccttcaatgaagaggggatggagccctatccgcacggctgggacgtctggagccatgggatccgcgcttttatgagcgaaaaagggatcgagccgaaccggatctatacctcggaagaggccgatgcgccgcagtaccttgaacatctggggatcgagacggtgcttatcgatcctaagcggacctttatgaatattagcggcgggcagatccgcgagaacccgttccgctactgggaatatattccgacggaagtgaaaccgttctttgtgcggacggtggcgatcctcggcggcgagtcgagcggtaaatcgacgctggtcaataaactcgccaatatcttcaataccaccagcgcctgggaatatggccgggattatgttttttcgcatctcggcggcgatgagatggcgctccagtattcggattacgataaaattgcccttgggcatgcgcagtatattgattttgcggtgaaatatgccaacaaggtggcgttcatcgataccgacttcgtcagcactcaggccttctgtctgaagtacgagggacgtgagcacccgtttgtgcaggcgctgattgatgaataccgcttcgacctggtgatcctgctggagaacaataccccgtgggtggccgatggactgcgcagtcttgggagctcggtggatcgtaaagagtttcagtcgttgctggtatcgctgctgaaagagaacgagatcgaattcgttcatgtgaaggagtcggactacgatgcccggttcctgcgctgcgtcgagctggtgaaacagctgatgggcgagcaggggtag

SEQ ID NO: 264563 - DNA, 1383 bp, Klebsiella pneumoniae
gtggcgaaagctccaaaacgcgcatttgtctgtaatgaatgtggtgcggattatccgcgctggcaggggcagtgcagcgcctgccatgcctggaacaccatcaccgagatgcgcatcgccgcgtcgccgcaggtggcgagaaacgagcgtctttcaggctatgccggtaacgccggcgtgtcgaaggtgcagaagctgtcagatatcagcctggaggcgctgccgcgtttctccaccggctttaaagaatttgaccgcgtgctgggcggcggcgtggtgccgggcagcgcgatcctgattggcggcaaccccggcgcgggcaaatcgacgctgctgctgcaaaccctctgcaaactggcggaagggatgaaaaccctgtacgtcaccggggaggagtccctgcagcaggtggcgatgcgcgcccatcgtctcgggttgccaacggccaacctgaacatgctctcggaaaccagcattgagcagatctgtcagatcgccgatgaagaaaagccgcagctgatggtgatcgactccatccaggtgatgcatatggccgacgtgcagtcgtcgccgggcagcgtcgcccaggtacgggaaaccgcggcctatttgacgcgctttgctaaaactcgcggcgtggcgattgtgatggtcggccacgtcaccaaagacggctcgctggccggtccgaaggtgctggagcactgtatcgactgctcggtgctgctggacggggatgccgactcccgcttccgcacgttgcgcagccataaaaaccgctttggcgcggtgaacgagctgggcgtcttcgccatgaccgagcagggcctgcgcgaagtgagcaacccgtccgctatcttcctcagccggggagatgaaatcacctccggtagctcggtgatggtggtctgggaagggacccgcccgctgctggtggagatccaggcgctggtcgatcactcgatgatgtccaacccgcgccgcgttgcggtggggctggaacagaaccgtctggcgatcctgctggcggtgctgcaccgtcacggcggcctacagatggccgatcaggacgtcttcgtcaatgtggtcggcggggtgaaggtcacggaaaccagcgccgatctggcgctgctgctggcgatggtctccagcctgcgcgaccgtcctctgccgcaggatctggtggtctttggcgaagtggggctggccggggaaattcgcccggtaccgagcggtcaggagcgtatctccgaagcggcgaagcacggcttccgccgcgccatcgtcccggcggccaatgtgccgaaaaaagtgccggaaggcatgcaaatctttggcgtgaaaaagctttcagacgcgctaagcgtttttgacgacttataa

SEQ ID NO: 264564 - DNA, 972 bp, Klebsiella pneumoniae
atgcctaacagtttgacctggtgcgacctgcctgaagacgtttccctgtggcctgggttgccgctttccctgagcggcgacgaggtcatgccgctggattatcacgccgggcgcagcggctggctgctatatggtcgcggtctggataaacgtcggctgacggcgtggcagcgtgagttgggcgccgcgttagtgatcgttgcctcctgggtggtcgaggattaccaggtgatccgcctggccggttcgctgactccccgtgcgacgcgactggcgcatgaggcggggctggacgtcgcgccattgggtaaaatcccccatttgcgcaccccgggcctgctggtgatggacatggactccacggcgattcagatcgaatgcatcgatgagatcgcgaaactggccggcaccggcgagctggtctcggaagtgaccgagcgggcgatgcgtggcgagctggacttcaccgccagcctgcgccagcgcgtggcgacgttgaaagacgccgatgccagtattttgctgcaggttcgcgacgcgctgccgctgatgccgggcctggcgcagctggtgctcaagctggaaacgctgggctggaaagtggcgatcgcctccggcggtttcaccttctttgccgagtatctgcgcgacaaactgcatctcgacgcggtattcgccaatgagctggagatccgcgacggcaagctcaccggcaacgtgctcggcgatatcgtcgatgcgaaatataaagccaatacgttgcgcaagctggcggaaaagtatgagatcccaacggcgcaaaccgtggctatcggcgatggcgccaacgacctgccgatgattaaggcagcagggcttggcatcgcctatcacgcgaagcccaaagtgaatgaacaggcggaagtgactatccgccacgctgacctgatgggggtattctgtattctctcgggcagcatgaaccaaaagtaa

SEQ ID NO: 264565 - DNA, 648 bp, Klebsiella pneumoniae
atggttcgcgcaaaactgaaattccggctgcatcgtgcggtcattgttcttatctgtctcgccctgctcgtcgcgctgatgcagggcgcttcgtggttcagtcagaacagtcagaaacaacgcaatccgcagctggaagagctggcccgcacgctggcgcagcaggtggtgctgaatctcgcgccgctgatgcgcagcgagacgcctgacgagaagcgcatcaatcagctgttgacccagctaacccataacagccgcgtcctggacgccggcgtatatgacgaacagggcgacctggtggcgcgctctggcgaaagcgtcgaggttcgcgaccggctggcgctggatggtaaaaaagccggcggctacttcaaccagcagattgtcgaaccggtgccaggaaaaaacggcccgctgggctacctgcgtctgaccctcgatactcataccctggcgaccgaggcgaagcaggtggataataccaccaatatcttacgcctgatgctgttgctgtccctggctatcggcgtggtgctgacccgcacgctgctgcagggcaaacgcacccgctggcagcaatcgcccttcctgctcaccgccaacaagccggttgaggatgaagacgatgaaaagaaaggaaatctataa

SEQ ID NO: 264566 - DNA, 1017 bp, Klebsiella pneumoniae
atgtccacattgcgcctcctgctctctgactcttacgacccgtggttcaacctggcggtcgaagagtgtattttccgccagatgcccgccacccagcgggtgctgttcctgtggcgcaatgccgataccgtggtcatcggccgcgcgcagaacccgtggaaggagtgtaatacccgccgcatggaggaagaccatgtgcggctggcccgtcgcagcagcggcggcggcgcggtgttccacgacctcggcaatacctgctttacctttatggcaggcaaaccggagtacgacaaaaccgtctccaccgctattgtgctgacggcgcttaattcactcggcgtaaccgccgaagcctccgggcgcaacgatctggtggtcaaaaccgacagcggcgaccgcaaagtctccggctccgcctatcgtgaaaccatggaccgcggttttcatcacggtaccctgctgctcaacgccgatttaagccgtctcgccaactacctcaacccggaccagaaaaagctgcaggctaaaggcattacctcggtgcgcggacgggtggcgaacctggttgagctgctgccgggcattacccatcagcaagtttgcgaggcgatccaggaagcattcttcagccattacggcgaacgggtggacgccgaggtgatctccccggacaacacgccggatctaccaaattttgctgagactttcgcccgtcagagcagctgggagtggaacttcggccaggcgccggccttctctcatcttctggacgagcgctttcgctggggcggcgttgagctgcattttgacgtcgaaaaagggcatatcacccgcgcgcaggcctttaccgatagcctgaacccggcgccgctggaggccctggcggcacgcttagtcggctgtcagtatcgggcggaagtattacagcagcagtgcgaggcgctggtcggcgatttcccggagcaggaagcggaactgaaagaactgtcggcgtggattgccggcgcagtgcgctga

SEQ ID NO: 264567 - DNA, 720 bp, Klebsiella pneumoniae
atggcaactcctcacattaacgcagaaatgggcgatttcgctgacgtcgttttgatgccgggcgacccgctgcgcgcgaagcacattgcagaaaccttcctcgaagacgtgcgtgaagtgaacaacgtgcgcggcatgctgggcttcaccggtacctataaaggccgcaaaatctccgtgatgggccacgggatgggtatcccgtcctgctctatctacaccaaagagctgatcaccgatttcggcgtgaagaaaatcatccgcgtgggctcctgcggcgcggtgcgtgaagatgtcaaactgcgtgacgtggtgatcggcatgggcgcgtgcaccgactctaaagtgaaccgtctgcgtttcaaagaccatgattttgcggcgattgccgatttcggcatggtgcgtaatgcggtagacgcggcgaaagcgctgtgcgttgacgcgcgcgtcggcaacatcttctccgcagacctgttctatacgccggacccgtccatgttcgacgtgatggaaaaatacggcattctgggcgtggaaatggaagcggcgggtatctacggcgtggcggcggagttcggcgcgaaagcgctgaccatctgcaccgtctccgaccacatccgtacccacgagcagaccactgccgctgaacgtcagacgaccttcaacgacatgatcaaaatcgcgctggaatccgtgctgctgggcgataaagagtaa

SEQ ID NO: 264568 - DNA, 1224 bp, Klebsiella pneumoniae
atgaaacgtgcatttatcatggtgctggactcctttgggattggcgcaacggaagacgcagaccgctttggcgacgtcggcgccgatacgctgggccacattgcagaagcctgcgccaaaggcgaggctgaccacggccgcaaaggcccgctgaatttaccgaacctgacccgtctgggtctggtgaaagcgcatgaaggctccaccggtaaaattgccgcgggtatggatggcaatgccgaagtgattggcgcctatgcctgggcgcatgaactttcttccggtaaagataccccgtccggccactgggaaatcgccggcgtgccggtgctgtttgactggggctacttcagcgaccaggaaaacagtttcccgcaggagctgctggataagctggtgaaacgcgccaacctgccgggctatctcggcaactgccactcctccgggacggtgatcctcgatcagctcggcgaagagcatatgaaaaccgggaaaccgatcttctatacctccgctgactcggtgttccagatcgcctgtcacgaagagacctttggcctcgacaagctgtatgagctgtgcgaaatcgcgcgtgaagagctgaccgaaggcggctataacattggtcgcgtgattgctcgtcctttcgtgggcgacaaagccggtaacttccagcgtaccggtaaccgtcacgacctggcggtagagccgccggcgccgaccgtgctgcagaagctggtcgatgagaaaaacggccacgtggtgtccgtgggtaaaatcgccgatatctacgccaactgcggtatcactaagaaagtgaaagccaccgggctggacgcgctgttcgacgcgaccatcaaagagatgaaggaagcgggcgacgagactatcgtcttcactaacttcgtcgattttgactcctcctggggccaccgtcgtgacgtcgctggctacgcggcgggtctggagctcttcgaccgccgtctgccggagctgatggagctggttggtgaggacgacatcctgatcctcaccgccgaccacggctgcgacccgacctggactggtactgaccacacccgcgagcatatcccggtgctggtgtacggcccgaaagtgaaaccaggttcgctcggtcaccgtgaaaccttcgcggacatcggccagactattgcgaaatactttggtacgtctgacatggaatatggcaaagccatgttctga

SEQ ID NO: 264569 - DNA, 1323 bp, Klebsiella pneumoniae
gtgtttctcgcacaagaaattattcgtaaaaaacgtgatggtcaggcattaagcgatgaagagatccgctttttcatcaacggcatccgcgacaatactatctctgaagggcagatcgccgcgctggcgatgaccatcttcttccacgatatgtctatgccggagcgcgtttcgctgaccatggcgatgcgggattccggtaccgttctggactggaaaagcctcaaccttaacggtccgatcgtcgataaacactctaccggcggcgtcggggatgtcacttcgctgatgctggggccgatggtggccgcctgcggtggttacgtaccgatgatctccggccgcggcctcggccataccggcggtacgctggacaaactggaagcgatcccgggcttcgatatcttcccggacgacaaccgcttccgcgagattattaaagatgttggcgtggcaattatcgggcagaccagctcccttgccccggccgacaaacgtttctatgccacccgcgatattaccgcgacggtggactccatcccgctgattaccgcctcgattctggcgaagaagctggcggaagggctggatgcgctggtgatggacgtcaaagtcggcagcggcgcctttatgccgacttatgaactctctgccgcgctggccgaagcgatcgtgggtgtcgccaacggcgccggcgtgcgcaccaccgcgctgctgaccgatatgaatcaggtactggcctccagcgccggcaacgccgttgaagttcgcgaagcggtgcagttcctgaccggcgaatatcgcaacccgcgcctgttcgacgtgacaatggcgctgtgtgtggaaatgctgatctccggcaagctggcggcggacgatgccgaggcgcgcgcgaagctgcaggcggtgctggataacggtaaagcggcggaagtgtttggccgcatggtcgcggcgcagaaaggaccgagcgactttgtcgagaattatgctaattatctgccgacggcgatgctgagcaaagcagtctatgctgataccgaaggttttatcagcgcgatggatactcgcgcgctgggcatggcagtggtttctatgggcggcggccgccgtcaggcatcggacaccattgactatagcgttggctttaccgagatggcgcgtctgggtgaccgcgtcgacggacagcgtccgctggcggtgatccatgccaaagacgagaacagctggcaggaggccgcgaaagcggtcaaagcggccattaaactggacgataaagccccggaaattacaccgacagtctatcgccgtatcactgaatag

SEQ ID NO: 264570 - DNA, 780 bp, Klebsiella pneumoniae
atgactgatttaaaagcaagcagcctgcgcgcgttaaaactgatggacctgaccactctgaatgacgacgacaccaatgagaaagtcattgccctgtgtcatcaggcgaaaacgccggtgggtaacaccgcggcggtctgcatctacccgcgcttcatcccgatcgcccgtaaaacgctgaatgagcagggtacgccggatattcgcatcgccacggtcaccaacttcccgcacgggaatgacgatatcgacattgcgctggcggaaacccgcgcggcgatcgcttacggagcagatgaagtggacgtggtcttcccgtaccgcgcgctgatcgccggcaacgagcaggtcggtttcgagctggtgaaagcctgtaaggaagcctgtgcggcggctaacgtgctgctgaaagtgatcatcgaaaccggtgagctgaaagaagaagcgctgatccgtaaagcgtctgaaatctctatcaaagccggggccgatttcatcaaaacctcgaccggtaaagtgccggtgaatgccacgccggaaagcgcgcgcatcatgatggaagtgatccgcgatatgggcgttgagaaaaccgttggcttcaaaccggcgggcggcgtgcgcagcgcggaagacgcgcagcagttcctggcgatcgctgatgaactgttcggcgccgactgggccgattctcgtcactatcgttttggcgcatccagcctgctggctagcctgttgaaagccctgggtcacggcgacggcaagagcgccagcagctactaa

SEQ ID NO: 264571 - DNA, 1278 bp, Klebsiella pneumoniae
atgcaaatcctcatgggacttatcggcatggtggcgctattggccattgctgtgctgctctccaataaccgaaaagccattaacctgcgcaccgtgctcggcgcctggataatccaggtgggtatcggcgcgttaatattgtatgtaccggccgggcgcgcggcgctattagcgatgtcgaatggcgtcgccagcgttattgcctacggcaatgaagggattagtttcatcttcggcgggctggtctccgataaaatgttcgaggtgtttggcggcggcggcttcgtctttgccctgcgcgtgctgccggtgatcgtcttcttctcgtcgctgattgccgtgctttactacctgggcattatgcagctggtcattcgcattctcggcggcgcgctgcgggcagtactgaagacctcacgtaccgaatcgctgtcggccacggcgaacatctttgttggccagaccgaagcgccgctggtggtgcgtccttatatcgccaccatgactcgctcggagctgtttgcggtcatgtgcggcggcctggcctcggtggcgggctcggtactggcgggctatgcgcagatgggcgttccgctggagtaccttattgccgcgtcgtttatggcggcgccgggaggcctgctgtttgccaaaattatcgtaccggaaacggaaaaaccggacgataacccggctcatgacagccaaagcgctgacgcggataaaccggccaacgtgctggatgccgccgcctccggcgccgcgtctggtatgcaactggcgctcaacgtcggcgcgatgctgctggcgtttattgcgctgatcgccctgctgaacggcatactctccggcgtcggcggctggtttaaccatcctgagctgtcgctgcagatgatcctcggctggatcttctcaccgctggcgtgggtgattggcgtgccgtggcacgaagcgacggtggcggggtcgtttatcggccagaagctgatcattaacgagttcgtggcctacatgaactttggcgaatatttaaaggcggatgccgaagtggcggcggccgggctgcaggtcatttcagatcacaccaaagccattatctctttcgcgctgtgcggctttgccaacctgtcatcgatcgccattctgattggcggacttgggggaatggcgcccaaccggcggcaggatatcgctcagcttgggctacgtgcggtagcggcggggacgctgtccaacctgatgagcgccaccatcgccggggtttttctcgccctgtaa

SEQ ID NO: 264572 - DNA, 795 bp, Klebsiella pneumoniae
gtgacgcaccgttttatcgatacccactgtcactttgattttccccccttcgcggcagatgaggtcgccagcctggcgcgtgcggcgcaggccggcgtcgggcgaattatcgttccagccatctctgctgagcgttttagccgcgtgctggcgctggcagctcagcacgaagcgctgtacgccgcgctgggtatgcatccgatcgtcatcgaagagcatactgatgaggaactggcgcagctggaagccttgatggcgcagcggccgcctaaactggtggcggtgggagagattggcctcgatctttatcgcgacgatccgcagtttgatcgtcagcaggcgctgctggaagcgcagctgaggctggcgaagcgttacgatctgccggtgatcctccactccagacgcacccacgataagctggcgatgctgctgaaaaaatatgccctgccgcgtaccggagtcatccatggctttgccggcagcctgcagcaggccgagcgcttcgttcagcttggctataagatcggcgttggcggcaccattacctatccccgcgccagtaaaacccgtgaagtgatggcgcgtctgccgctttccgctctgctgctggagaccgatgcgccggatatgccgctaaatggctttcagggacagcccaatcgaccggaacaagctgcacgggtatttgaggcgctgtgtgaactgcgtccggagtcgccggcagccatagaagaaaggatcatgcacaatacgctcgccttgttttcccttcccccggcctctgtatggtga

SEQ ID NO: 264573 - DNA, 1074 bp, Klebsiella pneumoniae
gtggggcaacgcattcccgtcacgctgggcaatatcgccccgctggcggttaaacccttccgaccaggcaagctggcgctggtatgcgaaggcggaggacagcgagggatttttactgccggggtgctggacgaatttatgcgcgccggatttaacccctttgacctgatgctgggtacttccgccggcgcgcagaacctctccgcctacatgtgtaatcagcaaggctatgcccgcaaagttatcacccgctacaccacttcacgccagtttttcgatccgatgcgctttgtgcgcggcggcaaccttatcgatctcgactggctggttgaggccacttcgcagcaaatgccgcttgccatgaactatgccgaagcgcagttcgcgttggggaaagagctgtggctatgcgcttgccgcggtgacgattactccgccagctatttttcgccgacgccgcaaacgtggctggatctgatccgcgcctccagcgccatccccggcttttatcgcagcggcgtgttgctcgacggcgttagctacctggacggcggcgtcagcgatgcgatcccggtgcaggaggcggcccgccgcggcgcccagaccatcgtggtgatccgtaccgtcccttcgcagatgttttataccccgcagtggttcaagcggatggagcgctggctgggagagagtagtctgcaaccgctggtcaatttggtgcatcatcacgaaaccacctaccgcgccatccagcagttcatcgagaaaccgccgggtaagttgcggatcttcgaaatctatccgcagcggccgctgcgcagcatggcgcttggcagccgactaccggcgctgctggaggactacaaaaccgggcgccagtgcggccgttatttcctggcaacggtgggtaaactactggccgaccagccgccgctgctgcgccacgcgccgcgtattgcccggcccgcgccggtggtggtgccgccggtgccggtggccaatgaagcgccccaggcgaccatcattcctgcgccccaggcgaatgaccccagttttgatcatgaggatctggcgtga

SEQ ID NO: 264574 - DNA, 162 bp, Klebsiella pneumoniae
atgtttcgatggggaattatttttctggtcattgcattaattgctgcggctctgggctttggtggtctggcgggtacggccgctggcgctgcgaaaatcgtctttgtcgtcgggattatcttgttcctggtgagcctgtttacaggacgcagacgtccttag

SEQ ID NO: 264575 - DNA, 621 bp, Klebsiella pneumoniae
atgaccagactaaagaatgccaatatgttgctggcgctcttcttaggcttagccgcgttgaacgcctcggcagagacggaaaaaacaacggtagacagtgcgaagtcggctgccagcaatgcgggagaggcggtagataattcgattaacaaagtcggcgattttatggacgacagtaccattaccgcacgggtaaaagcggcgctgatcgaccataaagatattaactccggcgatatttcggtgaaaacggagaataaagtggtcaccctcagcggcgacgtcaccagtgctgaacagaaaagtcaggcactgatcgtagcgaaagaggtcaaaggcgtctcacacgttaacgacaagctgacggtccatcataaatcatcgagcgagacggcgacgctgaaaggctatgccggggataccgccattaccagcgaagtgaaagccaagctgctggcggatgacattgtcccttcgcgcaatgtgaaagtcgaaaccaacgccggcgcggtacatctgaccggtacggtggcttccgcggcgcaggcggagcgtgccgcagagattgcgaaagcggtctccggtgtgaaaagcgtgcgcaacgatcttagcgttaagtaa

SEQ ID NO: 264576 - DNA, 1590 bp, Klebsiella pneumoniae
atgacgttgtctccttatctgcaagaggtggccaaacgccgcacttttgccattatttctcacccggatgccggtaagaccaccatcaccgaaaaggtgctgctgttcggacaggcgattcagaccgccggtacagtaaaaggtcgtggttccagtcagcacgcgaaatccgactggatggagatggaaaagcagcgtggtatctcgatcaccacctcggtaatgcagttcccgtatcatgactgcctggtgaacctgctggataccccggggcacgaagacttctccgaagatacctaccgtaccctgacggcggtggactgctgcctgatggtgattgacgcggcaaaaggcgtcgaagatcggacccgtaagctgatggaagtcacccgtctgcgcgatacgccgatcctcacctttatgaacaaactcgaccgtgatatccgcgatccgatggagctgctggatgaagtcgagaacgagctgaaaatcggctgcgcgccgattacctggcctatcggctgcggcaagctgttcaaaggcgtttatcatctctacaaagacgaaacctacctgtatcagaccggtaaaggccacaccatccaggaagtgcgtatcgtgaaggggcttaacaacccggatctcgacgcggcggtgggggaagacctggcgcagcagctgcgtgacgagctggagctggtgcagggagcgtcgaatgagttcgacaaagatctgttcctggccggggaaatcaccccggtcttcttcggaaccgcgttaggtaacttcggcgttgaccatatgctggatggcctggtggagtgggccccggcgccgatgccgcgcaacaccgacacgcgtgaagtcaccgccacggaagagaaattcaccggcttcgtgtttaaaattcaggccaacatggatccgaaacaccgcgaccgcgtggctttcatgcgggtggtgtccggcaaatatgaaaaaggcatgaagctgcgtcaggtgcgtatcggcaaggacgtagtgatttccgacgcgctgacctttatggcgggcgatcgctcgcacgttgaagaagcgtacccaggcgatatcatcggcctgcataaccacggcaccattcagattggcgatacctttacccagggcgagatgatgaagttcaccggtattccgaacttcgcgccggaactgttccgtcgtattcgcctgaaggatccgctgaagcagaaacagctgctgaaagggctggttcagctctctgaagagggcgcggtccaggtcttccgcccgatcgctaataacgatctgatcgttggcgccgtcggcgtgctgcagtttgacgtggtggtagcgcgtctgaaaagcgaatacaacgtggaagcgatttacgaatcggtcaacgtggccaccgcgcgctgggttgaatctactgacgtgaagaagttcgaagagttcaagcggaaaaatgaagttcagctggcgctggatggcggcgataacctgacctacatcgccccgacaatggtcaacctgaacctgacgcaggagcgttaccctgacgtggtgttccgcaaaacgcgcgagcactaa

SEQ ID NO: 264577 - DNA, 678 bp, Klebsiella pneumoniae
atgaaatgggactggattttctttgatgccgatgaaacgctgtttacgtttgattctttcagcggcttgcagcggatgtttctcgactacagcgtgacctttaccgccgaagattttcaggactatcaggccgtgaacaagccgctatgggtggattaccaaaacggcgccatcacctcgctgcagctgcagcaccagcgttttgacagctgggcggaacgtttgaatgtgccgcccggggaactcaacgacgcgtttatgaatgcgatggcggaaatctgtgccccgttgccgggcgcggtctcgctgctcaacgcgctgcagggcaaggtcagaatgggcatcatcaccaacggctttacctcgctgcagcagactcgtctggaacgcacaggtttacgcgatcactttgatttgctgattatttctgaacaggtgggtgtcgccaaaccggacgcgcgtattttcgattatgcgctggcgcaggcgggtaacccaccgcgctcgcgggtgctgatggtcggtgataccgccgagtcggatattcgcggcggcgtgaacgccggactggcgacctgctggctcaatgcgcatcagcgcgagctgccggcggacctcgagccggactggacggtgacctcgttaagcgaactggagcagctcctgtgtaaacactga

SEQ ID NO: 264578 - DNA, 447 bp, Klebsiella pneumoniae
atgaacacgatttctaccctcagcacggctgatttaaccaaagcctggcacatcgaaaaacgcgcccacgctttcccgtggagcgaacagactctggccagtaaccagggggagcgctatcgcaactatcagctgtcggtagatggcgaaatggcggctttcgccattacgcaagtggtactggatgaggcgacgctgttcaatatcgccgtcgatcccgcgtaccagcgccgcggcctggggcgagcgctgctggagcatgtcattgatgaagtcgaaaaactcggcgtcgtcacgctgtggctggaggtgcgagcatccaacgttgccgccatcgcgctgtatgagagcgtaggtttcaatgaggcaaccatccgccgcaactactatcctacggccgacggacgcgaagacgccattattatggctctgccaatcagtatgtaa

SEQ ID NO: 264579 - DNA, 414 bp, Klebsiella pneumoniae
atgacatcccgacgagactggcaattacagcagctgggcattacccagtggtcgctgcgccgaccgggggcgttgcagggcgaaatcgctatctcgcttcctgaacatattcgtctggtgatggtggcggaaaccccgccgtcgctgacagagccgctgattggcgacatattacgcgcgctggccgtgacgccagatcaggtcctgcagctgactccggagcgggtggcgatgctgccgcaggacagccgctgcaacagctggcggttgggcacagaggcgtcgctgccgctggcgggcgcccaggtgtccactcccgcttttgatgaactccagaccagcgcgccggctcgcagggcgctctggcaacaaatctgcgcacatgaacacgatttctaccctcagcacggctga

SEQ ID NO: 264580 - DNA, 1029 bp, Klebsiella pneumoniae
atgtccgcttttaccccggcaagtgaagtcttgctgcgccacagtgatgatttcgagtccgcccgcgttctgtttgccggtgacctgcaggatgacctgcctgcgcgtctggataccgcggccagccgcgcccacacccaacagttccaccactggcaggtcctcaaccgccagatgggtgacaccgtccgttttagcttagtggctgaggccgctgacgtcgccgaatgcgacaccctgatctactactggccaaagaacaaaccagaggcgcagttccagctgatgaacctgctctctctgctgccggtgggaagcgacattttcgtcgtcggtgaaaaccgcagcggcgtccgcagcgcggagcagatgctggctgaatacgcgccattaaacaaagtggatagcgcccgccgctgtggcctctatcatggccgtctggaaaagcagccgaccttcgacgccgacgcattctggggcgaatacacactggataatctgacgattaaaaccctgccgggcgtcttcagccgcgacggactggacgtcggcagccagctgctgctctccaccctcgagccgcataccaaagggaaagtgctcgacgtcggctgcggcgcgggcgtgctggccaccgcgctggccagccattcaccgaaagtgcgcctcaccctgtgcgacgtcagcgccccggcggttgaagccagccgagcgacgcttgccgccaacggcctggctggcgatgtgtttgccagcaacgtcttctccgaggtcaatggtcgcttcgacatgatcatctccaacccgccattccatgacggcctgcagaccagtctcgaagccgcccaggcgctgatccgcggcgcggttcgccatctgaacagcggcggcgagctgcgcattgtcgccaacgccttcctgccgtatccgcaggtgctggatgagacgttcggcttccatgaggtgatcgcccagaccgggcgctttaaggtctatcgcaccatcatgacccgtcaggcgaaaaaataa

SEQ ID NO: 264581 - DNA, 354 bp, Klebsiella pneumoniae
atgtatgtcattaccgcgaacgtaaagaaaaaggggcagagcacgtcgcaaatgacaaatgataaagattatcatatgatattgcttatcattatcgttgtaagaggtgaaaccatgctgcagcgagcattaggaagcggctggggagtgatgattcccggcgcgctaattgtcgctctcgggtatgccggagtgtcggctgacgtatggcgggtactggtcgcggtgggcatgctgatgtccgcggcgatgatctggcatcgtcaattgcgccattttatcctgctaccatcgtgtgtcgcgttgatcggcggaataatgctgatgcttgtggatattaaactgagaggataa

SEQ ID NO: 264582 - DNA, 1047 bp, Klebsiella pneumoniae
atgactgcacaaacctggcgagcacactacgcacaaaaatatcaatattccttacggctttttttactgcttaatttcatttcttcctcgctgtcgctggtcacccccctatttacggtagttcgttttacgctgccctgcgccctgatcgtcgtctgcagcgggctgctgctgctctggcactggaaatggccgcaatcgaaaataaatattcccactatctcgttgttatttggcatgctatgggcatggcacgtagtgacaaaagcgatgctattgacaccgccgcattttaactatctggtgatcgccctattaagcattctgtttatcggcaccatcgctttttccaataatatcactgcctttaccctccactctttaccaactttccttgcctgcctgataatggcggagggggaacaatggttgcgtatgacttactgctttatgctgcctatagccggtattaccctgcaaaatattatccagaagcgcagcgatgcctttacgcagggtttaatggataaactgatgcatgaacgcaatacgctcaacgatctcagtatgctcgatcccctgacaggtttgtataatcgccgcggactgcagaaccgcctcgataccctgctggcgctggacggcgacaaccactacgtgctgctcctcgatatcgatcacttcaaggcctataacgatcactatggtcatatgatgggtgaccaggcgcttattcgcgtctctgctgccattcgcaacgctgtacgctcacgcgatattgtcgcccgctttggtggagaggagtttatggtgctgctgaccaatagcagcgaagaaacggcctggcagacagccgaacgtatacgtcagcgggtctatgacctgaagatcccgcatatgtttaatgaaagcgtcgccaccaacgtcaccatcagtattggcctgacgccgctcattaatgacaacattgaacaagcgctggcgcgcgccgacggcgcactctatgaggcaaaaaataaaggccgcaacattattcttgccagttga

SEQ ID NO: 264583 - DNA, 789 bp, Klebsiella pneumoniae
atggcctggcgttcccttcctctcagcgatgaacttatctggcgggctcctttgccgacggctgagcatgccctggcggagagtattcgggaaaaaatcgccaccctgcgcccacacctgctcgatttcctgcgacttgacgaacccgccccgcggcacgcgttaacgcttgccgaatggtcgcaacccatcgccttgcgctccctgctggccacctggtccgatcatatctatcgtcatcagccgacgctgcctcgggaacagaagcctctgctctcgctctgggcgcaatggtatatcggtctgctggtgccgccgctgatgctggcgctgctcaatgaaccgcaaggcctcagcctggcgccagaacatttccatgtcgaatttcatgaaagcggccgggcggcctgcttctggattgatgtgcatagcgatgccgacatcgagaggctttcaccgcaggcgcgaatggatgccctggtaacgcgcaccctgcagccggttgttgaggcgctggcagcgacgggcgaaatcaatagcaaacttatctggagcaataccggctatctgattaactggtatcttggggaaatgcgcgcgctgctgggtgatgagcggcttgccgcgctacgtcagcactgtttttttgaaaaacaactcgccgatggccaggataacccgctgtggcgaacggtgatgctgcgtgaagggcagttagtccgacgcacctgctgtcagcgctatcgcctgccggatgtccaacagtgcggcgactgtacgcttaaataa

SEQ ID NO: 264584 - DNA, 1344 bp, Klebsiella pneumoniae
atgtctgctaaccatgctgcgtttaatttgatatttcgctttgtagaaaattacataagccccatagcagggcggatctcgtcgcagcgccacgtcatggctatccgtgacggatttatctcagcgatgccgtttatgatcgtcggatcgttcctgttagtgtttgcttatccaccgttctcaccggataccacctggggttttgcccgcgcctggctggatctggcgaaagagtttgaggggcgtattctgaccccctttgatatgacgatggggatcatgtcgatctacatttgcgcggcaatctcctataacctcggtaagcattacgagaaatccaatcagctcgatccctttatgtgcgcaatgctgtcgatcatggcctttttgctgattgccgcgccgaagaccaatggcacgctgccggtggatagcctcggggggaccgggatctttaccgccatcctggtggcgatctactgcgtggagatgatgcgtttcttgaaagcgcacaacattgggatccgcttgccggaccaggttccgccgatgatcaaaaactcgtttgatctgttgatcccggtgctggtggtcgtgctgacgctctatccgctgagcctgtttatccagcaccattttgacatgctgatcccgcaggccattatggccattttcaagccgctggtttcggcagccgactctctgccggcaattctgttggcggtgctgatcggccacctgctgtggtttgccgggatccacggtgcggcgatcgtgtccgggatgctgcagatgttctggctgactaacctcggtatgaaccagcaggcgctggcccagggcgcgcctctgccgcatatctttatggaggcgttctggaccttctttatcgtggtcggaggttccggggcgaccatgggactggtgttctgttatctgcgcagccgttcagcgcatttgcgctccattggtcgtttgagcgtggtgccaagcctgttcaatatcaacgagccggtgatctttgggacgcctatcgtcatgaacccagtgttctttattccgttcctgctggcgccgatggtgaacgcggtgctggcctgggcggcaatgaagctggatctgattggccgcgtcatctccgtcgtaccatggacggcgccggcgccaattggcggcgcctgggcgctgggctgggatttccgggcggcgattctggtcattgttctggcctgcgtgtcggcaatcatctacttcccattctttaaggtatatgagaaacagctgcttgctcaggaagcggaagaggccgagcgggcggagcatgagagtcaacagaccgcataa

SEQ ID NO: 264585 - DNA, 459 bp, Klebsiella pneumoniae
atgagtctgcagtctgtacggcagttttttgccgaacacgcccccgatatcgaaattattgagttaaatcagagtaccgccaccgtcgcacttgccgctgccgcacacaacgttgagccggggcaaattgccaaaacgctgtcgctcaagatcaaagataagattgtactgatcgtcgccaggggcgatgcgcggctggataataaaaagctgaaagagacctttggcgcgaaagcacgcatgctaagcagcgatgaagtggttacctggaccggtcatccggtcggcggcgtttgcccgtttggtctggaaaacccgctggcagtctactgcgacgtctctctcagacattatcaggaagtactacccgcagcgggagccatccatagcgcggttcgcattgaaccagaacgcatggcgcagctcaccgatgcaacatgggtagatgtgtgtttatag

SEQ ID NO: 264586 - DNA, 675 bp, Klebsiella pneumoniae; identical to SEQ ID NO: 134542

SEQ ID NO: 264587 - DNA, 723 bp, Klebsiella pneumoniae
atgttaccaggacaaggtaagtttggcgtcgttattagtaaaattcccgtcatgcaatcagggttaaaggtgatcttcaatgagaacctccctgattacgaactgagtttttgtcgttctcatgatgagctcacccttttacaactgcggcgggcggtgctggttgtcgcggatatctccggcgagattgcgcacccccgagccgtctgcgagcgttattactccctcatgacccagtaccgtgatattcactgggtttttatggtcagcgacagcctctatccgttggccgttgagctattaattcgtcctgaaagctcgttgatctccgagagcgagccggttaaccggctgattgaggtgatttgcgccggtagccgtgcggctgaacagattagccgtacgctgtttgccggggatgaagacagcgatttcgcaagctaccactctgcggcgatgctcactctttcagagcgtaaagttctgcgccttctggcgaaggggtggggaataaaccagatcgccgcgctgttgaaaaagagtaataagacgatcagcgcgcagaaaaacagcgcaatgcgtcgcttatcgctacgcagcaacgctgaaatgtatgcctggatcaacagcgcgcagggaatgcaagagctgaatatcaattcagcttacggggagcaaatggaatggaaaaaaatagtacaacccgccatgtcgccatcgtag

SEQ ID NO: 264588 - DNA, 882 bp, Klebsiella pneumoniae
atgccgttcgttcaaaccgtgcccgtatttaagctgtatggcgaagagtgcggctggccgacgccggacctgctgcactgtgagtcgatcttacagcgcagcagcctgtatcagtggcatattcgcgtccatcagcatgcggaaatggtccagcttctctatctgcatcaggggcgggcggagatcgaaattgaaggcgccaccgcggtgatgacggagtcctgcatccaggtggttcccgccctctgtattcacgggtttaatttttcacccgggacgcaagggtttgtgctctctctggcgctgccgctgctgagccggtttgaaaatcagttcggtcgccctctggatgtgcttagcgtgccgcagtgtgtgccggtgggccgttctcgcgggcgcatgcatacgctgttttcagcgcttcgcgaggagtactgcgaagagcacgatgcgcgagaaatgatgctctattcgctgctggggacgctgttggtctggctgaaccgacagtgccatcccgcgtcccccgcggaagataaagcggagcggaagcgcagcatgatgcgccacttcgcccgccttatcgagagccactaccgacagcatctcccgttggcggagtatgcgaagctgattggactgtcggttacgcacttaaattatttatgtcgtgagttttatggctgtagcgctcttggagtattgcatcagcggttgatgcttgaagcgcgacgcaatctgcagtacacccgcatgacgattacacaactctctgattatttggggtttagcgatgcagcctatttttcgcgttttttccgtcgctatagcggtatgtcacccaaagcatttagagaaacaattaaagataatgcttcataa

SEQ ID NO: 264589 - DNA, 777 bp, Klebsiella pneumoniae
atgcaggttgatcggacacagcagcgggcaatcacacgtttatgcatccagtgtggtctttttctgttacagcacggcgccgagagtgcgctggtggaggaactgtcaacacgtctcgggctggcgttggggatggacagcgttgaaagcgccatctcttcgaatgccatcgtcctgaccaccattaaaaatggcgaatgtcttacctctacgcgcaaaaatgtcgatcgcggcattaatatgcatgtggtgacggaagtgcagcacattgtgatcctcgccgagcataagctgctggactatcgcgacgtcgagaagcgttttgcgcagatcgttcccctgcgctatccgcgctggctgctggtgctgatggtgggtctttcctgcgcctgtttctgcaaactgaataacggcggttgggatggggcgctggtcagcttctgcgccagcacggtagccatgtacattcgccaggtgctgacccatcgctccatgcatccgcagatcaacttctgcatcaccgcctttgtcgccaccaccatctccgggctgctgctgcgcctcccggcgtttgccagcacgccgaccattgccatggccgccagcgttctgctgctggtcccgggttttccattaatcaatgccgtcgccgatatgtttaaagggcatatcaataccggactcgcccgctgggcgatcgccagcctgctaaccctcgccacctgcattggcgtggtgatggccatgaccgtatgggggctgcgcggatgggcataa

SEQ ID NO: 264590 - DNA, 444 bp, Klebsiella pneumoniae; identical to SEQ ID NO: 264520

SEQ ID NO: 264591 - DNA, 744 bp, Klebsiella pneumoniae
atgagcatgaaaaacgttggcgacctgatgaaacgcctgcagaaaatgatgccggcacatattgaaccggcgtttaaaaccggcgaagagctgctggcctggcaaaaagagcaaggccggctgcgttccgaagcgctggagcgagagaatcgcgcgatgaaaatgcagcgcaccttcaaccgctcggggatccgcccgctgcatcagaactgctcctttgataactatcgcgtcgagtgcgaggggcagatgaatgcgctcgcccgggcgcgccagtacgtggaagagttcgatggcaatatcgccagctttatcttctccggtaaaccgggcactggcaaaaaccacctggcggcagccatttgcaacgagctgctgctgcgcgggaagtcggtcttaatcatcactgtggccgatattatgtcggcgatgaaagataccttcggcaaccgggaaacgagcgaagaacagttgcttaacgacctcagcatggtcgacctgctggtgatcgatgaaattggtatgcagacagagtctcgctatgaaaaggtcattatcaatcagatagttgaccggcgctcatcctccaaacgacctaccgggatgctcaccaacagcaatatggaagagatgaacaaactgctcggcgagcgggtgatggaccgtatgcggctcggcaacagcctgtgggttatcttcaattgggaaagttaccggcaccgcgttacaggcaaggagtattaa

SEQ ID NO: 264592 - DNA, 255 bp, Klebsiella pneumoniae
atgggccaggatgcgcttatcatccagcatccgctccaccagcacttcaatcttgccgccgctggccttgcggccgaacagacgcgccgggatcacccgggtgttgttaaacaccagcagatcgccgggattgagcttatcgagaatgtcggtgaaggtgccatgcgtcagcgcgcccgtcggcccgtccagggagagcaagcgacagctactgcgctcaggcatcggatagtgggcgatcagagattcgggtag

SEQ ID NO: 264593 - DNA, 582 bp, Klebsiella pneumoniae
atgaattttctcgcccacctgcacctggcccatctcgccgacagttcgctgcccggcaacctgatggccgacttcgtgcgcggcaacccgcagggcgactatccggcggagatcatcgacggcatctttatgcatcggcggattgacgtgatgactgacaacctggcggaagtcaaagaggcgcgggagtggtttcgcccgcagacccgccgcgttgcccccatcaccctcgacgttatgtgggatcatttcctgtcccagcactggacgcagctctcccctgacctgccgctggacgagttcgtacgctacgccgagcggcagatcgtccccatcctgcccgactcgcctccccgcttcgtcaatctcaatcaatatctgtggtcggagcgctggctggagcgctatcgggaaatggattttattcagcgcgtgctgaacggcatggccagccgccgtccacgtctcgaggcgctacgcgactcctggcaggatctggatacccattacgaccgtctggagacgcagttctggcgcttttatccgcagatgatgcgcctggcagaaaacaaacagctgtaa

SEQ ID NO: 264594 - DNA, 603 bp, Klebsiella pneumoniae
atggttctggtcactcgtcaagcgccggattttactgcagccgctgtgctgggtaatggtgagatcgttgagaaattcaatttcaaacagcacaccaacggtaaacctaccgttctgttcttctggccgatggacttcaccttcgtgtgcccgtctgagctgatcgcgttcgacaaacgttacgaagaattccagaaacgcggcgtggaagtggttggcgtttccttcgactccgagttcgtgcacaacgcatggcgtaacaccccggtagaccagggcggtatcggcccggttaaatacgcgatggttgctgacatcaaacgtgaaatccagaaagcttacggtatcgagcatccggacgaaggcgtagcgctgcgcggctccttcctgatcgacgccaacggcatcgttcgtcatcaggtggttaacgacctgccgctgggccgtaacatcgacgaaatgctgcgtatggtagacgccctgcagttccacgaagagcacggcgaagtctgcccggcgcagtgggaaaaaggaaaagaaggtatggccgcctctccggaaggcgttgcaaaatacctgaccgaaaacgtctccagcctgtaa

SEQ ID NO: 264595 - DNA, 444 bp, Klebsiella pneumoniae
atggaaattatttttgacccgtcgttaatcgcccttaagcagaatatttcccgtgcggaagaggccatcgaactggcgggttcattacttgccaggcgccagatttgcagcgccgaatatgtcaacgagatgctgacggtatatgaagattttggcgccgccatcgtgatagatgacgggattgccatgccgcatgcccggccggaaaaaggggcattacagaccgggttctcacttgtcaccaccgccacgccaatctccttcagccacgatgagttcgatccggtttccgtggtcatcgcgatcgccggcgccgatgctgacagtcatatcaaaatgatccaactgatagcctcgctgatcgagtcagatattgtgacctttcttcagcaggaaaatgacgttaattcagtcttacatttcattcaaaaacaaatggagtag

SEQ ID NO: 264596 - DNA, 288 bp, Klebsiella pneumoniae; identical to SEQ ID NO: 134684

SEQ ID NO: 264597 - DNA, 963 bp, Klebsiella pneumoniae
atggctattttgtccattggatttgcttgtttcgatcagtttttctttctcaatgaatggccccaggagaataccaaaaacttttgtcatgattttattgaaagcggcggcggtccggcggccaatgcggcctggctgctgggattatggggcgaggaggtttattacattggtcatctgcagcaggacctttacggtcagcgcattatcgatgagtttgccgaggcgggggtggataccagccaggtggttttctccgatgacatgatcaccccgctggcctcggtgctggtcaatcgcttaacgggttcgcggacaattattacccgcaagatgcaaacgccgccttccctgacctacgagcaaaagctcaaactggacgacctcgccgagcgactgattgccagcgaggagccggtcaccattttaattgacggccatgaggcggaaatcagtgaatatttaattaagaaactgcccaacgccagggtcgtgatggacggcgggtcactgcgcgccagcaatattaaactggcggcctggactgactattttgtagtgagcgaacatttcgcccgcgattatatgagctatcgctcgctgagcaccgaagcagaaattaaagcggccctgattgagttgaataaaatttgccgcggtgaagcatttattacccttggcgaaaaaggctgcgcttttttaaaaagcggtatgctgcagatcgtcccgtcctggctgtgcaatgccgttgataccaccggcgccggggatgtatttcacggcgccttcacctatggcgtccattactcatggcatatcgataacattattttatttgccagcctgaccgccgccatttctattgagaaaaaaggggttcgggaatcgatgccggacctggcggtcgtccaccactcgttaaatagctacgagagaaacttaacgcaatattttgaagaataa

SEQ ID NO: 264598 - DNA, 861 bp, Klebsiella pneumoniae
atgttagtgtcgatgaaggacatgcttcagcatgccctgcgggacggctacgccgtcggtcagttcaacattaataatctggaatgggtcggcgccgtattaagcaccgcccagcagtgccgctcaccggttattttgggggtgtccggcggcacggttaagcatatgctcgggttaaaatgtattcatgacatcgtggttaacgccatggagtatttgcatattgatgttccggtggcgctgcatctggatcatggcacctcccgggaggcctgcgaagcggcgatcgccgccggcttcagttccattatgttcgatggctcgcatctgccgttcagggaaaacctggccattacccgccacctggtgacgctggcccacagcaaaggtatctctgtggaggccgaactggggaccatcgccggcagtgaagacggcattgtcaattccgaagtcatctacgccgatccgcaggagtgctacaccctggtgacagaaacccaggtggattgcctcgccgccgcgctgggctccacccatggtctgtataaaggtaaagcccgactgggatttaccgagatgaaagccattgccgagcaggtgaaggttccgctggtgctgcatggcggcaccggtattgccgatgaggatatgcgccgggcgattgcctgcggcaccgccaagattaacgttaataccgaaaatatgtacgcctggtgccaacaggtgaaagcaattttcgccgccgacaccgggcacgatgtgaacgatccgcggaaagtcatcgctcagggactgcagccggtacgcgagatgattgcccgccgcatggcgctctttggctcagagcagcgctattga

SEQ ID NO: 264599 - DNA, 1869 bp, Klebsiella pneumoniae
atgtcgcaaactgccacactgattctgacccacggtcagattcataccctcgatcgtgcgaatcccctggcggaagccgtggccatcgccgacggaaaaattgttgccaccggaagtcacaatcggatcatgagctttgccgccgaggggacgcaaatcgtcgatctcaaagggcatacggtgatcccgggcctcaacgattctcacctgcacctgatccgcggtgggttgaactacaaccttgagctccgctgggagggcgtcccctcgctggcggatgccctgcgaatgctgaaggatcaggcggatcgcacgccgtccccgcagtgggtacgggtggtcggcggctggagcgaatttcaattcgccgagcggcggatgccgaccctggaagagctgaacgaggcggcgcctgatacgccggtgtttgtgctccatctctacgatcgcgcgctgttgaaccgtgcggcgctgaaagccgtggggtatagcaaagagacgccggatccggcgggcggcgagatcgtccgcgatagccacggcaacccgaccgggatgctgatcgccaaaccgaacgccatgatcctttacgctacgctggccaaggggccgaagctgccgctggatctgcaggtgaactccacccgtcaatttatgcgcgagctgaaccgactggggctgaccagcgccatcgacgccggcggcggcttccagaactatccggaagattacgaaattatcgaacagctgcacgcgaaagatcagatgaccgtgcgcatcgcctacaacctgtttactcagcggccgaagcaggagctggaggattttgaacgctggaccgacatgctgaagccggggcaggggactgacttctatcgcgccaacggcgccggcgagatgctggtattttcggcggcggattttgaagatttcctgcagccgcggccggatctgccgcaaggcatggaggatgagctggagcgggtggtacgccatctggtggagcatcgctggccgttccgcctgcatgccacctacgatgagtccatcagccggatgctggacgtgtttgagaaggtgaaccgcgatatcccgtttaatggcctgcactggttcttcgatcatgccgagaccattaccgagcgtaacattgagcgggtgaaggcgctggggggcggtattgcggtgcagcatcggatggccttccagggcgaatattttgtcgatcgctacggcaaagaggcggtgaaacgtaccccgccggtagcaaagatgctggcgctggacgtgccggtggggctgggcaccgatgcgacccgcgtcgccagctataacccgtggaccgcgctgtactggctggtctccgggcgcaccgttggcgggatggcgatgtatgacgacgccaaccgcctgccgcgcgatgtcgcgctggagctgtggacggcgggcagcgcctggttctccagcgagcagggcaagaaaggccgtctggccgccggtcagcttgccgatctggtggtgctgtcgaaagactacttcagcgtcgcggaagaggagatcaaaggcattgagtcggtgctgacggtggttgacggcaaagtggtgtacgccgccggtcacttctcgccgctggcgccgccgccgatcccggtgctgccggagtggtcgccggtggtgaaggtcccgggccattaccgttccgctccgccggcgacggctaaaatcggcgccatggtgcagatgcaccagtgctgcggtagctgtggcgtccacggccatcagcatgatattgcgcgtaagtcgtcgattccggtctctgacgagcaggccttctggggcgtgctgggctgttcctgctttgccttttga

SEQ ID NO: 264600 - DNA, 546 bp, Klebsiella pneumoniae
atggcgcagcaaaaatcggtgaccctggttatcagccatctgctcgatccgcaacacagccagcgctacgaagagtggctcggtaaaattatgcccattgcggcagaatttcccggccatcttggggcgaatgtgatccggcccgccgcagggcagaatctgtggagcgtcataatccgcttcgataccctggagcacctctacgcctggacgcagtcggaaacccgtcggcaactggtggctgagattgccccactgctgacggaaggcgatcggactgaggtgcggactgaaccggccttctggtttaccccgccgacggtgaacgtacgccagccgcggcgctggaaacagtttctgatcaccctgctggtgattttccccagcaccaacctggtgcctgcggtgaccggcatgctgctgccgtcgcttaaggggagcctgatgctgcacctcattaatgatgcctgcgtggttgcgctggtggtctggttctggatgcccatcgtgacccgcctgtttgctggctggttgaagaaaaactga

SEQ ID NO: 264601 - DNA, 153 bp, Klebsiella pneumoniae; identical to SEQ ID NO: 134679

SEQ ID NO: 264602 - DNA, 903 bp, Klebsiella pneumoniae
atgcgcgtaaactttgatgttttgatgatccttgatgcccttgaccgccacggatccttcgccaccgccgcggagtcgctgtataaaccccccgccgctctgagctatatgatccagaaactggagagcgatctgaacatcgtgctgttggatcgttccggccatcgggcaaaatttaccgataccggccggctgatgctggagaaggggcgacagcttttaagtgccgccagagatctggaaaagcaggcccagcagctgagcgcgggctgggagcgagagctagccatcgcccttgacgcctcatttcccttttcggccctgctgccgctgatcgccgagttttacgcgcaaaacccacagacgcgactgaacttcagccatcacaccctcgccggttcgtgggaagagctgacccatcatggggcggatattatcctcggcgccatcaatgagccgcccacctccgcggagtggtcatggcaaaccctcggcgcgttggataacatcttcgtcgtcgccccccatcacccgctggctcaggcgaaggagccactggccaataaacagctcagccagcatcgggccatcgtgatccgcgacagcgcccgctattgccatccgctcaacagcaatctcctcgacgagcagccgcaaatcggcgtcgatgatttcgccagtaaagtcgaactattgtgcgccgggctgggctgcggctttctgccgcgccatatcgctcgcccgtggctggtaaaaggcagtctggtggagaaaagcgtcgcctgctggcgggaaaaggatattacctatatggcctggcgcagcgggaatgatgggctggctcagcgctggtggcgggaggcgctcctccgcggcgacctgctgagccagctctaccattaa

SEQ ID NO: 264603 - DNA, 1818 bp, Klebsiella pneumoniae
atgttgaaggcatggcaccttccggttgcaccctttatcaaggtgcaacaggaccgactgtttattactctgtggttaagcggtgagtcgctgccgcagcggatcacgctgcgcgcggaagaggataacgaagagctgtcgctgccgatgcagcggctccgccaggcgccacagccaggcgtggtggcatggcgcgacgaaatctctctcgccagcggtcagccgcgccgccgctacagctttaagctgctgtgggccgaccatcagcgctggtttacgccacaaggcttcacccgatttccgccggccagactggagcagttcgccattgacctgccggacgccggcccgcaatgggtggccgatcaggtgttctatcaaattttccccgatcgctttgcccgcagcgccgcgcgtgacgccgaccaggatgcggtctattaccatcacgcggcgggacgggagattgtgcgcaaggcgtgggacgacccgcttaccggcgaggcgggcgggtcgacgttctacggcggggatctcgacggcatcagcgaaaaacttccctacctgaaacagctcggcgtaaccgctctgtatctgaacccggttttcgccgcccccagcgtgcataaatacgataccgaggattatcggcgcgtcgatccgcagtttggcggcgacgcggcgctgctccggctgcgccacaacacccagcgggcgggaatgcgcatgatcctcgacggcgtgttcaaccataccggcgattcccatccctggttcgaccgtcaccagcagggcagcggcggcgccggccacgatccggactccccgtggcgcgactggtttaccttctcagaggaggggcaggcgcacaactggctgggttatgccagtctgccgaagctcgactatcggtcgaccagcctggtcaacgagatctatgccggtgaagacagtatcgtacgccactggctgaaggcgccatggagcatggacggctggcgtcttgacgtggtgcatatgctgggcgaaggcggcggggcgcggaataacctgcagcatatcgccggcattactcaggcagcgaagcaagcgcagccggaagcttttgtctttggcgaacattttggcgacgcgcgccagtggctgcaggcggatgccgaagacgcggcgatgaactatcgcggcttcaccttcccgatctggggattcctcgccaataccgatatttcttacgatccgcagaaaatagacgcccagacctgtatggcgtggatggataattatcgcgccgggctgtcgcatcagcagcagctgcggatgttcaaccagctcgacagccatgatacggcgcgttttaaatctcttcttggcaaagacgtagcgcgcctgccgctggcggtggtgtggctgttcagctggccgggggtaccgtgcatctactatggcgacgaggtgggcgtggatggcaataacgatccgttctgccgcaaaccgttcccgtgggatccggcgctgcaggatacccagctgctggcgctgtatcagcggatggcgaaactgcgtaaggcccaccaggcgctgcgctatggcggctgtcaggtgatttacgccgaggataacgtggtggtgtttgtccgcgtctacaaacagcagcgggtgctggtggcgattaaccgcggggaagcctgcgaggtggttatcgaagattccccgctgctgaacgtggccgggtggacgctgcaggagggcgccggcgccttccaggacggggtgctgaccctcccggccatctccgccaacgtctggtccggccgttaa

SEQ ID NO: 264604 - DNA, 1374 bp, Klebsiella pneumoniae
atggaaagtagtaacaagcttaagcgcgggctaagcacccggcacattcgctttatggccctgggttccgccatcggcaccgggcttttttacggctcggccgacgccattaaaatggccggacctagcgtactgttggcctacattatcggcggcgtcgcggcatatatcattatgcgggcgctcggtgagatgtcggtgcataaccctgccgccagctcattctcccgctatgcccaggaaaacctcggcggactggcgggctatatcaccggctggacctactgctttgaaatcctgatcgtcgccatcgccgacgttaccgccttcggcatctacatgggcgtctggttcccgacggtgccgcactggatctgggtgctcagcgtggtgctgatcatctgcgccgtcaacctgatgagcgtcaaggtgtttggcgagctggagttctggttctcgttcttcaaagtggccaccattatcatcatgatcctcgccgggttcggcatcattatctgggggatcggcaacggcggccagccgacggggattcataacctgtggagcaacggcggcttcttcagcaacggctggctgggaatggtgatgtcgctgcagatggtgatgttcgcttacggcggcatcgaaatcatcggcattaccgccggtgaggcgaaggacccggagaaatccattccgcgcgccatcaactcggtgccgatgcgcattctggtgttctacgtcggcacgctgttcgtcattatgtccatctacccgtggaatcaggtgggaaccgacggcagccccttcgtcctgaccttccagcatctgggcattaccttcgcggccagtattcttaacttcgtggtcctgacggcttcgctgtcggcgattaactccgacgtgttcggcgtgggccgtatgctgcacggcatggctgagcagggcagcgcgccgaaggtgttcgctaaaacgtcgcgtcgcggtattccgtgggtgacggtgatggtgatgaccattgcgctgctgtttgcggtatacctaaattacatcatgccggagaacgttttcctggtgatcgcctccctggccaccttcgccacggtgtgggtgtggattatgatcctgctgtcacagatagccttccgccgccgtctgtcgcccgaagaggttaaggcgctgaaattcaaagtccctggcggggtggtgaccacggtgatcggcctgctgttcctggcctttattatcgcccttatcggctatcatccggacacccgcatctcgctgtacgtcggtatggcgtggattgcgctgttgctgctcggctgggtctttaagacccgccgtgagcgccgcctggcgcaggctcagtaa

SEQ ID NO: 264605 - DNA, 1404 bp, Klebsiella pneumoniae
atggccgctgtatcgtccctgagaggggagcgcggtatttttccatttttttacaacaccacatccacaggcagtaatgaatttatgacccatcagttaaaatctcgcgacatcatagcgttgggctttatgaccttcgcgttgttcgttggcgcaggcaacattattttccctccgatggttggcttacaggcgggcgagcacgtctggacggcggcgatcggcttcctgatcactgcggtgggtctgccggtgctgacggtggtggcgctggcgaaagtcggcggcggcgttgaaagcctgagcaccccgattggtaaagtggccggtatcctgctggcggtggtgtgctatctcgcggtaggaccgctgttcgcaacgccgcgtaccgcgaccgtctcctttgaagtcggtattgcgccgctgaccggcgacggcccgctgccgctgctgatctacagcgttatttacttcgcgctggtgattctggtctccctctatccgggcaaactgctggacaccgtgggcaatttccttgcgccgctgaaaattatcgccctgattgtgctggcggtcgccgccatcatctggccagcgggcccgatcagcgacgcgctggaagcgtatcgtacggcgccattctccaatggcttcgtcaacggctacctgaccatggataccctcggcgcgatggtgttcggcatcgtgattgttaatgccgctcgctcacgcggcgtcagcgaagcgcgtctgttgacccgttataccgtctgggctggcctgatggcgggcgtcggcctgaccctgctgtatctggcgctgttccgtctgggctctgacagcgctactctcgtggatcagtccgccaacggcgcggcgatcctccatgcctatgtgcagcacaccttcggcggggcgggcagtttcctgctggcggcgctgatcttcatcgcttgcctggtgacggcggtgggcctgacctgcgcctgcgctgagttctttgcccagtatctgccgttctcctatcgcacgctggtctttgttctcggcctgttctccatggcggtctccaatttgggccttagccatctgatccaggtatcgattccggtgctgaccgctatctatccgccgtgtatcgcactggttgtattaagctttacccgcagttggtggcataattcgtcccgcgttatcgcgccggccatgtttatcagcctgatgtttggtatcattgacgggattaagtcatcggcatttgccgcgattctgccggactggaccgcgcgtctgccgctggcggagcagggcctggcctggctgatgcccaccgccgtgatgaccattctcgcggtgatctgggatcgcgcagccggacgtcaggtgacttccagcgcgcattaa

SEQ ID NO: 264606 - DNA, 1296 bp, Klebsiella pneumoniae
gtgctggaacggctgtcatggaaaaggctggcgctggagctctttttagcgtgtattccggccctgattctgggggcgtttgtgggtcatttgccgtggtttttactggcggcagtgaccggtttgctgatctggcatttctggaatttgatgcgcctgtcgtggtggctgtgggtggaccggagcatgactcctccgcctggccgcggcagttgggagccgctgctgtatggtctgcaccagatgcagatgcgtaataaaaagcgtcggcgcgagctgggaagcctgattaaacgctttcgcagcggggcggaatcgttaccggatgcggtcgtcctgaccacggaagagggggctattttctggtgtaatggcctggcgcagcagattctaaacctgcgctggccggacgacagtggccaaaacattcttaaccttctgcgctatcccgagttcgccaactatctgaaacaacgcgatttttcaaagccgctcaatctggtgctgaataacgcccgtcatctggaaattcgcgtgatgccctacagcgacaagcagtggctgatggtggcgcgcgacgtgacgcagatgcatcagctggaaggggcgcggcggaactttttcgccaacgtcagccatgagttgcgcaccccactgacggtgctgcagggctatctggagatgatgcaggagcaggtgctggagggggcgacccgagaaaaagccctgcacaccatgcgggagcaaactcagcgtatggaaggtctggtgaagcagctgctgacgctgtcgcgtattgaagccgcgccggcgctggcgatgaatgatcgcatcgacgtgccgatgatgctgcgggtggtggagcgcgaggcgcaaactctcagccaggagaaacagacgctgatcttcaccgtcgatgagcagctcaaggtgctgggtaatgaggagcaactgcgcagcgccatctccaacctggtctataacgcggtgaaccacaccccgccggggaccgaaattcgcgtcagctggcagcgaaccccgcagggagcgctgttcagcgtcgaggataacgggccaggcattgcgccggagcatattccccgtctgaccgagcgtttttatcgggtggataaagcccgttcccggcaaacggggggcagtggcctgggactggcgatcgtcaaacacgcggttaaccatcatgacagccggctggaaatagacagcacggtgggcaagggaacccgctttagcttcctgctcccggaacgattaattgccaaaaatgacgcctga

SEQ ID NO: 264607 - DNA, 690 bp, Klebsiella pneumoniae
atggcgagaagaattctggtcgttgaagatgaagctccaatccgcgaaatggtctgctttgttctggagcaaaatggctttcagcctgtcgaagcggaagattatgacagcgcggtgaatcaactcaatgaaccctggcctgatttgattctcctggactggatgctgccgggcggttcggggctgcagtttattaaactgctcaagcgcgaggcgatgacgcgggatattccggtagtgatgctgaccgcgcgtggagaagaagaggatcgcgttcgcggcctggagaccggcgcggatgactacatcaccaagcctttctctccgaaagagctggtggcgcgaatcaaagcggtgatgcgccgtatttcaccgatggcggtggaagaggtgatcgaaatgcaggggctgagcctcgacccttcatcgcaccgggtaatgaccggcgacagtccgctggatatgggaccgacggaatttaaattattgcacttctttatgacccatccggagcgggtgtacagccgtgaacagctgctgaaccacgtctgggggaccaacgtttatgtggaagaccgcacggtggacgtccatattcgccgcctgcgcaaagcgctggaacacagtggccatgatcgtatggtgcaaacggttcgcggcacggggtatcgtttctccgcccgtttctga

SEQ ID NO: 264608 - DNA, 1206 bp, Klebsiella pneumoniae
atgcgcctccttcacacctccgactggcacctgggccagaatttttacagcaaaagccgcgcggccgaacacgacgcttttcttacctggctactggaccgcgcgcaggagcatgaagtcgacgccattatcgtggctggcgatatttttgataccggctcgccgccgagctacgcccgcgaactgtataaccgtttcgtcgtccagttgcagcagaccggctgtcgcctggtggtgctggcgggcaaccacgactcggtggcgatgctcaatgaatcccgcgatatcctcgccttcttacacaccaccgtggtggcgaacgccggctacgcgccgattgagctgccgctgcgcgacggcacgccgggcgccatcttctgtccggtgccgtttttacgcccgcgcgagctggtgaccagccaggccggtcactccggtcgggaaaaacagcagctgctgctgcacgccatcagcgactattatcaggagcagtatcagcaggcctgcgcgctgcgcggcgatcggccgctgcccatcattgccagcggccatctgaccaccgtcggcgccagcaaaagcgatgccgtccgcgacatttacatcggcacactggatgcctttccggcgcaacacttcccccctgccgactacattgcgctgggccatattcaccgggcgcagatggtcggcggctgcgagcatatccgctacagcggctcgccgctgccgctgagcttcgatgaaaccggcaaagcgaaatcggtgcatctggtgagctttagcgaggggcgacttagcgccgtggaaaccctggaggtgcccgtgacccagcctctggcggtaatcaaaggcgatctggccgccatcaccgcccagctggagcagtggcgcggcgtcgagcaggacccgccggtgtggctggatatcgaaatcaccaccgaggactatctgcacgatattcagcgtcatattcaggcgctaacggaggatctgccggtggaagtgctgctggtgcgccgcagccgcgagcagcgcgagagaatactgctcaacgcccagcgggagacgctcagtgaactgaaggtggaggaggtattcgagcgccggctggcgctgaccgaaattgacgagatgaagcgcgcccggctgcatgagctgttcgcccatacggtgcatacgctcaccgcggaggacgaaaacgcatga

SEQ ID NO: 264609 - DNA, 2961 bp, Klebsiella pneumoniae
atgaaaatcctcagtctgcgtctgaaaaacctcaactccctgaaaggggaatggaagatagactttaccgccgagccgttcgccagcaatggcctgttcgccattaccggcgccaccggggccgggaaaaccacgctgctcgatgccatttgcctggcgctctatcatgagacgccgcgcctgaataaagtctcccagtcgcaaaacgacctgatgacccgcgataccgccgagtgtctggcggaagtcgagtttgaagtaaaaggcatcgcctaccgcgctttctggagccagaaccgggcccgtaaccagccggatggcaatctgcaggcgccccgcgtcgagctggcgcgctgcgctgacggcaaaatcctcgccgataaagtctcggacaagctggagcaaaccgcgacgcttaccggcctcgactatggccgtttcacccgctcgatgctgctttcccaggggcaatttgccgccttcctgaacgcgaagccgagcgatcgcgcggagctgctggaggagctgaccggcacggaaatctacggccagatttcagccatggtctacgaacagcacaaagccgctcgccatgcgctggagaagttcgaagcccaggcggcgggcatcgtcctgttgacggaggcccagcagcaggcgctgcaggaaagtttgcaggtacttactgacgaagaaaaagccctgctggcccagcagcagagccagcagcaccagctccagtggctgacccggcagcggatcagtgaagtaaatgctcgcttacttgccagcacggcgctgcgcgcgcgcatccgccagggcggcttgcgcgctcagcagcagcgtcaggctgaactggccgatctggcgcagtggctggccgcccatgagcgtttccgcttatggggtcaggagatcgccggctggcgagcgcaattctcgcaactgacgcgggataaacaacagctaacggctcagagcacccgcctggccgcgctacgccagaagctggccacgctgccagccagccctctcaccctgagcgcggatgacgttgccgcagcgatagaacagcaaacccaatcgcggccgctgcgccagcgcctgatctccctgcatgagcagcatcagctgctgcgcaagcgtctgcgccagaacgccgacagcgtccagcaggcgcaggcggagcaggtaaaacttaacgctaccctgacgctgcgccgggaacaatataaagacaaaaaccagcactatctcgacctgaaggcgctctgccagcgggaagaaacgattaaagacctggaaagctaccgcgaccggctcgaggcgggtaagccctgtccgctgtgcggcgcctgtgaacacccggcgattgaacaatacgcctcgttgacgctcacggataatcagcgccgccgcgatgcgctggaaaaggaggtcgccgcgctgaaagaagaaggcctgctgatcctcgggcaggtcaaggccctgacgcaacagctccagcgtgacaccgaagcggccgggcggctcgcagaggaagagcaagcgcttactaaagcgtggcaggagacctgcgcctctctgcacatcacgcgggatattgcgcaagagataaacgactggatgcaggaacaggagcgctacgagcagcagctctatcagctcagccagcgcctgatgttgcagagtcagcttaacgatcagcaggcgctggagcgccaggccgagcagcagctggcggccacgcgccagggactggagagcgccctgcaggccctggccctgagcctgccggcagaagggacagaagccgcctggctgcacgctcgcgaaagcgaatttgcccagtggcaggcgcaacagacccaacatgatgccattcagcagcaaatcgctgctctgcggccactgctggagacgctgccgaccagcgacgagacagaggttgaagctgagtcggccatcccggacaactggcgcgaaatccacgaggaatgcctgtcgctgcacagccagcttgtcgcccagcagcagcaggaaacccaggaaaaggcgcgtctggaccagtcgcaggcgcaattcacctccgccctggccgccagccgctttagcgatcgggaggcgttcctcgccgcgctgctggatgacgagaccgcccagcggctgacgcagttaaaacagacgctggagcagcagcttcagcaggcggctgcgctctgcgagcaggcgacccggcaacatgaggcgcacctggcgctgcgtccgcaaggggtggacgctgacgtccccaccctgcaaacccagctgcacgccctggcccagcggctgcgggataacactacccgccagggtgagatccgccagcagctcaggcaggacgcagagagccgtcaacagcagcaggcgctggggcagcagattgcagaggcggcgcagctggcggacgactggggctatctcaattcgctgatcggctccagcaccggcgaccggttccgcaaattcgcccaggggctgacgctggataatctggtctggctggcaaaccagcagctcaaccgcctgcatggccgctatctgctacagcgcaaggccagcgaggcgctggagctggaggttgtcgatacctggcaggccgacgccgtgcgcgacacccgcaccctctccggcggcgaaagtttcctcgtcagcctggcgctggccctggcgctgtcagacctggtgagccataagacgcggattgactccctgtttcttgatgaaggcttcggcaccctcgacagcgaaacgctggacacggcgctggacgccctggatgcccttaacgccagcggtaagattatcggggtgatcagccacgtggaggcgatgaaagaccgcattccggtgcagatcaaagtgaagaagattaacggcctgggctatagccggctagacaaagcgtttgcggtggagtga

SEQ ID NO: 264610 - DNA, 915 bp, Klebsiella pneumoniae
gtgcgtattggtattgatttaggtggaacaaaaaccgaagtgatagccctgagcgatcagggagagcagctgtttcgccaccggttacccacgccgcgggaggactaccggcaaaccatcgagaccatcgccactctggtggcgatggccgagcaggcgaccggacagcagggtaccgtggggatgggcattcctggctcaatttcgccttataccggggtggtgaaaaacgccaactcgacctggctcaacggccagccctttgataaggacctcagcctgcgccttgagcgggaagtccggctggctaacgatgccaactgtctggcggtgtcggaagcggtggacggcgcggcggcgggggcgcaaacggtattcgcggtgattatcggcaccggctgcggcgccggggtggcgctcaacgggcgggcgcatatcggcggcaatggtaacgctggcgaatggggacataacccattgccgtggatgaacgacgatgagctgcgctaccgtgcggaagtcccttgctactgcggcaaacaggggtgtatcgaaacctttatctccggcaccggtttcgccaccgactatcagcggctgagcggcaaagggttaaccggcagcgagattatgcgcctggtgggagaaggtgacgaaaaggctgaactggcgctgagccgctatgaacagcggctggcgaaatcgctggcccacgtggtgaatatcctcgacccggacgttatcgtgctgggcggcgggatgagcaacgtcgaacggctgtatcagacggtgccggacctggtgaagcagtgggtcttcggcggcgagtgtgaaacgccgatccgcaaagcgatgcacggcgactccagcggggtacgcggcgcggcctggctgtggccgctccaggggacctga

SEQ ID NO: 264611 - DNA, 912 bp, Klebsiella pneumoniae; identical to SEQ ID NO: 238657

SEQ ID NO: 264612 - DNA, 285 bp, Klebsiella pneumoniae; identical to SEQ ID NO: 210352

SEQ ID NO: 264613 - DNA, 666 bp, Klebsiella pneumoniae; identical to SEQ ID NO: 134668

SEQ ID NO: 264614 - DNA, 192 bp, Klebsiella pneumoniae; identical to SEQ ID NO: 134667

SEQ ID NO: 264615 - DNA, 534 bp, Klebsiella pneumoniae
atgacacagcctatctttcttattgggccacgcggctgcggtaaaaccaccgtcggccatgcgctggcgcgagcgcggcattttcagttctccgataccgatcatcggctacaggcccatgagcagcggacggtggctgagatcgtgcaggcggaagggtgggcgcgttttcgcgaactggagaccctgtcgctgaaggccgtgaccctgccgaatacggtaatcgccaccggcggcggcattgtgctggcggaaggtaaccgtcagtttatgcgggagaatggcgtggtgatttatctgcaggcctcggtgtcggcgctgattgaccgtctggaagcctacccgaaagccgaacagcggccgacgctgaccggaaaaccggtgcgcgaggaagtgggcgaggtgctggcgcagcgcgaagcgttataccgggacgctgcccaccatattgtggatgccacggcctcgccggatcgggtggtggagcagattatgtccatgctatgcagcgcgacggcaaccccggtaagttaa

SEQ ID NO: 264616 - DNA, 711 bp, Klebsiella pneumoniae
atgcaatctgaagaacaacgccttattgatggactgttttcccggctgaaagaggctgaggcgcacagcgcatcgcgcgatgccagcgccgaggagcggattgcccaacacgtgagcgcgcagccggcggccccctactatatggcgcaaaccattcttatccaggaagccgcgattaaacagcttaacgatcgcatccaggcgctggagagtcaggtcagccaactgcaggcggcaaagcccagcagcggtggcttcctctccggcctgtttggcggtggcggctcgtcacgcggttctgaccctatcccgggcgcggagcaatatggtcgcccgcaggccagcgctcagccgcagtatacgccaccaccgcagcagaactatgccccgcaggctgccgcacgcggcggcggctttatggcgggcgcgctgcaaacggccgctggcgtggcaggcggcgtggtgctgggcaatatgctgaccaatatgttcagcggctcgcacccgcaggagatagtcaatatcatcgaagagaagccgcagcctgatgccgcctccgcgcaggacagcatcgcgcaggacaccaccgcaggtgacgatccgttccgccagggagacgatcagttccttgccgacaatacctggaacgacgacttcgacgccggctttggcgacgatgattttggcagcgatgacgatagctgggtttaa

SEQ ID NO: 264617 - DNA, 459 bp, Klebsiella pneumoniae; identical to SEQ ID NO: 210347

SEQ ID NO: 264618 - DNA, 810 bp, Klebsiella pneumoniae
atggataagaaaattggctttatcggctgcggcaatatgggtaaggccattctgggcggactgatcgccagcggtcaggtacagccgggacaaatctgggtctacaccccgtcgccggacaaggttgcagctctgcgcgaccagtatggcatcaacgccgccagcagcgcccaggaagtggcgcagattgccgatatcgtcttcggcgcggttaaaccggggatcatgaccaaagtgctgggcgatatcgcctccagcctgaataaagagtcgctggtggtctctatcgccgccggcgttacgcttgagcagctggcgcgcgcccttggccacgatcgcaaaatcattcgcgcgatgccgaatacgccgtcgctggttaacgccggtatgacctccgtcacgcctaacgccctggtgagcagcgaagatgttgccgaagtgctgactattttccgttgctttggccaggcggagcaaattgccgagccgatgatccatccggtggtgggggtaagcggttcggcgccggcctatgtctttatgtttatcgaagcgatggccgatgccgccgtcctcggcggaatgccgcgcgctcaggcctataaattcgccgcccaggcggtgatgggctccgccaaaatggtgctggagagcggagaacacccaggggcgctgaaagatatggtctgttcccctggcgggaccaccatcgaagccgtgcgcgtgctggaagagaaagggttccgctcggcggtaatcgaagccatcacccagtgtatggaaaaatcagagaaactgagccgctcctga

SEQ ID NO: 264619 - DNA, 318 bp, Klebsiella pneumoniae; identical to SEQ ID NO: 134662

SEQ ID NO: 264620 - DNA, 1416 bp, Klebsiella pneumoniae
gtgaaattaagcgccctgtttattgccctgattcctctactgggctcgccggttattcatgcagaaactactgctgcgccggttctggaaaatcgcgctgcgcagggagatatcaccactcctggcggcgcgcgtcgtttaacaggcgatcaaaccgaagcgctgcgcgcctcgttaatcaataagccagctaaaaacgttattttgctgattggcgatggcatgggggattcggaaattaccgctgcgcgaaactatgccgagggggcgggcggtttctttaaaggaattgatgctctgccgttaaccgggcagtacacgcattattcgctggataaaaaaaccgggaaaccggactacgtgaccgactcggcggcctccgccaccgcctggaccaccggcgtgaagacttataacggcgcgctgggcgtcgatattcatgagaatgcgcatcagaccatcctcgagctggcgaaagcggcggggctggccaccggcaacgtttccaccgccgagctgcaggacgccacccccgcggcgttggtggcgcatgtgacatcgcgtaaatgctatggcccgacggtcaccagcgaaaaatgccccagcaatgcgctggaaaaagggggcaaaggctccattaccgaacaactgctgaacgcccgaccggatgtcaccctgggcggcggcgcgaagacctttgccgaaacggcgacggcgggcgagtggcagggcaaaaccctgcgcgagcaggcgcaagcgcgcggctaccagattgtgaccgacgcggcttctcttgccgccgcgacggaagccagtcaggataaaccgctgctgggactctttgccgatggcaatatgccggtacgctgggaagggccgaaggcgtcttatcacggtaatatcgataatccgccggtgacctgtacgccaaacccgaagcgtgacgcctcggtgccgacgctggcgcagatgacggagaaagcgattgacctgctgagtcgcaacgagaaaggtttcttcctgcaagtcgaaggcgcatccatcgataagcaggaccatgcggccaatccgtgcggccagatcggcgaaacggttgatcttgacgaagcggtgcagaaggcgctggaattcgcgcgaaaagacggtaataccctggtgatcgtcaccgccgaccatgcgcatgccagccagatcatcccggcggatagcaaagccccggggctgacccaggctctgaacacgcacgatggcgcggtgatggtgatgagctacggcaactctgaggaagagtcgatggagcacaccggcacccaactgcgcattgcggcctacggtccgcatgcggctaacgtcgtcggcctgaccgatcagaccgacctgttcacgaccatgaaagctgccctgagtctcaaataa

SEQ ID NO: 264621 - DNA, 261 bp, Klebsiella pneumoniae
atgaagaatctcattgctgagttactggttaaactggcgcaaaaggaagaagaagcaaaggaactgacggtgcaggttgaagcgctggagatcgtggtcaccgcattattgcgccatatggagcatgatgcccagcaggcattgattcaggatattgaacaggcgattgaccaggtgaccccctgtccgccggtcaacgaccatgatgcgatgctgttgcagcaatatctaaagaagctgttgcggcatcctcgtagctag

SEQ ID NO: 264622 - DNA, 1200 bp, Klebsiella pneumoniae
atggaatcctggaaggttaatctcatctccgtctggtttggttgcttttttaccggcctggcgatcagtcaaattctcccctttttacccctctacgtctcccagctcggcgtcacctcgcatgaagcgctatcgatgtggtcggggctgaccttcagcgtcacttttcttgtctcggcgatcgtctcgccaatgtggggaagcctggcggaccgtaaaggccgcaagctcatgctgctgcgcgcctcgttggggatggcgattgccattttactgcaggccttcgccaccaacgtctggcagctgtttatcctgcgggcgatcatgggcttaacctccggttatattcccaacgccatggcgctggtggcctcccaggtgccgcgcgagcgcagcggctgggcgctaagcacgctgtcgacggcgcaaattagcggggtgatcggcggtccgctgctgggcggtttcctggcggaccacgtcgggctgcggatggtcttttttattacggcgatcctgctgaccatcagttttctggtgaccctgtttctgattaaagagggcgttcgcccgcaggtcagcaaaagcgagcgtctcaccgggaaacaagtctttgcctctttgccctatccggggctggtgatcagcctgttcttcaccaccctggtgatccaattgtgcaacggctcaatcggcccgattctggcgctgtttattaagtcgatggcgccggacagcaacaatatcgcttttctggccgggatgatcgccgcggtgcccggcgtgtcggcactgatttctgcgccacggttgggtaagcttggcgaccgcatcggcacctcgcggatcctgctggcgacgctctgctgcgcggtggtgatgttcttcgccatgtcctttgtcaccaccccgctgcaattgggtacgctgcgttttctgctcggctttgccgatggcgcgatgctcccggcggtgcagaccttattgctgaagtacagcagcgacagcgtcaccgggcgtatctttggctataaccagtcgtttatgtatctgggcaacgtcgccgggccgctaattggcgcctctgtgtcagccatggccggcttccgctgggtgtttattgccaccgccattatcgttttcattaacctctggcaactggcgtggatgctgcgccaaacccgccgggctaacgcctga

SEQ ID NO: 264623 - DNA, 684 bp, Klebsiella pneumoniae
gtgagaggaaagacgctgctggtgctggccgggctgctcggcgcgggcctgttgggataccgcaatctgccgccgcacctgaatccgctggcgccgctggcgctggacgatcccccgggctggctgacgtcgtttaagctgcgcaggctgacggcagaccagtgcgcctccctgctggcggaagccaatcgccggcggcttatcgccagccggccggtggccgacagcgagggaagctgccctctgcgtaacgtggtgcgggtggcgaattttggctcggtgcagctgagcagtagttttctcgccagctgcccgctggcgctgagcagtgcgctgtacatcgagcagcaggcgaagccgctgacccggcagctgatggcgagcgatctgcgtcagatcgatcatctcggcagctttgcctgccgcaatatttaccatcgtcaacaggcgcggcgcagtgaacacgccacggcggacgcgctggacgtcagcggtttccgtctggcggacggtagacgcgttagcgtcctgcagggctggcggagcgagacttcgcgcccctggctggcggcgctgttgagcagcagttgccattacttcggtaacgcgctggggccagagtacaacgcggctcacgccaaccattttcatttcggcatgcgcgggcagggcttctgcttttga

SEQ ID NO: 264624 - DNA, 1098 bp, Klebsiella pneumoniae
atggcaaagatgagggttgggatcgtttttggcggcaagtcggcggagcatgaagtgtcgctgcagtcagcgaagaatatcgtggaagcgattgataaatcgcgcttcgatgtggttctgttgggtattgataaacaggggctgtggcatatcaacgacgccggcaactacctgctcaacgcacaggatcctgcccgcattgccctgcgcccttccacggtgactctggcgcagatcccgggccgcgaagcgcagcagctgattaacgccgaaagcggccaaccgctggcggccatcgatgtgattttcccgatcgtccacggcacgctgggtgaagatggctccctgcaggggatgctgcgcatggcgaatctgccgttcgtcggctccgatgtgctgggctctgcagcctgtatggataaagacgtgaccaaacgtctgctgcgcgacgccgggctcgccgtcgccccgtttatcacactcacccgcgccaaccgcgcgcagttcagctttgccgatgtcgaagcgaagcttggcctgccgctgttcgttaagccggctaatcagggctcgtcggttggcgtcagcaaagttaaaaacgaagagcagtaccatcaggcggtggccctggccttcgaatttgaccataaagtggtggtggagcaaggcattaaagggcgggaaattgagtgtgcggtgctgggtaacgaccacccgcaggccagcacctgcggtgaaatcgtcctcaacagcgagttttacgcctacgacaccaagtatatcgacgatcagggcgcgcaggtggtagtcccggccgctatcgcccctgagctcaacgacaaaattcgcgctatcgcggtgcaggcctaccagaccctgggctgcagcggcatggctcgtgtcgacgtgttcctcaccgccgacaacgaggtggtgatcaacgagatcaacaccctgccgggctttaccaacatcagcatgtatccgaagctgtggcaggccagcggtctcgactacaccagcctgatcacccgcctgattgagctggcgctggagcgccatgccgcggaccgggcgctgaaaacctccatgaactaa

SEQ ID NO: 264625 - DNA, 204 bp, Klebsiella pneumoniae; identical to SEQ ID NO: 134656

SEQ ID NO: 264626 - DNA, 303 bp, Klebsiella pneumoniae
atggctgaattcagtttttcaaaatcgcttttgggaaataaaaaaaggggcgcgctgaccggcagccatgtcgcctacgggctgttcgtgttgatctgctgctgggccggcgcgcagatgctcagcatgctgatccacgccccgggggtatttgaacgcctgatgcaagcccaggacgccagccgtccgcaagtcgacatcagcctcgccgtgggtaccctctttggtctgatccctttccttatcggctgcacgttcatcggggtactggcgcttatcgtgcgctggcgtcagcgccgttaa

SEQ ID NO: 264627 - DNA, 1107 bp, Klebsiella pneumoniae
atggccgcacgtttatcgcgcattattcccgtttcattgacgctgctggcggccatggcgctgagcgcctgtaccagccagcaggccccggcgctgaaagagggcgagaagcctgttgacgtggcatcggtggtgcggcagaaaatgccggccagcgtcaaggatcgggaggcctgggcgcaagccatcgccaccgcgtttgacagccagaagctggcgccgacggaagaaaacgtctgctcggtgctggcggtcgcgcagcaagagtctaactatcagtccgatccggtggtgccggggctgaataaaatcgcctggcaggaaattgaccgccgggcggaaaaaatgcacattccgccgtttctggtccataccgcgctgaagatcacctcgccaaacggtaaaagctatagcgaccgtctggacaatgtgaagacggaaaagcagttgagcgccatttttgatgactttatcgggatggtgccgatggggcagaagctgttcggttcccttaacccggtgcacaccggggggccgatgcaggtcagcattgcttttgccgagcagcacacctccggctacccgtggaaaatgaacggcacggtgcgccaggaggtcttcagtctgcacggtggcctgtggtttggcacctatcatctgctgaactatccggccagttatagtgcgccattgtaccgctttgccgacttcaacgccggctggtacgccagccgtaacgccgccttccagaacgcggtggtgaaagccagcggggtaaaactggcgctcgacggcgaccttatccgctacgacagcgaggagccgggcagcaccgagctggcggtgcgtcgcctggcgagccagctggggatgagcgacagcgagatccatcgtcagttgaaaaagggcgacagcctggcgtttgagaagaccgatctctatcagcaggttttccgtctcgccgagaaaaaggcgggcaaaaccctgccgcgggagatgttgccagggatccagctggagagtccaaaaatcacccgaaatctgacgacggcgtggtttgcgaaacgggttgatgagcggcgggcaaactgtatggcgcggcgttaa

SEQ ID NO: 264628 - DNA, 1221 bp, Klebsiella pneumoniae
atgtttaaatcttttttccccaaaccggggccgttttttatttctgcctttatctggtcgctgctggccgtgatcttttggcaggcgggcggcggcgactggctgctgcgggtcaccggggcatcgcaaaatgtggcgatcagcgcggcgcgcttctggtcgctcaactatctggtgttctacgcttactatctgttttgcgtcggcgtgttcgcgctgttctggtttgtctactgcccgcaccgctggcagtactggtcgattctcggcacctcgctcatcatcttcgtcacctggtttctggtggaagtcggggtggcgatcaacgcctggtatgcgccgttctacgacctgatccagagcgcgctggccaccccgcataaggtcagcatcaaccagttttatcaggaaatcggcgtctttctcggcatcgcgatcatcgcggtgattattggcgtgatgaacaacttcttcgtcagccactacgtcttccgctggcgcacggcgatgaacgagcactatatggcccactggcagcatctgcgccatatcgaaggcgccgcgcagcgtgtgcaggaagataccatgcgttttgcttccaccctcgaagatatgggcgtgagctttatcaacgcggtgatgaccctgatcgccttcctgccggtgctggtgacgctctccgaacatgttcccgacctgcctatcgtcggccatctgccgtatggcctggtgattgccgctatcgtctggtcgctgatgggtaccggcctgctggcggtggtggggattaagctgccgggcctggagtttaaaaaccagcgcgtggaagcggcctatcgtaaagagctggtttatggcgaggacgatgaaactcgcgccacgccgccgacggtgcgcgagctattccgcgcggtgcgtcgcaactatttccgtctctatttccactatatgtatttcaatatcgcccgcatcctctatctgcaggtggataacgttttcggccttttcctgctgtttccgtcgatcgttgccggtacgattaccctcgggctgatgacgcaaattactaacgtcttcggccaggtgcgcggctcgttccagtacctgatcagctcgtggacaacgctggtggaactgatgtccatctacaaacgtctgcgcagttttgaacgcgagctggacggcaaaccgctgcaggaagcgatcccgacattacgttaa

SEQ ID NO: 264629 - DNA, 534 bp, Klebsiella pneumoniae
atgacggctcaacgggtagtgatggtcgtggatatgcaaaacggcgtgttcgccacgcagcgtctggcgcgcgagcgctgcgtcgcgcaaattaatcgtctggtgcgcgcggcggacaaggttattttcattcagcatgatgaagccggcggcctcgaagccggcagcgaaggcttcgccctgcttcctgagctggagcagccggctggcgcgctgtatgtcaccaaaaccgcctgcgatgccttctaccacacctcgctggcgcaggtgctggacgaacacgacattcagcagttcgtcatctgcggctgcgccaccgactactgcctcgataccaccattaaaaatggcgccagccgcgggtacggtattgttatcgcggaagatgcccacaccaccgccgaccgccccgccgcgcaggccgcgacgcttatcgcccactacaatgaggtgtggcgtacgctgaccattcctggcaatcctttacaggtgaaacccacagaaacaattctgcacgcatggcagcagaactaa

SEQ ID NO: 264630 - DNA, 1161 bp, Klebsiella pneumoniae
ttgaaacgtagtttgctcatttttgctgcgctgtgcgcggcgtcgtggacctcggtgcaggccgcacagcctaccgttgacccggttttcgcctcggatgtggtcgatcgttacgccaatcatatctactacggcagcggcgccaccggcatggcgctggtggttatcgatggcaatcagcgtgtttttcgcagctttggcgaaacccgcccggggaataatcagcacccgcagctcgactcggtgatccgtatcgcctccctcagcaaactgatgaccagcgagatgctagtgaagctgctcgaccagggggtggtgaaactcaacgatccgctgagcaaatacgccccgccgggcgcccgggtgcctgactggcagggaaaaccaatcaccctggttaacctcgcgacccataccagcgccctgccgcgcgagcagcctggcggcgccgctcatcgtccggtgtttgtctggccgacccgccagcagcgctggaactggctctcaaccgcgaccctgaagaccgcgccgggctcgcaggcggcctactccaatctggccttcgatttactggcggacgcgctcgccaccgccgccggcaaaccgtatccgcagctgtttgaagagcagatcacccggccgctggggatgaaggacaccacctttaccccgtcaccggatcagtgccagcggctgatgatcccggaaaaaggcgccagcccatgcaacaacaccctggcggcgatcggcagcggcggagtctactcgacgccgggggatatgatgcgctggatgcagcagttcctgtcatccgatttctatacccgcagccagcaggccgaccggatgcagacgctgatttatcagcgtaaccagctgacccgggtgattggtatggacgtgccgggccgcgcagacgcgctgggcctcggctgggtgtatatgaagccgaagaacggccatccggggattattcagaaaaccggcggcggcggcgggtttatcacctatatggcgatgaatccgcaggctaacgttggcgcctttgtggtggtaacccgctcgccgttaacccgcttcaacaatatgagcgatggcatcaacgacctggtcagcgagctgagcggcgcacagcccaacatgcagacggccagccagtaa

SEQ ID NO: 264631 - DNA, 975 bp, Klebsiella pneumoniae
atgacagatttaatcactcgcccccgccgcctgcgtcaatccgctgcgctgcgcgccctgtttgaagagacaacactgagtttgaacgacctggtgttgccgatctttgttgaagaagaaattgatgattacaaagcgatcgaggccatgcccggcgtgatgcgcattccggaaaaatatctggcgcgcgagatcgaacgcatcgccaacgccgggatccgctcggtgatgacctttggtatttctcatcacaccgatgccaccggcagcgatacctggaatgaaaatggtctggtggcgcgtatgtcgcggatttgtaagtccacggtgccggagatgatcgtcatgtccgatacctgcttctgcgaatatacctcccacggccactgcggcgtgctgtgcgaccacggggtggataacgacgcgaccctggaaaacctcggcaaacaggccgttgtcgccgccgccgcgggggcggatttcatcgctccttccgccgcgatggacggtcaggtgcaggcgattcgccgctcgctggacgccgccggcttcaccaatacggcgatcatgtcctactcgaccaagttcgcttcttccttctacggtccgttccgcgaagcggccggtaccgcgctgaagggcgatcggaaaacctatcagatgagcccgatgaatcgccgggaggccattcgcgagtcgctgctcgatgaagcccagggcgccgactgcctgatggtgaaaccggctggcgcctacctggatattctgcgcgatatccgcgaacgcagcgatctgccgctcggcgcctatcaggtcagcggtgagtacgcgatgatcaaatttgctgcccaggcgggcgctatcgatgaagagaaagtggttctggaaagtctcggcgctatcaaacgcgcaggcgccgacctgatcttcagctatttcgccctcgatctggccgagaaaaagatcctccgttaa

SEQ ID NO: 264632 - DNA, 492 bp, Klebsiella pneumoniae; identical to SEQ ID NO: 215226

SEQ ID NO: 264633 - DNA, 1719 bp, Klebsiella pneumoniae
atgtttagtctcgacaacgtactcgatgacctgtggcctcaggcgaggcccgccccctggcaaaagaaactgttaaaaaagctattttatgaggaagagtttcaacaatttgccgaccgtcaccgccacctgaaggggcttgatacggtcgaacaggtgctggaatacctcaatatccgctgcgccatcccggcgcacgatctcgaacaaatccccgaatatggcccgctggtcattatcgccaaccaccccaccggcaccctcgacggcctggcgctcctgtatgcggtatcccgcgtgcgccgcgatgtcaaagtggtcaccaaccgcatgctcacccaccttgagcccctgagctcgctgtttatcccggtagataatattcatggccgcaccgctaaagcggcgctgcagcagatggaccagcagctgcaggccggcggggtgctgatcttcttcccggcgggggaagtctcccgcctcacccgtcgcggcatccgcgataaaaaatggcactccggctttattaagctggcggcaaaatatcgcgccccgctgctgccggcgtggattaacgcccgcaacagcgccctgttttacgccagcacgctgatatcagacaacctgccgctgctcctgctgatgcagcagatgtttcgccggcgcaacagcagcctgccggtgcgtatcggccagcagatcccctggtcgaactggttcgatgcccagtccagcgctcgcgagcttaccggccgctgctatcagcaccttgaacagctgcgcaaagggctgccggggcggtttaaaaccgaaagcgccatcgcccgtccggaagaccgggcgctgctcaaacgcgaactgcacaaggccaaatgcctgggccgcaccgccgatggcaaagtgatttacctctggcagcgcaacggccaggaggacgcgccgctgctgcgcgagctgggacgcctgcgggaaatcgccttccgcgcggtcggggaaggcagcggcaaaaggcgggatatcgacgggtatgacgacgactatctgcatctgatcctgtgggatgaagaagacctcgagatcgtcggcgcttaccgctttatgccgacggctatccagttggcaaagcgcggcctggaggggatctacagttacagtctgttccattacgacgggcggatggacgatgtcctgcagcacggcattgagctggggcgcagctttatccagccgcgctactgggggcgtcgcgggctggactacctgtggtccggcatcggcgcttatctggcgcgctatccgcactatcgctatctgtttggtccggtgtcgatttctggcgggttgccgcccgccgcccgcgatctgctggtggcgttctaccggatgtggttcccggcgacgcatccgctggcggagtcgcgtcgcccttatccggcgtcgctgcccgacgtgctggcgcagtttggcggggaggattacaacgacgacctggcccggctgaagtctctgctcggcaatctcggctgcgcgatccccccgctgtataagcagtactcggaagtatgcgagccgggcggtgtgcagtttatcgatttcggcagcgacccggatttcaacaactgcgtggatggtctggtgctggtggatctcacctacctgaaggccaatcgctaccagcgctatattggcgcgcatctgggtgcgcaaaaatcggcataa

SEQ ID NO: 264634 - DNA, 852 bp, Klebsiella pneumoniae
atgagtgaacgtctgagcattaccccgctggggccctatattggcgcgcaggtgagcggggcggatttaacccgtccgctgagcgacaaccagtttgagcagctgtatcacgcggtgctgcgtcatcaggtggtattcctgcgcgagcagaatatcaccccggcgcaacagcgcgatctggcgctgcggtttggcgacctgcatatccatccggtctaccctcacgcccctggcgtggaggagattatcgtcctcgatacccacaacgataatccgccggataatgacaactggcataccgatgtcacctttatcgacacgccgcccgccggcgccattctggcggcgaaagagctgccgacgaccggcggggacaccctgtggaccagcggcatcgccgcctgggaagcgctgtcagaacccttccggcagctgctgagcggcctgcatgccgaacacgatttccgcaaatcgttccaggagtataagtacaacaagaccgaagccgagcatcggcgctggcaggaagcggtggcgaagcatccgccgctgctgcatccggtagtgcgtacccacccggtgaccggcaagcaggcgctgttcgttaatgaaggctttaccacgcgaattgtcgaggtgagtgagaaagagagcgcagcgctgctgaacttcctgtttgctcatgtcactaaaccggagtttcaggtgcgctggcgctggcagccgaacgatgtcgctatctgggataaccgggtgacgcagcattacgccaacgccgactatctgccgcaacggcggatcatgcaccgggcgacgatcctcggcgataagccgtattaccgggcggggtaa

SEQ ID NO: 264635 - DNA, 828 bp, Klebsiella pneumoniae
atgagcgtggtactgaacgacaaaccgcgtcagtcgacgctgaagtggcgctggccgctctcccgccagctcaccctcagcgtggcgaccctggcggtattgctggccgtctggtgggcggtcgcggcgttgcagctgattaacccgctgtttctgccgccgccaggccaggtgctgcagaagcttatcaccatcgccgggccgcagggctttatggatgcgacgctctggcagcacctggcggcgagcctgacgcggatcgttatcgccctgttggcggcagtgcttattggcgtaccggtggggatcgccatggggctcaactcgacggtgcgcgggatcctcgacccgatgatcgaactctatcgtccggtgccgccgctggcctacctaccgctgatggtgatctggtttggcatcggtgaaacctcgaagatcctgctgatctacctggcgattttcgcgccggtagccatgtcggcgctggcaggggtaaaaagcgcgcagcaggtgcggattcgcgccgcccgttcgctgggcgccagccgggcgcaggtgctgtggctggtgatcctgcccggcgcgctgccggagatcctcaccgggctgcgcattggtctcggggtgggctggtcaacgctggtggccgctgagctgatcgccgccacccgcggattaggatttatggtgcagtctgccggcgagtttctcgccaccgatgtggtgctggcggggatcgcggtgattgccattatcgcctttttactggaactgggtctgcgcgcgctgcagcggcgcctgacgccctggcatggagaagtacaatga

SEQ ID NO: 264636 - DNA, 636 bp, Klebsiella pneumoniae
atgggtacgccgcagtacatcaggcttaccgcccggccgcggaaacgtgagccagcggcttccgaggttaaggcaatcaggttcggcaatgccgccccgagcccgacgccggtgagcaggcgcgccagcagcagcgtcgggaagctccatgccagcgcggtggccagcgagaacaggccaaacagcagcaccgaccccaacagaatgcgcttacgcccgtggcggtccgccagcatgccgcccaccagcgcgccgggcagcaggccgaggatcccagcgctgaagatccagcccatctgcattttatccagcgcaaaggcctgcgccatgccgacggcggcgatccccgccgcctgcagatccagcccttccatcagggccaccataaaacagagcccgatggtgaccaccaggcgcgagggggttgcagtcgttatcttggtcatagggtaccttggcgatagccgaacaaacggagcaggtgactggcggctgatgcttagtcagccgcacgttcttagttatttattgcggttaagcagatccagcgcgacgtcgacgatcatatcctcctggccgccgaccatccgccgcttgcccagctcgacgagaatatccaccgcgctgaggccatag

SEQ ID NO: 264637 - DNA, 966 bp, Klebsiella pneumoniae
gtgatccagggcaaatcggtgcgtctgatcctgaaaaaggacgcgcgcattgaggaagtccagcagcatggcgacatgccgcccctgcaggtggccgacaccgcgccgcgctttgaagatgcgtttatcgacctgctcggcggcgccgggaccgctgaatcgccgttgggggcgattatccatcgcgttgacggcagcaaagaggaaacggtcattgaagcccagtcgttaacgaaaaagtttggtgatttcgccgctaccgaccatgtcgatttccaggttaagcgcggtgaaattttcggcctgctcggccccaacggcgccggaaaatccaccaccttcaaaatgatgtgcggcctgctggtgcccacctccggcaaagcgctggtgctgggaatggatctcaaggtcagctctggcaaggcgcgccagcatctgggctatatggcgcaaaaattttccctgtacggcaacctcagcgtcgagcaaaacctgcgctttttctccggcgtctatggcctgcgcggccgggcgcaaaatgaaaaaatcgcccggatgagcgatgcctttggcctgaaaagtatcgcccgccacgccgccgacgagctgccgctcggctacaagcagcggctggcgctggcctgctccctgatgcatgaacccgatattctgtttctcgatgaacccacctccggcgtcgatccccttacccgccgcgagttctggctacatattaatagcatggttgataaaggcgtgacggtaatggtcaccacccactttatggatgaggcggaatactgcgaccgcatcgggctggtctatcacggcaagcttatcgccagcgggaccccggatgagctgaaagcccaggcggcggacgacagccagacggacccgaccatggagcaggcgtttattaccctgattaaccgctgggacaaggagaatagccatgggcaatag

SEQ ID NO: 264638 - DNA, 258 bp, Klebsiella pneumoniae
atgcaccaccagcggcacctgccactgctggcaaatctgccgacaatgcgccacccagtcgtctgcgtgggcgctaaggccgtggtgaacatgcaccgcccgcagcgtcagcgagggatcctgttcccgcagcagcaccagctgatgcagaagaaccgtcgagtccagaccgccgctgaaggccaccagcagctggcgatggggatgaagcgtatgcgcaatatcagccgtcatatccacgaacataccgagaagtga

SEQ ID NO: 264639 - DNA, 882 bp, Klebsiella pneumoniae
gtgcatgatagaggcgatgtatttatccatgccgctatccaccagcacctgcttgaaggcgccgccgccgccgatgatcaacagcatcatggcgatgattttaatcgaagaggtcagggtatcgttgatctgctccatggagcggccgcggttcaaaccgaaggtgaacagggcaatcagtaccgcaatcagggtggccatcaccgggtcgccgaagaactcggcaattggcaggaaggcgtggcctttcggcaggatcatctcagccacggcgcgcatcgccatcaggatcaccggaaccaacgaggtccagacgctgacgccaaagccaggcatctcttcttctgtgaacactttcgggttatgcaggccttccgggatcggcttatcaatgcctttcaggaagcgcgcaaacaccggccctgccaggataaccgtcgggatagccagaatggtgccgtagagcagcgttttgcccatatcggcatggaagatggtggcgatcgcggtcggacccggatgcggcggcaggaagccgtgggtgacagagagagcggcggccatcggtacaccgacgtacagcagcgggatgcgggccgaggcggcgatggtaaacaccagcggcagcatcagcacgaagcccacttcatagaacagggcgaagccaacggtgaagccggtcaggaccaccgcccactgaatatgcttcttaccgaacttattgataagggtggtggcgatacgctgggcgccgccgcagtctgccagcagtttaccgagcatagccccgaagcccatgatcagcgcgaggctgccaagggtgccgccaacgccgttcttgatagagacgatcactttatccagcggcataccctgcattaa

SEQ ID NO: 264640 - DNA, 966 bp, Klebsiella pneumoniae
atgagcaaatcacatccccgctggcggatggcgaaaagagtgctgaccgtgctcttttttatcgccgtcatcgtcctgttggtgatctacgcgcaaaaagtcgactggcaggacgtgtggaaggtgatccgcggctacgatcggctggccttgtttagcgccattgcgctggttatcgtcagctacctcatttacggctgctacgatctgctcggtcgggcctattgcgggcacaagctggcgaaacgccaggtcatgctggtgtcgtttatctgctacgccttcaacctgaccctcagcacctgggtcggcgggatcggtatgcgctaccggctgtactcgcggctggggctgaacggcagcaccatcacccgtattttttccttaagcattaccaccaactggttgggctatattctgctgggcggggtgatattcacggcagatctggtgaagctgccgccgcactggtacatcagccagaccactctgcgtattatcggcggggtgatgctgatccttacgctttgctatctgttcggctgcgcgttcgccaaacgccgtcacctgacgattaaaggccagcggctggtgctgccctcctggcgcttcgcgctgctgcagatggggctctcggcggcgaactggatggcgatgggggcgataatctggctgctgttgggcagcgagattaactattttctggtattaggggtgctgctggtgagcagtatcgccggggtgattatccatattccggctgggatcggcgtgctggaggcggtgtttatcgccatgctctccggggaagatatttcgaagggcgcgatcattgccgccctgctcgcctggcgcgcgctctattatttcctgccattgctgctggcgacggtggcctatctgctgctggagagccgggcgaaaaagctacggcaaaagaaccagcgcaagctggcccgcgaatga

SEQ ID NO: 264641 - DNA, 1245 bp, Klebsiella pneumoniae
gtgaaatgtcgttggcaggaaggcaaccgcattacgctactggagaatggcgaccagtactatccggcgctgtttgcggccatcggtcgcgccagccggcgggtgatcctcgaatcctttatctggtttgaagatgaggtaggccggcggctgcacgcggtcctgctcgaggctgcccgccgcggcatccaggtggaggtgctcctcgacggctatggttccccggatctcagcgatgaatttgtcggcgagctcaccgccgctggcgtgattttccgctactacgatccgcgtcctaagctgatggggatgcgcaccaatctgttccgtcgcatgcaccgtaaaatcgtggtaatcgacgacaccaccgcctttgtcggcggtattaactactccgccgaacatatgagcgactacggtccggaggcgaagcaggattatgcggtgcaggtcgaagggccggtggtactcgacatcctgcagttcgagctggaaaacctgcccaacagcgataccgcccgccgctggtggcgacgtcgtcgccaccagccggaggttaaccagacccccggcgaggcgcaggcgctgttcgtctggcgcgacaaccaggatcaccgcgacgatattgaacgccactacctgaagatgctgaccagcgcccgccgggaagtgattatcgctaacgcctattttttccccggctaccgcctgctgcatgcgatgcgcaatgccgcgcggcgcggagtacgggttaagctgatcgtgcaaggcgaaccggatattcccattgtgaaatttggcgcccacctgctctatcactatctcgttaagggcggggtgcagatttacgaatatcgccgtcgcccgctgcatggcaaggtcgctctggcagacgaccactgggccaccgttgggtcaagcaacctggatccgcttagcctgtcgctgaatctggaagccaatctgatcatccacgatcgggtgtttaaccagacgctgcgcgataatctcaacgggcttatcgcccgggattgccagcggatcgataaaacgatgctgccgaaacgcaactggtggcggctgggcgtcagcgtgatggctttccactttctgcgccacttcccggcatgggtcggctggttaccggctcataccccgcggctggccagagtcagcccgccggtccagccggaaattgaaactcaggaccgcgtcgagtctccagccagggataatccactatga

SEQ ID NO: 264642 - DNA, 318 bp, Klebsiella pneumoniae; identical to SEQ ID NO: 25804

SEQ ID NO: 264643 - DNA, 768 bp, Klebsiella pneumoniae
ttgcgcatcctcaccctgcgcggtaaagcgcagacggtgaccttttttcacacccagcgccacgaccttcatcaggctgcggccattagccggcttgccggaaccgtcgagattggtgacggtaatgtcgctggaaaattgtttaatggtgttgaccagcatggtgcccggacgggcgtgcaggccgtgctcattgcgcaccacgaattcggcgctcagcacatcttcggcaatggcatcgtcgctggtcagcagcgccagcacggtggcggcgtcggctttcagcagatggtcagctttcttgtccagcagcagcttgctcaggcggttcagcaccgcggtcggctgctcgtcaaccattgccactgtgaccagcagggaaaccggctgatcgtcgcgggtgaaggcgttagccgcgcggctaaccgccacagcgctgcgcagattgccttccgcactgtcgttcagccagacgccctgaccgaggttcagcggcgtatcgttaatgacgtggctaacgaaggcggcatcgacagcgccaacttctttcagacgcgccgcgttcagcgcctgcagggtcagcagatcgctggccgcgacgtcgagactgagggtctcgttgtccagcttcagcgcttcgctctgcttctctcccatcagcagcgcacgcagctcttccgcggtggtggcggactgcagctgcgcggcgaccgcgtcatcgctcagcacgtgggtcagctgacgcagcaggccgaggtgttcatctga

SEQ ID NO: 264644 - DNA, 411 bp, Klebsiella pneumoniae
gtgcaggcggccaggctactgtcgataagcggtgaaggcgaaacgctgcgtctgacgctggcgcggcgcggcggcggcgtgcagacgctgagcgtcgatcacctgatcctgaccaccggacccgcacaccgcgccctgaccgacagccagccatttttacaggacctcgcccgccgcggcctgattcgcgccgatgccctcggcatgggcctggaggtggacagccgttcccgggcagtggctgagccgcacgttgaggcgctgccggtgctggtggccggtccggccgcccgcgggcgttttggcgaactgatgggcctgccgcaggtagccgaccatgccgctgaagtggcggcgcaaacgttactcacgctcgggatcccgcaggactcccgatgtcctgcgtactga

SEQ ID NO: 264645 - DNA, 645 bp, Klebsiella pneumoniae
atggctggcgtattaattaccggttttgagccgttcggcggcgaaacggttaatccttcatgggaagtggttaagcagcttgatggcatgattattcgcggacagcaggtggtggctaaacagttaccctgcgtgttcggcgaagcgctgacggtgctgaaggcggcgctggaaacctatcaaccgcggctgacgattgccgtcggacaggccggcggccgtgtcgatatcaccgtcgaacgtgtagcgatcaatgtcgatgatgcgcggatccccgacaataaaggccagcaaccgatcgatgagccgatcgtcgctaatggccctgcggcctgcttcagtacgctaccgatcaaagcgatcgtcagcgcgctgcgccagcaggggatcccggcctcggtgtcgcaaaccgcgggcaccttcgtctgcaatcacgtgatgtatggtttgctgcatcagctgcagggaaaacgcggacagaagggcggttttatccatattccgtatctgcctgaacaggcggcggcccatccggggcaggcgagtatgtcggtcgagacggtacgcgcggcgctggaaacggcgattaccgtcgcccttgaacaggatgacgacgtcaaaattggcggcggcgccacgcactaa

SEQ ID NO: 264646 - DNA, 648 bp, Klebsiella pneumoniae
atgacccgccactacgaccggcttgctcaccgggggctcggctttgaccggttcggcaggggccgcttcggtcactggcgcttgctccacggtttctgcgaccggggcgatagtttccactggcgctgcaacgacaggcgtcgtttccaccgcttcaggttctaccaccaccggctcggggtcgagcgtcactggcgcgatagcctgaggcgcttcgacagccggtgcttcggtgaccggctcctgaggcgctggctcgacggctgctggcgcgacaacttccgcagcatcaacgaccagcggctcggccgccgctaccggctcgacgactaccggctcagcggttactggttccatggtagccggctcgacggtgaccggcgcagcggtaacggtttcaacgacggcaaccggggccgctacagcctcgacagttttcgcgacgctggcgtcctgaacctgaacctcttccggctgctgatcctgcggacgaaccaccgggtagcggatccagactttaccggaagccatctccggcgatgcgcaggctacggtcagcggcataggcgactgggtcggatagcgttcgtcacgatagcgacgacgacgctgaccgctgacgcgcaggtgacgcggggagcgacgtga

SEQ ID NO: 264647 - DNA, 585 bp, Klebsiella pneumoniae
gtggccagccagcgcgtctttgtagccggcgaggcgttcgacgccggtgggagagtcaagggagccggtaataaaggcgatatcgcgatggccaagcgcaatcagccgctccactacccgcatcgccgaggctttttgatcggaccagacgcagtggctggcgtggcggcgcaggcggcgattaagcaccatgatcggctgcgagtggttctcaacgatctcgtccatctcatcgacggtgagaaagcgcgggtagatgatgatcgcatcgcagcgcagatccagcaggtactggatcgcctcccgctcctcttgcgcgctgtgcttgccgtcggccaggatcagctgccgccctttatcctccgtcatccgcgccacgtgatacagcagttcgctaaaatagacgccgtggtacagggtattggtcaccaccaggccgagggtttgcgtggttttggtcgccaggttgcgcgccagcagatttggccggtagccgctctccgccaccgccttaaacacccggtctttggtctcctggctgacatagccgttgcccgacagcacccgcgaaacggtcgcctttga

SEQ ID NO: 264648 - DNA, 636 bp, Klebsiella pneumoniae
atgtatcgggttaaggccaataaacgacccgccgcggcgggcgatttccggcagcatggcccgcagatcgccaaaatcgccgatcccccagtttttctccgagcgcagggtataaagctgcacgcaggtgccccacagctttttcccctctttcagcggctgcggttcgtagcagcgcgccggcgcgacaatggtccggcagtgccaacgctctccctcttgggtgagcgtcagggagtggtacccctccggcagtttagccggcagcggcagcgtctcgccgccgcgggttttcccttgatactgcttaccgtcctcagtagtcaggatccactgatactcaccgcgtcctgccaccggcagcgacatttttttgccgtgggtgaaaattttcacgttcggcagcgggttaaccgccactttcgtggcggcggtagagcgatgcatcgcatccagcaggcgctgtttggtgacagccgcgatagactgcggcttgccgtgcgcgttgatatagctggggctgatgcccgccgccagcgcggcattatcgaggcgtttactctccataggccttcctttagcgtttcgcctgccagatacgttgctgataatcgcggatcgagcggtcggagctga

SEQ ID NO: 264649 - DNA, 237 bp, Klebsiella pneumoniae
atgcaccgcgaaggtggcgccagggttgaacatctccgtccacggaatggcctgtacgccgaggtacagatccagatcgctgtatacgcgacattcgcccagcggcagcatgatgcgcgaagccagccggctccacatcaggctttgatacagcaggcgcgtatccccctgaaaatggaccccgccctggactacctggcagtccgtcgcgccaagcccttccagttcagtttttaa

SEQ ID NO: 264650 - DNA, 294 bp, Klebsiella pneumoniae
atgggtgcgggccagcagctcggcttcccactcgtcgccgccgcgttcaatggcgagacgcaccagcatggcctccatgttggcgcgcgcgtcgaagatatcgagaagctcctgttccgacatgggcgccacccgatagcctttctgattgaccaccgttaccagccgctcggccaccagttgcgaaagcgcctcgcgcagcggaccgacccccaggccatagcgcgacgtcagcaggctcatccgcagcttctcatcggggtggtaaaccccgcggatgatgtcgttttttaa

SEQ ID NO: 264651 - DNA, 720 bp, Klebsiella pneumoniae
  misc_feature (485)..(494): n is a, c, g, or t
atgagcctgacggtcagcgaactgctggcccttgagggactctccgccctgcgtctgcgggcgggaaagcaagggctgcagcgggccgtacgctggtactacgtggcggaaaatgaacatatcgccgagtggatcatgggcggcgagctggtgtttatcaccggcatcaaccatccccgggatgaagccaacctgatccagttgctgatggagggcaaacagcgcggcatcgccgggatggtgatcctcaccggcgaggcctatatccacgccattcccgccacgctgatcgcccttgccgacgagctgggcatgccgctgatcgagcagccctacctgctgaagatggtgattgtcaccgagcgcatcggcaccgcgctggtccgcagcgaaaacgtcctgcagtcgcagcgcgacattctgatgcagctggtcaccggcgactatccggacctgcagatgctccatcagcgcgccctccatcnnnnnnnnnnccctccatcagcagctcgattttacccgtccgctgcggctggcggcgctgcgtctggaggggttgtcccgcctgtttcgccagttcccgcccgagcaggccgaagcctggctgctgcaggcccaccgcagcgtacgtcagcagctgcagcagcagctcaaccagcagggcaattcctttccgctgctggagcgcagcaatatgtttcttttcctgctgccggatga

SEQ ID NO: 264652 - DNA, 240 bp, Klebsiella pneumoniae
atggacctgcagcgcagcaacctggcgctgcgccatctcgctcatcgaaccgaccaccgccagcagcgggccctgctcgctgcggcgcaggcggcgagccagcgcctcgcagagacccgccgagccgaccagcagggtctcccgcgcatggggcgcaacggcgtcgatcacctggtccagatggctgtcttcccaggcgtcgacaatcaacactcgcttctcctcgcccgccgtcgctaa

SEQ ID NO: 264653 - DNA, 252 bp, Klebsiella pneumoniae
atgtacgtgtttttagggggtcggatgtacaaaaaaaagggggtcggatgtacaaaaaaagggggtcggatgtacgagctagggggtcggatgtacgatcattgggggggtcggatgtacgtggataactttatgtttcaacagcttttttacagggttgttcaccttatccctaactttactcaaagagggggagcggcattaacccgaaataaaaaaggcccgtatgggcctatttttttgcttccttga

SEQ ID NO: 264654 - DNA, 6465 bp, Klebsiella pneumoniae
atgacttacagtgaaagcgatattgccattgttggcatgaactgccggtaccccggcgtgcacagcgttgcggcattcgaaacggtgcttcgcaccggatgcaacattttggaccccaaagtgaccccgagcaacggccacaatcacattacgctgaacaacgtctatgagcacatggcggagttcgatgccaacttttttggctacagccgtgcagaagcagaaatcatggatccacagcagcgcgtatttctgacctgtgcttgggagatgtttgaacaaagcggttacaacccgaagcagcacgatgcgcgcgtcggcctatatgcgggcgtgagtaccagcttctatttgcttactcacctgatgaacaacccagacaagcttgcacaactcggtggtctccaaatcatggtcggcaatgacaaagatcatttgacgtcccaactggcttaccgcctgaatattaccggcccttgcgtgacggttcaggccagttgtgccacctcgctggtggcagtgcatctggcctgcgaagggctgctgagcggtcagtgcgatatggcgctagcgggtggcgtcacgtttcgcatggaggagcagcgcagctatgaatcgcacggtgatgggctgcaagcagaggatggcctgattcatacttttgatgcgcaggcgagcggtacggtctacagcagtggtttgggcatggtgctgctcaaacgggctacagacgcgcaggtgcaaggggataacatccttgccgtcatcaagggaagcgccatcaacaatgatggcggtgcgcgcagtggttataccgtgccgggtgttgatggtcaggaagctgtgatgattgaggcgcatagcttggcggaggtgacgccgcagcaaattcagtatctagaactgcatggcagcggcacgccgttgggtgacgctatcgaattcgcggccatcaaacgtgtgtttgggacgccagcgccgaatgcgacaccgtggcgtctgggggctgtgaaacctaacgtgggtcacgtagaaatggcatctggcatcaccagtctcataaaaacggtgctgagtcttactaaccgggtgttttaccctacgctgaattttcaacgggctaatccgcaactggggttggaggacagcccgtttgaagtggtgtcccgtttaacgccttggccggagggcaccacgccacgcaccgctggtgtgagtgcgttcggattgggcggcaccaacgcacatctggtggtacaagcgccgttatcgacgccgcaggcgagggcgcagcagatggggccttgtgtcgttgtactctcggcaaaaaaccacaatgccctggaacagatgcaaaacgccctgctggcgaaactggccgcacatccagagatacgcttacaggacgtggcttacaccctgcgtcacgggcgtttctccgccccggtacgtaagtgtgtcatcgcagagaattgcacccagctagcccgacaactccgcgacgcaccgatggtggaggcaaccacgggttgcacgatctactggagattggggcaccgtttcgttgttgcactcgagacgcttagtgactggctggcgtgctctgaggtgttgtcacaggcggtgggacaactgctcgagcattttccgctcgaaccagcctgtctgcaagatctctcccctgcgcaacggacgtttatcagccagtatgcgctgatcgcgttgattgacgaacgggaaacgttgaatgtggtgctatgcggcgacggtgatggtggctatgctgccgccgtactacgaggagactgcacactagagcaagcatggcacaggttgaatgcgggccaaccgtttgatgatgtgccgacgaatcccctcttgcagcccgatgtctgctctttgatgctggacgacgcggcgagtgatgccaatcgcaccgcgctagaggcgttagggcagttatggttggctggcgtcagcctagattggcgctgggtggatgcggcggagcgtatgttgggcagtcaacgcatcgccctgccggggaccgtttttacaccgcagcgctattgggtcgaggccgtacggcctgccacgttctcccacgaatcgtcgaataatctcttatcccgcgcaacaaaatccgatattattgcagtggtgacggagatatgggaacgcacgcttggtgtcagcattgatgatcaccacgccagcttcttcgaactgggtgggcattcgctgttagcgtcaaccattttatatgatattcagcaacgttacggcatcacctgtacgctaagcgcattctttgccgatcccaccatcgagggattaagttgctatctgctcgaacaaggcggcagtgagacagcggtttcagcattgcctgatacggtctttgcccctgaccagcagcacctaccttttccgctgactgacgtgcaacaggcctattgggttgggcggcgaaaatccttgggattgggcaatatttccacccatatctatgtggaatatgaactacaggggctagatgaaacagcgttcaaccgcgcgctcaatgcggtgattgcgcggcacagcatgttgcgtgcaattgtcaacgatgacggtatgcagcagatattgccaaacgtgccggaataccacgttgccttctataccacccagtgcgaggatgcgtttcaacagcgttgccgtgagctgcgtgacaccctctcacatcagatgattgattgtagtcgctggcctctgtttcagatggaggtcgtggttgatccgcagcaaaaagcccggctacatgtatctatcgacctgctgatagccgatgcatggagtctggagttgttcattcgggaactagcttatcactaccgccatccgcaggcggcattgcctacattgacgtacagtttccgcgactatgtgctgaccttaaaatcctacgagaaaacgccgcagtttgaacgggcacgtgactactggcgcgcccgcatcgaaactctgccgccggggccacgattgccgctgcgtaccgaccccacgaagctggaaaaccccacattcgtgcgccgtagctattgtctatctcgtgctatctggcagcgcttgaaaacgcaggcgggtcagatgagtatcacgcctactacactgctgctcacggggtttgctcaggtgttggcgcgctttagttcctcgccgcactttagccttaacctgacgctgtttaatcgtctgccgttgcacgcagatatcaatcacttaattggcgattttactgcactgacgttgctggagattgatatgtcgcagggagaaaccttgcaggcgcgggcaaacgtgatccactctcaactgtggcgcgatttggataaccgcttgtttggcggtatccaggtctctcgactgctggtacaaactcaccgcgatccggcgaaatcggtgattcctatcgtgttcaccagcttgctcaatcaatatgaggcgagctgggaaacggatgatacgctgttcaaccaaccgcaggatgatctgtacagtatttcacagacaccgcaggtgtggctcgatcatcaggtaatggagcgtaacggggaattgcactttaattgggacgtggtggaacaattgtttgaaccggcgctaatggatcagatgttccagtgttattgccaactcctgcacgccctagcccagcgaccacagctctggcatgagactcaagatgtgctggcgctgcccaccgttagtgcaccggtcacgcaggctcctgcacctacggccttgttgcaccatgggttactgcgtcaggcagcactgacgccacaggaaactgcgctgatcagtcctatccgtgaattgacctatcgccaactgtcgacggcggcggatcatgtggcccgcgccctgttagcgctgggcgtgcagcatggcgaccgcgtggcggtggtgatggaaaaaggctggcagcagattgccgccgtacacggcattttacgactgggtgcggtctatctgccagtggatccggtgctaccgccacagcgtcgccagcttttgctgacggtgggcgaggtgcgggtacaagtaacgcagccgggtctcacgcaattggagccgtcgctgcccgtgctgatcatcgacgacggaatgctggacacgcctgctgcgccgttgcctgaagtggctggggatgtcacggatctggcctatatcattttcacttccggctccaccggtaccccgaaaggagtgatgatcgaccaccgtgcggccatgaacacgctggaagacatcaacgaacgctttggcctcaatgcgcaggatagggtgttcgggctgtcatcattgagctttgacctgtcggtttacgatgcctttgcgccttttatggtgggtgcagcgctggtactgccggaagcaggacgggaaaaagatccgcgtcattggcagacagttatggtacacggtcatgtaagcgtctggaatgcagtgcccgcactgatgcagatgctgtgcgaataccacagcggcgatcggatgagttatccgacgttgcgtctggcactgttgagcggcgactggatcccgctaacgttaccggagcagatgcgcgagcggctcaatgaaacgatggacatcatcagtctgggtggagcgaccgagtgcgccatctggtcggtctactacccgataggtgaggtggaatcgacgtggaccagtattccctacggtcggggtctgcgcaaccagccagtatacgtgctaaatgcgcaactggaggaatgtccggtcggggtggaaggagagatttgcattggcgggatggggctggcacaaggctacctgaacgacgcagagaaaacggcggcgagctttgtctggcgcgaagcgagtggtgagcgaatttaccgcactggggatcgcgggcgctactttgctgacgggcaagtcgcctttttggggcgcaacgatacccaagtgaaggtgaatggttaccgtatcgaactgggggaaatcgagcgctgcattgcgcgacatcccgatgtggagcagtcagtggtggtggcagtgggtaattctcaacatcgtcggctggtcgcttttgccaaactgcacgatcgccaccaggcgcaggcattgcaagctaaggaagcggaggcggcggcactggcgcagggtattattgtgaatccggcacagcgtctagcgttcaaactcaaggagccacatattcgcgcgctggatggtctgggcattgcactgacggcaccggcggatagcacacgttacatcaaacgccgcagctatcgtcatttcagcgcgcaaaaaaccacgctggcacagttggggcaattgctgtcgggcttggggcagatgcgtctacccggtctaccttttgccaagtatgcctatgcgtccgccggggggctatacccggtgcaaacctacgtgtacctgcatccagacaagatcgaagagggagtatccggtatttactacttcgacccgcgacagagctgtcttatgccggtagcaccagaagtcgagctgaacagtggttttcatgccggacctaatcagtctattgccgatcgggcggcattcacgctgtttatggtggctgatatggcggtgatctcgccattctatgggcaagaggcagcttggcacttctcggtgatggaagcaggtactctctgccatttactggaagaagatgcgccgcgctacggattggggctgtgccaacttgggatggcagacttttccgctgtggcatcgcattttcaattgtcgccacatcatcgctatgtccattgcaccgtggggggcgtgatagggcaagaggcggcaagtgctgcagcattgctgcgcgatttctccacctatgagaaaccgaaggaaaccgctgcgccgctggacatgcagagctacaaagatgccatgctgcgcggcctgcgtcagcaactgcctgactatatggtgccgagtgatctgatgttagcgaccgattttccgttaaccgctaacggcaagctagatcggcaaaaattacagctgcagggcgaacaaattgcccaccagcgtgacggcgtgggtccaatccaggtggacagtgcgttacaacagcggctggtggcgctctggcaggaggtactcggcgtgagccacgtgtcggccgaagacgatttcttctcgctggggggcagttctatagaattggtgcgtattcagcaggcacttgaggcgattatcgggcaggagattcccattgtcgatctgttccgtctgccaaccatcgcggatgtggcgcgttaccttgatgagcaactgcacaatctacccgccgcccacgatatcgtattagcgcaggctgaggtttcgcaggtcagcgctgcgcgcgagaatctggcgttgcggcgtaaacgtgcccaacagggagaaaagggcgatgagtga

SEQ ID NO: 264655 - DNA, 177 bp, Klebsiella pneumoniae
atggatctttttgcccgcagggtaatcggctggagtctgtcagcgaatgccgataccgcactgataagcagtgccctgcggatggcctatgagacgcgtggccagtcgcgggatgtcatgttccacagcgaccagggaagccagtatacgggcctgaaatatcaacaacttctctga

SEQ ID NO: 264656 - DNA, 861 bp, Klebsiella pneumoniae
atgtgcgccgaccatggagtgtgggacgaaggggtggcgatttcgccgaaggcggtcaccgccatccaggcggcaaatatgacccgcggcaccaccggcgtctgcgtgctcgccgcccaggccggggcgaaagtgcatgtaattgatgtcggtatcgatagcgaaccgctccccggcgtggtgaatatgcgggtggcgcggggctgcggcaatattgcccgcggtccggcgatgagccgtgagcaggggcaggagctgttgctggaggtgatgcgctacacccgcgcgctggcccaggagggcgttaccctgtttggcgtcggcgaactggggatggccaataccacgccggcggcagcgatcgtcagcgttttgaccggcagcgatgcgcaggaggtggtcgggattggcgccaatctgccgctggcgaaggttggcaacaaggtggaggtggtgcggcgggctatcgccgtcaatcagcccgacccgaatgatggcctcgacgtactgagcaaagtcggtggtttcgatctgctggggatgaccggcgtcatgctgggggcggcgtcctgtgggctgccggtggtgctggatggctttctctcttacgcggcggcgctggcggcgtgccggatagcgccggcggtaaaaccgtatctgatcccgtcccactattcggcggagaagggggcgcgtatcgcgctggcgcacctcggactcgaaccgtatctcaatatgggtatgcggctgggggaaggcagcggcgcggcgctggcgatgccgatcgtcgaggcggcctgtgcgatgtaccatcgcatgggcatgctggcggccagcaatattgtgttacctaaggggtaa

SEQ ID NO: 264657 - DNA, 213 bp, Klebsiella pneumoniae
gtggcgggcattggacccaaaagcgccgcccagctgctgaacgagtttcaggacctggaggggctgtacgcccgtctggccgaggtcccggagaagtggcgcaaaaagctggccgcgcatcaggagatggccttcacctgccgggaggtggcccgcctgcagaccgacctccagctggacggcaatctgcagcagctgcggctgacgcgctga

SEQ ID NO: 264658 - DNA, 723 bp, Klebsiella pneumoniae
atgaacagctgcctctatcagggcgtcctgcgccaccgtcgcctgcagccgaaggcgcaccacttcgtctaccgcctgtttatggcctggcttgacctcgacgaactggacaggctgcctgaggcgggcatccgccgcaaccgcctggccgccgccgcctggtacgacgccgattatccgctgggcgcgccgctgaaggctcaggtgctgaaccggctggagagcctgaccggctgccgcccggcgggccgcgtgatgctcctgacccagctgcgctacttcggcttccattttaatccggtcaatttttactactgctatgacgaagccgacaccctgcgctgggtgctggccgaagtgcgcaacacgccgtggaatgagcgtcattactacgcggtggacggccagcaggcgcgcccgctggagaaagcctttcacgtttcgccctttaacccgatggacatggtctatcactggcgcttcaacgcgcccggcaaaacgctgcacatgcatattgaaaaccatcaggccagcaaggtgttcgacgccacgctggccctgagccgcgtgccgttgacccgcgccaacctgcgcgggctgctgctgcgtctgccgctgatgaccctgaaaaccgtcctcgccatctactggcaggcgctgcggctgtggctgaagcgcgtgccgctgtacaaccatcctgtcagcaggagtgaacgctcatga

SEQ ID NO: 264659 - DNA, 348 bp, Klebsiella pneumoniae
atgctctgggcgccaatctccagttcctgcgccagcaggcgacgcaggcgggtggtatccagccagacgccggtgcccagcacctggctgcgcggcaggccggaaagctgccatacctgccaggtgatgatgtcgcaggggttggtggccaccagaaagatgccgttaaatccgttggccatcatcgtcggcacaatgctcttcacaatcttcgcggtggaggtcagttcatccagccggctctggccggggcgcagcgcgccgccggagacggtgatcaccgcgatatcgacatcggcgcagtcgctggcctcgcgggtggagatggtcatcatccccggcaggtag

SEQ ID NO: 264660 - DNA, 672 bp, Klebsiella pneumoniae
atgcaaccctccgaactgcccgcatctattcttaaacgtcttcctgttcgttttaactatgatgataattattttaatcacaaatttcagggcatgccgaaatgtggttatacgcagatgattaagtccattctcaatcatgagaatatcaaagttgacttacagcgggaatttatcgttgacgagcgagctcattacgatcacgtattctatagcggtccattagatgccttttatggctaccaatatggccgtctgggctatcgaacattagattttaaaaagtttatctatcagggtgattaccagggatgcgcagtgatgaactattgttctgtggatgtgccctatactcgcatcactgaacataaatatttttctccctgggaacaacatgacgggtctgtttgttataaagagtatagccgtgcttgtgaagaaaatgatataccttactatcctattcgccagatgggagagatggcccttcttgaaaaatatttgtcactggccgagaatgaaaccaacatcacttttgtcggtcgtcttggaacctaccgttaccttgatatggatgtgaccatcgctgaagcattgaaaacggcagaagtctatttaaattcactcactgaaaatcagccaatgcctgtgtttacggtttctgtacgatga

SEQ ID NO: 264661 - DNA, 678 bp, Klebsiella pneumoniae
gtgctgacccagaacggcgtcccgatgagccgttaccgtgcggggcgtctgatgaaatatctgaacctgagcagttgccagcctggaaaacatcagtacaaaaatgcccgtcaggagcatacctgcctgccgaatctgcttgagcgccagttcgctgtgcccgagccagatcgggtatggtgcggagatattacgtatatctgggcaggaaatcgctggtgctatctggcgatcgttatggatctttttgcccgcagggttatcggctggagtctgtcagcgcatgccaataccgcactgataagcaacgctctgcggatggcttatgagacgcgtggtcaaccgcatgatgtcatgttccatagcgatcagggaagccagtataccggtctgaaatatcaacaacttctctggcgttacagaataaaacaaagcgtcagtcggcggggaaactgctgggacaatagtcccatggaacgcttcttccgcagtctgaaaacagaatgggtaccggtgaatggttacgcaggcaaggacgaagcccgacagcaaattaatggttacatattgaactactacaacagcgtcagacctcaccattataacggtgggttgactccggaagagtctgagaacagataccatttttactgtaaaaccgtggccaatattacttga

SEQ ID NO: 264662 - DNA, 1086 bp, Klebsiella pneumoniae
atgggaagagaagcacagccgccgcattcccggctgaccccgcgactggaggccgacctgccgcggatcaatttttaccgcttctgccagcttctggaaaaacggcgtcccggccaaccgctgatggggggaaccagccatccggctgacgatccggtgcgtttttacccgcatccgggaatgggatttcccgccagcgaactgaaagccgtggaatacgatgaggccgatgacaacaggccgccggtcattcgcaccacctttatggggttgtacggtgtcgattcgccgctcccgacggcatatctcgatgatatcgcccagcacagggaagggcatgaagcgctgcagggcttactggatatcttcagccaccggatcatgacgcagttttaccgcatctggcggaaatactcctggcccgccacctttgagcccggcggcaccgatcgtctctcgcagtcgctactgggcctggcggggctaggcatccccggcacgacgcagcatatcgcctcgccggcgtcgcgctttctggcgctaaccggcgtgctgcgtcagccgggcaaaacccagcaggggatccaggcgctggtcaccctgctggccccggagaccaccgtcagggtgagcccgtacagcctgcgtccggtggcgatcagccagccgctggggttttacggcgatgacgacttcttcctggacggcaatacgccgctgggtgacgaagcgatggatgccagcagccagctcctcgtcgcccttaccaccgacaatcccgcggaggcgcagggctggaagcctgacggcccgctgtttcgggactttctcatcctgctgcgggtatacctcggctggcgattccgggccaacatcaccctgaccgcgccgacccgactgctggctgtcccgccgctgggggacgagccgttctggctcggtatgaacggcgtgctgggtgtgggtgagggcgagagtgaggacgatattcctcagacctttaccaccgagctgggtacctatacgggcctgcagcctgccacctttctacaaggaaaccgacgtgttacgtataagtttgactaa

SEQ ID NO: 264663 - DNA, 417 bp, Klebsiella pneumoniae
atggcggaacaggccgacaaccgccacgaacgtcgcctccgcttccagcggcatattcagactggcgtcccctccgggaccgatcaccacatcgcgactggcgaggagatcggcggcgagcagaatatccccctcctccagcagctgctggtaaaccagccggtcaaaggtctggcgatctttaagctgatagatgcgcaccaccaccggttcagagagcgagtgattctctctggcatcggtgttgagcgcttcgcgcgcggtaaagtccagatgcagcgtattaattttcttataaaaaacggcgttgaaggcagactttgttccctccgagacgcgctggctgagtccgcatccgctcaggcaaagcgcaagcaggggcagcagacaggcggttttagtcaaacttatacgtaa

SEQ ID NO: 264664 - DNA, 420 bp, Klebsiella pneumoniae; identical to SEQ ID NO: 138253

SEQ ID NO: 264665 - DNA, 687 bp, Klebsiella pneumoniae
atgaaatacctttttttatttctactggttttcaccagcggcgcagcggtggccaccgaaccaggcagtcagtatcaacagcaggccgaagccggcgatcgacgcgcgcaatattaccttgccgatacctgggtcagctccggcgattatcaaaaagccgaatactgggcgcagaaggcggccgcccagggcgatggcgatgcgttggcgctgctggcgcagctcaaaatccgtaacccccaacaggcggactatccgcaggcccgccagctggcggaaaaagccgtcgaggccggcagtaaatccggagagatcgtcctcgcgcgggtgctggtcaaccgtcaggctggcgccaccgacgtagcgcacgccatcacgctgctgcaggatgctgcccgggatagcgaaagcgatgcggcggtagatgcccagatgctgctggggctgatctacgccagcggcgtacacggcccggaggatgatgtgaaagcaagcgaatacttcaaaggcagttcatcactttcccgcaccggctatgccgaatactgggccgggatgatgttccagcagggagagaaaggctttatcgaaccgaataagcagaaggcgctgcactggctcaacgtcagttgcctggaggggtttgataccggctgcgaagagtttgaccggatcagtaaaggataa

SEQ ID NO: 264666 - DNA, 408 bp, Klebsiella pneumoniae
atgaagttgctgatcgcctctttattattgctgttttgccctagaaaaggatttgagtggttcgttaagaaatgtatcccagatgaatacaacaactctaattttagcaacgcttcatgtctgttacgaaaaaaaatccactcggcagcgatagctaattttgtttttttctctattgtaatagctggcgtgtggtatgaatggaggatagaaccgacaattatcaattgcattaaagccggttctgcgtacatcgcactaacagtaacactagggcggggtggctggaatgttcagtcaaataagggaaacactctcacggaaagaattgatcggaacatctacaagttggcacagtacatcaatgtggcaattttgctggtgacgttgtattacccaggaaaatga

SEQ ID NO: 264667 - DNA, 729 bp, Klebsiella pneumoniae
atgaaaccagtcattttagtggtggatgatgacagggcaatgggcgagctgctcagcgatgtgctcggcgtgcacgcgtttgaagtgcttgtcagccagaccggcaacgacgcgctgacgacggtggcgcagcgggcggatatcgcgctggtcttactggatatgatcctgccggatacccatggcctgcaggtgctccagcagctgcagcgcacgcggcctgagctgccggtggtgatgctctccggtctgggcagtgagtctgatgtggtggtgggcctggagatgggcgccgatgattacatcgccaaaccgttcagctcgcgggtggtggtcgcccgggtgaaagcggtactgcgacgcagcggggcgctggccggcgaggcgtcgggcgccggtgctggcctgacgtttaacggctggcggctggataccacgcgctgtgaactgtataacccgcagcagcaggcgatcccgctgacccagggagaatatggcctgctgctggcgctggcgcagaacgcgcgccgggtattgaatcgcgaacagctgctggcgctgacccataacgaaagcaccgaggtattcgaccggaccatcgatgtgctgatcatgcgcctgcggcgcaaaattgagctcaacccgcatcagccgacgttgattaaaaccctgcgcggtctgggctatgtcttttccgccgacgtgacccacagcgagaaggcggcgtag

SEQ ID NO: 264668 - DNA, 420 bp, Klebsiella pneumoniae; identical to SEQ ID NO: 138253

SEQ ID NO: 264669 - DNA, 1680 bp, Klebsiella pneumoniae
atgagtaatgccatcacggagattgataacaccgatctggtgtttatcttcggttacaacccggcggattcccaccctatcgtggcgaatcacgtcattaacgctaaacgcaacggggcgaaaattatcgtctgcgacccgcgcaaaattgaaaccgcgcgcatcgccgatatgcacattgcgctgaagaacggctcgaacatcgcgctgctcaacgccattggccacgtgattattgaagaggatctgtacgataaatccttcgtcgccagccgttccgaaggcttcgaggagtatcgcaaaatcgttgaaggctatacgccggagtcggtggaggagatcactggggtcagcgcccaggagatccgcgcctgcgcccggatgtatgccagcgccaaatccgccgccatcctgtggggcatgggcgtcacccagttctaccagggcgtggagacggtgcggtcgctgaccagcctcgcgatcctcaccggcaacctcggcaagccgagcgtcggcgtcaacccggtacgcggccaaaacaacgttcagggcgcctgcgatatgggtgcgctaccggatacctatccgggctatcagtacgtcaagttcccggagaaccgcgaaaaattcgccaaagcctggggcgtggaaagcctgcctgcgcataccggctatcgcatcagcgaattgccgcaccgcgcggcgcacggtgaagtgcgggcggcgtacattatgggtgaggatccgctgcagaccgacgccgaactctcggcggtccgcaaagcgttcgacgatctggaactggttatcgtccaggacattttcatgaccaaaaccgcctccgcggccgacgtcatcctgccgtccacctcgtggggcgagcacgaaggcgtgtataccgcagcggaccgcggcttccagcgcttctttaaagcggtggagccgaagtgggacctgaaaaccgactggcagatcatcagcgaaatcgccacccggatgggctatccgatgcattacaataacacccaggagatctgggacgagttgcggcatctgtgcccggacttctacggcgccacctacgagaaaatgggtgagctcggctatgtcatgtggccgtgccgcgatgagtccgacgccgatcaggggacgtcatatctgtttaaagagaagttcgataccccgaacggactggcgcagttcttcacctgcgactgggtcgcgccgatcgataagcttaccgacgagtacccgatggtattgtcgacggtgcgcgaggtcggccactactcgtgccgttcaatgaccggtaactgcgcggcgctggcggcgctggcggatgaaccaggctatgcgcaaatcaacaccgccgacgccgaacggctaggcatcgaagatgaagagctggtatgggtcaattcgcgtaaggggcgcatcatcacccgcgcgcaggtcagcgatcggccgaataaaggcgcggtgtacatgacctaccagtggtggatcggcgcctgtaacgaactggtctcagagaacctgagtccgataaccaaaacgccggagtacaagtactgcgcggtcaacgttgagcggattgccgatcagcgcgccgcggaacagtacgtgatcgacgagtacaacaagctgaaatcccgcctgcgcgaaagcgcgatgggttaa

SEQ ID NO: 264670 - DNA, 687 bp, Klebsiella pneumoniae; identical to SEQ ID NO: 264665

SEQ ID NO: 264671 - DNA, 1314 bp, Klebsiella pneumoniae
gtgaagaaaacaaaaaaagtcagtctggcctggcaaattttgctagccctggtgctgggtatccttctgggcagttatctgcattaccacgctgaaagtcgcgattggttaattagcaatttgctgacgccggcgggcgatatctttatccatctgattaaaatgatcgtggtcccgattgtcatttcgaccctggtggtcgggattgccggcgtgggtgacgccaaacagttagggcggatcggtgccaaaaccattatctatttcgaagtgatcaccacggtggcgattgtgctgggtatcaccctggccaacgtcttccagccggggacgggcattgatatgtcgcagctggcggcagttgatatttcgaaatatcagaacaccaccgccgaagtgcagagccatgcgcacggcctgatgggcaccatcctgtcgctggtgccgaccaatatcgtggcatcgatggcgaaaggcgatatgctgccgattatcttcttctcggtgctgtttggcctggggctctcctcgctgccggcgacccaccgtgagccgctggtgacggtcttccgctctatctccgagaccatgtttaaagtcacccatatggtgatgcgctatgcgccggtcggggtattcgccctgatttcggtaaccgtcgccaccttcggtttcgcctcgctgtggccgctggccaagctagtgttgctggtttactttgcgatcctgttcttcgcgctggtggtgctggggattgtcgcgcgcctgtgtggtttgagcatctggatcctgatccgcatcctgaaagatgagctgattctggcttattctaccgccagttcggagagcgtactgccgcgcattattgagaagatggaagcctacggcgcgccggcgtcgatcaccagctttgtggtgccgaccggttactccttcaacctcgatggttcaacgctgtatcagagcatcgcggcgatctttatcgcccagctgtacggtattgacctctctatctggcaggagattaccctggtgctgaccctgatggtgacctcgaaagggatcgccggcgtgccgggcgtctccttcgtggtgctgctggccaccctgggtagcgtcgggatcccgctggaagggcttgcctttattgccggcgtcgaccgtatcctcgatatggcgcgtaccgcgctgaacgtggtgggtaatgcgctggcggtgctggttatcgccaagtgggagcataagttcgatcgcaaaaaagcgctggcctatgaacgcgaagtgctgggcaagtttgataaaaccgcccaataa

SEQ ID NO: 264672 - DNA, 1959 bp, Klebsiella pneumoniae
atgagccaaattcacaaacaccctattcccgctaatattgcggaacgttgcctgattaacccggatcagtacaaggcgcagtaccaacaatccataaccgaccctgatacattttggggcgagcagggcaagatccttgactggatgcggccctatacccgtgtaaagaatacctccttcgcaccgggtaatatttccatcaaatggtatgaagatggcaccctgaacctcgccgctaactgtctcgaccgccacctcgccgaacgtggcgatcaaaccgccatcatctgggaaggcgacgacgccagccaaagcaagcacatcacctaccgtgaactgcatgccgacgtgtgccgtttcgccaatgtgttgctcgacctcgggattaaaaaaggcgacgtggttgctatctatatgccgatggtgccggaagccgcggtggcgatgctggcctgcgcccgcatcggggcaatccactcggtcattttcggcggcttctcgccggaggcggtggccggacgcattatcgactccagctcacgtctggtgatcaccgctgacgaagggctgcgcgccggtcgcgccatcccgctgaagaaaaacgtcgatgacgcgctgaaaaacccgaacgtgaaaagcattgagcacgtggtggtcctgaaacgcaccggcggcaatatcgactggcaggaaggccgcgatctgtggtggagcgacctgattgcaaacgccagcgccgaacaccggcccgtcgaaatgaacgccgaagatccgctgttcatcctctatacctccggctccaccggtaaaccgaaaggggtgctgcacaccaccggcggctatctggtctatgcggccaccacctttaaatacgttttcgactaccatccgggcgatatttattggtgcaccgccgacgtgggctgggtcaccggccatagctatctgctgtacggcccactggcctgcggcgccaccaccctgatgttcgaaggggtgccgaactggcctacgccggcgcgcatgtgccaggtcgtcgataagcataaggtcagcattctctataccgccccgacggctattcgcgccctgatggcggaaggcgacaaagctatcgaaggcacagaccgctcctcgctgcgcattcttggctcggtcggcgaaccgattaacccggaagcctgggagtggtactggaagaagatcggtaacgagaagtgcccggtgatggacacctggtggcagaccgaaaccggcggctttatgatcaccccgctgccgggcgcgattgagctgaaggccggctccgcgacgcgtccgttcttcggcgtccagccggtgctggtggataacgaaggcctgccgctggatggcgccaccgagggcaaccttgccatcgccgactcctggcccggccaggcgcgtaccctgttcggcgaccatgagcgctttgagcaaacctacttctccactttcaaaaatatgtactttagcggcgacggcgcgcgtcgtgatgaagatggctattactggatcaccggccgggtcgatgacgtcctgaacgtctccggacaccgtctggggaccgccgagatcgaatcggcgctggtctcgcacccaaaaatcgccgaagcggcggtggtggggatcccgcataacatcaaaggccaggccatctatgcctacgtgacgctcaatcacggcgaagaaccgacgccggagttgtatgccgaagtgcgtaactgggtacgcaaagagatcggtccgctggcgacgccggatgtgctgcactggaccgattcgctgccgaaaacccgctcgggcaaaatcatgcgccgcattctgcgtaagattgccgcaggcgacaccagcaacctcggcgatacctcgaccctcgccgatcctggcgtcgtggaaaaactgctcgaagagaagcaggccattaccatgccatcgtaa

SEQ ID NO: 264673 - DNA, 312 bp, Klebsiella pneumoniae; identical to SEQ ID NO: 136141

SEQ ID NO: 264674 - DNA, 1656 bp, Klebsiella pneumoniae
atgatcaagagagtcctgacggcgctcgccgccacgctgctgcccctcggcgctcacgccgcagacgctattaccggcgcggtacagcgccagccgaccaactggcaggcgattgtcatgttcctgattttcgtcgccctgacgctgtacatcacctactgggcctcaaaacgggtgcgttcgcgcagcgattactacaccgccggcggcaatattaccggcttccagaacgggctggcgattgccggcgactttatgtcagcggcgtcgttcctcggtatctccgcgctggtgtatacctccggctacgatgggctgatctactcgctgggctttctcgtcggctggccgattatcctgtttctaattgctgaacgtctgcgcaatcttggccgctatacttttgccgatgtcgcctcttaccgcctgaagcaggggccgatccgcaccctctccgcctgcggttcgctggtggtggtggccctgtatctgattgcccagatggtgggcgccggcaagctgatccagctgctgttcggccttaattaccatgtcgccgtagtgctggttggcgtgctgatggtgctctatgtcctgttcggcggcatgctggcgactacctgggtgcagattattaaagcggttctgctgctgtgcggcgccagctttatggcctttatggtcatgaagcacgtcggcttcagcttcaataacctgtttaccgaggcgatggcggtccacccgaaaggggcggcgattatgagtcccggcggactggtgaaagatccgatatccgcgctctctctgggtctgggtctgatgttcggtaccgctggcctgccgcatattctgatgcgcttctttaccgtgagcgacgccaaagaagcacgtaaaagcgtcttctacgccaccggttttatgggctatttctatatcctgacctttatcatcggcttcggcgccatcatgctggtcggcgcgaacccggcgtttaaagacgcggccggacagcttatcggcggcaataacatggcggcggtgcacctggcggatgcggttggcggcaacctgttcctcgggtttatctctgcggtagccttcgccactatcctggcggtggtggcgggcctgaccctcgccggcgcgtcagcggtgtcgcacgacctgtacgccaacgtcttccgcaagggcgcgaccgagcgtcaggagctgaaggtctccaagatcaccgtgctgatccttggggtggtggccattctgctgggtattctgtttgaaaatcagaacattgctttcatggtcggcctggccttctccatcgccgccagctgtaacttcccgattattctgctgtcgatgtactggtcgaagctgaccacccgcggcgcgatggtcggcggctggctgggcctgctgactgcggtcattctgatgatcctcggtcctaccatttgggtgcagatcctcggccatgagaaagcgctgttcccgtatgaatatccggcgctgttctccattgccatcgcgttcattggcatctgggtcttctccgccaccgataactcaccggaagggatgcgcgagcgcgagcagttccgcgcccagtttatccgttcacaaaccgggatcggtatcgaacgcggccaggcgcattaa

SEQ ID NO: 264675 - DNA, 174 bp, Klebsiella pneumoniae
gtgaccaacagcggcgcggatgccagctacagctatttcaccaaccccgacagccccggaggcgcagcggccatgcagacgctcgccttatccactaactattacaggacggggagcgcggtgaccgcggggacagccaacgccaccggggtgatcacctttacttataactga

SEQ ID NO: 264676 - DNA, 264 bp, Klebsiella pneumoniae
atggtcttccacggccagcgccagcggccggcaggcaacgggagccactggaaccagaagataagccccgccacggcgaaggcagatagccacaggctttgcgacaggaccgccagcgggtcggcaaccagtatcgctcccagacagcagagccacacctgccacgccgtccagcgctggcccgacaagcgtaaggcgcagcacatgcccaaccctacgcaggtgcgcagcgccggcggctgcataccggtcagccaggcatag

SEQ ID NO: 264677 - DNA, 294 bp, Klebsiella pneumoniae
atgtttctcaacgtcttcgcgggtcagacggccgccgacgccagtgcctttgatggccgctgggtcaaggttgtgttcagccagcagacgacggatcgccgggctcagcgcgtcgttgttctgctcttccagagaggcctgctgacgctgcgccggagtggacgctttcgcatcggctttctcgctgctttctttacctgcgctgttgccttcgcgcaggcggccaaggatctggcgagacaggacggtggcgccctcgtcttccagcactgcatccagaatgccgtccgctga

SEQ ID NO: 264678 - DNA, 723 bp, Klebsiella pneumoniae
atgattgcactcttacttctcttcttcgtcgctctcggtgccggagtactcagcggtgtcgtcggcactggctcgtcgttaatcatgctgcccgtcctcgtagccacgtacgggccacggattgctgtgcctgttatggcgatcgcctccctttttggcaacatcggacgggtgattgtctggtggcatgagattcgttggcgaccggtgtttgcctattcgttggcgggagttcctgcggctgttctcggggcgcacacgttacttacgatttctcctggcacagtggaggtattcctggcagctttcttccttgcgatgatcccgctgcgccgtctcatcagacgatcgaacctccacttgaatctctggcacatgagtttggccggggcgattgtcgggtttatgaccggattcgtgctgtccaccgggccgctcagcgtgccggtatttaccgggtacggaatgagtggaggcgtatttttgggatcagaggcggcaagcgcaatcctgctctacgctggcaagctagctacgttcggtatatcgggcgcactcgcgcagcctgtcctcacacatggacttgccatcggcatcgcattgttcgtcggttcgatgattgcgaaacgtctcgtccagaaactccagacgcatacgttcgagcttctcattgatgccgttctcgtcgctggggcagtagggatgatccttgctctcaaatga

SEQ ID NO: 264679 - DNA, 327 bp, Klebsiella pneumoniae
atgggcgtttccgttaaacgcattgtcgtcaccgggatggggattgtcagcccgctgggctgcggcgtacagcacgtctggcagtcgctgctggcaggaaagtcaggggtcacccggctcagcgagcagctggtcgcggatattccctgcaaagtggccggccaggtgccgtccattgacagcgatccgctgcacggcttcgacccgctggcgaccatccccgcgaaagagcgcaaaaagatggatcgctttatcgagtttgcgctggtcgccgcccgtgaagcgctgacccaggccggctggtcgccagcatctgcggccgaatag

SEQ ID NO: 264680 - DNA, 456 bp, Klebsiella pneumoniae
gtgaccgtcaacgccgcgcaccacgtgccagccgtaggcttcgaaacgtttagcggtgtcgtcggtgaaccagccttccacgtgaccgtcgatggagataccgttgtcatcatagaacgccaccagtttgcccagtttcagggtcccggccagggagcagacctcgtgagagatcccttccatcatgcagccgtcgcccatgaaagcgtaggtgaagtggtcaacgatatcgtggcccggacggttgaactgcgcggccagcgttttttccgcgatagccatgcccacggcgttggcaatcccctggcccagcgggccggtggtggtttccacgccggcggtgtagccgacttccgggtggcccggcgtcctggagtgcagctgacggaagtttttcagctcttcgatcggcagatcgtacccggagaggtgcagcaggctgtaaatcagcattga

SEQ ID NO: 264681 - DNA, 210 bp, Klebsiella pneumoniae; identical to SEQ ID NO: 250617

SEQ ID NO: 264682 - DNA, 168 bp, Klebsiella pneumoniae
atggagcatgtcttcattctggaaccattcattaggccagtagatgagatcggacggattggcatcaaagtttatctccagcaatcccagcgcgtagctttgttccgattccttgccttcagcattgcacacgaaactaattatctgaacgagttcatcccaggttaa

SEQ ID NO: 264683 - DNA, 1044 bp, Klebsiella pneumoniae
gtgcagctcctgtccgttaagctgcgcgctgccgctaaatggcaccatattcatcagagcttttgccgtcgtcgatttaccgcagccgctttcaccgacgatgcccaacgtctcgccggggaaaagatcgaagctgacgccatcgacggcatggacttcgcgacgcacgcgcaggccgtcgccgcgcaccggaaagcgcacgctgaggtcgcggacgctgagcaacggtcgcgtcgcctcgaccggcgccagcgcgggcgcctggcccagcaccggtaccgcctgcaacagctggcgggtataagccgcctgcggcgaggtaaacagcgtttttgccggagcctgctccatgattttgccgtgactcataaccagcacatcatcggccatttctgccaccactcccatatcgtgggtgatcaacagcaggctggtggaaaacgcctgctgcagttcgcgcatcaactcgaggatctgcgcctgaatagtgacgtcgagggccgtggtcggctcatcggcaatcagcacctgtggctggcacagcattgccatggcgatcatcacccgctggcgcataccgccggaaagctcgtgcggatactgttgcaggcgcttctccacatgactgattttgaccgcgtccagcatcgtgctgacccggctgcgccgttcacggcggcccagcacttcgtggcgttgcagcgtctcttccagctgctggcccaccgtcatcagcggattgagcgaggtcatcggttcctgaaaaatcatggcaaccgacttgccgcgcagcaactgcatttgccgctccggcaggctgagcaaatcctggttatcaaaaataatcgcgccgcctggaatctgtgcctcctccggaagcaaacccatgatcgccagcgaagtcagcgatttaccgctgcccgactcgccggcaatgcacagagtttttcccggccagagcgcaaagctgacgtcatccaccacccgctgtgtaccaaactggatcgacaggcgctcgaccgagagcagcggcgccggaaatag

SEQ ID NO: 264684 - DNA, 408 bp, Klebsiella pneumoniae
gtgctgattgaggatccctttcatcagcgtcttgtgcagtggccagatcttttgcgggtcttcataggggctgtcgacccgcacggcgagctgattatggcggcgaacggccccggtgatgtccaccgggaagcgctgaaaatagccttcgtgccgggtcagcgtcttgccgttgagcgccacctcggcaaagtaatcgacgccgtcaaacaccagcgtagccatggcgtccggcgtcaggccatgcagggtaaattgatggcgataccacagggcgccctgatgatcgtatccggcgctgtaccagtttgccggtacccgcagcgtgcgccagtcgccgtccgaagcctgcgcgccggcgaaggcgctgtcgttggcgtcatgcacccgccattgtccggccagtga

SEQ ID NO: 264685 - DNA, 966 bp, Klebsiella pneumoniae; identical to SEQ ID NO: 264640

SEQ ID NO: 264686 - DNA, 1245 bp, Klebsiella pneumoniae; identical to SEQ ID NO: 264641

SEQ ID NO: 264687 - DNA, 762 bp, Klebsiella pneumoniae
atggctgagccaacggcgggattttcgttgaacgtgctgacaattaacacccataaaggctttacggcgtttaatcggcgttttattttgcccgaactgcgcgacgccgtgcgcagcgttagcgcggatattgtttgcctgcaggaggtgatgggcgctcatgaggtacatccgctgcacatcgaaaactggccggatacgacccattatgaatttctcgccgacaccatgtggagcgactacgcctacgggcgcaatgcggtttatccggaaggccaccacggcaacgccgtgctgtcgcgctttcccattgaatactacgaaaatcgcgatatctcggtcggcaacggggagaagcgcggcctgttgtactgccgcatcgtgccgccgcggagcgggataactattcacgtgatttgcgtccatctcggtctacgcgccgaccaacggcaggcgcagttgaccatgctggcggagtgggtcaataccctgcccgcgggcgagccggtggtggtggctggcgattttaacgactggcgtcagcaggctaaccagccgttaaaagcccaggccggtctggaagagatctttacccgcgcccgcggacggccggcgcgcacctttccggtcagttttccgctgctgcgcctcgaccgcatttacgtcaagaacgcccacgccagtcgcccgaaggcgctggcccttaaacaatggcggcatctgtccgatcatgcaccccttagcgtggagatacatttgtga

SEQ ID NO: 264688 - DNA, 438 bp, Klebsiella pneumoniae; identical to SEQ ID NO: 238130

SEQ ID NO: 264689 - DNA, 1107 bp, Klebsiella pneumoniae
atgtttcaccgtttatggacattaatccgcaaagagctgcagtcgctgctgcgcgagccacagacgcgggcgattttaatcatgccggtgctgattcaggtgctgctgtttccctttgccgcgacgctggaggtgaccaacgccaccatcgccatctacaacgaggacagcggtcgccacgcggtggaactcactcagcgctttgcccgcgccaaagcctttacccacgtcctgctgctgcaaagcccgcaggcgatccagccgaccatcgatgaacaaaaagctctgctggtggtgcgcttcccggccgatttctcgcgcaatctggataactatcaaaccgccccgctgcagcttctgctcgacggacgcaactccaacagcgcgcaaatcgccgccaactatctgcaacagattgtgaaaaactatcagcaggagctgctggagggtaaagcgaagccgaacaacagcgagctggtggtgcgcaactggtacaacccgaatctcgactataaatggttcgtggtgccgtcgcttatcgccatgatcactaccatcggggtgatgatcgtcacctcgctgtcggtggctcgcgagcgcgagcagggcacccttgaccagctgctggtctcccccctcgccacctggcaaattttcgtcggcaaggcggtgccggcgctgatcgtcgccaccctgcaggcaactatcgtgctggcgattggtatctgggcctatcagatcccgtttgccggctcgctgctgctgttctatttcaccatggtgatttacggtctatcgctggtgggctttggcttattgatttcgtcgctgtgcgccacccagcagcaggcgtttatcggcgtgttcgtctttatgatgccggctattctcctgtcggggtacgtctcaccagtggaaaacatgccgcagtggctgcaggatctgacctggataaatcccatccgccactttaccgatatcaccaagcaaatttatctgaaggatgcgagtctggagattgtgtggggaagtttgtggccgctactggtcatagcggccaccaccggctcagcggcgtatgcgatgttccgaaggaagattgcgtaa

SEQ ID NO: 264690 - DNA, 1134 bp, Klebsiella pneumoniae
atgggcaatagcattctctcctggcggcgggtccgcgccctgtgcgtcaaagagacccggcagattgtgcgcgatcccagcagttggctgatcgcggtggtgatccccctgctgctgctgtttatcttcggctacggcattaacctcgactccagcaggctgcgggtcggcgtattgcttgagcagcagagcgaagaggcgctggatttcgtccataccatgaccggctcaccctatatcgacgccaccgtcagcgacagccgcaggcagctgattgagatgatgcaggccgggcgcatccgcgccatggtggtcattccggtggatttcgaccgccagatggcccgccccggcgccgacgcaccgctgcagctcatcaccgacggcagcgagcccaataccgccaacttcgctcagggctatgtggaaggtatttggcaaatctggcagcagcagcgggcggaagaccgcggcgaaacctttgaaccactgatcgacgtgcagatgcgctactggtttaacccggcggctattagccagcactttattatccccggggcgatcaccatcatcatgaccgtggtcggcgccatactgacctcgctggtggtggcccgcgaatgggagcgcggcaccatggaggcgctgctgtcgacggagatcacccgcgccgaactgctgctgtgcaagctcattccctactatttcctcggcatgctggcgatgctgctgtgtatgttggtgtcggtatttattctcggcgtgccctatcgcggctcgctgccgatcctgtttgtcatcactagtctttttttgctcagcaccctggggatggggctgctgatctcaaccattacccgcaaccagtttaacgccgcgcaggtggcgctgaacgccgcctttttaccgtcgattatgctgtccgggtttattttccagatagacagtatgccggcggtgatccgcgcggtgacgtatgtgatcccggcgcgctatttcgttagtactctgcaaagcctgtttctggcgggcaatattccggtggtgctgctggtcaacgtgctgtttttgattgcgtcggcggtgatgtttatcggtctgacgtggctgaaaaccaaacggcgtctggattag

SEQ ID NO: 264691 - DNA, 966 bp, Klebsiella pneumoniae; identical to SEQ ID NO: 264637

SEQ ID NO: 264692 - DNA, 840 bp, Klebsiella pneumoniae
atgcaacaactcgatgaacgactgaaagggcaatacgcctcgctgtcgccgcaggagcagcgggtggcggatttcatctttgaccactttgacgacctgataagctacaacagcgccgagctggcgcagctgagcggcgtgtcgaaagccaccgtcagccggctgtttaagcgcctcggttacgacaaatataaggatatgcgcgatgaactgcgcactctgcgtcagagcgggatgccgctcaccgaccagcgcgacgcggtgcagggtaacacgctgctggcgcgccattataagcaggagatggcaaacctcacccagtgggtcaacgccctcgacgcccgccagttcgctgaggcgctgacggcgatggtggccgcccgccgcattgtggtgattggcatgcgcaacgcctatccggcggcgctgcatctgcgccagcagctgctgcaggcccgcggccaggtgctggtgctgccccagccgggtcagagtctcagcgaagagctggtcgatctgaccgccgatgatctggtggtaatgatggcgtttcgccgccggccgcgaatagtacgcccgctgctgcagcagctgcagcgcgacggggtgccggtcctgttaatgtgcgagccgcaggcccacagcctgtttccgctctcccgctggcagctctgcgcgccgctggacagcgtctccgcctacgatagctatgcctcggtcaacagcctgatcaatctgctggccaatgcctttctccatgaaacgctcgacagcggtcgtccgcgcatccacgatatcgccacgctttaccagcagctggacgagctggaacaacgctga

SEQ ID NO: 264693 - DNA, 786 bp, Klebsiella pneumoniae
  misc_feature (728)..(737): n is a, c, g, or t
atgcacaaaaagacgttattttcgcgtgccggtcgtctcgccgtggcggtgagcggcgcactggccctggcgggcgccgccttacctgccaacgcctccacgctgcggatcgccatgaccgccgcggatattccgttaacccttggccagccggatcaaggctatgagggcaaccgctttaccggcatcccgctgtacgacgcgctggtggagtgggatctgtcgcaaggtgaaaagcccagcggtctggtgccggggctggcgaccgagtggcacatcgatccgcagaacaccagccgctggattttcaccctgcgtccgggggtgaagtttcatgatgggacggaggtgaacgccgacgccatcgtctggaacgtggataaggtgctgaataaagcggcgccgcagtacgccccgggtcagatcggcaacaccctgtcgcgcatgccgaccctcaccggcgcagagaaaattgacgaccacaccgtggcgctgaccacctcggaaccggatgcgctgctgccgtacaacatcaccaacctgtttatcgtctcgccgacggcgtggcagaagcagtatgacgcggtgccggccagcgtgagagatagcgccgcgcgcagcaaacaggcgtggaccgccttcgccgcccacgcggtgggtagcggcccgttcaaactggagaagctggtgccgcgtcagcagctgatcctcgataaaaaccccgactnnnnnnnnnngactactggaacaaagatcgcattccccgggtggataaagtggtgctga

SEQ ID NO: 264694 - DNA, 234 bp, Klebsiella pneumoniae; identical to SEQ ID NO: 161827

SEQ ID NO: 264695 - DNA, 615 bp, Klebsiella pneumoniae
ttgcgccggctgcagctcaaagactacatcgacctggtcgtcaaactggatagtcgcctgctcgtaggtttcctgggcagaaaccggcgcagcgtcagcggccttcatcatgcgaaccatcgggctcggctgatagttggagacatggtagcgcacgctgtacaccggacccagcttgctgtggaagcctgcggccagctcctgcgcctgatgcacggcatcgtcgatcgccgctttacgcgctttatctttgtaggcgtccggttgcgcaacgcccagcgagacggagcgaatttcgttgagccccgctttcagggcgccatccagcagaccgttgagtttatccagctggcgcaaggtcacttccactgtgcgcaccgcgcgatagcctttcagaatgcttttcccgttctgatagtcgtaatcaggctgggtacgcagattcgccgagttgatgtcctttttagcaataccgctcttttcgaggaaagagagatattgcgcaacgcgatcgtcagcctgtttttttgccgacgcggcgtcttttgccgacacgttcacttcgatcgccagggtggcgatgtccggaaccgcggcaacgcttgctgtgcctga

SEQ ID NO: 264696 - DNA, 933 bp, Klebsiella pneumoniae
atgaccaaaatttacacgctcacgctggccccctcgctggatagcgccacgcaaaccccacagatctacccggaaggcaaacttcgctgcagcgcgccggtatttgaacctggcggcggcgggatcaacgtggcccgcgccgtgacctttctcggcggcaaagccaccgccattttcccggtcggtggcgctaccggcgagcatcttgccgccctgctggccgatgagcaggtgccggtcgagaccgtcgaaacccgcgactggacgcggcaaaacctgcacgtccacgtggccgccagcggcgaacagtatcgcttcgttatgcccggcgcggcactgacggacgatgaattccgccgtctggaagagaaggttctgactatcgaacccggctctctgctggtggtcagcggcagcctgccgccaggtattagcgtcgataacctgatgcagctggtgaaaaatgcgcaacagcagggactgcgctgcatcattgacagttccggcgatgcgctggccgccgcgctggacgtcggcaatattgagctggtgaaaccgaaccagaaagagcttagcgccctcgtgcagcgcgatctcagccaacccgatgacgtgcgccttgccgctcagtcgttgatccagtccggtaaagtgcgccgggtggtggtctccctgggtccgcagggggcattaggcgtggacgccagcggcagcgttcaggtagtgccgccaccgatgaaaagccagagcaccgtcggcgctggcgacagcatggtgggcgccatgaccttgcgtctggcggaaaacgccagccttgaagacatggtacgctttggcgtcgccgccggtagcgccgcgaccatcaaccagggcacccgcctctgctcgcgggccaatacgcaaaaaatctatgattatctctgcgggcgttga

SEQ ID NO: 264697 - DNA, 285 bp, Klebsiella pneumoniae
atgagtaatgagattaccgcctgggtcgtcagcgtgaccttccatgaacaggcgctgacggagatcaatgaggtaagcaaccattttacccgtgccgggtttgtactgacgctcaatgatgaagagggcacgccccatgagctgggaaccaacaccttcggcctgctgagcggccagacggccgaggaagttaaggccctcagcgctggcctggcggaagcggcccttggccgcccggcggaaatcgctgtggccacattcgccgagtggttaaaagctcaataa

SEQ ID NO: 264698 - DNA, 747 bp, Klebsiella pneumoniae
atgagcgcaatgacccttgatttacctcgccgctttccgtggccaacgctgctgtccgtggctatccacggtgccgttgtggcggggctgctttatacctcggtacatcaggttattgaacagccttctccgacgcagccgatagagatcacaatggtggcgccggccgatcttgagccgcctccggcggcgcagcctgtcgtggagcccgttgttgaacccgaacctgagccggagccagaggtagcgcctgaaccgccgaaagaggcgccggtggtgatccataaaccggaacctaagccgaagcccaaacctaaacccaagcctaagccggagaaaaaggttgaacagccgaagcgggaagtgaagccggcagcagagccgcgtccggcctcgccgtttgaaaacaacaatacggcgccggcgcgtacagcgccaagtacctcgaccgcagcggctaaacccaccgttactgctccgagcggcccgcgggcgatcagccgcgttcagccgtcctatccgccgcgcgctcaggcgctgcgcattgaagggacggtacgggtgaagtttgacgtttcgcctgatggccgcattgataatctgcagatcctctctgctcagccggcgaatatgttcgaacgcgaggtgaaaagcgcgatgcgcagatggcgttatgagcagggaagaccgggtaccggcgtaacgatgaccatcaaattccgcctgaacggcgtcgagattaactga

SEQ ID NO: 264699 - DNA, 297 bp, Klebsiella pneumoniae
gtgctttacgttatctacgctgaagatatcgccgattctctggaaaagcggctgtcggttcgccccgcgcatctcgcgcgtttacaactcttacacgatgaaggccgactgcttaccgccgggccaatgccggccgttgacagtaacgaaccgggcgcagcaggattcagcggatcaacggtgattgccgagtttgaatcgctggaagcggcccaggcctgggccaatgacgatccgtatatcgccgccggggtttaccgccaggtctcagttaagccgtataagaaggttttttga

SEQ ID NO: 264700 - DNA, 648 bp, Klebsiella pneumoniae; identical to SEQ ID NO: 212897

SEQ ID NO: 264701 - DNA, 501 bp, Klebsiella pneumoniae
atggcgctggcgcagcgcgcccacttcgggttcggcatgccgatcctgtataacgcgcgtcgccagcatccgcaggcggaagaacgcttcaatgcccgctattgcgatctcgataccctgctgcaggaggctgactttgtctgcctgatcctgcccctgagcgaagagactcaccatctgttcggtcaggcgcagtttgccaaaatgaaatcttccgccatcttcattaacgccgggcgtggcccggtagtggacgagcaggcgctgatcgccgccctgcagaacggtgagatccacgctgccggtctcgatgtgttcgaacacgaaccgctggccaaggactcaccgctgctgagcctgccgaacgtcgtcgcgctgccgcatatcggctccgccacccatgagacgcgctacaatatggcggcctgtgcggtggacaacctgatcgacgccctgaacggcaacgtagagaaaaactgcgtcaatccgcaggtaaaataa

SEQ ID NO: 264702 - DNA, 711 bp, Klebsiella pneumoniae
atggcgacaggaaagtcctgctctcgctggtttgcggctatggcggccttattgatggtggttagcctgagtgggtgttttgataaagagggcgatcagcgcaaagcgtttatcgacttcctgcagaatacggcgatgcgtagcggtgaacgtctgccgacgctgaccgccgatcagaaaaaacagtttgggccttttgtctctgactacgcggtgatctacggttactcgcagcaggtgagccaggcgatggacgctggtctgcgcccggtggtggacagcgtcaatgcgatccgcgtcccgcaggattatatgacccagcgtgagccgctgcgtcaggcgaacggcgcgctgggcgtgctcagccagcagctgcagaatgcgaaaatgcaggccgatgccgcgcatggcgcgctgaagcaggctgacgatctcaagccggtcttcgatcaggtttacgccaaggtggtgacggcgccagccgacgcgctgcagccgctgatcccggccgcgcagatctttacccagcagctggttcaggtgggggattttgtcgctcagcaggggacgcaggtgagctttgtcgccaacggcattcagttcccgacctcccagcaggccagccagtacaatgcgctgattgggccgctggcggcgcagcatcaggcgtttaatcaggcatggacggcggcggtgaacgccacccgttaa

SEQ ID NO: 264703 - DNA, 1356 bp, Klebsiella pneumoniae
atgactaagacaaccatcgacattcaggcctttatcaacgagcaccccttcacccgctaccagtggatgattcttgcgctctgctttatcaccgtcgcgatggacgggttcgataccgcaattatcgggttcatcgcctccgacctggtgcaagagtggggcgtggaaaaatcggccctcggcccggtgatgagcgccgcgctggtgggcctggcggtcggcgccttaaccgcagggccgctggctgaccgcatcggccgcaaaaaagtgctgatcatgtcgatcgtggtgttcggcggattcagcctgctcaccgccttcgccaccagccttaatcagctgacgctgctgcgcttcctgaccggtctgggccttggcgcggcgatgccgaatgccgcgacgctaatgagtgaatatgcgccggagcgccgtcgggcgctgctggtgaacctgatgtttgtcggctttccgatgggatcttcgctgggcggctttttatccgcctggatgatcccgcactatggctggcagagcgtgctggtgctgggcggcgtgatgcccctcctgctggcggtggcattaatattcctgctgccagagtccgtccgctatctggtggtgaagcagcacccggcgcagcgcattgctgctatcctgcgccatatcgcgccgctgccgaaggcagtggaatttgtactacgcgaagcaggccaggtgaaagagaaatccgcgatcggcgtcattttctctcctcgctacgcggtgggtaccgtgatgctgtgcctgacctactttatgggtctgctgattttctatctgctgaccagctggctgccgctgctcatccgtgaaaccggcgcctcgatgagtcaggcctcaattatcaccgccctgttcccgctcggcggcgggattggcgtgctgatcctcggcgccctgatggacaagatcaaccccaataaagtggtggccgtcggctggctgctgaccggcgtttttgtctgcctggtggggttctccaccagcagcctggcgctaatgggagtgatggtctttatcgccggcagcattatgaacggcgcgcagtcgtcgatgccggcgctggcggctggcttctatccgacgcaggggcgcgccaccggcgtcgcctggatgctgggtatcggccgcttcggcggcatcctcggcgcgttcagcggcgccttcctgatgcaggctcagctctcctttgagaccattttcaccctgctggccatcccggcgttcctgtcagccattgcgctgctgatcaagtaccgggtcagtaaatccgtgccggcgacgacagatgaggcgagaagcctgcagaaagcctaa

SEQ ID NO: 264704 - DNA, 291 bp, Klebsiella pneumoniae
atggaatataaagatcccgtgtttgaactgctgagcagcctggaacacatcgtttttaaggatgataatcagaaacttacctcaaaccgtaagtccactgtatttagtgaatttgaacagctgcgtaaaggcactgggcttaagattgacgactttgccaacgtcatgggcgtgagcgtcgccatggtaagagagtgggagtcgagacgggtcagaccgtctcccaccgagctgaaattgatgcgcctgattcaggccaatccacagctttcacgacagttactcgattaa

SEQ ID NO: 264705 - DNA, 213 bp, Klebsiella pneumoniae; identical to SEQ ID NO: 213497

SEQ ID NO: 264706 - DNA, 1620 bp, Klebsiella pneumoniae
atggctcattgcgcccacatccccgcttttgttttacatcaggtcacctgtcagtttgcgacggggcagaccctgtttggtccgctcagcgtctcgctggaaccgtccctttgcggcctggtcggccggaacggcgtcggcaagactcgtctgctgcgtctgctggcgggccttgattctcctgccggcggccatattgagcgcgccgccgccgttgcctgggtagcgcagcagccgacgctcacgccggagaccaccctcgctacgctgctgggctatgcgtcggtttttgccgccttgtctcgccttgaacagggccaagggctggccgacgatttcgatctgttagatggtcactgggatctcaccgatcgcctgagtttagcgttccgtgaagccgatctcccgccgttctctgccgatcgccccgcattttcactcagcggcggcgagcggatgaaggctctgctgtgcggcgccttcgtctcgggcgccgattatctgctgctggatgagcctaccaaccatctggaccgccaggggcgggagtggctctatcaccaactggaaagctggcagggcggggctctgatcgccagccacgaccgcgagctgctgacgcggatgccgaggattattgagctgacgccgacggcgctgcgcagctacggcggcaactatgctgaatatcagcgccagcgtatggcggagcagcaggccgcgcgcgcggcgctggagcatgccgtgaccgaccgacggcgcacccgcgcgcgaatgcataaggagcatgacgccgcccagcggcgctcggctcagacgctgcgtaccgttgatacgctaaatatcgcctccttcgaacgcgtgaagtacaaaggcgcggcaaaagagcgcccgggaacgctgcgccgtcagcatcgtgaacagaacagcagtctgaatgccgccgtgcagcaggcgcgggagcggatagaagacgacaatccggtgatgttcaccctgccgggtagcgaagtggccgccggcaagcaggtgctggtggtggagtcattacagctcgaccatgcgccggctgcgccgctgaactggcgtatcgatggcccgatgcgcatcgcgctaaaggggccaaacggctgtggcaaaaccactttgctgaaaacgctgttggggctggagcaggccgcgtcaggcgatgtccggctttcggtgagcgccgcttacctcgatcaacatctgacgcagctggatttatccctgtcggtaatggcgcacctgagcctggaagataccccactggatgagggcctcctgcgcacccgcctggcgcagctccagctgggcgcggataaggtcactctgccgctgtcggcgctcagcggcggcgagcgcctgaaagcggcgctggcgtgcgtgctctggcgatgcgagcctgcccagctgcttttgttggatgagccaaccaaccatctcgatttagcatcgacgcaggctattgaaagcgcgctggcggcgtttcccggcgcgatgctggtggtgtcgcatgatgaggcgtttttacaaggtctgaagctgacccatagtctggcgtggcgggagacgagctggcacttttccctgctctga

SEQ ID NO: 264707 - DNA, 150 bp, Klebsiella pneumoniae
atgtggcgcaacaacatttactttcgttatattcttctgacctttaagaacggcgctttcacccaggatttgcgcgctatcttccccgtcaaaccactgggcaattttgccctgacgttcaacaaaatgaccaggttttttacccgttag

SEQ ID NO: 264708 - DNA, 1437 bp, Klebsiella pneumoniae
atgaacaacgcgcagacacatctgaaaatgggctacgtctggacgatttgtctggtcgccgcctgcggtggtttactgtttggctatgactgggtggtgattggcggcgctaagccattttatgaagcctggttttcaattacggacccggcgcagtccggctgggcgatgagctcagcgctgttgggctgtattttcggcgcattaatttcgggatggtgcgcagacaaactggggcgcaagctgccattaattctttccgccgtgctgttcagcgcgtcggcctgggggacggcggtcgccagtcatttcgatatgtttgtggtttaccgcattgtgggcggcgtagggattggtctggcttccgctctcagcccgctttacattgccgaagtcagcccggcagagaaaagaggacgttttgtcgcggtcaatcagctcactatcgtgattggcgtgctggccgctcagttaatcaatctgatgattgctgaaccggtggagccgggggcgacgcagcagatgattgtggacagctggaatgggcagatgggctggcgctggatgttcggtgcggaactggtgccggcgctggcgtttctggtcctgatgttttttgtccccgagtcgccgcgctggctcatgaaggccggtaaaccagagcgcgcccgggctgcgctggaacgcattggttctgccgactatgccgacaggatcctgcgtgaaatcgcgcataccctggaaaaggataacaataaagtctcctatggcgcgctattggctccccaggtgaaaccgattgtgatcattggcatggtgctcgccatattccagcagtggtgtgggattaacgtcatctttaactacgctcaggagatttttgcctcggcggggttcgatattaacagcacgctgaaatcgatcgtcgcgacgggcgtcgttaatctggtctttaccattgcggcgctgccgctggtggataaaatcggtcgccgtaaattaatgctgcttggcgcttcgggattgacgctgatctatgtgctgatcgccggcgcttacgccatgggcattatggggtggccggtactgttgctggtgctggcggcgattgctatttatgcgttgaccctggcgccggtgacctgggtgctgctggcggagatttttcccaaccgcgtacgtggactcgcgatgtctttaggtaccctggcgctgtggatcgcctgtttcctgttaacctatactttcccgctgcttaatgccggtctgggcgcggcaggaagcttcctgctgtatggtgttatttgcgctgccggctacctctatatcctgcgcaacgtcccggaaacgaaaggtatcaccctcgaagcgctggaagagcagctggcgcagcgtcatacgggcgtgaatgcggcgaagcaggagcagatgcgctaa

SEQ ID NO: 264709 - DNA, 402 bp, Klebsiella pneumoniae
atgaaattagttatcgcctccgtaatttctctactcagcttcagcgcgctggcggcgccagaggggacgctcagcgtacacattcttaatcagcaaaccgggctcccttcaccgggggtgcagattgagctggataaacagcagggggagagctggcagcatatcgccaccggtaaaacggatgccgatgggcggattaaatcgctctatccgcaggcggagaatatggagccgggggtgtataaagtgacgtttaaaactggtgactattttaaaagccaaaatatgaatacgttcttcccggtgattccggttattttcaatgttacaaagcaaaatcaaaaactgcatatcccgctgctgctcagtcagtacggatactctacctaccgcggcagctga

SEQ ID NO: 264710 - DNA, 171 bp, Klebsiella pneumoniae; identical to SEQ ID NO: 134896

SEQ ID NO: 264711 - DNA, 306 bp, Klebsiella pneumoniae; identical to SEQ ID NO: 238804

SEQ ID NO: 264712 - DNA, 663 bp, Klebsiella pneumoniae; identical to SEQ ID NO: 212693

SEQ ID NO: 264713 - DNA, 249 bp, Klebsiella pneumoniae
atgccgctgtcgtttatgaatatgccgctgctgagttacgccagcgaagtgactattccgacgcttatcgtgaccggcgaaaaagcccattcacgctattttgccgaagatgcctttaaggccatcggcagtaaagagaaagcgctggtgattgtcccaggcgcaaaccacgtcgatctctatgacaacgtcgcgggcaaaattccctttgcgacgttcgcgcaattttttaaaaccaacctgaaatag

SEQ ID NO: 264714 - DNA, 1203 bp, Klebsiella pneumoniae
atgtctgcattaggtcacacccgggcacactggagcggcgtcctggcgatgacgctctgcgtatttgtgctcattgcctcagaatttatgccggtcagtctgttgacacccatcgcgggtgatttacacattaccgagggattagccggtcagggcattgcgctttctggcgcgctggcggtactgaccagcctgacgatatcccgtcttaccggatcgctggaccgtaaatggctgctgctggggctcacggcgttgatggcagcctctggggtgattattgccctggcgtccagtttcccggtttatatgctgggcagagcgctcattgggatcgtcatcggcggcttctggtcgatgtcggcggcaacggccattcggctggtgccgcaacgccaggtcccccgcgcactggccatctttaacggtggtaacgcgctggccaccgttgtggcagcgccgctgggcagctacctgggggccaccgtcggctggcgcggcgcctttttatgtcttgtcccgctggcggtgctggccttcgtctggcaatgcattagcctgccgtcgatgaaaagtccgcgcgcaccacagcggcagggatcggtgctgcgtctgttccgtctttctacgctatccctgggattgctggcctgcggactgttctttatgggacagtttaccttatttacctatgtgcgaccgtttctggagacggtgacccaggtcagtccttctggtctgcccctgatattactggcgattggtatcgccggttttatcggcacgctgcttattacgaccgttctgaatgccctattttatccgacgctgatagctatccctttggtcatggccgcgattgccggaacgcttctgctggccggacagcatatgggatcggtcaccgtactgttaagcctgtggggcctgctggcgacagcggcgcccaccggctggtggacatggattgcgcggacgctgcccgaggatgcggagacgggcggcgggctgatggtcgccgtgatccagctatcgatagccctcgggtcaacggtaggcggcctggtgtttgatagtcttggatggcacagcacttttgcactgagcggtctgttactgctgggcgcggcaggggtgacttttctgctctctgtcaaaatcagatcatctcagcgcactgcgattaatgaattgaatgcataa

SEQ ID NO: 264715 - DNA, 870 bp, Klebsiella pneumoniae; identical to SEQ ID NO: 260117

SEQ ID NO: 264716 - DNA, 291 bp, Klebsiella pneumoniae
gtggcctttaaagcggcagtctcccgggaaattttcgctgccaatgaccgcgtgacactgcgctttatcgatgcgggagagatctttcctgccgaacgcctggcgctggcgcgtaacgatgagcactttgatgtcgatccgttagcggaaggcggcagaggcttgcggcttattctgcgtgcggtggactattttaatgtggaaactggcgccggggagaatgtgactaccctgatagaagcgttgcctgatacccgcctaagccatgccaccgacgatcgctgcgggtga

SEQ ID NO: 264717 - DNA, 189 bp, Klebsiella pneumoniae; identical to SEQ ID NO: 138680

SEQ ID NO: 264718 - DNA, 915 bp, Klebsiella pneumoniae
atggataaactggatactctgaccttgtttgtgcgcatcgtcgaacggggctcattcagtgccgccgccgcggatctgggggtttcccggccagtagcgaccgcggctattaaagcgttggaggtcagtctcggggcgcggctgctacatcgtaccacccggcacgtacggccgacggcagaaggctcgctgtattatcagcgctgcgtgtccattctggcggcccttgaggaggccaaccgcagcgccggggggagcatctccggcaccattcgggtagacgtggcgggcaacctggcgcggaccctgctgctgcccgcgctgccgcagtttctcgcccgctacccggacattacgctgcagatcggcgaaagcgagcgtgacgtcgatctggttcgcgagggagtcgactgcgtcattcgcggcggccatctccccgacagcgagatgatctgccggccgctcgccgggttgcaggagatcacctgcgccagcccgacctatctcgcccggtacggcaccccgcatacgattgaaggactgacgggccacgtgatgatcgggtttgtttcatcgcgcacgcaacgtaccttgccgctgagctttacccaggatggccgtcagagcgaggtcagtttgccctgtcggttgctgacttccgatgccgacgtcggcgccgaagcggcaaggcttggctttggcctgtatcaggcccccttgccccgccttgaggccgatctggcgtcgggcgcgttaacggaagtgctggccgattttcgccctgcgccgctgccgctctccctgctctatcccagcagccggcagctctctgcccgggtacaggtatttatcgactgggtgacggcgctgatgaagcctcccctggcgcagcaggcatccggaaggctaaaataa

SEQ ID NO: 264719 - DNA, 750 bp, Klebsiella pneumoniae
ttgccgcccgcttccgctgccgccgaagactcaatcagcgccgtagccgccggaatgcccacccacgggccgagcgcggcggcaatcgaatcgaccatgaacgggcgattaatctgcggcatgttgccttcttcatccagcagacccgcctcgccgcccaccgccagcgttgtccccatggtggagaaaaactcagatgcgaaaaagacgaacaggaacggcaggaaggcgatgtttaacgcccccagcaggtcaacctgtcccagcaccggcgccagcgagtggggaacgtcgataaaatgcgtcggcagtttggtcacgccgaacgggatccccaccagggtagcgcacagaatggcccacaaaatggcgcccggtaccttacgcgcctgcagggctatcgccaggaacaggccgcacagcgccaccagcgcgccgggggcgagaaagtcaccgagcatcagcgcgttggttttcgcattggccagcaccagcccggcattgcgaaaaccgagcacggcgacaaacaggccgatggaggccgtcaatcccagcttgatcgactgcggcaccgagcgggtgaccacttcgcgcaggccaaagcgggtcagcaggaagaagaggatccccgaccagcaggcaattccgaggccagtctgccagccaatcccttcgctaccggccagcgtcacccccaccagcaccgagccgccaatgcccgggccgacgataaacggcaggttggcataa

SEQ ID NO: 264720 - DNA, 1848 bp, Klebsiella pneumoniae
atgagacgaatactgacaacgctgatgatcctgctggcggtcattgtcgccgggcttacctcgttggtattgctggtcaatcccaacgattttcgcgcctatatggtgcatgaggtggcagagcgcagcggttatcagcttgaccttgatggcccgctgcgctggcacgtctggccgcagctcagcattctcagcggacggatgacgctgaccgccagaggcgccgaagaaccggtgatccgcgccgacaatatgcgcctcgacgtggcgctgctgccgctgctctcgcatcagctgcaggtgaagcaggtgatgctcaagggcgcggtgatccagctgaccccgaaaaccgaggcggttcgcgacagctcagcgccggtggtgccgcatgataacaccctgccgctggccccggaggatcgcggatggtcctacgatgtgcgtcagctgcaggtggccgacagcgtgctcttctttcagcatgagaacggcgagcaggtgaccgtgcgcgatatccgtctgcagatggagcaggatgagaatcaccgggccaccgtggatttctccggccgggtgaaccgcgaccagcgcgacctggcgctgaacttctccgccaccgtgcagggcggcgattatccgcactccttaaaagccgactttacccagcttagctggcagctgcgcggcgccgagctcccaccggacggcattaatggtcagggaagtctgcaggccagctggcaggaagatgacaagaccctgcgttttgacaacctgaatctgatggctaaccgcagcaccgttaccggcagcggcagcgtggtgctgggggatcgcccggactggtcgctggatctgcacgccaccactctcgatctcgatagtctgctggcgcaaaggtcgccggcgacggacagtagcgccagtcagcagggccagagtcagacgcgaccgctgcgcccggtgatcgccgacagcgatgagcgcgaagattaccagagcctgcgcggcttcaacggccgaatggccctgagcgccgaccagctgcagtggcgcggtctgaacttcacccaggtgcagagcgaaatcagcaaccagcaggggctgctgacggtcagcaaaatgcagggcaatcttgacggcgggcagctctctctccctggcacccttgatgcccgcggcgacacgccgctggcgacgttccagccggcgctgcagaatgtggagatcggttcgctgatcaaagcctttaactattccttaaacctgaccggcaagctgtcgctgagcggcgaattttccggaacgcgcattgacgccgatgatttccgtcgccactggcagggacaggctcagctgcagatggccgatacccgcaccgaagggctgaacttccagcagctggtgcagcaggccgtggaacgcagcaccaacgtgcgggcgcaggaaaattacgacaatgccacccgcctggattccgtgagcagccggctgacgctggataacgggctggtgacgctgaaccgcctgcagggacagtccgacgtgatggcaatgaccggcgaaggacagctcgatctgcagaaagagaactgcgatatgcgcttcaacgtgcgcgtgctcggcggctggaaaggggagggcaagcttatcgaccgcctgaaacagaccgctatcccgctgcgcatctacggcgagtggcagtcgctgagctacagtctgcaggtcgatcagatcctgcgcaaacagctgcaggatgaagcgaagcagcgcctcaacgactgggttgagcgtaataaaggcagcaaagacggcaacgatgccaaaaagctgctcgataagctgtaa

SEQ ID NO: 264721 - DNA, 582 bp, Klebsiella pneumoniae
atgcgtctgtgtgaccgagatatcgaagcctggttggatgaagggcgactcgccatcaatccgcgtccgcccgttgagcgtattaatggcgcgacggttgatgtacggctgggtaataaatttcgcaccttccgtggccacacggcgccgtttatcgatttaagcggcccgaaggccgaggtcagcgccgcgctggaccgggtgatgagcgaagagatcgtcctgccggaaggggaagcctttttcctgcatccgggcgaactggcgctggcggtgacctacgagtctgtcaccctgcctgccgacctggtaggctggctggacggacgctcctcgctggcgcgcctggggctgatggtgcacgttaccgcgcaccgtatcgatccaggctggtccggctgcatcgtgcttgagttttacaactccggtaagctgccgctggcgctgcgccccgggatgcccatcggcgcgctgagctttgaaccgttatcgggcccggcggcccggccgtataaccgccgtgaagacgccaaatatcgcgaccagcagggcgcggtggcgagccgaatcgacaaggattga

SEQ ID NO: 264722 - DNA, 642 bp, Klebsiella pneumoniae
atgactgatatgtcccatcagtgcgtcattgtaggcatcgccggcgcatcggcttctggcaaaagtcttatcgccagtactctctatcgcgaattgcgtgaacaagttggcgacgaacatattggcgtcattccggaagacagctattacaaagatcaaagtcatctgtcgatggaagagcgcgtcaaaaccaactatgaccacccgagctcaatggaccacagtctgttgttccagcatttgcagatgctgaaaagcggccagccgattgaactgccggtctatagctacgtcgagcatacccgcacgccgaacaccattcacgtcgagccgaagaaggtgattatccttgaagggatcctgctgctgaccgacgcgcgcctgcgtaacgagcttaacttctctattttcgtcgacaccccgctcgatatttgcctgatgcgccgtattaagcgcgacgttaacgagcgcggccgctccatggattcggtgatggcccagtatcagaaaaccgtgcgcccgatgttcctgcagtttatagaaccgtcgaagcagtatgccgacatcatcgtgccgcgcggcggcaaaaaccgcatcgctattgatattctgaaggccaaaatcagtcagttttttgaataa

SEQ ID NO: 264723 - DNA, 849 bp, Klebsiella pneumoniae
atggtgctgttaccctggaccccgccttacgactgggcgtggatggttggttttctgcaggcgcgtgccgtcgccggcgtcgagcgctttgatgaaggaggctatagtcgcagctttggcgtggaaggccaccgcgggctgattcatctggcgccggacgaagaggcgcagggcctgcgggtgaccctctccccggggctgcaaccggtggcggagatctgctatgcgcgaattggccagctgtttgatttagcctgcgacccgcggcaggtcgccagggcgttgggctctctggcccaggcgcggccggggctgcgcctgccgggggcgctggatgcctttgagcaggcggtgcgcgcggtgctgggccagctggtgagcgtggcgatggccgcccggctcaccgccaaagtggcggctggctggggagaaccgctggcggaggcgcccggctctgttttgttcccgacgccagaggccctgtcccgggccgatccgcaggcgcttaaggcgctggggatgccgctgcgacgcgcggaggcgctgatccacctcgcccgggcggcgctcagcggcgagctgcccctgacggcgccggcggatattgacgccgggctgcgtcaactgcagaccctgcccgggattggccgctggacggcaaactactttgccctgcgcggctggcaggcgaaagatatctttttgccggatgattacctgattaaacagcgctttccgggaatgaccccggccgccatcgcccgctatgcccgccgctggcagccgatgcgatcctacgcgctgttgcatatctggtataccgatgactgggcgccggcggcggaatag

SEQ ID NO: 264724 - DNA, 1329 bp, Klebsiella pneumoniae
atgttttgcgctgatggcgaaaacagcgcagaagtgtattgcggtgcgacaactatggcgcaggcgaaaaaggtcttcaccccagccaggcagatggccagccgcctgccggcacttcgctccagatttgatatttcggtatggaccgacagcctgacacgcccggatggttccgttttcgcacctatggcggggaaacccggcgatggtgacagcccacattgcgcgatcattgacgagtatcacgaacacgatacggatcatatgtacgaggccatgacaatggggatgggcgcccgttcgcagccgttaacgctcattatcacgacagccggctcgtcactggagtccccttgctatgacaaggacaaggaagtcaaagaggttatcgaaggcataacccgtaatgatcgcctgtttggcatgatttacgaactggatgctggcgatgactggaccgacccgaaaaacttaatcaaagctaacccaaatctggacgtttcggttaagtacagcgacctggttgagcttctggaagtagcgaaacaggttcctcgcaaggttaacgccttcaaaaccaaacgcctcaatatttgggtatccggtaaatccgcgttctacaacatggagcagtggaaggctgctgaagaccccgaccttgagctggctgattttgcgaatgacagctgcaacatcggtctcgatctcgccaaaaagctggatatgaacgccgggatacgactatttacgcgggaaattgaaggtaaacggcattattactgcatcaaacctaaattttgggtcccggaagacactatccatacaaccgatccaaaactgctgaaaactgctgacaggtatcagaagttttatgaaatgggcgtgctggaagcgacggatggcgcagaggcagactatcgcgagattctggccagtattatcgatatgcaggacgaaaaccgcattgacgagattgatatcgaccctgcaggcgcaacagcacttcgccaccagttggaggacaacggatttaccgtagtcgatatccggcaggattacaccaatatgtcaccggcgatgaaagagcttgaagcggctctggccggtggtcgattccaccatgatggcaatcccattctgacctggtgtatcagcaacgttatcgggaaatttatacccggtagcgatgatctcgttcgcccgacaaagggagacaatcaaagcaaaatcgatggagctacagcgttatttaacgccatgactcgcgcaatgctgcacgaaagcagcggcggcacatcggtatatgatgaggaagacatagcgtgttaa

SEQ ID NO: 264725 - DNA, 597 bp, Klebsiella pneumoniae
atgtcaacgtcaaagcacccaagcgagatcaaaataaatcccaatcagggtggcaaggctgcgattgagcgattggtcgtggcatatggttttacaacacggcaagcccttgcagaccacttagaagtgtcaacaagtacattggctaacagatacatgcgagataccttccccgcagattggattattcaatgtgccttggaaacaggtacctcgcttaattggttaaccgccgggaaaggcctcaagctaagttctcaaacagcacccaccgaagagctcgcaaagtttcgtctggcagcaggaagaatggttgaagatggatcgtatgtttttgacacatcatttcttccagcaaatctatctgctccgatggttgtcctcgacggactgactacatacatatgtgaacaaaagtttgcagaagtgcttgatgggcactggttgatcaacattgatggaacttattccattagactcatcacacggttgcccaagggcatgattaaaatttccactgcaaatattagttttgaatgtgctttttcagatatagaagtgattgcaaatgtaagaagcacaactgtttcaatttga

SEQ ID NO: 264726 - DNA, 198 bp, Klebsiella pneumoniae
atggttccggtaaaagacacgcagaccggcaccggatggaatactgccaccgcgcagaagcagatcgatctccgcctccgaatcatcaaagcctctcgatttaagttcataccccagatgcaggcgctgctgattatccacattctgcctgtcccctttctgacgctttggcttaaccatgcgaagccgcgcgtttag

SEQ ID NO: 264727 - DNA, 210 bp, Klebsiella pneumoniae
atggtcatccagcacatagagtcggcaaccgtcaatcgcttgaccgatagggatatcgtcgtagtcgtacccgcgcaggcagcggtgatgactgacatcgattgctgcttcggtcgggccatagagatttataagatcaccctgcgccaccgattgataaaagcgagccacactgtggaccgtgagtttctcaccgctggaaaacactaa

SEQ ID NO: 264728 - DNA, 3711 bp, Klebsiella pneumoniae; identical to SEQ ID NO: 235899

SEQ ID NO: 264729 - DNA, 816 bp, Klebsiella pneumoniae; identical to SEQ ID NO: 220143

SEQ ID NO: 264730 - DNA, 2181 bp, Klebsiella pneumoniae; identical to SEQ ID NO: 186045

SEQ ID NO: 264731 - DNA, 258 bp, Klebsiella pneumoniae
atgagtctgcatcttatccacacaatgctcattgataaccataaacggtatgagctctttggtgattacagcctgtccgttcagagagtaaaaaaggtacttgaatacactctcgatggcgatgtttggaaagtcactaaccctgaggttgatatcagtaagtttttggaggcggctaaggatgcagccgcttcgatttttggtcggccaaccaacgagttgcatcatatcattaagcacctggaatcattaagatag

SEQ ID NO: 264732 - DNA, 462 bp, Klebsiella pneumoniae
atggctgataaaacttcgcctgaatatgcgatgttgccggcgggcaccattgtgaaatacggggagcctggcgctgccacgtcagcgctgaaaccgctgattaactgtaaagcgctgggtgcaatggggcagacggggggctttgtcgactgcaccacgttactggataagcagaaacagtccatcagtgatctgcctgatgggcctgaaaagtcgctgggcttcattgatgatccgggcaataccgattttgccgcgctgctgaacgcagcagaggcccgcaagaccatccagttatacgtcgaattacccaacaagcgaacagcgacgatgctcctggcgctgtccgggtggcagatgaatgaaatcgccgctccggcgaatgaggtcatccagatcactgttcagggtaagcagaacaagatcacctggggaaccgtcgctgtctccggcggcgcctga

SEQ ID NO: 264733 - DNA, 648 bp, Klebsiella pneumoniae
atgattagctttgggtccgcttgcagctatcagacgggggcgacgctttctctttttaatgccgcccatcaaccatggctctttatcccctatctcagtctgctgtttttcacaggcgcaatacatacgcgcctctggaacgggtcgttgaagcctggccaaaaccagcgtctgacagagatcacctggctacaatggccacgctggcgaaatgtgacatggatgctgaaaaatatcctccgtcagttcattacgcaagccatgccgttattcctgattatctgcattgttgcggggatgcttgattacgcagggatcactcgctggctgagtgaaacgacggcacctttacttcatctttttaaactgccagcagaactgatgcccgggatcattttttcactgctaaggaaagatggtttgatggtgctcaatcaggatggcggcagcttaatacagtctctcagcacatctcagttactgctacttgtctggctcgcctctacgttgatggcctgccttgtcacggtatttaccatcgcccgggaaataaactggcggtttgcagcagcagtggcgggaaaacaggtattaagttctctggtggtggctctggtgatatcccagttatttattcatgaggcataa

SEQ ID NO: 264734 - DNA, 255 bp, Klebsiella pneumoniae
gtggtcgccggtggcgacaatcgcctgggcgcaactgaggccggtgaggatgccaccaagcaggtgctggcgcagcgaggcatccgtcgccagcgaacggtgagcttccaggatcgcgctggcggtgccgtcattgtccagcagccgcagctcgatatctttcaccagcaggcgcaggccattatccagcgccgcctgctcctgttcgggactgacggcgacgggcagttcgcccagctcgtgcagatcgcgtga

SEQ ID NO: 264735 - DNA, 594 bp, Klebsiella pneumoniae
  misc_feature (569)..(578): n is a, c, g, or t
atgactccgcaggaactggaagcttgtgtgctagctggcctgttaaacggcggtgccagcccggatgcattcgacgtgattgcctctacgcctgaagaatctttcagcatagggtttcatcgtcgcgcgttctccgaaattaaaaaacaggcgctggcgaacggcctgatcgacatgctttttgtcagcgaagcgctgggcggtagtagcctggcagatttatcagagattacgcgcatgcctgccacggtaccgaacctgaagggttacgccggaaaaatggttaaggcgtggcgcagccgccgtatggccgaattactgcagcagggcgctgatggtatccggcaggcaaacaaccaggaacagcgcgatcaggttgtcgaaactgccgtggcgcagctgctggacatgaccggcgacactggcgacgtgcagccggtacacatgagcgaattactgcctgtgtatatggaaaccatgcagaaacgcatggacggtgaagagggcacccgaaacctgaaaaccgggatcgaggaacttgacgatgcgaccggtggaatcaacctgcnnnnnnnnnnaacctgcaggatttga

SEQ ID NO: 264736 - DNA, 453 bp, Klebsiella pneumoniae; identical to SEQ ID NO: 74988

SEQ ID NO: 264737 - DNA, 240 bp, Klebsiella pneumoniae
atgcaccatccgctctgtcaggctgcgccagtcctctcccgtatcacgggcgcgctgaataattttatcatctatatcagtaatgttacgcacgaaagtcacatcgtatccgcgaaaacgcagatagcggacaatcatatcaaaagctacaaaggttctggcgtgcccaagatggcaaaggtcataaaccgtcacgccgcatacatacatgccgattttgctctctttaaccggaactaa

SEQ ID NO: 264738 - DNA, 1164 bp, Klebsiella pneumoniae; identical to SEQ ID NO: 199886

SEQ ID NO: 264739 - DNA, 165 bp, Klebsiella pneumoniae
atgccatttcgcgggatggaggtgaccagctcccgttttttaactcacaatttcgttagtaacgtccgctgttggcactcagcggacacctcagctttgcctcaccccggaatcattaaacttagctttgacatcccgtaccagctgctgttgattccattttaa

SEQ ID NO: 264740 - DNA, 594 bp, Klebsiella pneumoniae
atgtccccagcagtcatgctcctttcagatcttagttatcaattaggcattatcggattgatcgaatatcaggaacgtcttgaaatatacagatggcttaaagacaacagcaacaatgttgctgacccacgcaacgctcccggggaagattatgcatcttctgaaaaagagagaatggatcatggggatgactgggatggaagtaacagaatggaaggtccacagttaagtcatactggtacaaaaggaggtcaaaaaatcgaggatgaagatgattcgatgcatttcctagcctttaacaaatggctctttacagttggtgacaaagactctttcccttcagttcctcacgcccattaccaacgaaaaaccaccccgtggccaaagttaaatccctataccggagtggtatatagcagcaagaatgctgaagatgtttcttccaggctcaccaaaagagagatgaaattactgtggaatgattctaagtttattgaagagtgcaggaagcagattatttggtatagtgcgtttgcacctcattactcttttcctaatgcacgatttggcaggcatattcttccacggtggtga

SEQ ID NO: 264741 - DNA, 192 bp, Klebsiella pneumoniae; identical to SEQ ID NO: 217366

SEQ ID NO: 264742 - DNA, 438 bp, Klebsiella pneumoniae
ttgcactgtggtgaacggcggatcaaaacgcgcatcctggcgttccggcgcggcgagcacctcgccgatagtcgtcaggcggtggatcagcttcgcggcatattggatggcgttaacgccctgcggcgcgtaggcggaatggcaggccgcgccctgcacttcgcagcgcacggcaagcttgcctttgtgaccgagcaccggctgcagttcggtaggctcgcctatcaggcagagatcgggcttttccgggcgactggccagcacatccagcaaagtacgtacgccaagacagcctacctcttcatcataagaaatcgccagatgcagcggctgtgcgagcggctgcgcaagaaaatgcggcactgccgccagcatgcaggcgataaaacctttcatgtccgctgtgccgcggccgtacagcttgccgtctcgctctga

SEQ ID NO: 264743 - DNA, 369 bp, Klebsiella pneumoniae
atgaaaacagcgatatgggtggtggtgtatttaacgatgtgttttctgcttttcaccggatggatgttcgcctttgcgcagtatgcgccctataacgggcaggaacacgcgttttctctgacgtatctgcttaatttattttttcttcatgtagtgatggtaccttactacgagttttttcagactgaaatatacagcaatgtattaatgagtctggcagatgaatccggtcagatgatacgttttcatcacgtggtacctgttctagggatatatagtctgtccgcactcttaacttttgtaggttacatcatatatgcaaaatggttcactcataactggctgaaaggaaagcttcttccaaaatga

SEQ ID NO: 264744 - DNA, 2010 bp, Klebsiella pneumoniae; identical to SEQ ID NO: 202569

SEQ ID NO: 264745 - DNA, 1308 bp, Klebsiella pneumoniae
ttgtctcgtgggctcggagatgtgtataagagacagattgactgcgatatgggtaataacggcataagcatgtgcgctatggggcgaatagaaatgattcgcccgcattggaaacttgaaacgctcaatgcgccctatactccaacggaaatcacgcttatcaaaagccgtgatgatattggaggatttgttgatggggatatctatattgaaaatgccgtcgtttctggtggattcacttataacgacaataattcaattgccacttatttaatcggtggcatgattaaccttgccagcaccaaccctggtggaacgaccactctacccgagggctcgcctgtggttcctcgtctgttccgtgatattactatcaaagggatgaagcaccttcgacgctactcaacagaccgctacaccaggtttatttactcaaatcttccgcagtatcttaaacatccggaatcgatcactcttgatgattttgattatttctgcgaccaaccgctggtatttgggttcggtaactggctggatacctattatacagacgataccacctcttcgcccatggcagttgacgtgacatgtcacatcactattaaccgtggagcatttgccggattgtcatttgccgggacgggtaataagcaaaatctgagcgttaaacttaaccaggtgcgcgatttgcgttacggcaagaaaggtgtagctgttgttgccaacacccgtggagtctatgagataagtgatacggatgtgaccagtctcagcacggtattcaattcatctcagccaacggtaccgaatatcatcaaactgaacggcggaacattccgtgtgtttgataattcggttatgccaatgacagctaacgatagtgtttatcacgatgtatccgcttcaaatgtgaatttcctgggggatttttccgcatcaacagtaacggcaacgaacctgaatctggcgaagtggttccggctgatgggatgctcataccagaccgtctcaggatcgcgtgttccttatttgcttttgtacacgggtaatgtaggaacagttgaaactacaatcggcatacccgtcagatcaggaaacgcaatgctgactcaaagcatctataacagtctgataaccaccgataccttccagatttcgaatatgtcaggtaatttatcccgaaaactatataacgggttagatgggggttacttcttcaatatcagtatcacgggtaacagagcgttaattaacacagctaaagcgtcagaaacagcattgctgcggcagatccttttagcggcgtaa

SEQ ID NO: 264746 - DNA, 282 bp, Klebsiella pneumoniae
atgttctcacatgaatcagaagttaaagtaaatcttgttaatgataacgggtgcgtactcggaagtgaaacaagaaacctcctcctttattttgaggtgaaatcattaaacattagtggcactacctgcacggcatctctcttttcaggaacaagcaaagagagtatgcaattttatggggcttattccatggaggttgatttacagtctggaggtattaacgagtctgtagaaagtcacatcattgcgcttgaggagttttcaggagcagtacagatataa

SEQ ID NO: 264747 - DNA, 261 bp, Klebsiella pneumoniae; identical to SEQ ID NO: 184178

SEQ ID NO: 264748 - DNA, 1197 bp, Klebsiella pneumoniae
atgcagcgtactggctttaataatgcccgggtccggcaggccaataagtcgatttttctttcccatctgtggcgggaaaagcagctcagtaaatcacagctctctcaactcaccggtctctccattccggcggtgagcaatattctggccgagctgcttagcgagggattgatcggtcactcaacggaacacttgagcaaacggggcgtgaacagcggcagctaccagatccccgagcacggtgcctggacactgtgcatgaatatcaccccgaccagcattgaatatcagcttgccgacgcccgcctgctggcagtggatggccatcagcatttgccggtcaacgcgcccactcctcaggccctgcttgaggccatcgttgaatgctggcggcatatccaccgccgctacccacagcacagcatcaatctcgcccttggcgtgcatggacaggttgatccgattaccggcgtttcacaaaccatgccccaggcacgctggaaaacaccgatcgaaataaagtatctgcttgaggagcggcttggcgtgcaggttcgggtggataacgactgcgtgatgctggcgctggcggagaagtggcagcatcagggtacacagcaggatttttgcgtgatcaacgtcgactacggtatcggctcgtcatttgtgattaacgatcatatttatcgcggcagtctgtacggcagcgggcagattgggcatacgattgtcaatcctgacggcaacgcctgcgactgcggaagatacggttgcctcgaaaccgtcgcctctctcagcgcgctgaaaaaacaggcccgaatgtggctcaaaacgcagcctgaagcaacgctcgcccccgagcagttaaccacggcgtcgctcattgaggcctggaaagagggagatgtgcaaattcgcgcatgggttgataacgctgccaacgcgattggcttaagcctctataatttcctgaatatattaaatattaatcaaatctggctttacgggcgcagctgcgccttcggtgagcagtggctggaaagtatcgtcaaacaaacgggtttcaacccctttgaccaccgggatacgccgcgagcgcacgccacccaaattggctttggccagctgacacgcgcccagcagctgatggggataggttatctgtacgttgaggagcaattgcagacgctggtttag

SEQ ID NO: 264749 - DNA, 291 bp, Klebsiella pneumoniae
atgaaaatcgtgctggaaaccgaaccgcgcaatctgccggcgctggatatcaccttcgccgaccagcgtatcgaacgcctgctgtttaactaccgggcgcgcaacttccccggcacgctcgatgaacatgagcagcagcgctggttagagcaccgtcgtcaggtgtttacgccagagtttttgcaggcctatgccgatgagctgcagatgctgtatcagcagtatgcggatgataaagagaagctggcgcagctgaaggcgctgtggcagtacgcacaggatattgtctga

SEQ ID NO: 264750 - DNA, 1137 bp, Klebsiella pneumoniae
atgaccgacccctacgtcggccagctgacctttatccgcgtctactccgggacgctgaagaaaggcgatgcggtgtggaacccggtgaagggcaagaaagagcgcatcgggcgtatcgtgctgatgcaggccaacgaccgtcacgaagttgacgaactacacgccggggatatcgcggcctgcgttgggctgaaggatgtgactaccggcgatacgctgtgcgatccggatgcggtgattaccctcgaacggatggagtttccggagccggtgatttcgctggccatcgagccgaagaccaaagcggaccaggagaaaatgggcatcgcgctgcagcggctggcggcggaagatccgtcgttccgtctgcataccgatgaagagtccggccagacgattatctccggcatgggtgagctgcatctggagatcattgtcgaccggatgaagcgcgagtttggcgtcgaggccaacattggccgtccgcaggtcacctaccgcgaaaccctgcgcaagaaagtgacggacgtggaaggcaaatttgtgcgccagtccggcggcaaagggcagtatggccacgtcgtgctgaccctggagccgctggagccgggcagcggtttcgtcttcgaggacgccaccaaaggcggcgtggtgccgcgcgagtacatcccttccgtggagaaagggctgcgcgaagcgatgggcaccggcgtgctggcgggttatccggtggttgacgtgaaagcgaccctgaccttcgggtcgtaccacgacgtggactcctcggagatggcgttccgcatggcggcgatcttcggcttccgggagggcgcgcgcaaagcggacccggtgatccttgagccggtgatgcacgtcgaggtggagacgccggaagagtacgccgggaatattatgggcgatctctcttcccgtcgcgggatggtgcaggggatggaagagcgcttcggcagccagatcatccgcgccgacgtgccgctggcggagatgtttggttattccaccacgctgcgctcgatgtcgcagggacgggcaacctacagcatggagttccaccattacgcggaagcgccgcgtaatgtggcggatgaaatcatcgccagccgcgcgaaaagctaa

SEQ ID NO: 264751 - DNA, 183 bp, Klebsiella pneumoniae
gtgaacctcacccgctcccaagtcacaaagtatcggatcacgtttgtcaggaccaaaggcaaaaagaaccgtagcatcccgattagcaaagagctgtacgaggaaatcattgccctggacggcttcaagttctttactgactgctacttcagtttttatctgtgctggggctttgttgaataa

SEQ ID NO: 264752 - DNA, 744 bp, Klebsiella pneumoniae
atgcataagctcgccaggcaaaaacatattctcgacaggcttagcgaaaccggtcagctgagcatcagcgaactggttgcagatctgcaggtgtcggccgataccattcgccgcgatctgagcgacctggaacaacagggcgtgctgcagaaaagccacggcggggccatcgcccttaacgtcccggccatgacgcgccagggcagaaacgctcttctcacccagaccaagcagcgcctgggtcagcagctcgccgcgcgcattccctctggctcgacgctgtttctcgacgccggaagcacgctgctggcggtggcagcccagctgaaagggccgttgaccgtgatcacggcttctctggatatcgctcagctgttcagcgaccgtgccgatatccagatgatcctgcttggcggccagtgggatagtaaacaacggctgttcgccggcagcgccaccctgtcgctggtcacccgctaccgggccgatatcgccattctcggcgcctgcgcgctccatgccgggctggggctgagcgccagccaggaagctgatgccgacgttaaacgcgccatgctggccgccagcgccgagcactggctggtggcggaccataccaaactcaaccgctgcgaaccgtggcgggtggccgggctcagcgacattcaccatctttttcttgatcgtccctgggctgagctgggggatgaccccgccctctctgtacatattgctgacgcttaa

SEQ ID NO: 264753 - DNA, 519 bp, Klebsiella pneumoniae
atgatcggtcaacgcatcgcagacctccaccagccagctgccgccgtccgtcgggccattaccttccttcaggtcgcccagcacatcgtccagcgccagcactttgcgctgacgagtggagacgatcagccgctcatccatatacaggcgcatcgccaccagctggtcgggccgctcatcggtactgccgttgatacagcgcagggtgatcagcgccccgtcaccgatccgcgtcacccgcggccgggtgctctcccccgccagggcatcgcgtacgttattgggcagcaacggggtggccgccagccagtcggcgctgtcgctatgggtatagttgagatgcagccagcagggcttctctttgtcgataatatcgttatcggcgagcggcttcacgcccccctgcccgtcgagcacccacgcgaagatcgcgtccggtatctgcaactccgagcctttaatcgcgtccactcaacctccgttaatccatatctgctaaattacgcgccttctctataa

SEQ ID NO: 264754 - DNA, 294 bp, Klebsiella pneumoniae
atgataaacgtgacgttcttcggccatatactgcgccagcagctgagcacgaaaggggagttctgccacgttaaaaagcgcgctcgaatcgtcctggtattcatcgctaccgaaagtttccacggtctcaccttgtgccgcgtcacctgcagtattggcatcaaccagctcgccactaacgggctcagcggatactccggaatcatcgccgtgatgaacatcagcaggcgcctgtcctggcttcaaagtccaggttcggccatcatcaccgagctggtagcgttcacaccatga

SEQ ID NO: 264755 - DNA, 306 bp, Klebsiella pneumoniae
ttgctgtttgtggttgacaccttttacccggatgtgacctgtttttacttcccaggcagtggttctatctaccatctgcgaagccagactggattcagggtcgtagggaacgtgccaggaatccattctctcggtgtcatgattcagcacttctctcatgacactcaaaaattcctcaatccccactacatggctgtggatatcagctgtattaagagcagcaagcaaatttcgacggacatcacggactttcaaaaattcgctttcattaacgcgttttaccttttgagaccaggtaaaaaataa

SEQ ID NO: 264756 - DNA, 198 bp, Klebsiella pneumoniae
gtgcgggatagcgacagcatgcttctccagggcgatgccggtgggaaaagtcgcttcgcgttcgagcagggcggcggggtagctgtcatgtacgacgcctcgcgccagcatctctgcgccaatgtgttccagtgcctgctgactggaactgaaatgaatgccggtacgaacaaacagttgactcatatatcctcttaa

SEQ ID NO: 264757 - DNA, 528 bp, Klebsiella pneumoniae
atgaaccgtttcattatcgccgatgcgagcaaatgtatcggctgtcgcacttgcgaagtggcctgcgtggtatcccatcaggaacatcaggactgcgcctccctgacgcctcacacctttcagccgcgtattcacgtgatcaaaggggtcaatgtttccacggcgatcgcctgccgtcagtgtgaagacgccccctgcgccaatgtctgcccgaacggcgccatcagccgcgataaaggctttgtccatgtgatgcaggagcgttgcatcggctgcaaaacctgcgtcgtcgcctgcccgtacggggcgatggaggtggtggtgcgcccggtgatccgccatagcggcgccggattgaacgtcgtggcggaaaaagccgaagccaacaagtgcgatctctgcttccaccgcgagagcggcccggcctgcatggaagtgtgcccgacgcatgccctggtgtgcgttgaccgcaacaaacttgagcagatgaatatcgagaaacgtcgccgtacggcgctggcctggtaa

SEQ ID NO: 264758 - DNA, 738 bp, Klebsiella pneumoniae
atgctgagcgataatcacttccgcctcgttgccccagcggtcaatggcggcgttgatgtatttcgaccacgccagcggatcgcggattttggcgccgcgcagagagtaagtgttgtgcagggtatgggtcacatcctctgccgcctcgatcattttcttctctttgacataccacagcatttccgacggcgcttccgagcccggcgccatcataaagtcataggtcagaccgtcgatcacttcctgctgaccggtatgggtaatgtagtgggtcggcgggatcagcgtaacggtacccgccgaggtggtggtgccgagaccggcgccgacctgtcccttagcgtccggcttcagcaggttgccgtacatgtagctggcgcggcggctcatcgcagtaccggccatgatgttctcggaaaccgcttcctccataaagccggcaggggcgtaaatcttcactttaccggccttcacgtcagcttcatcgaccacgccacggataccgccgtagtggtccacatggctgtgggtaaacagcaccgccaccaccggttttttcggccggtgggcaaaatagagcgccagagcctctttggccggttcggcgctcagcaaggggtcgatgaccgtaatcccggttttgccttcgataatggtcatattggaaagatcgagattacggatctggtaaacgccgtcggtaactttgaacaagccgccgatattgagcaattgtga

SEQ ID NO: 264759 - DNA, 138 bp, Klebsiella pneumoniae
atgactatgccatatgtactgttttgtgcctttattttatcaaaactggctgaatgggttgcatctaaacatatactcgtcgtgttttgtaataggtctaactttctgcagttttcatcatcaatatcaattccgtag

SEQ ID NO: 264760 - DNA, 180 bp, Klebsiella pneumoniae; identical to SEQ ID NO: 96849

SEQ ID NO: 264761 - DNA, 855 bp, Klebsiella pneumoniae
atgacgctggctttccagcgccagaagcgacagcagatcgtcgacgggatactgaacgtaagcgccatggtcggcggtttcaccataggggatccaccacaaacgcagcaccgacatcacgtgatcgatgcgcagcgcgccgcagttctgcatattggcgcgcagcaggtcgataaacggctcataggcgcgagcggcaatgatatgcggatccatcggcggcaggccccagttctggcccagcgggcccagaatatccggcggcgcgcccacggacgctttcaggcagtacagctcacggtcgcaccaggtctccgacccgccttcggcgacgcccaccgccagatcgcggtagaggccaatcggcatcccgtcgcgctggctggtttcccagcaggcggcgaactggctccaggccagccactgcagccagagatagaaactgacgtcgtcctcatgctcaatgcagaaggctttcacctccgggctgtcgatatcctgaaaggccttcggccaggccggccagccccagcgcagcgggtcctgttgtacctgccaggcgtgaagcgcatcgaaagcggcctgccagtagaggctttccccttcgcgcagaacaaactcgcggaacgctgtcatctgctcatcttcacgacgagagaatcgtttccacgccatacgcagcgcggtcattttcagcgtggtgaccgcggtatagtcgacatcatccgtttgccgcgccgcctgcaaggcctgctgggtcgctgcggactgccaccacgcctgcgcctcttcgctacgctggaaatcttcaaccgcattaacgtcgatgtagatgacgttcagccagcgacgtga

SEQ ID NO: 264762 - DNA, 777 bp, Klebsiella pneumoniae
atgctggcaaaacggataatcccctgcctcgacgtccgcgacggccaggtagtgaaaggcgtgcagttccgtaatcacgagatcattggcgacatcgtcccgctggccaagcgctatgccgacgaaggggccgacgaactggtgttctatgatatcaccgcctccagcgacggtcgggtggtcgacaagagctgggtgtcgcgggtggcggaagtaatcgatattcctttctgcgtggcgggcgggatcaagtcgctggaagacgcggcgcagatcctctccttcggcgccgataagatctcgattaactcccctgctctcgccgacccgacgctgatcacccgccttgccgaccgctttggcgtgcagtgtatcgtggtggggattgatacctggtttgatgcagagaccggcaagtatcacgtcaaccagtataccggcgacgagagccgcacccgggtgacgcagtgggaaaccctcgactgggtggaggaagtgcagaagcgcggcgcaggcgagatcgttctcaatatgatgaaccaggacggggtgcgcaacggttacgacctgcagcagctggcgaaggttcgcgcggtgtgccacgtcccgctgatcgcctccggcggcgcgggcactatggaacacttcctcgaagccttccgcgacgccgacgttgacggagcgctggcggcctcggtattccacaaacagattattaatattggcgaactgaaagcgtacctggcggcacagggcgtggagataagggtatgttga

SEQ ID NO: 264763 - DNA, 570 bp, Klebsiella pneumoniae
gtggtcttcctgccggactattgtgtatcggcagcggaaaaactgatcccggcggcggatatctccgagcagatctccaccgcgggtaaagaagcctctggcaccggcaacatgaagctggcgctgaacggcgcgctgaccgtcgggacgctggatggcgctaacgtggaaatcgctgagcaggtgggcgaggagaacatctttatcttcggccacacggttgaagaggtgaaagccctgaaagcgaaaggctacgatccgctgaaatggcgtaaaaaagacaagctgctcgatgcggtgcttaaggagctggagaacggcacctacagcaacggcgacaagcatgccttcaatcagatgctgcacagcctgctgcaaggcggcgatccgtacctggtgctggccgatttcgaagcctacgtagcggcgcaaaaacgggtagatgagctgtatcgcgacgaggaggcctggacccgcgcggctatcctcaacaccgcgcgctgcggcatgttcagctccgaccgctcgatccgcgattatcagcaacgtatctggcaggcgaaacgctaa

SEQ ID NO: 264764 - DNA, 636 bp, Klebsiella pneumoniae; identical to SEQ ID NO: 264648

SEQ ID NO: 264765 - DNA, 276 bp, Klebsiella pneumoniae
atgcagcgaaggcacggcactgacccaggcgtagctctggacaaaggccgggatcgccagcggggctaccgccagcgccgaccacagctgccgaccggcaaggacggtacgttccgtcagccaggccagcgtcacgccgagcacaatgctgatggggaccgccagcaccgtcagccacagggtattgctgagcagctcccctacccgcggacgaaagaccagcgctttgatggtcggccagccggtgtcgaacccaaccgccaccacaaaccctaa

SEQ ID NO: 264766 - DNA, 237 bp, Klebsiella pneumoniae
gtgctatcgaagctggtgccgctaaacgcgatggtcaccgccgacgcatcggcggaacagctggaaaagaccagcttaaccggcacgctggcgccgctcgccccggcatgtccggagaacgtctgcgaggagacggtgcctaaatcgatactgttcgacggctccacggccacctcacaggaaggcgcttcgatggtgcctgtgacgttaaaattgaccgtgctgctgccctcataa

SEQ ID NO: 264767 - DNA, 1107 bp, Klebsiella pneumoniae; identical to SEQ ID NO: 251989

SEQ ID NO: 264768 - DNA, 267 bp, Klebsiella pneumoniae
atgatttatatataccacaacagtaagccagattatttttctgaattgggaacctataacggatataccttttacggtgttacagaggataaccgtactcttgaggatgcggtgggggctttttccgagttgagcccgcaagtctataagcaaaatggcaattttatttattatattcgtgtccctaataccaatatttttgttcagtgtctgaatcaactgaatgtttcggagcccaaatgcatcactatcaaagaacggtactga

SEQ ID NO: 264769 - DNA, 744 bp, Klebsiella pneumoniae
atgcataagctcgcccgacaaaaacacatcctcgaccggctgagtgaaaccggtcagctgagcatcagcgaactggttgatgcgctgcaggtgtcggccgataccatacgccgggatctcagcgagctggaaaaccagggcgtactgcagaaaagccacggcggcgccatcgcgcttaacgtcccggcgatgacgcgccagggaagaaacgccctgctccccggaaccaagcagcgtctcggccagcaggtcgccgcgcgcatcccctccggctcgacgctgtttcttgacgccgggagtaccctgctggccgtcgctacccagttgaaaggccccatgaccgtgatcaccgcgtcgctggatatcgcccagctgtttagcgaccgcgccgatatccagctcatcctgcttggcggccagtgggacagtgagcagcggctgttcgccggcagcgccacgctgtcgctggtggcgcgctaccgcgccgatatcgcgattctcggcgcctgcgcgttgcatgccgaactggggctgagcgccagccaggaggccgatgccgacgtaaaacgcgccatgctcgccgccagcgcggaacactggctggtggcggaccataccaaagtcaaccattgcgaaccctggctggtggccggtctcagcgacatacaccatcttttcctcgatcgtccctggcctgagctgggggatgaccctgccctctctgtacatattgctgacgcttaa

SEQ ID NO: 264770 - DNA, 681 bp, Klebsiella pneumoniae
  misc_feature (546)..(555): n is a, c, g, or t
atgaaaaaactgatcttcttatgcatgctggtactgtgccccctctatagctgggcgacctgcagcggaactaactctggcgatgtctcaatgaccaacctgccggaaaagatcctggtcaacgccgggagctataccgccggcaccgtgctgtatgactcgggaaaaattacccgcgcgcaaacagcatttaccaactgtcagggcaacgtctatgcggtatttgcctggtcctcgaacaatgccggggcgctgataggggataatatctatgccacctcggtgcaggggattggcctccgcgtcaaggtgtggctcaatatcagcggtgaatatgaaggtgatactgatgatttcagccccgactcgcaggtacattatatcggggatgtgaactattacctcggtaagcctaccggtctgtttgattattatgcctcgacccattacaccccggcatatcagctgcagctggtggccaccggcggcgctattgccagcaacagtcaattatcgttcagcgatccggtggccacggtatcggcnnnnnnnnnngcgctattgccagcaacagtcaattatcgttcagcgatccggtggccacggtatcggcaaaagataatggcgggacgatctccatttcgcggttgcacattagcggcaccaccagcatccagatga

SEQ ID NO: 264771 - DNA, 480 bp, Klebsiella pneumoniae
atgcccgcccaccttcacatcaaaaccgccctcgccggcaaaaatccccgtctgcgcctccaccgacgcccaggtgctgtgcattttgctctggctcaggttgagagaacccgaaccgccgcccatgctgccgctcgcccccgcactgccgctacgctgcttcgaatcgtagttatcgctgtcctgctcgctgctcagcgtcaggttacgcccgacgtccattgtcacctgatggccgctcacctgcgccccggtcagcgtcgtatcgcgaccgctgacgatagtcacccgctcaccggcgctgagggtcgtttcgttatgcgtcaggctgttgcccttctcgtggcccttcgcggcgttggcgctggcgctgaccgtcagcccgttcgcgccctgaccgaagttaataccgacgccaaacgaactcccatggctctcgtttttaccgctcagggtgctggcgttctccgcagagaataa

SEQ ID NO: 264772 - DNA, 390 bp, Klebsiella pneumoniae; identical to SEQ ID NO: 219905

SEQ ID NO: 264773 - DNA, 465 bp, Klebsiella pneumoniae
atggatcgccacacactcccgactaaaattatccactacagtcagcgcccggaaacgtcgtccgttaaacaggttatccgacacgaaatccatactccagcactgatcgactccgctcaggaccggacgttgctgacgatgtgctgcactgacatgcctgcgggggcgctttttgcgcaggttgaggccttccagacagtaaatccggtgtgttttcttgtggttaacaggccagccttcccgccgcagctgaatatgaatacgcgggcaaccgtagcggatccgggtttccgctatttcccggatacgcagggttatcgcccgatcatcccgccggctctgccagtggtaaacggttctgctctgcatcagcagtccgcatccccgtcggacactgatacggtaagcctcccgcagaaaatgcaccgcctgacgcttctgagccggcctcagaactttttttga

SEQ ID NO: 264774 - DNA, 885 bp, Klebsiella pneumoniae
atgagcctgcttttcagcgctaaacgtaagaacatcaatctcagtacgccgcatcaaacgttgatgcaaaacgcgcgcagatggctggaaaaatgttgtgaagagcagaaaccgcagctgtgccggacatggggtaaaccgctgcgtcattgtatctatattgctctgctgatcccgatcgtttgcggcatcggatttagcccggcggcggcggcgctcaccgttcccagtctgctgtttgtatcggtcggcgaggtgatgacgtatttgtgcctgaggtttttacgcaacccgatgaaaaccctgcgtagtttgggaccagttatgatcctgatggcgctggtatttagccctttcgccaccgtggcgggcggtgttttcctgcttggcatgctacccctcacccaacttcctgccggctatcctggcgccttgttaaccgccatcgcactgtgcgcgttcgtcgcctggaaaacgccacgctatacgcagaagggtttaaacgatctggccgtcgccaaagggttgaaactgtatattaaaacggccgaagagaagcgttatcagacactttatccacctgaccagatggtcgcgcactttgaaagcctgctgccggtcgctctggcgctcggcgtaggaaagaccctggcgaacacttttgcccgatacttaagcagcaccggcgcgatatcggaagtgttacagcagacggactggcgggatatgcatcatttctaccagagctgtcattccgcggccagtgagaagccggtggagcgttcagagggtggctcgtcaggttccggctatagcggctccggctcttccggtggcggatcgtcaggcggcggttccggtggcggtggcggcggtggctggtaa

SEQ ID NO: 264775 - DNA, 882 bp, Klebsiella pneumoniae
gtgcatgatagaggcgatgtatttatccatgccgctatccaccagcacctgcttgaaggcgccgccgccgccgatgatcaacagcatcatggcgatgattttaatcgaagaggtcagggtatcgttgatctgctccatggagcggccgcggttcaaaccgaaggtgaacagggcaatcagtaccgcaatcagggtggccatcaccgggtcgccgaagaactcggcaattggcaggaaggcgtggcctttcggcaggatcatctcagccacggcgcgcatcgccatcaggatcaccggaaccaacgaggtccagacgctgacgccaaagccaggcatctcttcttctgtgaacactttcgggttatgcaggccttccgggatcggcttatctatccctttcaggaagcgcgcaaacaccggtcccgccaggataaccgtcgggatagccagaatggtgccgtagagcagcgttttgcccatatcggcatggaagatggtggcgatcgcggtcggacccggatgcggcggcaggaagccgtgggtgacggagagcgcggctgccatcggtacgccgacgtacagcaacggaatacgggccgaggcggcgatggtgaacaccagcggcagcatcagcacgaagcccacttcatagaacagggcgaagccaacggtgaagccggtcaggaccaccgcccactgaatatgcttcttaccgaacttattgataagcgtggtggcgatacgctgggcgccgccgcagtctgccagcagcttaccgagcatagcgccgaagcccatgatcagcgcgaggctgccaagggtgccgccaacgccgtttttgatggagacgatcactttatccagtggcataccctgcattaa

SEQ ID NO: 264776 - DNA, 822 bp, Klebsiella pneumoniae; identical to SEQ ID NO: 139181

SEQ ID NO: 264777 - DNA, 279 bp, Klebsiella pneumoniae
atggggtataccgataatcgttttccagcccagccacattggattgtaattgccatcaacatcttcgctgtgttcaatatagcctcccagcgggatcaggatttgctgagcgtgatgttcgaccagccacggggagtgcatggaatgccagtcatccggatgctcgatctgctggtcattttgaaaggattggcgaaaaagaccatattcgtatttgatgccatgcccggatgcggcaatatcaagggtggccatcgaatcgataaaacaggcggctaa

SEQ ID NO: 264778 - DNA, 327 bp, Klebsiella pneumoniae
atggtggtctttcgccccctgacgaccagtgtaaacatcaatggtgcgcaaccttgcatctctgccatccgcattcagctgcccggcggcgtcaggcagtacaagctggaaacgggctttcccgattggccagctccagtcgttgcccgtcacgttccagtacagctcatcccagtcatggaagcggctgaaatggttgctaacctgatagcgaatttcatagttataaatacctggcttcagggtgcgatcggcgctgccaatgcgcacggtcagcgcttttgttgtgcgatcgaggctgtagggttcagggagtccattgcgtga

SEQ ID NO: 264779 - DNA, 564 bp, Klebsiella pneumoniae
atgcgcgagggcagcatcgtggtgctggccatcattatgggtctgatgctggcctttgatatgggcggcccggtgaacaaagttgcctacgccttcatgctgatttgcgtttcgcagggcgtctacagcgtggtggctatcgccgccgtcggtatcgccgtaccgccgctgggcatggggctggcgacgctgattggccgcaaatatttcaccgccgaagagcgggaaaccggcaaagccgcgctggtgatgggctgtgtcggcgtgaccgaaggggcgattccctttgccgccgcggatccgctgcgcgtcattccggccaatatgattggcgccgccagcggctgcgtcaccgccgcgctgatgggcgcccagtgttacgccggctggggcgggcttatcgtgctgccggtggtccagggcaagctcgggtttgttgccgcgctgctggtcggcgcctgcgtcagcgctgcctgcgtcatcctgctgaaagccttcgccaaaaagaaacccactaacgtcgccactgacgatgaactagaccttgatttcgaaattaactaa

SEQ ID NO: 264780 - DNA, 432 bp, Klebsiella pneumoniae
gtgccgctgggttcggtggtgggcgccaccccggacgggcggctggccggagaacagctggcggacggcggcctgtcgccgatggttggtcaggattcccaggggccgacggcagtgctgaaatcggtcagcaagctggataactatctgctgtcgaacggtacgctgctgaacgtcaaattcactccggcaacgctggacggcgacggcggcctgaacaaactggccgattttttacaggccttctgcaagctcaagctgcagcatattcagttcaacgtggtcaatgccgacaccctgcgtgaagcgcagcagcggccgcaggactttgccggtctggtggtacgggtcgcgggctacagcgccttctttgttgagctgtcgaaggagattcaggatgacattatccgccgcaccgcgcatcagctgtga

SEQ ID NO: 264781 - DNA, 513 bp, Klebsiella pneumoniae; identical to SEQ ID NO: 139306

SEQ ID NO: 264782 - DNA, 144 bp, Klebsiella pneumoniae
atgttggttgtcggcaccatagccggccgtaaaacggatctgcgtaagcgcatagtcaaaaccggcacgttcagcaatttgcgccagcttacggttgtagtcgatatcccaactggtacgctgcgggatattactgatcactaa

SEQ ID NO: 264783 - DNA, 573 bp, Klebsiella pneumoniae
atggtcggcggatactgctccgtcggctgctatctcttcagcttccttcccgcctatatcctggcgcatccattcacgtgctgcttccggcgtcatgaccagcggccggcggtcgtgaatatctatcagccctttatctgctgctgcggtgacaatcaggaagccttcagcttcgtcgccgcgctcgaaaggaacgctgccgatcgcagccatgaagattggctggccatcggcacgatggataaagtagggctgcttcttgtcgccttcttttttccattcgaaccatccatcagcaaagcagatcgcccggccatgttgccagagaggtttaaacattctgctggcggccgccgtttcaacgcgtgcgttaatcagaggcggtttatcccaccacccgggtgcgtaaccccagtgaaccggatcgaggtgcatctgttcgtctcgttcgctcagaagcaaaactttagtccccggcgccacgttgtaccggccgattggttctggatcataggcgatatcccgctcagcttcttctacaagataagccaggtattcttcgcgtgtctgtga

SEQ ID NO: 264784 - DNA, 309 bp, Klebsiella pneumoniae
ttgcagttgttcttctatttcgccaagggattgctgcagcgagaggaagttttcgctggctttgagttccggataggcttccgccagggcgaatacacggctcaacgttccggcatagtgctgctcgctgtcggccacctgttggggattaccaatcagaacgctgcgctggcggccgatctcttccagcagctccttttcgtgctgcgcatagcgcttgaccaggctgaacagattgggcgccagatcgtgacggcgcttgagctggacggcaatgccgctccaggcttcgtctttgaaacggcgtaa

SEQ ID NO: 264785 - DNA, 528 bp, Klebsiella pneumoniae
atggccgcgcgcgtttccgactggtatttcaccaacggcaacacgcctgaaggcatcaaagcacaggtggatgacatccggcgtaaggcggcacaaaaccagcatcaggtgaagatcggggttaacggcttcgttattgcgcgtgaaagcgaaaaagaggcgcagtcggtgctgcgggaaattattgataacgccaatccggacgcggtgaaagggttccagcacgaagtgataaacgccggcagcgcatcgccggagggcgagggcaactgggccaaatccagctttgaagatttggtgcaatacaacgacggctttaaaaccaacctgattggcacgccgcagcagattgcagagcgcatcattgcgctcaaacagtcaggcgtcaatctgctgctgctggcattcctgcatttccaggaggaagtcgagttcttcggaagggaagtgatccctcgggtgcgtgagctggaaaagcaatctcagcctgccatagcccacgtcgtgccagaagccctcaagtattga

SEQ ID NO: 264786 - DNA, 264 bp, Klebsiella pneumoniae
atgagcatgacggggatcctcaaccgggggatgcagcgttatattgccgacagcaacagcgccctgctgggcctgcagccggaagactggctggagatggcgacgccggttaacattccgggcaccagcactgagtacccgaactggcgccggaagctgtccgtcaccctggagcagatgtttgccgatgaacaggtcaataagctgatcaaggatctggataaacggcgcaaggcggcgagcaagaaagccgccgccagatga

SEQ ID NO: 264787 - DNA, 213 bp, Klebsiella pneumoniae
gtggcgggcattggacccaaaagcgccgcccagctgctgaacgagtttcaggacctggaggggctgtacgcccgcctggccgaggtcccggagaagtggcgcaaaaagctggccgcgcatcaggagatggccttcacctgccgggaggtggcccgcctgcagaccgacctccagctggacggcaatctgcagcagctgcggctgacgcgctga

SEQ ID NO: 264788 - DNA, 354 bp, Klebsiella pneumoniae
atgaccccggagaaattcattaatcagaccaacggcgtcacgccgcgacgctgggtgcagcaggctaaccccggcctggccgcttttttgcaccaacagctgggggaagggtggccaaccgatttacccttgctgtccagtctggaaagcctggccgatgatactgctgttattgataatatccgggccattaaatttgccaacaaaaccgcgctcagccagctggtcgctcaacgctatggcatcgtcctcgatccgctggcgatgtttgattgtcaggtcaaacgtattcatgaatataagcgtcagttgctcaatattcttcatgtgatcgcgctttaccggctttgttga

SEQ ID NO: 264789 - DNA, 354 bp, Klebsiella pneumoniae
atgcaggtaaaatatttagcagggattgtcggcgcagccttactgttggcaggttgcagttccagcaatgaattaacctctgccggccagaatgtgcgtttcgtgcaggagaatccgggcgcagaatgtcagctgttagggaccgcgacgggtaaacagagcaactggctctccggccagaatggcgatgagggcggttccatgcgcggtgcggcgaacgccttgcgcaaccaggcggcagcaatgggtggcaacgtgatttacggcgtcagcagcccgacgcaaaacctgttgtcgagctttgtacctaccgacagcgaaatgaacggccaggtttataagtgcccgaactga

SEQ ID NO: 264790 - DNA, 396 bp, Klebsiella pneumoniae; identical to SEQ ID NO: 180578

SEQ ID NO: 264791 - DNA, 213 bp, Klebsiella pneumoniae; identical to SEQ ID NO: 264787

SEQ ID NO: 264792 - DNA, 171 bp, Klebsiella pneumoniae
gtgcgctacagctgggttacctggagccatcgctatcagcacactgatgcctattttggctctacctgctgcacgctaatcgaacaggacggcagaccgcagatcgtccgcaaaaccgtgcgcctgaacaacgactatatccgtcaggtgattgacgtttaccacatttaa

SEQ ID NO: 264793 - DNA, 201 bp, Klebsiella pneumoniae
atgcaggggcgttccctgacgctgccgagcggcgcagggcatgatgctatcgccatcgccgagcgctggccatcggcgatgctgtttgtgcgttgcctggggggcgtcagccatcacccggcggagtcggtgaccgccgccgacgtcgggctggctatcgacgctttctcccgggcggtagagaaggtggccgacgcctga

SEQ ID NO: 264794 - DNA, 216 bp, Klebsiella pneumoniae
atggccattcagatacgcatcgctgaccagaaactgaatagccagccggatatcttcatccgcgataaatccgcggacggtctccgggagcgcctgcagctcttcatcactggtgaccagcttgcagtagtaatcacgctcgatgctccgctgcgcggcgttcaccatttgcgtgagcatggcgtcatgctccgtgaaatccagttccaggcgtag

SEQ ID NO: 264795 - DNA, 228 bp, Klebsiella pneumoniae; identical to SEQ ID NO: 247929

SEQ ID NO: 264796 - DNA, 531 bp, Klebsiella pneumoniae
atgactgatcgccagcaccagcagatcggccttaagctgcaggccgccgtcggtggtcaccgtcccctgatgaaaagcgagcgcccgatcgcgcaggtggcgaagccgtccgccgctggacgccgcggcgtcggcaaaacgctgcgccacatagcgaccaaactggccgcgctgagggtagacggaaccgtccgggcgcagcgcctgcacatcgacggtaaagacaggctgatggcggtaccaatgatcgaaggcgccctcttcgtcgccggccagctgcatgcgagcggccggaacgttaatccggtgcgtcggctccgcagtggagtaggccaccccggccccgggggactggcgcggctccagcagcgtcacgcgcaccccattcggcgccaggcgcagcagctcaatcgccaccgccgcgccgctaaagccgccgccgataatcacgatatgcggttctgcactcatcgctgccctcctccggtatgctgtctcatggtcgcgctccgggccatcagctggcgctga

SEQ ID NO: 264797 - DNA, 258 bp, Klebsiella pneumoniae
atgaaagaggttgagtcgctggtctacggagggcgtttccaccacagcaatcacccggtaatgaactggatgatgtcaaacgtcaccgttaagccggataaaaatgacaacattttccctaataaatccacgcctgaagccaaaattgacggtcccgctgcgctgtttaccgcaatgagtcgaatgctggttaacggtggtggtgaagttgacttcctgtccactatcgaccctgacgaagaccttttacttctatga

SEQ ID NO: 264798 - DNA, 1653 bp, Klebsiella pneumoniae
  misc_feature (1609)..(1618): n is a, c, g, or t
atgctggtggtgctctccgagtttggccgcgatcgtgtcgagttccagcgttatgaagggctgatgagcccggagatcaaacgtcaggacctgccgttgggtaaccagcacgtgcagaaaatgcaggccgcaatggcggccctcgactggatcagcaaagttggtaaattcaaagatctgtggggcatgctgaaaaaagctgagcataatcagctgaaatatgatcgaatgtatgccccgcttatccgactgattgaagaggtactgagcggtggaagacggctaaacgagttgacgcgctaccttcaggacgctctgcaattatctgacggtgcggtgcaaaatatcctttggagcccgccgcgctcaattatgtttgagtttctcccctccctactgcgtaacctcagaacgcgctggtcggttaacggcgtggagtgggccggtctgcgaccgagtcaaccgcatgacgagagcgaacaacatcggagcaattcacccgctccggaatacatcccgcaaaacctgttcagcgagttgaatttgccggaactggacattcgcctgaagcgtggacgtgatgacgaagaacaatgggaaaccctctcgttctggcaggggatgcgtgagtttgctccagggcgtctgtctaaacgctacgccattaaatcgaacaaaagtacggattggctggtcccacaaacctacgagccggtggcaggagaagggcggcaatatgttgatttccagataagcgatgcgttcggcgatagttggcaaaaagagtgtgaagtcgagtatcagggaaaaacgatcaaggttgttaaaccgtcaaaggttatgaccacccgggctgatattcgtcgtataaatgataaaagtaatgcgcaactgcagtggatactccacgtcattaaccctgcggttgcgacgcccgacgaggtgccaaagggaccctggaagcaaactctgcgcgatatcacgttttacaaccaccagcatatgacgtcgctggaactggttcgcttttctaccggatcgaaggcgtcgatccggttcagaaataaggaacgagctcacgttgatttcacctgggtgaatggagaggaacaggttggcgtaggaagtcgtcaatgggtggatgcaatgcgcttgcgttttaacctctcgtgtgatgacgttatgggcctgctgcatcaggcagaaatccagcgaggcatgcgccccgtttattttcaacatcttgtaagacagtcatctgaatttgaatttgatagctttaacgcggactgggctattgaatgttttatggctcagcttgcggagacgttggcaagcggcgctcacacctcggttgagtcggcgctgcgagaaatggcttccgaaaaagggatgaaaaggctggctgatatcccggccagcctgtttcagccggataccgaaaatgaggctggcactgaccaagcgctacagatcggcctccataaactccttgaacgaccggatatacagcaactgctgttgaactgcgcacaggcactctggaaacccttggctgagatcggcggctttgtcgaatgggcgcggcaggtattagcggacactttgnnnnnnnnnncagcaaacgcgaagtacattacttccggatgttga

SEQ ID NO: 264799 - DNA, 855 bp, Klebsiella pneumoniae
  misc_feature (596)..(605): n is a, c, g, or t
gtgacagactcctgctggatgcgcgatctccgcacgggagcagaatggctggaaatctggctctgcgagatggagtcaggcggaagcgggattttgatccgtttacagaaaaagtgggctgaagaccctgtatccttcctcaatgtgcttgtgcgaaatctttcagccagcgactacgagcagatcgattacgatctgcgcaccgtgttgcagatgctgcaaacggatcacgcgcttcgtatggcgatctctgccgttcgtgaagccagtaacatggatgcccggcaggaggctaacaagaatcttcatttgcagctttcacagcgcggtttgcgcctttctcacagctttacaacggtgctgtactcgcggatcctgcgggcgggtagcggcgatgacacagacgcccagctttatcagctactgtcggactggtcgtctcttgaaacaagaacgggtattgagttcagtatgaataccatggcgcacgcactggcggtgaatgcgcttggcgtcaaaactgatgcatccttagtgtttaacgcgcagtgccggaaccaaaacctgctctcgccgcgtggttacacggtccggcnnnnnnnnnngtccggcaggcagagctcggtttttacaatatgttttgctcgcgtaaagttacgactgagcgcctgcttgccggcgcgctatttagtgagcagatcgaaaagatttcccttgatgaggctgactggcttgggcaactgcatatggcgttgtgtaaagccggtcgagttgagttacaactcacgcgcgcgcagcgaaatcaattacatcaggtcattaacaccgtgcaaattgaacccgtcgatcatttag

SEQ ID NO: 264800 - DNA, 165 bp, Klebsiella pneumoniae
atgcgaatgccggattggtttgagccgcataactggaaggagaccgtacttgctgccgcggagcaggcccggagaaacgtggatgctcactatggcgatcgccccgtccgccatcaattgcttgcaatgaaggcgattattctatgtacccgcgacatgctgtaa

SEQ ID NO: 264801 - DNA, 204 bp, Klebsiella pneumoniae
atgtcccaatcccttatccgcttacctgaagttcagcgcagaaccggctatagcaaggcttggatctatcgactcatggctcagaaaaggttcccttcttccattaagattggtgcgcgtgctattgcctttatcgaaagtgaaattgatgattggataaattcttgtattgatgcctcccgaaatggaggagagaatgcttaa

SEQ ID NO: 264802 - DNA, 558 bp, Klebsiella pneumoniae
  misc_feature (377)..(386): n is a, c, g, or t
atgttcccgtttttgggtgtgttcaatttcggcaacgctttcttccacaccaagaagcctgtaaaccgggatttgtttagtctttccacgccgttcacctgtatcttcaatcagcccgatcgaaaccagatactgcaggctcgactggaccgttttcttatccagctcagttgcttctgccagcgcaggaatggatggaaaagcacagagatcagctccgcacatgtcggccatccaggtcagaacagcttttgcagaggacttccctgtcttgacttttttggcccatcgcattgcgtcaatgctcatgaagcccccctatttttctgtacggtactcattgtcaaaactcgattaaaaaaactgtggcgctacgnnnnnnnnnnaaaaagctgtggcgctacggcgcttatgctcgccagtagtggtcccgccgcatctgcaggaagcatgttaaaaagtgcaattgctgcctcccgaatttcacgctctaacttttgcaacggagcgccaagcaattttgcctggtgcgcttcgctacactctttgattgcttga

SEQ ID NO: 264803 - DNA, 210 bp, Klebsiella pneumoniae
ttgaaaatcgattggcatagctcattactgaccagtaacaatagcatggataaaaactacaaaaatacacaaaacgttcgtcttttcatgattaaggaatgtggtgaagattttcgattcgatcgtgaatttatgatgtggatacgtaatgatgatccgaaaactttgggtgatgttatcaatgagtggaaacgcagacattcgttttaa

SEQ ID NO: 264804 - DNA, 1254 bp, Klebsiella pneumoniae
atgctggaacaaatgggcattgccgccaaagcggcctcctggcagctggcgttactctccagccgggaaaagaatcaggtactggaaaagatcgccgattatctggaagcgcagaccgacgatattctgcgcgccaacgcggaagatttagccgaagctcgcgccaatggcctgagtgaagcgatgctcgatcgcctcgcgctgaccccggcgcgtctgagcggcatcgccagcgatgtgcgccaggtgtgcaatctggccgatccggtcggccaggtgatcgacggcgggctgctggacagcggtctgcgtattgaacgtcgccgcgtcccgctgggggtgattggcgtgatttatgaagcgcgtcctaacgtgacggtcgacgtcgcctccctgtgcctgaaaaccggcaacgcggcgatcctgcgcggcgggaaagagacctggcgcaccaacgccgccacggtgaaggtgatccagcaggcgctgcaggagtgcggtctgccggccgccgcggtacaggctatcgagagcccggatcgcgcgctggtgggcgaaatgctgaagatggataaatacatcgatatgctgatccctcgcggcggcgcgggcctgcacaagctgtgccgtgagcagtcaacgatcccggtgatcaccggtgggattggcgtgtgccatatcttcgtggatgaaaccgccgagatcgcccccgcgctgaagatcatcgtcaacgccaagacccagcggccgagcacctgcaataccgtggaaacgctgctggtgcaccgcaacatcgccgataccttcctgccggcgttgagcaagcagatggccgagagcggcgtcaccctgcacgccgccccttccgccctccccgcgctgcaaaacggcccagcgaaggtcgagccggtgaaagcggagcagtatgacgacgagtatctgtcgctggatctaaacgtcaaagtggtggctgatatggacgaggctatcgcccatatccgcgaacatggcacccagcactccgacgccatcctgacccgcaccctgcgtaacgccaaccgctttatcaatgaagtggactcttccgcggtatatgtgaacgcctccacgcgcttcaccgacggcggccagttcggcctcggcgcggaagtggcggtcagcacccagaagctgcacgcccgcggcccgatggggctggaagcgttaaccacctataagtggattggtttcggcgacgataccattcgtgcgtaa

SEQ ID NO: 264805 - DNA, 1104 bp, Klebsiella pneumoniae
atgagtgaaagccagacgctggtggtaaaactgggcaccagtgttttaacaggcgggtcccgtcgcctgaaccgcgcccatatcgtcgagcttgtgcgccagtgcgcacagttgcacgccatgggacaccgtattgtcatcgtgacctccggggccattgccgccgggcgcgagcaccttggttacccggaactgcccgccaccatcgcctccaagcagctgctggcggcggtgggacaaagccgtctgatccagctgtgggaacagctgttttctatctatggcattcacgttggccagatgctgctgacccgcgccgacatggaagacagagaacggttcctcaacgcccgcgacactctgcgcgcgctgctggataacagcatcgtcccggtcattaacgaaaacgacgccgtcgcaaccgcggaaatcaaagtgggcgataacgacaatctctccgcgctggccgcgatcctcgccggggcggataagctgctgctgttaaccgaccagccaggcctgttcaccgccgacccgcgcagcaacccgcaggcggagctgattaaagacgtctacggcatcgacgacgcgctgcgcgccatcgccggtgatagcgtctccggacttggcaccggcggcatgggcaccaagctgcaggccgcggacgtcgcctgccgggcggggattgataccatcatcgccgccgggaaccgcccggacgtcatcggccatgcgatggcaggcctgccggtaggtacctgcttccacgcccaggagtctccgctggagaaccgtaagcgctggatcttcggcgcgccgccagcgggggaaatcaccgtcgatgcgggcgcgacccaggcgatcctcgaaagaggcagctcgctgttgccaaaagggatcaaaatcgtcagcggcaacttctcccgcggcgaagtgatccgcatccgcaatagcgaaggacgcgacatcgctcacggcgtcagccgctacaacagcgatgcgctgcgccttatcgccggccagcactcgcagcaaatcgatgccattctgggctatgaatacggcccggtggccgtccaccgcgatgatatgatcatccgttaa

SEQ ID NO: 264806 - DNA, 462 bp, Klebsiella pneumoniae
atgaccattgacggcggatcggacgatctgatcccggtggtggcggccctgcatgatcagatgcacacctggcagggaaccccctatgaatggggcggtactgaacaaagcggcgtcgactgctcgggtttcgtctggcgcacgctgaaggatcgctttaatctgccgatggagcggatcaccacccgcgagctgctgcacatgggcgtgcgggtcaataagcgggatttacgtcccggcgatctggtgttcttccgcacccgggccgggatgcacgttggcttttacgataccgatcataatttccttcacgcctcgagcagccagggcgtgatgcgctcttcgctggacaacccttactgggaatcggcgttctatcaggcgcgtcgtctgccgaaggagtataacgcgcagatcaccatgaacagcgacaccctgcatctggcgaagaatcgccgctaa

SEQ ID NO: 264807 - DNA, 207 bp, Klebsiella pneumoniae
atgccagggttcaaatttgaagactttaccaaccaggtgcagtttgcgcagctttcacgcgcctacaaccgggaggcgataaaatcgttgccgacagtggacgcgagctgggcaggcaaacctgtcgatattctctttgcggccacggtggttaacggcagcctgcaggatgcggccgctcttgcgctaaaacaggaggcgcgctga

SEQ ID NO: 264808 - DNA, 306 bp, Klebsiella pneumoniae
gtgatttccggcaacgataccatggcgctgggggcggaagcggcgctgaaagccgcgggtaaaaacgacgtgattgtcgtcggcttcgacggtagcgactacacccgcgactcgatactcaagcagggcaacattaaggccacggttctccagcctggctggaagcaggcgcaaatggccgtggaacaggcggactttttcctgaagaacgggaaagcccaaaaagaagagaagcagttgatggactgcatcctcatcgatagtggcaatgcgaaaaaactcaacatgttcaacctcagcgagtaa

SEQ ID NO: 264809 - DNA, 351 bp, Klebsiella pneumoniae
  misc_feature (15)..(24): n is a, c, g, or t
ttgcaacctggagcnnnnnnnnnntggagcgatccgcgaagtacgacgctctggctcgatgattttggctcaggcaatgcgggtattagcgcgattcgaggctaccattttgattatgtcaaaatcgataaagacttcttctggcatttaatgcaaaaagattctggccgaccattgatggatgcgctgatcacctttctttcccgtaaccaccataatgtgattattgaaggcgtagaaagcgaagcgcacaagaaatggttacagggcatggagtggtttgctattcagggacactactggaaggaagtcagtattgaacaactggtcaaagaagatatcaaggtttaa

SEQ ID NO: 264810 - DNA, 816 bp, Klebsiella pneumoniae
atggctgttgtcagagccgcgcatgaaaaggggatcgtgatacctgccgtcagtaatttcaatgccccgtcggggaaaggtgtctcaggcgatgtcgaaggtcaacgggttgttattggtaatgaactggctatgcaggaaaacagtatcgttattgataatcaaaaggccgttgcggatacgttgcggatggaaggcgctaccgttatctatgtggccacagacgggaaccttgcaggcctgatagctatctcggatcccgtgaaagcaaccacgccggatgcgcttaaagctttgcgtcaggcggggatccgcattgttatgctcaccggggataaccagcttactgctgaagcagtcgcacggaaactgggaatagatgaggttgaagccgggattctgccggatggcaaaaaagcagtgataacccgactgaaagcgtctggccatgtggttgcgatggccggagacggtgtgaatgatgccccggcgctggcagcggctgacgtgggaatagccatgggaacgggtacagatgtggcaattgaaagtgccggagtcacccttctcaaaggcgacttgatgatactgaacagggcccgtcatctgtcagaaatcaccatgaaaaatatccgacagaatctgttttttgcatttatctacaacgcacttggcgtgcctgtggctgcaggcctgctttatcctgtgtatggaatactgctgtcgccagttattgcggcggcggccatggctctttcctccgtcagcgtcattgtgaatgcgttgcgtctgaaaagtgtcaggctcgggaaataa

SEQ ID NO: 264811 - DNA, 300 bp, Klebsiella pneumoniae
gtggtgtccattgttgacctcaccgtcacgcttgagcgagatgtgacggtcgaagaggtgaacaatgcttttcgcgaagccgccgcagcgggacctctgaaagggatcctgggttatagcgatgaaccgctcgtctccagcgattaccagggagacccacgctcgtcgattatcgacggtctatcaacgctggtgattggcggtaatatggtcaaaattctggcgtggtacgacaatgaatggggattctctaatcgtctcgttgatctggcattgatgatggcaaagcgtgaaagctaa

SEQ ID NO: 264812 - DNA, 630 bp, Klebsiella pneumoniae
atggtaaaggtcggtattaacggttttggccggatcggacgcaatgtactgcgcgcagcactgaataatccggatattcaaattgtggcaatcaacgatttgacggacagcaaaacgctggcgcatctgctgaaatacgactcgcttctcggtaagctggatgcagaggtaaccgcgggtgaaggggggcttgttgttgatggtaaacccattaccgtattcagtgaacgcaacccggccagtattccgtggcgtcagtgtgaagtcgacatcgttattgaggctacaggattattcacggaccgtgaaaaggctgctgtacatatccacagcggtggtgccaagcgcgtgattatctctgccccgggtaaaaacgatgatttaaccattgtgatgggcgttaatgagagcctttactccccggataaacactacgtgatcagcaacggaagctgcaccaccaatggtcttgcacctgctgcacaggtcctgcaccagcatttcggtattaagcatggtctgatgaacaccacccatgcctacaccaacagccaggcgctgcacgatcagccggaaaaagatctgcgcggggctcgcgccgccgcattgtcgattgtgcgttattcctga

SEQ ID NO: 264813 - DNA, 1308 bp, Klebsiella pneumoniae
atggcgatagctccgacgcttaacgttccccaggctcgttttctggctatgcagcagaagttcaaagcctatgtagctggttttggatccggtaagacatgggttggctgcggtggaatatgcaaagggttctgggagttccccaaaataaaccaaggctactttgccccgacttatcctcagatccgcgatattttctaccccacggtggaagaagttgctcacgactggggactgaaagtcaaaatcgttgaaagcaacaaagaggtccatttctacagtgggcgccagtaccgcggcacgacaatttgtcggtcgatggaaaagcccgacacgatagtaggctttaaaatcggcaatgcgctggtggatgaactcgacgttctgaaagcggataaggcgcgtcaggcgtggcgaaaaataatcgcgcgtatgcgttataaagttgatggtctgcgtaatggcattgacgtgactaccacacctgaaggatttaagttcgtctataaccagtttgttaaggctgtgagggaaaagcctgaactgaggtcgatgtatggtctggtacaggcttcgacattcgacaacgaaaagaacctgccggatgactatattccttcgctcctggcgagttacccgccggaattgatcaaggcatatctgaacggccagtttactaacctgaccagtggcaccatttatcatcagttcgacagggtgctgaataattccagtgaggaagagcagccaggtgaagcgctgtatatcgggatggatttcaacgtcgggaagatggccgggatcgtccatgtattgctgctcggcttaccacacgcggtaacagagattatcaacgcttacgatacgcccgacatgatacgcatcatcaaggaacgtttctggctgtatgccgacggtgactaccgcaaggtccgcgagatttatatttacccggatgcctctggtgattccaggaagtcaaacaacgccagcaaaacagatattgagcagctccggcaggccggatttaacgtcatcgttgatgatgctaacccgccggtaaaggaccgcattaactccatgaacgccatgttctgcaatggtaatggcgatcgccggtacaaggtgaatgtggcccgttgcccggtctatgccgactgcctggaacaacaggtgtgggataaaaacggcgagccggataaaaagagcgataacgatcaccccaacgatggcgctggttacttcattgtgaagcaattcccaatcgttcgacctgcattctctatttcactggacacgacattctga

SEQ ID NO: 264814 - DNA, 1401 bp, Klebsiella pneumoniae
atggccaataacgatattacttatgttcgccctgaggtcagggcggcgatgcccgtgtggaaaaaaattcgtgacgtgtgcaaaggggctgatgctgtaaaggccgccgggaatgaatacctcccttttctggatccgtccgataagtctgcacgcaataaaaagcgcaatgctgattacattcagcgcgccgttttctacgcgataacgggcaatacaaaagtgggtctactggggctggcattcagaaaagacccgaccatgaccgcgccggataaactgaattatcttcgtgacaacgccgatggtgctggtgccagcatttatcagcagtcccagcaggttacagaaaatattctggaggccgcgcgcgaggggctttatacggattatgcagctgagaccgacgaggcgatcatccttcgttatcaggcggaaagcatcattaactggcgcaccaaacgcatcaatggacgtgatcaactggtgctggtggttttacgtgaatgcatggaaaaggaagatggttttgcgtacgaggatgaaatccagtatcgcgaactggctctggagaacggaaagtttgtctgccgggtatggcgaaagtcagctgacgcaggctctttttccgtcgattctgagtatcacccgaagcctaaaggtgaggatttttgggatgaaatcccctttaccttcgttggtgcacaaaataacgatcccagcatcgacgagtcgcctttagccgccctcgttgaaattaaccttggtcattatcgaaattcggcggattacgaagacagcgtatttttctgcggtcaggttcagccggtgatttccgggcttgataccgcctggcgtgactggctgcaggataagggaattcgtgtcggttctcgttctccattcctgctgccgaaggaggggagttttacctatgctcaggcgcaaccaaacaccctggctaaagaggcgatggacagtaagcgtgattattctgttcagcttggcgcccggcttatcgagcagaacggcgcggttaaaaccgccacgcaatccagcggcgagcaaaccgcatccacatcggtgctcggcatttgcgtttccaatgtctcggaggcctatacgctggcgctcggctggtgcgccagatatctcggcataaaaggcgaggaatatcgttacagcatcaatcaggagtttatcgccaaagtcgcagaatccggcatggtaacggcaatcgtcaatgcctggcagtacggtgcgattcgcgacactgatatggtcagagctctgcagaggcttgacctgatagatcctgctgacgaccctgaaactgtcattgacgctattcgtaacggcgcgcctaacctgattggtggcaataatggcaacggcgaatga

SEQ ID NO: 264815 - DNA, 426 bp, Klebsiella pneumoniae; identical to SEQ ID NO: 231620

SEQ ID NO: 264816 - DNA, 714 bp, Klebsiella pneumoniae
atgctgcatctgtttttccgcaaagatatcccaccgacctatgatctgaaccgactgaaagaaccggctcttgctatcaaagacccggcgacgttcagaactggctggattgtattaatccttctgctggtaggtttttttgtgcttgagccgctgggtattcctgtcagcgctattgcggctgtgggtgctgctatcctctttttcgtggctaaaaaaggtcatgccattaacaccggtaaagtcctgcgtggtgcaccgtggcagattgtgattttctcactgggaatgtatctggttgtttatgggttgcgtaatgccgggctgacagaatacctctctggcgtattgaatttatttgcagacaaaggactttgggctgccacatttggcacgggattcctgacagcattcctgtcatccatcatgaacaacatgcctactgtattgattggcgcattgtcgatcgatggcagcaccgcatcgggtgtcatcaaagaagcaatgatttatgccaatgtcatcggttgcgatctgggacctaaaattacgcctattggtagcctggcaacgctactctggctgcatgtactttcacagaagaacatgacaatcacctggggatactatttccgcaccgggattatcatgactctgcctgtgctgtttgtaacgctggccgcgctggcgctacgtctctctttcactttgtaa

SEQ ID NO: 264817 - DNA, 654 bp, Klebsiella pneumoniae
  misc_feature (573)..(582): n is a, c, g, or t
atgttactggcaggagcaattttcatcctgaccatcgtgttggttatctggcagccgaaggggttagggattggctggagcgccatatttggcgcaatactggcactcatatctggtgtagtacacattaccgacattctggtggtatggaatatcgtctggaacgccacagcaacctttattgccgtgattatcatcagtttgctgctggatgagtctggcttttttgaatgggcagcattgcatgtttcccgctggggaaatggccggggtcgcctgctgtttacttatatcgttctgctcggtgctgcggtagcagcgctatttgccaatgatggtgcagctctcatcctgacgccgatcgttattgccatgttgctggctctgggattcagtaaaagcgctacgctggcatttgtaatggctgcagggtttattgccgataccgccagcctgccgctgattgtgtcgaacctggtcaatattgtttctgctgacttcttccatctgggattcacggaatatgcctccgtgatggtgcctgtggatattgccgccattattgccacgctnnnnnnnnnngattgccgccattattgccacgctggtgatgctgcatctgtttttccgcaaagatatcccaccgacctatga

SEQ ID NO: 264818 - DNA, 1635 bp, Klebsiella pneumoniae
ttgcttgtcagcaccgatccggcttcaaacgtaggccaggtgttcagccagactattggcaataccattctgccggtggcctctgtaccgggtctttcagcgctggaaattgatcctcaggccgccgcccaggaatatcgggccagaatcgttgatcctatcaaaggcattctgccggatgatgtcgttaacagtattaacgaacagctctctggtgcatgtaccaccgaaattgcagcttttgatgaatttaccggtctgttgactgacgcatcattattgacccgctttgaccatattatctttgataccgcgccaaccggtcacactattcgtcttctccagttgcccggtgcgtggagtagcttcattgagagcaatcctgatggtgcttcctgtcttggcccgatggcagggctggagaaacagcgtgagcagtattcacacgccgtccaggcattgtctgatccggatcgtacgaggctggttttagtggctcgactgcaaaaatcaacgcttcaggaagtcgcccgtactcatgatgagcttgcggcgataggtctcaaaaatcagtatctggtcatcaacggcgtgttacctgagacagaagcagtcaacgatactctggcggctgcaatatggggccgggagcaggaggcgctggcaagtcttcccgctggtctggacgctctccctactgacacattattccttcaaccagtgaatatggtcggtgtgtctgctttaaggggacttctcacctcccaacctgagacggcttcatttgctgaagtgtccgccctgcaaaaaccagcgatatcgtcgttgtctgctctggttgatgagattgcccttaatgaacacggcctgattatgctgatgggtaaaggtggcgtgggtaaaacaaccatggctgcggccattgcagtcagactggccgaaatgggatttgatgtgcatctcacgacgtcagatcctgctgcacacctgagcacaaccctcaatggaagcctcaataacctgcaggtcagcagaatcgaccctcatgatgaaacagaacgttatcgccagcatgtccttgaaacgaaaggacgtgacctggatgaagcagggaaacatctgctggaagaggatttacgctctccgtgtaccgaagagattgctgtgttccaggccttctcacgggtgatccgtgaagcgggtaaacggtttgtcgtcatggatacggcaccgacaggacatacattgttgctgcttgatgctaccggggcataccaccgggagatagcaaagaaaatgggagataaaggccatttctctacgccaatgatgcagcttcaggatccggaaagaacaaaagtattactggtcactctgccggaaacgacccccgttcttgaggctgcaaatttacaagccgatcttgaacgtgccgggattcatccatggggctggattatcaataacagtctttccatcgctgaaacccgttcaccgctgcttcgtcagcgctcgcagcaggaactgcctcaaatcgaggctgtaaagaaccagcatgctacccgtgttgcactggttcctgttcttgcggcagagccaaccggtatagacaaactcaaacagctcgcaggttaa

SEQ ID NO: 264819 - DNA, 390 bp, Klebsiella pneumoniae
atggtgctgactaaatgttttttccggcgcgagaatttgatggcctcacttttattttgcatcgtttcatatgggttgctatctacctggctttaccttgtgcattcaattaatgaaaaagtagaatcaacattaccctcatctttactgattcgtgttttgataatcattacagcattatcatttattattcagaaaaaacctggagtttttaaaaacttcattgcaataacattcggtctggttttagtgtttatacacaccatcattgtattacatctgcttttgaatacttttccagatatctatgattttgttttttattatgaattttttttaatggttttcttttgcggactacctttatgtttatgtataagaatggtttga

SEQ ID NO: 264820 - DNA, 300 bp, Klebsiella pneumoniae; identical to SEQ ID NO: 251342

SEQ ID NO: 264821 - DNA, 1263 bp, Klebsiella pneumoniae
atgagcagcagggacctggcaaaattcaccgatgtcagacgttacgctacgctggtttgtataataacagaggccagggccaccctgactgacgaagtgattgatctgcacgagcgtatcctgggtagtctgttcagcagggcaaaacgcacgcaggccgaacggctccagcaaacgggaaagcttattcagagcaagctgaagcagtacgttaccgtcgggcaggcgttacttaacgccagagaatccggggaagatccctggactgcaatagaagatgtccttccctggcaggaattcatcaacagcgtggaagaaacgcggtttctttcccgtaagggcaatttcgacgcgcttcatctgatcaccgaaaaatacagtacgttgcgtaaatatgccccgcgtatgctgtcagcattgcagttcatggcgacacctgcggcgcaggcgctcagcgatgcgctggacaccataacggaaatgtaccgtaaacaacttcgtaaagtgccgccatcagcgccaacagggtttatccctgaaagctggcgaaaactggtgctcacgccttcaggcatcgaccgcaagtactacgagttttgcgtactgaatgaactcaagggtgcattacgttccggtgatatctgggtaaaaggatcgcgccgctacaaaaattttgatgattatctcatcccgactgctgagtttgagaaatcccgacataatgaccagttacagttggccgttcagaccgatagccaggcataccttcaggcccgtatgactcttcttgcatctcggctggaagaagttaacgcgatggcgcttgccggtgatttgcccgatgtagatatctcagataaaggcgtaaaaatcactccactggagaacagcgttccttcaggtgtttcgccctttgcaggtttggtctatggcatgcttccccatccgaaaattacggagatactggaagaagttgatagctggacgggatttacgcgtcacttcgcgcacctcaaaaataataacgtcagaccaaaagacggaagactgttgctgaccaccattctggctgacggcatcaaccttgggctgacaaaaatggcggaatcctgccctggggccacaagatcgtcactcgaaggtattcaggcatggtacatcagggatgaaacttattcagcggcactggccgagctggtcaacgcacagaaagagcgttcgggtaggcagtcacggacgttatgccggtcaggtcaatcttaa

SEQ ID NO: 264822 - DNA, 591 bp, Klebsiella pneumoniae
  misc_feature (576)..(585): n is a, c, g, or t
atggggctgggtgcagccggcggtgtgatgatgaaggctgatgcgaacgcgtcggcaattaccacgctccagaacacagtgaagacccaggggggtaatattgactccctgagttcctcgataacggcgctggagaacagcctcaggtcgacaaacgatacggtgagtaaaaaggctgacacgactgcagtgagttcactgactggtcgcgtaagccaggtggaaaacactatcaccagccagtcgcagagtatcacgtcgctgaccagcagcatcaataccatcagtactcagggagctaatccgtgggttgacggtacgttcgaaagctacggagatggtcatgtgctgggcgggggcggcaccgccgttgtggtggcgtctcagaaattcaccggcaataagagcctgcaggtgagtcgaggagcgaacaacaacggcaacagcgataaacagcttgggagctggcagtcagtccgtgaggatgcgaagttccggtttgagttctgggctatgatgccggcggatcaggcgccatcctccgggtggacaacgctggtcggcattaactcactnnnnnnnnnncactga

SEQ ID NO: 264823 - DNA, 1476 bp, Klebsiella pneumoniae
  misc_feature (505)..(514): n is a, c, g, or t
gtggtctggatctctacccgtggcgcctccggcagcggcacccccggttattcgctgtatatcgacgatctggttatcacggatgttaccgatgcgaaagcggcacaggatgcctctgacgcgacggcgagtgccgtgagcggtctgacggctcgcgtaacggatgccgaagggaaaatcaccgcccaggcgcagcagcagacggcactggccacgaaagtggataatgccacctcccgcgtcgataacatggcgaagacgctaagcgacagccagagcacacaggccagcctgaatacctcgcttcagtcgcagattgacgcgcaggcggccgccaacatcaaaaaccagacgacgctggacaacacgattaaatcggtggccagtatcaccagtacccagcagacgcatgcaacggcactggaggcgctggcaacgcagcagacgaccctgacatccagtgtcggggatctcagtgcttccgttcagaacaccgccaaaaccnnnnnnnnnntggcggatgtgaatggtacggtgagttcgctgtggtcgatgaaggttgagacggttaacgggaagaatgttggcgcggggattacgctgggcagcaatggtgaaacgagcgacatgatcctctacgctgaccgcttctcgctgtttaaccgtaataatgcgacggctgttccggtgatggttgccgaaggcaatgagctgtatatcgatacggcacgtatcaaaaacagttccctgacctcaaccaaaatcgcggacggttccatcacgaacgcgaagatcggccacgagatccgctcgaatgactttgttgacgggtcacgcggctggcgtatcgctaaggatggctcttcgcagttcaacaacgtgatcgttcgcggtgcggtttatgcgactgacggctggttccagggtacggtatatgcgaaccacatcgagggcgacatcgggtcatttgcgatcaacatcgctcagcaccgcacgcgcaaggtgccgaaggctacatggcagtggtttgagctggcccggttccggcggcagaatttcgaccaggtgatcaatattcgcggtggactcctccagacggatagcatcactatcgacggcggcgcgaaactcagagcggggatgtcctacgcgccaggggctgacggcggactgaatcctggctatctgtcgtatgcaatgcttcttcgtggcacaggcgctacgtctggtggcggcagtatggagctaggcattgagcttatgtatgaaacaggtggagcaacacgtctgttaacggcgcaagagtcaatgaacgtagacaacatgtcatttgtcgtccctgccggtactggcgacgctgttctgcgatatggctgttacctggaccgtaacggacagatggtattaaccatcctctcaagattcgacgccttcgccgcgcgcaataacaacgtaattcgcggttcatcaacctga

SEQ ID NO: 264824 - DNA, 930 bp, Klebsiella pneumoniae
atgaacgacctgattatgattgttattcgttttcttctttatctggatttgatggtaatatttggattgccattttttcagatatatggaataagcggtgtcagacatgaaacctataacctgactaatttcaggtcgtttataacctttgctgttgttacaggcatcattcttactggcattaatatgctcctggtatctaatgccatgagtggagtaactgacctcagagaattatccatccatgttatcgagatggtgatagaagaaactgatgtgggtattagctggattgtcaggctctgtgccctgtttaccacactcggtgctttgttcctttacactaacaagagagtattgtcctgcctgctgatgacgatgagtgggggcgtggcgctggctacacttgcctggggaggacacgccgttatgcatgacggtctgcattactatctccatttactgagcgatctgacccatctcggcgctgcaggtgcctggacaggtgctctggttgcatttgctatcctgctgatgcgcagaaacgagcataatgcacagagcgtcattgtgatatctgactccctggcaaaatttgccacggcaggaacggtgattgttgtagccctgatcctgagtgcgctggtcaactatctgtatattgctgagggtaacttaactcccttattcaacagttcctgggggaggatattgcttgccaagacggctctgtttgttctgatgcttcttctggctgcagcaaaccggtttcacctgggtccccggcttgaagttatggtcagggaagggaattatgatcgcagcgttgccctgatgcgaaacagcatcctgacagaattcgttgttgcgattatcattctgggcgccgtagcgtggcttggaatgcttgctccgtctcagatcagctag

SEQ ID NO: 264825 - DNA, 381 bp, Klebsiella pneumoniae
atggctgatgcgctggaccgcgggcacgacgaggacgatttatcgctgatgtttggcgtgagtgttcagacagtacgtgcaacgctgtcgctgctggatgccacccaggctgtccgcgatgcagtggaatctggaactgtcaccgttacccaggcgcgtcagctggcatcgcttaaacctgaagagcagcgggagaaggtatctgaaattgaagcggcaactgctggcacaaccggccatgaaaaagcccggcgtcagcgtcagatcctcggcgaggcaaggccgcgcctgaaaacccgcaaagaaatcaccaaagccctggaatcagccgagggtgagtatgcaagtgcacttcgttgggtgcttggggaggcgcaatga

SEQ ID NO: 264826 - DNA, 333 bp, Klebsiella pneumoniae
atgattgcgcgatttagcatgctcgctgatctgactgtctgtataatctttaccttcgttaccaaccttaatcacgtcttcaatcgtcgcgataacgatgcccggatctgctcgcagctcgatattttctgtactgctgactatcagccatattctgagcaccgtaaagcggcccgagccttcacccagcaggggcttataagtttccgggacgctggcgaccgccatgcacaccccggcatcgtcaaacagcgcggcttctctgatggtgaagcctccgacttctggcggcatcatcatttcagcaataattacattattgctgttatctga

SEQ ID NO: 264827 - DNA, 1422 bp, Klebsiella pneumoniae
atgacgtggctcgggggaattgtgctgggcttaggcgtggcgctggctaaacaatcgcgtaacaccctgttgcgaaatgcggcaggctgctacatctggttattccgcagcctgccgttgctggtgttactgatctttatttttaacctgccacaaattttcccgacaaccagcgggttactgtcgaatccattcgcagccggtttgctggcgctgattcttagcgaaaccgcctatattgcggaaatccatcgtggtggattgttgtcagttcagcgcgggcagtttgaagcaggacgggcgctggggctcaataatacccagatccggctaagcattattattccgcaggcattacgtatctctctaccaacgttggtgaatgaatttatcaccatcgtgaaaatgacttcgctggtgtcggttatctcgctgtcagaaatcctgatggtgggtgaacgcctttatactgacaacttcaaggtgatggagaccctgctggcggtggccttctattatgtgctgatcgttacgttgttcgagcgcctgtttggctggctggagcgccgctgggatgtgctgaatcgtaagcccgcaccgtttgatgtggcgcaggctcgcgccagcttgccagtacagcccgttgccacgcgcaaaagccacagcgcatcggcaaaaccgattttgaagttaactggtctcagtaagtccttcaatggcaagccggtactgaacaatatcaacctcagcgtgaaacctggtgaggtgatctccattattggcccgtcgggctcaggaaaaaccacgttgatccgcatgatcaatggtctggaaaaaatggatcagggtagtgttgagctgctgggacgtgcatttattcatgcaggacagcgcgaaaacgcactcccttaccgtgcccagataacccggcttggaatggtttttcagggcttcaacctgtttccccataagacagtgctggaaaacctgatgctggccccgcgactgcataacctcgataaccctaatgatctgtataagcgcagcctggccatgcttgataaagttggcatgctggaacacgctacgaaatacccccatcaattatcaggcggacagcaacagcgcgtggccatcgcccgtactctggtaatgaagcccgcagtggtgctttttgatgagccaacctcggcactcgatccggagcgagtcagcgaagtactacaggtgattgaaaagctggcggaagaggggatcaccatgctgattgtaacccacgagatgaggttcgcgttcaccatttccgaccgggtggtgtttatggagcaggggcgtatcgaaattgatgcgccgccggaagaaattcgccaaatgcgcaatcaccggatcctccgctttatcgacgatatggctacggcctga

SEQ ID NO: 264828 - DNA, 588 bp, Klebsiella pneumoniae
gtgtggtttcccgttcggctgaaggccctcaagggtggcgaccacctccgccatatcgttgccgttgcactgcgtaacctccatgccgaaagcgcgccatttttcatccagcggatcggtattcatgatctctttggtcgcaccggccagctgcagattatttttgtcgttgataataataaggttatccagctggtagtgggcggcgaccagcgcggcctcccagttgctgccctccgccagttcgccatcgccggtgacgacaaatacgcgacgcgggttgttatcgcgtttcgctgccagcgcaatgcctaccgccacgggcagaccatggcccagcgcaccggtattgagctcaatacctggcgttttgtgctttaccgggtgtcctggcagagccgagtcggcgtgttgataggttgccagccagtcaacaggaataaagcctgcttcggccagcacgcagtagtaaccaccgacagcgtgccccttcgactgaatatagatatcgcggtcgtcgctctcttttcgcgcaggggagcagttaaggatgcgaaagtagagggcggtcagcagttcgacttgtga

SEQ ID NO: 264829 - DNA, 294 bp, Klebsiella pneumoniae; identical to SEQ ID NO: 136254

SEQ ID NO: 264830 - DNA, 261 bp, Klebsiella pneumoniae
atgcgcttccagctcatggatatcttctttgctgtcggttttcggcagacgcaccatatccacgcccgcgcggactaccgcttcaaggtcggcaagaccgaacggcgtattcagcgggttaatgcgcaccacggtttcgatatcctgatacagtggatgctgcagcgcctgatacaccagcagacgagcggtatctttctcgcgcagcgaaacggcatcttccaggtcgaacatcaccgcatcggcgccgtagacgaatga

SEQ ID NO: 264831 - DNA, 669 bp, Klebsiella pneumoniae
  misc_feature (631)..(640): n is a, c, g, or t
atgctgcgacacactattcctgtacgcagggatctggatcggattgcggacgatcacggtttcgattttcatgtaattgacaacgagatttactgggacgagagtcgagcctaccgctttacattacgccagatagaagagcagattgaaaaaccgaccgccgagttgcatcaaatgtgcctggaggtcgttgatcgagcggtgaaggacgaacagctgttgcagcagctggcgatcccaccgctatactgggatgcgattgctgaaagctggcgccagggggatccttctctctatggccgtatggattttgtatggtgcggtgccgacgctccgcttaagttgctggaatataatgcggatacgccaacgtcactttacgaagctgcctggtttcaatggttttggctggaagacgccagacgcagcggggtgatcccgcgtgacgccgaccagtacaatgcgattcaggaacggctaattgcccgctttagtgaactttacagcccggaaccgctctacttttgctgctgtgaagggagtgatgaagatcgcacgacggtgctttatctccaggactgtgcgcaacaggccggtcaggaaactcgttttctctatgttgaagagctgnnnnnnnnnngtcggcggtatgctgaccgatttggatga

SEQ ID NO: 264832 - DNA, 552 bp, Klebsiella pneumoniae
  misc_feature (15)..(24): n is a, c, g, or t
atgttgaagagctgnnnnnnnnnngtcggcggtatgctgaccgatttggatgacaacgttatccgtcgggcgtttaagctttatcccctggagtggatgatgcgagatgataatggcccgctgctgtgtaagcggcgagagcggtggatcgaaccgttatggaagagtgtactcagcaacaaagggttgatgccgctgctatggcggttctttccctgtcatcctaatctgctacccgcctggtttgccaatgaatcgccacagatcgcgccgggcgagagctatgtgcgtaaaccgatcttttcacgtgaaggcggcaacgtcaccatctttaatggtcagcagcagattatcgaacatgctgatggagactacgcggaagagcccatgatctttcaggccttccagcccttgccgcgctttggtgacagctacacgctgattggcagctggatcgtggatgatgaggcttgcgggttggggatccgggaagataataccttgatcactaaagatacttctcgttttattcctcactatataaccggctaa

SEQ ID NO: 264833 - DNA, 609 bp, Klebsiella pneumoniae
  misc_feature (496)..(505): n is a, c, g, or t
gtgatccgccagatctacacctccggcctgcgcggcaagttgggcgaggagatctccgccggtttaatggaaaacccggtgcagatccactcccacggcggtcgcgtacagctgattcaaagcggcgagctgtcgattgatgtcgcgtttctcggcgttccttgctgcgatgagtttggcaacgccaacggctttagcggtaaatcacgctgcggttcgctgggctacgcgcgcgtcgatgccgagcacgctaaatgcgtggtgctgctgaccgaagagtgggtggattatcctaactatccggccagtattgcccaggatcaggtggatctgatagtccaggtagatgaagtcggcgatccgcaaaaaattaccgcgggtgccatccgtctgaccagcaacccgcgcgagctgctgatcgcccgccaggcggcgaaagtcgttgagcactccggttactttaaagagggtttctcgctgcagaccggtaccggcnnnnnnnnnnaactcgcttccttgaagataaaatgcgccgtaacggcattaccgccagcttcggcctcggcggtatcaccgggacgatggtcgatttgcacgaaaaagggttga

SEQ ID NO: 264834 - DNA, 609 bp, Klebsiella pneumoniae
atggtcgatttgcacgaaaaagggttgatcaaaacgctgctcgatacccagtccttcgatggcgacgcggcgcgttcgctggcgcagaacccgaaccatgtcgagatctccaccaatcagtatgccagcccgggctctaaaggcgcctcctgcgagcgcttaaacgtggtgatgctcagcgcgctggagattgatatcgactttaacgttaacgtgatgaccggttctaacggtgtgctgcgcggggcgtccggtggccatagcgataccgccgccggtgcggatttgaccattattaccgcgccgttagttcgcggccgtattccctgcgtcgtggaaaaggtgctgacccgcgtcacgccgggggccagcgtggatgtgctggtcactgaccacggcattgcggtcaacccggcacgtcaggacctgatcgacaatttgcgcagcgcaggcattccgctgatgaccattgaggaactgcagcagcgtgctgagctgttgactggcaagccgcagccgatcgaattcaccgatcgggtggtggcggtggtgcgctatcgcgacggttcggtcatcgatgtgattcgtcaggtgaaaaacggcgactaa

SEQ ID NO: 264835 - DNA, 840 bp, Klebsiella pneumoniae
  misc_feature (805)..(814): n is a, c, g, or t
atgctaaaagagcacaactggcatcaactcaaggacgatacggcgcagcgcctgaatcagctggccccgtattttcgtgacggcaaaattatcgacgccaaagatactgtcgccgcgctggaagccgttattcgaagcttcgatcgcgtcaatatcgagggtaataaccagaaacaggcggattttctctccgaatgcctgtgccagcttgatccgcaaaagatctccggcctgcatatggtgcagtcatccgtaccgttgtccagccatctggatttgtttgaaaagggcatcgctgaaaagctcgatttcgcctatgccgggccgcaggatggacgtctggcgaagctgatccaggacggtaagatcaagctcggggccatccatacctatctggagctgttcagccgctactttgtcgacctcacgccgcgcgtgtcgctaatcaccgcctttgaagcggataaagacggcaatctctacaccggctttaacaccgaagatactcctgttattaccgaagccacccacttccgccagggaattgtgatcgcgcaggtcaacaagattgtcgataaagtgccgcgcgtggatatccccggcgactgggtaaatgcggtgattgaagcgccgcgtccgttctatgtcgagccgctgtttacccgcgatccgggacttattactgacacccatgtgctgatggcaatgatggcgctgaaaggtatttatgccgaatacggcgttgagcgcattaaccacggtattggcttcttcaccgccgccattgagctactgctacccaccnnnnnnnnnncacctacggcgaggagcttgggctga

SEQ ID NO: 264836 - DNA, 852 bp, Klebsiella pneumoniae
gtgaaacagcagatcgcccatatcgtgcgcctgtcagccatcggcaccgtcatcagccagcgcgtccaccgcgatgtggcgccgaagccgctgatgtcgctgctggtcgaaggctgcatggagagcggcaaagatgtcgccgccggcggcgcgatggtcaaccacggtccggggctgattttctccggtctggcgacctacgtcgactcgcttgagcagatccgcgatgcgctgctggcgaactttgaaggttacgaagcgctgcgccgcgactgcctgaacgcgccgaaatacggtaacgacgataactacgtcgaccagtacgcgctggatattaccgaatggaccgagaaagagtgccgtaagtacaagatgctctactcgaccctcagccacggcaccctgtctatctccaacaacacgcccatcggcgagctgaccaacgccacgccgaacggccgcctggcgtggatgccgctctccgacggcatcagcccaacccagggcgcggataaacaaggtccgacggcgattatcaagtcggtcagcaagatgaacgtggaaaccatgaacatcggcatggtgcacaacttcaagttcctcaaagggctgctggataccccggaggggcgccatggactgattaccttgctgcgtaccgcctcgattctcggcaatggccagatgcagttcagctatgtcgataacgaagtgctgaagaaagcgcagcaggagccggagaaataccgcgacctgatcgtccgcgtcgccggctatagcgcctacttcgtcgagctgtgcaaagaggtccaggacgagatcatcagccgtacggtgattgagaagttctag

SEQ ID NO: 264837 - DNA, 447 bp, Klebsiella pneumoniae
gtgatcacccccaccggcattgaccgaaaatattacgaattttgcgtgctgaatgaactgaagggagccttacgttcaggtgacacctgggtaaaggggtcacgccgctacaggaatttcgatgattatctgatcccgtcagacgattttgaaaaatcactccgggataaccagttaccccttgctgttccggccgattgccatgaatacatcaagagccgtttgacgcttcttgcatcgcgtctggaagaagttaacgcgatggcgctggccggtgatttacccgatgttgatatatcggataaaggcgtgaaaattaccccgctggataacagtgtcccttcagcagcatccccttttggcgatctggtttatggcatgccccctcaccctaaaagggggccgcttggaaaacggaaaatatcccacgttaagcctgttttttaa

SEQ ID NO: 264838 - DNA, 309 bp, Klebsiella pneumoniae
atgccttacttccaacgcgatatcaacagcggcgcgctcaatacccagcaggcctatgagatcgtggagtgcctgtggttcaagctggcggaactgagcgaagtccgcgccgcctgcgccattgacggctatccgatgctcgacgctatgctgcgcggcgccacttttgacaacgccgaagtgaacgaactctcggcgatgtttatcagcgcccagcgcaacctcagcgcgctgaatctgccggtacgtctgtttagccgacacgccggtgatggaaggcttaaccccgcgtatgcaacgcctgcgtaa

SEQ ID NO: 264839 - DNA, 552 bp, Klebsiella pneumoniae
  misc_feature (532)..(541): n is a, c, g, or t
atggaaggcttaaccccgcgtatgcaacgcctgcgtaaccactacctgacggtgcgcccgagcgtctctatctatcgcgcgctggcctttaccgaagtggtgaaagccaacccgggcatgccgaccattctgctgcgggcgaaagccttccgccacgcctgcgaaaccgcgccgattctgattcaggacgatgagctgatcgtcggccatccgtgcggcaagccgcgcgcgggcgccttctcgccggacatcgcctggcgctgggtgcgcgacgagctcgacaccatgagcacccgcccgcaggatccgtttgagatcagcgaagcggataaaaaaaccattcgcgaagagatcgtcccgttctgggaaggccgttcgctggacgagatttgcgaagcgcaataccgtgaggccggcgtctgggccttcagcggcgagaccttcgtcagcgacctctcctatcaccagattaacggcggcggcgatacctgtccgggctacgacgtgctgctattcaccaaagggatgaacnnnnnnnnnnaacggcattaa

SEQ ID NO: 264840 - DNA, 210 bp, Klebsiella pneumoniae
atgatgtctcttagattccattggaagctggctctgacgactataagtcatctgaaaattaatatgtcgtatcacctcgtgggccttttaggctacgggtttataatctataacctttttgtcatgcaactgatacctgtaggtgcgttcgtaacactggtctggcagttaatcgctaatatttatttttttaggtacttctgcttttag

SEQ ID NO: 264841 - DNA, 255 bp, Klebsiella pneumoniae
  misc_feature (121)..(130): n is a, c, g, or t
atgaccgcgccacgcccccctgttacgctgagagctattgattcacataccggcggcgaaccgacccgcctgatcgttgacggcttccccgacctcggcgacggcagcatggcggagcgcnnnnnnnnnncgaccgcttcgcccgcgacttcgaccattggcgtcaggcggccattcttgaaccgcgcggcaatgacgtactggtcggcgcgctgctgtgcaaaccggtctcggcggcggccaccgctggcgtga

SEQ ID NO: 264842 - DNA, 366 bp, Klebsiella pneumoniae
atgaccggacgccgggttgacagtctgacggccgcggctgaggccgccgacgtgttacatgctcagggcgcgcgcaacgtcattatcactctcggcgccagcggcgccctgctgagcgagcatggggtgaaatcccctattccctgctttccttctcacccccgagacactaccggtgcgggcgatgccttcaacggcgcgctggcggcgcggctggcctgcggggaaccgctacaggccgcagcccgattcgcggcggcctatgccgccgtcagtgtcgaaaagcaaggcgcctcatctttacctgagtacctggaggcacaggaacggcttctccgtgccgccgctgattatgaaatggcataa

SEQ ID NO: 264843 - DNA, 750 bp, Klebsiella pneumoniae
gtgttgttggaagcggcatcgatagaaggcgcccaagtatgggcggagcgatttcgtcaggacactgcggcgacagcggtggtgtgtggagaggtgtcgatcagctatagcgccagcatgggggtggctctccttgacccccgtttgcactctgtcgagcaggtgatgctgcaggcggacagcgcgctctaccaggcaaaaaagacaagggtgcaaccaagttgtgggcgcacaagtatttcagaattgagaggagtggcgatgaaggaaaagcaagcagacccgatcaaaacatttcgcgcccaatgggcagtgatgacgttctacgagcgctttgaacaggtgatcgcgctcgcgctgtccgcaatcattgccgttatcatcgtggtctcgctgctgcagctgatctcgatcgtcttcagcctgctgatcattgatgcattcaatccgctcgatcacaaggtcttccagaccgtgttcggcatgatcatgacgctgctcattgccatggagttcaagcattccatcgtgagggtggccttgcggcgcgacagcatcatccaggtcaagacggtgatcctgatcgggctgatcgccctggcgcgtaaattcgtgatcctcgacccggagaccggccccgccaaggtcgcggcgcttgcaggcgcgacactggccctcggggcgacttactggctgctgcgcgagcgcgatgaccggacagccggggaaagctcagatgatcagtcgtga

SEQ ID NO: 264844 - DNA, 381 bp, Klebsiella pneumoniae
atggctgatgcgctggagcgcgggcacgatgaggatgatttagcgctgatgtttggcgtgagtgtccagaccgtacgcgcaactctgtcactgctggatgccacccaagctgttcgcgatgcagtggagtccggaacggtcaccgttacccaggcgcgtcagttggcatcgcttaaacccgaagagcaacgggagaaggtcaagcagatcgagacagcgaccgccggcaccacgggccatgaaaaagcccggcgacagcgccaggttcttggtgaagcaaagccgcgtatcaaatcacgcaaggaaattacaaaagcactcgaagatgccagtggcgaatatgccgaggctctgcgctgggtgcttggggaggcggtatga

SEQ ID NO: 264845 - DNA, 708 bp, Klebsiella pneumoniae
atgctggatgaggtggcgcatgcacttaaaagagaaaacattgagttccatcttcttggctacgcttgtagtacgctaaatgatgcggttatttgccatggtgcgtattctaatcaggatttagagaaaaaactcaatgatattgctccggatgtaatgtggttccctgcacaatggcctgagacatatagttatacgttgagtgcagcacttcaatatgggttaccggttgttgtaccaaatattggtgcctttggcgaacgactcatcggacgaaaatttagccggattattaattgggatatatctttccaaagaatgagtgagttatggcgacaagctattgcagatttcgatggctttttccagcaacagaatgttgatcctatgccggatgtttcgtcagaaacacgtgttgatcatttctatcaagattattatattcgtgattcatggtggcgtgaaagcgagcttggcagaattgattttaaaactttgatagatagtttctattcttcagagaacatcacaatagctgaagaaaaaatatctcaacctcatggaaggaaggaaaaattattggctgtattatggatgttgcggcaaaatcctgcattatcttgggcaaccaaacttatcccctaccgtttgcaacgatatgtgaaacgacaactatcgcgtcgtgcattacatgaaattgttcgataa

SEQ ID NO: 264846 - DNA, 258 bp, Klebsiella pneumoniae
atgagccaccatggcgaccagctcttcggcgtaggggtcgcctgcgcgatagcgggtaccgccgtaggccgcgaagcggtcaaacagcagttttcccggaccgctttcaaactcgtcgccgacggtgatcttgttggtcaccgaacgcccgttgatgaccgtcgaaaagtcatccacccagtagcgccgctgaaaccacggggtattccagctgaacttccagtcgatggtgaagtgcttaccgcgcagctccgctaa

SEQ ID NO: 264847 - DNA, 435 bp, Klebsiella pneumoniae
atgtttaactctattcttgttgtatgcacgggaaatatatgtcgttcgccaattggcgagcgatatctacgtcaggccttacccaataaaaaaattgactcagcgggtatcagcgctttagttggtcatagtgctgatgatagcgcaattaggattgcggaaaagcatggaatctctctggccggacataaaggacgacaatttacttcagcgcttggtcgccagtatgatctaattctggtaatggaaaaatctcaccttgaacaaataggtcggatcgcccccgaggtaaggggaaaaacgctactgtttggccaatggctgagccaaaaggaaatcccagatccttatagaagaagcgatgaagcgtttgcttcagtatataagctgatcgagcaggctggcttacgctgggtcgagaaattaggtgcataa

SEQ ID NO: 264848 - DNA, 279 bp, Klebsiella pneumoniae
atgaaagaagcgcttggtcttatcgaaaccaaaggtctggtggcctgtattgaagccgcggacgcgatgtgtaaagccgccaacgtcgagctgattggctatgaaaacgtcggttccggcctcgttaccgcgatggtaaaaggcgacgtcggcgcggtcaacgcagcggtcgactccggcgtggaagcggcgaaacgcatcggcgaagtcgtcagctctcgcgtcattgcgcgtccacataacgacatcgaaaaaatcgcggcgcagcacaaagcatga

SEQ ID NO: 264849 - DNA, 285 bp, Klebsiella pneumoniae
atgggtgatgcattaggtctgattgaaaccaaaggtctggtggcctgcattgaagcggcggatgcgatgtgtaaagccgccaacgtcgagcttatcggctatgaaaacgtcggctccggcctggtcaccgcgatggtgaaaggcgacgtcggcgcggtgaaagcagcggtggattccggtgtggaatcggcgcagcgcatcggcgaagtggtgacctcgctggttatcgcccgtccacataacgacatcaacaaaatcgtctcgcattacaagattgcggactaa

SEQ ID NO: 264850 - DNA, 387 bp, Klebsiella pneumoniae
  misc_feature (263)..(272): n is a, c, g, or t
gtgggtaacccggagctgctcaggcagttcgatatcccggtggtgcacgatctccccggcgtgggtgagaacctgcaggaccatctggagatgtatctgcagtacgagtgcaaagagccggtatcgctctacccggcgctacagtggtggaaccagccgaagatcggcgccgagtggctgttcggcggcaccggcatcggcgccagcaaccagttcgaagcgggcggttttatccgcagccgcgcagagttcgcctggccgannnnnnnnnngtaccacttcctgccggtggcgattaactacaatggctccaacgcggtgaaagagcacggcttccagtgccacgtcgctcgatgcgttcgcccagccgcggccacgtgcgcctga

SEQ ID NO: 264851 - DNA, 180 bp, Klebsiella pneumoniae
atgaacagcacgaacaggatcagccccagcgcgagagcgacgttcagctcggagagcacgcggatgcccttgtccaccccggaggtgaccgagatggtggcgatgatcaccgacagcgcaatcagggccgctttcgccgccagcgagtccggaatatcgaacagcacgctcagaccgtag

SEQ ID NO: 264852 - DNA, 618 bp, Klebsiella pneumoniae
gtgttctcctggcgctgtgacgtactgaacgaagctgaagttgaggcgttcgccgccgcggtcgtcgcgcgtttcggcggcgtcgatatgctgattaataacgccggccagggctatgtcgcccacttcgccgatacgccacgtgaggcctggctgcacgaagccgaactgaaactgttcggcgtgattaacccggtaaaggcctttcagtccctgctagaggcgtcggatatcgcctcgattacctgtgtgaactcgctgctggcgttacagccggaagagcacatgatcgccacctctgccgcccgcgccgcgctgctcaatatgacgctgactctgtcgaaagagctggtggataaaggtattcgtgtgaattccattctgctggggatggtggagtccgggcagtggcagcgccgttttgagagccgaagcgataagagccagagttggcagcagtggaccgccgatatcgcccgtaagcgggggatcccgatggcgcgtctcggtaagccccaggagccagcgcaagcgctgctattcctcgcttcgccgctggcctcctttaccaccggcgcggcgctggacgtttccggcggtttctgtcgccatctgtaa

SEQ ID NO: 264853 - DNA, 570 bp, Klebsiella pneumoniae
atggccttaaccggggcggttattaccgatgagcggctgaaggtctttgatttcaccccaccgtgggcctccgcgcagcactatttcgtcaaacgcgctggcgatacctcgctaaataccattgccgatctcagcggcaaaaaagtggggttacaggccgggagcgcgctgctggcgcgtttgccggagctgaaggcgatgctggagaagaccggcggcaagctggggccggtggtggagtatccctcctatccggaagcctacgccgacctggcgaacaagcgattggattacgtgattaacgtggtgatctcggtaaacgacctggcgaaagccaaaccgaaggtcttcgccaaagggctggccgtctccggaccggggtatatggcgtggccgatcccgaaaaactcgccgcagctgctggcctatatgaccaggtttatgaaccacatgaaggagaccggcaagctcgccgagctgcagaaaaaatggttcggcgaaacctatgacaacctgccgaccgaggcgatcaccagcccggaacagtttcacaaactcgccggactgtaa

SEQ ID NO: 264854 - DNA, 345 bp, Klebsiella pneumoniae
atgaatgcgtatccgcttttactgccggacacagtccaggaaggagcgacctttcagcgtatctctgacccggaaatggtctcgggaatgttgcgaacggggatcgtctctgcccgtatccaggtgaatctgtaccgtctcgatgattacacctcactgctgcagctggataaaaaaatctggacggaactgaagtccgtcgttcatggccagctggagggtatcccggttcagtatgtggagcgaggcggtatccatcaggataaaaaccagctgacgaatcgtcgcattcagtatcgcctgacccgcgatttcatcattcactacgtggaggactcctcgtga

SEQ ID NO: 264855 - DNA, 570 bp, Klebsiella pneumoniae
  misc_feature (357)..(366): n is a, c, g, or t
gtggtgcagttcttgctactctgtttcttctttgcgcttaactactacagcgttaagaccttcgcccgatcgaacaacttcatcagcgtgctcaagtttctggtgccgctgctggtggtggtgacgctgttcgccttctttaaaccggagaacctgcacgctcaggggattgcgccgttcggcatgtccggggtggaagcggcaattagcgcgggcggaattatcttcgcttatctggggctgacgccgattatctcggtggccagcgaagtacaaaagccgcagcggactatccctattgcgttgattttatcagtggtgctgtcgacgattatctacgtgctgctccatctcgcnnnnnnnnnncgagatgctgaacggcggctgggccgaggtgagcaaacagttctcgctgccgtatcgcgatatcgccattaccctcggcatgggttggctggcctttatggtgataagcgatgcgattatctccccgagcggcaccggcaatatctatatgaacgcgacgccgcgggtgatctacggctgggcgaaggcgggtactttctttaa

SEQ ID NO: 264856 - DNA, 543 bp, Klebsiella pneumoniae
atgctgaccgacgattttatcgatccccatcgcgatgcgacggatatcctttttcgcatcagcagcctgccggacgcgggctatcacgccagagtgtttggcagccagcgctattacctgaccgcctccccggagtatgtttcacggtacggcagcccgacgtcgccggaggcattgcatcaacatcgcacgctggtgtatggcggttcgcagggagccaaccgctggctgtttcgccagcgcgaagaggcatgggtgcactatccgttgaccccgctcatgacctcgaacaatgccgatgccctgctcacttcagccatcggcgggatggggatcgtgttatttcccgactggatggtcagcgaagcgctgcacaacgggacattagtcacgctgatggatcgctattcggcggccatcagccacacgccatcgtatatcgcggcgatttatccttatacccgccatccctctctcaacgtgcggacagtgattgactattttgccgacgtgtttggatcgccgccctactggcagcgctaa

SEQ ID NO: 264857 - DNA, 294 bp, Klebsiella pneumoniae
atggtcgataacgccgacagccgcagcttcgtactctgtccgggaaaggcctgggatcgctcgccgtgcggtaccggcaccagcgccaagctggcctgcctggcgcagaatggcaagttgcagccgggggaaatatggcgccaggccagcatcatcggcagccagtttaccgccagctaccagcgcaccgcggaaggcatcatccccacgatccgcggcgaagcctgggtatgcggcgataaccagttgatcctcaaccctgacgatcccttctgctgggggatcgcgccgtga

SEQ ID NO: 264858 - DNA, 339 bp, Klebsiella pneumoniae
atgagcctgaaaccgggtgatatgaactgtcgcattgcgattagctacgttcagtccggtcgggggccgctgggcgaaccgctaccggaaaagcaggttgaatcgggaaaagcgtgggcaaaacgggagctggtatcggggcggaaagtccgcacgctggatcagcagcaggtggtggaaacctgcctgtttacggtctatccgggcgtgctggttgatattgactggaaaatcacgacgaaaaatctggtttataccgtccggaatatcgaccgtaaaacggaccggatcattatcacgggggaggctgacgggcggcatgatagagctggcgattaa

SEQ ID NO: 264859 - DNA, 231 bp, Klebsiella pneumoniae
atgatcccgtcgacgccgacgcgctccgcctctttcgccattttctgggcaaaggcggtggtgaactcggccaccccggcgatgaccggaattttgccgccggcggcatccttcgccacctcgataatctgtagtttttcatcggtgctcagcgaggtgttttcacctacgctgccgcacaccaccaacccggaaacgccatctttcaccaggtttttcatcaccgcgtga

SEQ ID NO: 264860 - DNA, 465 bp, Klebsiella pneumoniae
atgatctggctggcgggcagcctgcaggccgccacctggccgctgctggcggtggctttttgctgggcgctgcccggggccatcatcctgttctgtaccgcccgggcggcggacgtggcgctgctgggcgaccggaccgccatcggcctcggcgtacgtctgcagcagctgacggtgctgcgcttttttgcgccggtgctgctgacctcggccagcgtctcctgcgtcggcagcctgggatttgtgggcctgatggcgccgcatatggcgcgtttcgtgctgcgcggcggccaggtatcgctgctgtgcggcagcgcgctgattggcgccttgctggtgctggcgaccgatacccttggccggctggcgtttgccccgctgcagatcccggcggggattgtcattgccctggtgggctgcccgttcttcgttgtcttgctctggcgtcgccgtgatgccctttaa

SEQ ID NO: 264861 - DNA, 363 bp, Klebsiella pneumoniae
atgaaaacgttaacggtgtttgacccggctatgtgttgcagtaccggtgtctgcggtacagatatcgatcaggttctggttgatttttctgcggatgtgcagtggctaaaacagcgtggaattcaggttgatcgttataacctggcacagcaacccatgagctttgtacagaacgaaaaagccaaagcattccttgaggcatccggggctgaagggcttccattgttgttgctggatggagaaatggtgatggcggggcgttatccgaaacgtgcagaactggcccgctggttcggaataccgctggagaaagtaggattagcatctaaaagctgctgcggtggtaatacttcttgttgctga

SEQ ID NO: 264862 - DNA, 207 bp, Klebsiella pneumoniae
atggttgaaaacgaagaaatcatctatgatgcattggaacatcatcataacaatggtgcaatattcattagcccttactatttagaaatgaaaccagaaagttttggcgtcgataaagaacacaaaaaattcagtatcaatgaaaataacacaaattattattcatcaagtttctatcatgccctaagcagaatcatgaaagaatag

SEQ ID NO: 264863 - DNA, 183 bp, Klebsiella pneumoniae
gtggccgggccgcgcaacacctactcgctgtcacgcctgatgcaggccaccgccatggaatacggcgagtggaatagcgcggcggtaattgcagtgatcattatggtcacggcggccatctgcacgctgctgatcgccctgcttatcaccccattcgcaacccgcaaaggagagctcaaatga

SEQ ID NO: 264864 - DNA, 267 bp, Klebsiella pneumoniae
atgatggcgcagcgccgcgcgctggaccgcctgctggatggcgctgagctggatttgcgcatggctgatgtcgcggcacaccccggtggcgatctccagcatgctctcggtgatgtcgtgtttggcttctcccacggtcagctcatgctggacgtcggcaatcagcgtcgaggcatcctggctgagatcgtaacccggcgggttcaccacctgcagctccagttcgataccgagggtaaaaggatcggagcggtgaaaatcggctaa

SEQ ID NO: 264865 - DNA, 279 bp, Klebsiella pneumoniae; identical to SEQ ID NO: 242519

SEQ ID NO: 264866 - DNA, 126 bp, Klebsiella pneumoniae
atgcccggcctgacggtagtgagcgatcaccggcatggtggtctccgggtcgacaaacccgcgctcggtgatttcaaggatgatctgttcggcggcgatcccccagtgctgcagctgatcgtgtaa

SEQ ID NO: 264867 - DNA, 1701 bp, Klebsiella pneumoniae
atggagaaggaaataccactttatcaaaatcagtatggtttaccaaaagatcgggcagcagaaatccgtagagcttaccagtatcaagattcagttggcgctcaacttttgattcttgcagttaaaaataattgttatacagaggtatggttcgagcattacgaagatatcatagcattaaaagcagatgggtatatcgatgtttatcaagtgaaaacaaaaatttctgattctaaatggaaatccaatgatgctgaaatcattaaaacaatcagcaggttctgtgagttagagaagctacatgggcaagtcattcaaaaatattttttccattcaaataacgatgtatatatacctcaatcaacatctactatcccagaagaaatagtaaaaagccctttaaagataaaagaattatttgcttgtccggaaatggatgagaagttgacccatctattaaataaatgggtagggaaaattgatcaaccatacgacatattggttaacgtattagcgaagatagagtttatcaaagggaaatcactcacaggatttcaatatgagattaccgcagatttagcaaccctaccaaagatacgaaatctttcacacgacaaaataaaaaacataagtgatgatctattaagtatcattaataaagcaaactcacttgatacaacttctactaactcctatttgtcaataatagacactaatggtttaagtaaaaatcaaaacttaagtaagagagtgaaggtttgtgaaataaaaaagctaattaatgctgaaagcaataaaataagaaatagaaaaataataagaatactatctgtagctactgtgatcatcatccttttcatcatagcatttttaaatctcaaacctgaaagcttacttgaacgttctgttcgaatcatcaactcatcaagaagcagaactactccacctgagtttgatgaagctatttctgctattaggagtaatgatttatctcttgagggcattgacctatcaggagcaaatattcaatgcaaagatatgtcaaaactaaacctacgtcgtagcgtcctaactaatttgatggggactggtgttaattttgataacgcaaaactttatttgtctcaattcaatcaaagtgaacttaatgctagctctttcaacaatacgataatggatggagctaactttcaggacgcaaatatgcttggttcatccttgaaaaaagccattgcccgtaattcaaattttagtaaaacaacactcaacggtgcaaatctgtctgacgcagatttttaccactcaaatttcagtagcgctgatttgtcacaatctgaacttatatcggcaaatttacagcactctatattaacaaacgcgaacctaactgatgcaaatattacaaatacagacttaagagattctataggattaaaacaaaatatgttagataaagcttgtttttcgcctaaacagccaccattgatctctcctcctttaactctccccaaacagagttgctataaaacagaagcagaacgtgatgatcgatatattctacaatatgctcttaaggtcacagggatgatggcggtcattaatgggttttgtgataaggggaaagtaattgataggccttctgatgtatctggtagacctgacttaaatatagaaatcaatattgaaccaaataccagataa

SEQ ID NO: 264868 - DNA, 897 bp, Klebsiella pneumoniae
atgatgtctacgtttcctgccagcttactgatccttaacggcaaaggtgccaatgaaccgcagctacgcgaagcggttaacctgttacgcgatgaagggattgatattcacgtccgcgtgacctgggaaaagggcgatgccgctcggtttatcgatgaagccctgcagctgaacgttgaaacggtgatcgccggcggtggcgatggcaccattaatgaagtggcgaccgcgctggtggagcgctgcggcaagatggcgctagggattttaccgctgggcacggctaacgactttgccaccagcgtcggtattccgcaggacctggccagcgccctcaagctggcgatcgtcggccgcgatgtgccgatagatatcgcccgggtgaatgataaaaccggctttattaatatggcgaccggcgggttcggcacccggatcaccaccgaaacgccggaaaaactcaaggccgcgctcggcggtgtctcttatttaatccacggtctgatgcgtatggataccctgaagccggaccgctgcgagatccgcggggagaactttcactggcagggcgatgcgctggtcatcggcatcggcaacggtcgccaggccggcggcggccagcagctatgtccggaggcgttgattaacgatggtctgctgcatctgcgcattttcaccggcgaagagctgatccctgccctgttcagcaccctggcgaatccggaaaactcgccgaatattgttgacggtgtctcctcgtggtttgaaataaccgcgccccatgagatgacctttaacctcgacggcgagccgctcagcggaaaaaccttccgtatggagctgttaccggcggccctgcgctgccggctgccgcccgactgcccgctgctacgctga

SEQ ID NO: 264869 - DNA, 1362 bp, Klebsiella pneumoniae
atgtttaaaccagaactcctctccccggcgggaacgctgaagaatatgcgttacgctttcgcctatggcgccgatgccgtctatgccggccagccgcgctactcgctgcgcgtgcgtaacaacgaattcaatcacgaaaatctgcagctcggcatcaatgaagcccacgcgctgggtaaaaaattctatgtggtggtcaacatcgccccgcataacgccaagctgaaaacgtttattcgcgatctgaagccggtggtggagatgggtccggacgcgctgatcatgtccgatccgggtttaatcatgctggtgcgggaacacttcccggagatgccgatccatctttcagtgcaggccaacgccgtcaactgggcgacggtcaaattctggcagcagatggggctcacccgcgtgatcctgtcgcgtgaactgtcgctagatgaaatcgatgagattcgccgccaggtgccggagatggagatcgagatattcgtccacggcgcgctgtgcatggcctactccggccgctgcctgctctccgggtatatcaacaagcgcgacccgaaccaggggacctgcaccaacgcctgccgctgggaatacaacgtggcggaaggcaaagaggacgacgtcggcaacatcgtccacaaatatgagccgatcccggtgcagaccgtggagccaaccctcggcatcggcgcgcctaccgataaagtctttatgattgaggaagccaaacgtccgggcgagtacatgaccgcctttgaggacgaacacggcacctacatcatgaactcgaaagatctgcgggctatcgcccacgttgagcgtctgacccagatgggcgttcactcgctgaagatcgaaggccgcaccaaatccttctactactgcgcgcgcaccgctcaggtttaccgcaaggcgatcgacgatgccgccgccggcaaaccgttcgataccagcctgctggagaccctggaggggctggcccaccgcgggtacaccgaaggcttcctgcgccgccatacccatgacgattatcagaactacgagtacggctactccgtctccgagcgccagcagtttgtcggcgaattcaccggagagcgtaacggcccgctggcggccgtggcggtcaaaaataagttcagcgtcggcgacagccttgagctgatgaccccgcagggtaacgtcaatttcacccttgagcatatggagaatggcaaaggcgaaaccatgccggtggccccgggcgatggctataccgtctggttgcctgtgccggacgacctgcccctgcagtatgccctgctgatgcgcaactttactggtcaaacaaccagaaatccgcacggtaactag

SEQ ID NO: 264870 - DNA, 723 bp, Klebsiella pneumoniae
atgactgaattgcctgtagatgaaaacaccccacgcatccttatcgtggaagatgaaccgaagctcggccagctgctgattgattatctgcaggccgccggctatgcgcctgcgttgattaaccacggcgacaaggtcctgccctacgtccgccagacgccgccgcacctgatcctgctggatctgatgctgcccggtaccgacggtctgacgctgtgccgggaaattcgccgcttctccgatgttccggtggtgatggtgacggcgaaaatcgaagagatcgaccgtttgctggggctggaaataggcgccgacgactatatctgcaagccctacagcccgcgggaagtggtcgcccgggtaaaaaccatcctccgccgctgcaaaccgcagcgcgatctgcaggcgctggacgcccagagcccgctgattgtcgacgaaggtcgttttcaggcctcctggcgcgacaagctgctggacctcactcccgccgagttccggctgctgaaaaccctctcccaggagccgggcaaagtgttctcccgcgaacagctactcaaccatctgtatgacgattatcgggtagtcaccgatcgcaccatcgacagccacatcaagaacctgcggcgtaagctggaggcgctggacgccgagcagtcgtttatccgcgcggtgtatggcgttggctaccgctgggaagcggacgcctgccggctggcgtag

SEQ ID NO: 264871 - DNA, 1479 bp, Klebsiella pneumoniae
gtgaaattttggcgcccgggtattaccggcaagctgttcctcgctatattcgccacctgcatcgtgctgctgatcagcatgcactgggcggtgcgcattagttttgaacgcgggtttatcgactatatcaagcgcggcaatgagcaacgcttaaccatgctcagcgacgcgctgagcgagcagtatgcccagcatggcagctgggcgtttctgcgcaataatgaccgctttatcttccagctgctgcgcaccttcgaacgggataacgacgaccgctcgccgccggggcacgccatgaagccggacgccgccccggacgggccgccgccggatggcccccctgacggcccgcgtccgaggccggaaatgccgccccacggctggcgcaccatgttctgggtggtggatcagtcggggcgcgtgctggtggggccgcgtgagcgcgtcccggaggacggcacccagcgcagcatcgtggtcaacggcgcggaggtgggcaaagtgatcgcctcgccggtagagcggctgacgcgcaataccgacattaacttcgaccggcagcaaaagcgcaccagctggctgattgtcgcccttgccaccctgcttgccgcgctggccactttcccgttggcccgcggtctgctggcgccggtgaagcggctggtggaaggcacccataagctggcggcaggcgacttttccacccgcgtgacggtgaccggcggcgatgagctcggccgcctggcgcaggattttaaccagctcgccagcaccctggagcgcaaccagcagatgcgtcgcgatctgatggccgatatctcccatgagctgcgtaccccgctggcggtgctgcgcggcgagctggaggcgattcaggacggggtccggcgctttacccccgagtcgattccttctctgcaggccgaggtggctaccctcaccaagctggtggacgacctccatcagctgtcgatgtccgacgagggggcgctggcctaccagaaaacctcgctggatatcatcaccctgctggaagtggcggcgggcgcttttcgcgagcgcttcgccagccggcagctaagcattcaggtgtcgctcccggagcaggcgatgatcttcggcgaccgcgaccgcctgatgcagctcttcaacaatctgctggagaacagcctgcgctataccgacagcggcggcagcctgcacattaccgcccgccgcagcggccgcatgctggtgattgacttcgccgacagcgcccccggcgtcagcgatgagcagctggcccgcctgtgcgaacgcttttaccgggcggaaggatcgcgcaaccgcgccagcggcggctccggcctcgggctggcgatttgcctcaatatcgtagcggcccacggcggcaccctgcgtgccgaccattcgccttttggcggggttagcattaaagttgagttacctctggaacatgatttaccgagagacgtatga

SEQ ID NO: 264872 - DNA, 1416 bp, Klebsiella pneumoniae
atgacagacctcccggccagcgtgcgctggcagctatggatagtggcgttcggcttctttatgcagtcgctggacaccaccatcgttaataccgccctcccctcgatggccaaaagcctcggggagagtccgctgcatatgcatatgattatcgtctcctatgtgttaacggtggcggtgatgctgccggccagcggctggctggccgaccgggttggggtgcgcaatatcttcttcaccgccatcgtgctgtttaccgccggatcgctgttttgcgcccaggccagcaccctcgaccagctggtgatggcgcgggtgctgcagggggtcggcggcgcgatgatggtgccggtcggccgcctgacggtgatgaagatcgtcccgcgcgatcagtatatggcggcgatgaccttcgtcaccctaccgggccaggtcggtccgctgctcggcccggcgctgggcggggtgctggtggagtacgcctcctggcactggatcttcctcatcaacatcccggtggggatcgtcggcgcgatcgccaccctctgtctgatgcccaactacaccatgcagacccggcgcttcgatctctccggctttctgctgctggccgccgggatggcgactctgaccctggcgctcgacggccagaaagggctcggcatttcccctgcctggctggcggggctggtggccgtcggcctctgcgccctgcttctctacctgtggcacgcccgcggtaacgcccgggcgttgtttagccttaacctgtttcgcaaccgcaccttctccctcggcctcggcggcagcttcgcgggacgcatcggcagcggcatgctgccgtttatgaccccggtgtttctgcagatcggcctcggcttctccccctttcacgccgggctgatgatgatcccgatggtgctcggcagcatgggcatgaagcggatcgtggtccaggtggtcaaccgctttggctaccgtcgggtgctggtcgccagcaccctgggcctggcggcggtcagcctgctgtttatgtttagcgccctggccggctggtattacgcgctgccgctggtcctgtttctgcaggggatgatcaacgccagccgcttctcctcgatgaataccctgacgctgaaagatctcccggacgatctggccagcagcggcaacagcctgctgtcgatggtgatgcagctgtcgatgagtatcggcgtgaccatcgccgggctgctgctggggctgtatggccagcagcatatgagtctcgacgccgccagcacccatcaggtctttctctacacctatctgagcatggcggcgatcatcgccctcccggcgctcatcttttcccgggtaccggatgacgtcggcagcaataccgtcctccgtcgacgcaacaggagtggatcgtga

SEQ ID NO: 264873 - DNA, 3078 bp, Klebsiella pneumoniae
gtgaagtttttcgccctcttcatttaccgcccggtggcgacgatcctcatctcgctggccatcaccctgtgcggcattctcggcttccggctgctgccggtggccccgctgccgcaggtggacttcccggtgatcatggttagcgcctcgctgccgggagcctcgccggagaccatggcctcgtcggtggccaccccgctggagcgctccctggggcggattgccggggtcaatgagatgacctcctccagctcgctgggcagcacccgcatcattctcgagtttaacttcgaccgcgatatcaacggcgcggcgcgcgacgttcaggcggcgatcaacgccgcgcaaagcctgctgccgagcggaatgcccagccggccgacctatcgcaaagccaatccgtcggatgcgccaatcatgatcctgacgctgacctcggacacctactcccagggtgagctgtatgatttcgcctccacccagctggcgcagaccatcgcgcagatcgacggcgtgggcgatgtcgacgtcggcggcagctccctgccggcggtgcgcgtcgacctcaacccgcaggcgctgttcaaccagggcgtgtcgctggacgcggtgcgcaccgccatcagcgacgccaacgtgcgcaaaccgcagggggcgctggaggacagcgcgcaccgctggcaggtgcagaccaacgatgagctgaagaccgccgccgactatcagccgctgatcgtccactatcaaaatggcgccgcggtgcggctgggagatgtcgccaccgtctcggattcggtgcaggacgtacgcaatgccgggatgaccaacgccaaaccggcgatcctgctgatgatccgcaaactgccggaagccaatattatccagacggtggacagcatccgcgcccgcctgccggagctgcagcagaccattccggcggctatcgacctgcagatcgcccaggaccgctcgccgaccatccgcgcctcgctggaggaggtggagcagacgctggtgatttcggtggcgctggtgatcctcgtggtgttcctgttcctgcgctcggggcgcgccacactgatcccggccgtcgccgtcccggtatccttaatcggcaccttcgccgcgatgtatttgtgcggcttcagcctcaataacctgtcgctgatggccctgaccatcgccaccggcttcgtggtggatgacgctatcgtggtgctggagaatatctcccgccatctggaggcggggatgaaaccgctgcaggcggcgctgcaggggagccgcgaggtcggctttaccgtgctgtcgatgagcctgtcgctggtggcggtgttcctgccgctgctgctgatgggcggcctgcccggccgcctgctgcgcgagttcgccgtcaccctgtcggtggcgatcggcatctcgctggcggtctccctcaccctgacgccgatgatgtgcggctggctgctgaaaagcggcaagccccaccagccgacgcgcaaccgcggctttggccgcctgctggtggccgtacagggcggctatggtaaatcgttaaaatgggtgctgaagcatacccgcctgaccggcctggtggtgctgggcaccatcgccttcagcgtttggctctacatttcgatcccgaaaaccttcttcccggagcaggacaccggggtgctgatgggcggcattcaggccgaccagagcatctccttccaggcgatgcgcggcaagctgcaggactttatgaagatcattcgcgaagatccggcggtggataacgtcaccggctttaccggcggctcgcgggtcaacagcgggatgatgtttatcaccctcaagccgcgcgaccagcgccacgagacggcgcagcaggtgatcgaccggctgcgcaaaaagctggccaacgagcccggggccaacctgtttctgatggcggtgcaggatatccgcgtcggcggccggcagtcgaacgccagctatcagtacaccctgctgtccgacgacctgtcggcgctgcgcgagtgggagccgaagatccgcaaagcgctggcggcgctgccggagctggcggacgtcaactcggatcaacaggacaatggcgccgaaatggacctggtctatgaccgggataccatgtcgcgcctcggcatcagcgtccaggacgccaacaacctgctgaacaacgcctttggccagcggcagatctctaccatctaccagccgctcaaccagtataaggtggtgatggaggtggatccggcctacacccaggacgtcagcgccctggataagatgttcgtcattaacagcgacggcaagccgatcccgctggcctacttcgctaaatggcagccggccaatgccccgctgtcggtgaaccaccaggggctgtcggcggcatccactatctcctttaacctgcccaccggccgctcgctgtcggaagccagcgaggccattgaccgcgcgatgacccagctcggggtgccgtcgagcgtgcgcggctcctttgccggtaccgctcaggtgttccagcagaccatgaacgcgcaggtgatcctaatcctcgcggctatcgccacggtctatatcgtgctgggggtgctatatgagagctatgtgcatccgttgaccatcctctcgacgctgccctccgccggggtgggcgctctgctggcgctggagatcttcgatgccccgttcagcctaatcgccctgattgggattatgttattaattggcatcgttaagaaaaacgccatcatgatggttgattttgccctggaggcgcagcgtaacggcaacctgacgccggaagaggcgattttccaggcctgcctgctgcgtttccggccgattatgatgaccaccctcgctgcgctgttcggcgccctgccgctggtgctctccgggggcgatggctctgagctgcgccagccgctggggatcaccatcgtcggcggtctggtgatgagccagctgttaacgctctacaccacgccggtggtctatcttttctttgaccgtctgcggctgcgtttttcgcgtcactcctctcaaccggtaagcgaataa

SEQ ID NO: 264874 - DNA, 3123 bp, Klebsiella pneumoniae
atgcaggtgttacctccaggccgcaccggcggcccgtcccggctgtttattatgcgtccggtggccaccactctgctgatggtggctatcctgctggccgggatcatcggctaccgctttctgccggtctccgccctgccggaggtcgattacccgaccattcaggtagtcaccctctatccgggcgccagcccggacgtggtgacctccgccatcaccgccccgctggagcgccagttcggccagatgtcaggccttaagcagatgtcgtcgcaaagctccggcggcgcctcggtagtcacgctgcagttccagctgaccctgccgctggacgtcgccgagcaggaagtgcaggcggccattaacgccgccaccaacctgctgccgagcgatctgcccaacccgccggtctacagcaaggtgaacccggcggatccgccgatcatgaccctcgccgtcacctcctccgccatcccgatgacccaggttgaggacatggtggagacccgggtggcgcagaagatctcccaggtttccggtgtcggtctggtgaccctcgccggcggccagcgcccggcggtgcgggtgaagcttaacgcccaggccatcgccgccctcggcctgaccagcgaaaccgtgcgcaccgctatcaccagcgccaacgttaactccgcgaaaggcagcctcgacggcccggcccgcgcggtgacgctttccgctaacgatcagatgcagtccgctgaggattatcgccggctgattatcgcttatcagaacggggcgccgatccggctcggcgatgtcgccagcgtcgaacaaggggccgaaaacagctggctcggggcatgggccaaccagcagcgggccatcgtgatgaacgtccagcgccagccgggggccaacatcatcgacaccgccgacagcattcgccagatgctgccgcagctcaccgagagcctgccgaaatcggtgaaggtgcaggtcctctccgaccggaccaccaacatccgcgcctcggtgcgcgacacccagtttgagctgatgctggccatcgccctggtggtgatgatcatctacctgtttctgcgcaacgtgccggcgaccattattcccggcgtcgcggtgccgctgtcgctggtgggcactttcgcggtgatggtgttcctcgacttctcgatcaataacctgacgctgatggcccttaccatcgccaccggcttcgtggtggatgacgccatcgtggtgatcgagaacatctcgcgctatatcgaaaaaggcgagaagccgctggccgccgcgctgaagggcgcgggggagatcggcttcaccatcatctccctcaccttctcgctgatcgcggtgctgatcccgctgctgtttatgggcgatatcgtcggccgcctgttccgcgaattcgccgtcacccttgccgtcgctattcttatctcggcggtggtctccctgaccctgacgccgatgatgtgcgcccgcatgttaagccacgaatcgctgcgcaagcagaaccgattctcgcgggccagcgagcgtttcttcgaacgggtgatcgccgtctatggccgctggctgagccgggtgctgaaccatccgtggctgacgctcggcgtcgccctgagcaccctggcgctgtcgattatcctgtgggtctttattccgaaaggctttttcccgatccaggataacggcattatccagggtaccctccaggcgccgcagtcggtctccttcgccagcatggccgagcgccagcggcaggtggccagcattatccttaaggatccggcggtggagagtctgacctccttcgtcggcgtcgacggcaccaacccggcgctgaacagcgcccgtctgcagatcaacctcaagccgctggatgaacgcgacgaccgcgtccagacggtgataagccgcctgcagcaggcggtggacggcgtccccggcgtggcgctctacctgcagccgacccaagacctgaccatcgacaccacggtgagccgcacccagtatcagttcaccctgcaggcaaactccctcgaggcgctgagcacctgggtaccgccgctgctcagccgtctgcaggcccagccgcagcttgccgacgtcagcagcgactggcaggacaaaggcctggccgcctatatcaaggtggatcgcgacagcgccagccgcctcggcatctcaatggccgatgtcgataacgcgctgtacaacgccttcggccagcgactgatctccactatttacactcaggcgaatcagtatcgcgtggtgctcgagcaggataccgaggcgacgccgggcctggcggcgctggagaatatccgcctcaccagcagcgacggcggcatcgtgccgttgaccgccatcgccacggtggagcagcgctttaccccgctgtcggtgaaccacctcgatcagttcccggtgaccaccatctcgtttaacgtcccggacaactactcgctgggcgaagcggtggaggcgatcctcgccgccgaacagtcgctggatttcccgaccgatattcgcacccagttccagggcagctcgctggccttccagtcggcgctcggtagcaccgtctggctggtggtcgccgcggtggtggcgatgtatatcgtgctgggggtgctgtacgagagctttatccatccgatcacgattctctccaccctgcccaccgccggggtcggggcgctgctggcgctgtggctggcgggcagcgagctggacgtgatcgccatcatcggcatcattctgctgatcggcatcgtgaagaagaacgccatcatgatgatcgacttcgcgctggccgctgagcgcgagcagggcatgccgccgcgggaggcgatctaccaggcctgtctgctgcgttttcggccgatcctgatgactaccctcgccgccctgctcggcgccctgccgctgatgctgagcaccggcgtcggcgccgagctgcggcgtccgctggggatcggcatggtcggcggtctgatgctcagccaggtgctgaccctgttcaccaccccggtgatctatctgctgttcgaccgcctgtcgctgcacctgaagcgccgcttcccgcgtcaggaagaggaggcgtaa

SEQ ID NO: 264875 - DNA, 1239 bp, Klebsiella pneumoniae
atgaaaggcagtaacatacgtcgttggggcgccgcgctggcggtagtgattatcgccggggccgcctactggttctggcacgatcgcgggacgagcggcagcggggctcccgccgccgggcagggcccgcaggggccgggcggcgcacgccatggccgctttggcgccgcgctggcgccggtgcaggcggccaccgccaccggagaagcggtcccgcgctatctcaccgggctgggtacggtgacggcggccaacaccgtcaccgtccgcagccgggtcgacggccaactgctgagccttcacttccaggagggtcagcaggtcaaagccggcgacctgctggcgcagatcgaccccagccagtttaaagtcgctctcgcccaggcgcagggtcagctggcgaaagatcaggccaccctcgccaacgcccgccgcgatctcgctcgttaccagcagctggtgaagaccaacctcgtctcccgccaggagctcgacactcagcagtcgctggtggtggaatccgccggcacggtgaaagctgatgaagcggccgtcgccagcgcccagctgcagctcgactggacccgcattaccgcgccaattgacggccgcgtcggcttaaagcaggtcgatatcggcaaccagatctccagcggggataccaccgggatcgtggtccttacccagacgcacccgatcgacgtggtctttaccctgccggaaagcagcatcgccacggtggtgcaggcgcagaaagcgggcaaagcgcttagcgtcgaagcctgggatcgcaccaataagcagaaaatcagcgtcggcgagctgctgagcctcgacaaccagatcgatgcgaccaccgggaccatcaagctgaaggcgcgctttagcaatctggacgacgcgctgttccccaatcagttcgttaacgcccgcctgctggtggacacccagcagaacgcggtggtgatccctgccgccgcgctgcagatgggcaacgaagggcatttcgtatgggtgctgaacgatgagaataaggtcagcaaacacagcgtaacgcccggcatccaggacagccagaaagtagtcatcagcgccgggctttccgccggagatcgcgtggtcaccgacgggattgaccgcctgaccgagggggcgaaggtagaagttgtcaccgccagcagcggcgagcaggcgcagcccgccccgcgccagagcggtaaacacggagcgcgttcctga

SEQ ID NO: 264876 - DNA, 1275 bp, Klebsiella pneumoniae
gtggcaaacgcaaacaaactcacgctcttcatcgtcatttttatgctgatggggatcctctccggcgcggctatccatgcctacgcgacgccaaccaccgtctccgcctgggcggacaatattacgctgctcaccgatctgtttctgcggttgatcaaaatggtcatcgcgccgttggtgttcagcaccctgacggtcggcattatgcgcctcggcgagacggcgaccatcggccgggtaggcgggaaggcgatggtctggttcatcacctcctcggtattatccattctcgtcgggctggtgatcgtcaccttccagcacccgggcgccgggttaaacctggcggtgccgaaagaggcggtggataccggcctggcggtcagcggcatgagcctgaaagggttcctgtcgcacactatccccaccagcatcaccgaggcgatggccaacaacgagatcctgcagatcgtggtgttctcgatgttcttcggcatcgccggcgcgtcgctgggggagaagtttaatgctccgctggtggcggcccttaacgtggtgtcgcacattatgctgaaggtgacgggctatgtgatgtacgttgcgccgctggccatcttcgccgccatctcgtcggtgattgcctcccaggggctggggatcctgctcaactatgcttcattcatcggcggctactacctggcggtgctgttgaccagcgcggtgctgattgccgtcggctatatggtgctgaaaaaagaggttttccgcctgctgaacatgctgaaagatccggtgctggtggcctttaccaccagcagctcggaagcggcctatccgaagacccttgagcgactggtgaagtttggctgctcgcgcaatatcgtctcgttcgtcctgccgattggctactcgttcaacctcgttggctcgatggtctactgctccttcgccgcgatgtttatcgcccaggcctataacgtgccgctgagctttagcgagattacggtcatgatgctgaccctgatgctggcctcgaaaggtatcgccggggtgccgcgttctgcgctggtggtgctggcggcgacgatccccagcttcaatataccggtcgccgggatcctgctgctgatgggtatcgaccatttcctcgacatggggcgctctgccatcaacgtgctgggtaatggcatcgccaccgcgatgctgtcgaaaaatgaagggttgctgaccgacgaggaagcgcagccggactgggaagtggagaaagcggaagcctga

SEQ ID NO: 264877 - DNA, 774 bp, Klebsiella pneumoniae
atgcctgagctgttgaatcccgcgcctgtcgcgcacctgcgccatctgctgcgcgcccattccccccttgtgcactgcatgactaatgacgtggtgcagacctttaccgccaacgttctgctggccgtcggcgcctcgccggcgatggtgatcgatccccgcgaagcggcgcagtttgccgctatcgccgatgcgctgttaattaacgtcggtaccctgaccgaagatcgcgccgtggcgatgcgcgccgcggtggagcacgcccgtcaggccggcaagccctggacgctggatccggtggcggtcggcgccctgaccgtgcgcactgccttttgtcacgagctgctggccttccagccggcggccattcgcggcaatgcctctgaaattctggcgctggccgggatgagcgccggcgggcgcggggtggataccaccgatacggccgccgcggcgctgccggcggcccaggcgctggctcgtcggctggctaccgtggtggcggtcactggcgaggtggactacgtcaccgacggcgagcgggtgctcagcgtggcggggggcaatccgctgatgacccgggtggtgggcaccggctgcgcgctgtcggcggtggtggcggcgagcgcggcgctgccgggagaccggctggaaaacgtggccgccgcctgcgggctgatgaagcaggccggggagatcgccgcccgtcagggaggcccaggcagctttattccggcgtttctcgacgcgctgtatcaggaggtgcagggatga

SEQ ID NO: 264878 - DNA, 801 bp, Klebsiella pneumoniae
atgaaacgcatcaacgccctgaccatcgccggcaccgatcccagcggcggggccggtatccaggccgatctgaaaaccttctccgcgctgggggcctatggctgctcggcgatcaccgccctggtggcgcagaatacccgcggcgtacagtcggtctatcgcatcgaaccggattttgtggccgcgcagctcgactcggtgttcagcgatgtgcgtatcgataccaccaaaatcggcatgctggcggagaccgatattgtggaagccgtggccgagcggctggcgcgctaccgggtggccaacgtggtgctggataccgtcatgctggcgaaaagcggcgatccgctgctgtcggcttcggcggtggagaccctgcgtcaacgattgttgccgcaggtgtcattgatcaccccgaacctgccggaagcggccgcgctactcgatgccccccatgcgcgtaacgaacgggaaatgcttgagcaggggcgggcgctgctggcgctgggctgcggcgcggtattgatgaagggcggccatctcgacgatgccgaaagcccggactggctcttcacccgcgaaggggaacagcggttcaccgcgccgcgagtgcagaccaaaaatacccacggcaccggctgtacgctctccgccgcgctggcggcgctgcgcccgcgtcacgcggactgggcggccaccgttatcgaggcgaaggcctggctgtcggcggctctggcgcaggccgactctctggaggtaggccacggtatcgggccggtgcaccatttccacgcctggtggtaa

SEQ ID NO: 264879 - DNA, 1053 bp, Klebsiella pneumoniae
atgactgatattacgcagttgctgggcaaagatgccgagagcctgttgcagcaccgttgtataaccattccgtccgaccagctgtatctgcctggcgcagattatgttgatcgggtgatggtggataacaaccgaccaccggcggtgctacgcaatatgcagaccctgtacaataccggacgcctggggggaaccggctacctttccattctgccggttgaccagggcgtggagcactcggcgggcgcctcctttgccgccaacccgctgtactttgatccgaaaaatatcgtcgagctggcgatcgaagccggctgtaactgcgtggcgtcgacctacggcgtgttggcctcggtgtcgcgccgctacgcgcatcgcatccctttcctggtgaagctcaaccataacgaaacgctgagctaccccaccgaatacgaccagaccctctacgccagcgttgagcaggcgtttaatatgggggcagtggccgtgggagcgacgatctatttcggctcagaacaatcgcgtcgtcagatagaagagatttccgccgcctttgagcgggcccatgagctgggcctggtcaccgtgctgtgggcctatctgcgcaattcggcgttcaagaaagacggcgtcgactatcatgtttccgctgacctgaccggtcaggccaaccacctggcggccaccatcggcgccgatatcgttaagcaaaagatggcggagaataacggcggctacaaagcggttaacttcggctataccgacgaccgggtgtacagcaaactgaccagcgataaccccatcgatctggtgcgctaccagttggccaactgctatatgggccgcgccgggctgatcaactccggcggcgcggcgggcggggagaccgaccttgccgacgcggtgcgcacggcggtgatcaataaacgcgccggcggcatggggctgatccttggtcgcaaagcgtttaagaaatcgatggccgacggcgtgaagctgatcaatgccgtgcaggatgtttatctggatggcaaagtgactatcgcataa

SEQ ID NO: 264880 - DNA, 1284 bp, Klebsiella pneumoniae
atgtccgttaataacaaacagtggtacggtctaccgctcaacctcatctggggatatgtcgccatcgccgtgtttatgaccggcgacggctttgagctggcttttctgtcgcactacatcaaagcactcggattcaccccggcgcaggcttcctttgcctttaccctctacggtctggctgccgccctgtcggcgtgggtctccggcgtggtggcggaaatcattaccccacgtaaagccatgctgattggcttcgtgctatggtgtgtattccacgtactgttcctcgtcttcggcctcggtcgcgccaactatgcgctgatcctgctgttttatggcatccgcggcctggcctacccgctgttcctctactcctttatcgtcgccattatccacaacgtccgcagcgacagttccagctccgcgctgggctggttctgggcggtctactcggtgggtatcggcgtgttcggcagctatattccgagctttaccattccccacattggcgaaatgggcaccctgtggctggcgctgctcttttgcgccaccggcggcattattgcgctggtgtcgatgcgtcataccgaaacgccgcgccatatgcagaacctgaccactcgtgaaaaattcgccgaactggggcgcgcggcgacgctgctctataccaaccgcagcattctgttctcgagcattgtgcgcattatcaacaccctgtcgctgtttggttttgcggtgatcatgccgatgatgtttgttgatgagctgggatttaccacctcggaatggctgcaggtatgggcggcattcttcttcaccacgatcttttcgaacgttttctgggggattgtggcggagaaaatgggctggatgaaggttatccgctggttcggctgtatcgggatggcgctttccagtctggcgttctattacctgccccagcacttcggccataattttgccatggcgctggtaccggctattgccctggggatttttgtcgccgcgtttgtgccgatggcggcggtgttcccggcgctggagccgaaccataaaggcgcggcgatttcggtctataacctgtcagccgggctgtcgaactttctggcgccggcgattgccgtggtactgctgccctacttcagcactatcggcgtggtaatagcctataccgccttatatattctggccttcttcctgtgcccgttaatccgcgttgaacagcctggctttaccagcgatcagcatgcgaaaccgtttaccgccaacgcggcagagtcttaa

SEQ ID NO: 264881 - DNA, 1608 bp, Klebsiella pneumoniae
atgcaaaacgatacgcaaaacattattggcgtggatgtcggttcgggcagcgtgcgcgccggggtattcaatctgcggggcgagctcctcgcccacgcgacccgggaaataaccctgtttcgcagcgccggaaacaaggtcgagcagtcgagccgtgagatctggcaggcggtgtgctactgcattaaaacggcggtggccaacgccggcgtttcgccgtcgtcgatcgccgggatcggcttcgatgccacctgctcgctggtggtgattggcgataacgatgcgccgctggcggtcgggccttcggacgatgcggaccgcaacattattgtctggatggatcatcgcgccaccgggcaggcggaaaagatcaatgccacgggccacccggtactgcggtacgttggcggcaaaatctcgccggagatgcaaacgccgaaaattttgtggctgaaggagaatcgcccgcacatctatcagcaggcgcgccacttcttcgacctcgccgattacctcacctggcgctcaaccggcgatgaagcccgctcggtctgcacggtgacctgtaaatggacctacctggcgcatgaacaacgctgggatgccggttacttccgccagattggcctcgaagagctggcggatgaagattttgtccgcatcggccagcggattgtcgatccaggcaccccctgcggcgagggcctttgcgccacggcggcagaggagatgggcctgccgatcggtacgccgttggcggtggggatgattgacgcccacgcgggcggcatcggtaccgtcggcgtgcttaacggcgcggtcaacaatatggcctatgtcttcggcacttcttcctgcaccatgaccaccactcaggaagcggtattcgtcccgggcgtctggggtccttactattcggcgatggtgccgggctactggctaagtgaaggcgggcaaagcgccgccggcgcggctatcgaccagctgctgagcttccatccggcggcggcggaagcgcgcgagcaagcgaaagccgcaggcgtccctctaccggtctggctggcggatcgcgttctgacgcaagttgcttcgccttctgaagcggtaacgctggccgccggtctgcacgtcgttccggagtttctcggtaatcgcgcgccgcttgccgatccccacgcgaaagcgctgattgccgggctggggatggagcgggacctggataacctgaccgcgctgtacgttgccgggctatgcgggattggctatggtctgcgacagatcattgacgcccagcgcgcctgcggaattgagagtgaaaatatcgtcatcagcggcggagccgggcagcatccgctggtgcgtcagctgttggccgacgcctgcggcgttagcgtcgtgagcaccgccagccgcgagccggtgctgttagggtccgccatcctcggcgcggtggcgggcagagtcgcggcttcgctgccggaggccatgaagcagtttactcaggtggatgccacctatcacagcgagacggcgtttagcccgcttcatcagcgcaggtatgcggcctataaggcgctacaacaggccggcaggctgattcgcgaataa

SEQ ID NO: 264882 - DNA, 750 bp, Klebsiella pneumoniae
atgaaccactctgtctcctctatgaatacttccctcagcggtaaagtcgccgcgatcaccggcgcggcgtccggtatcggcctcgagtgcgcgaggaccctgctgggggctggcgcaaaagtagtgctgatcgaccgcgaaggcgaaaagctcaacaaactggtcgccgaacttggcgaaaacgccttcgccctgcaggtcgacctgatgcaggcggaccaggtcgataacctactgcagggcattttgcagcttaccgggcgtctcgatatcttccacgccaacgccggcgcctatatcggcgggccggtggccgagggcgacccggacgtctgggaccgcgtgctgcaccttaatatcaacgccgccttccgctgcgtgcgcagcgtcctgccgcatctgatcgcgcaaaaatccggggatattatcttcaccagctcgatcgcgggcgtggtgccggtgatctgggagcctgtctataccgcgtcgaaattcgcggtgcaggcatttgtgcacaccactcgtcgccaggtggcgcagtatggcgtgcgcgtcggcgccgtactgccgggcccggtggttaccgctctgctggacgactggccaaaagccaaaatggacgaagcgctggccaacggcagcctgatgcagccgattgaagtggcggagtcggtgctgtttatggtgacgcgttcgaaaaacgtcaccgtgcgtgacattgtgatcctgccgaacagcgtggatctctga

SEQ ID NO: 264883 - DNA, 1002 bp, Klebsiella pneumoniae
atgaagaagataacgatttacgacctggcggaactttccggcgtttcggcgagcgcggtgagcgctatcctcaacggtaactggaaaaagcgccgcatcagcgccaagcttgcggaaaaggtgacgcggattgccgaggagcagggctatgcgattaaccgtcaggccagcatgctgcgcagtaaaaaatcacacgtcatcggtatgattatccccaaatatgataaccgctacttcggttccatcgccgaacgctttgaggagatggcccgcgagcgcggcctgctgccgattatcacctgtacgcgccggcgtccggaactggagatcgaggcggtaaaggcgatgctctcctggcaggttgactgggtggtcgcgaccggggcgaccaatccggataaaatttccgcgctatgccagcaggcgggcgtgccaacggtcaatctcgacctgccgggctctctctcgccgtcggtgatttcggataactacggcggcgcgaaagcgctgactcataagatcctggctaatagcgcccgccgccgcggagagctggcgccgctgacctttatcggcgggcgcagcagcgaccataacaccagcgagcgtttacgcggcttccacgatgcgcatcgcgagctggggcttagcgtgccgcaggagaatattctggctcccggctattcgaaaggccacgttgaggcctgcctgcaggagcggtttggcagcgcgaagacgttgttgcaggggatatttgttaactcgacgatatccctggaaggggttgtgcgctggctgtcgcaggtggggctaaccggcagcgagcagccgccgatgggctgcttcgactgggatccgtttgtctacctgctggggcacgatatcgacatggtgcagcaggacgtgccggcgatgctggacgctgttttttcgattattgacgccggcgaagccagccagcagcggattgaaattcccccacgactgatgagcagcagctga

SEQ ID NO: 264884 - DNA, 942 bp, Klebsiella pneumoniae
atgagtaaagaagacgatatccggttggatcagaaggtgcgtgccgcatggatgtactacatcgccggccagaatcagagcgagattgccagccagctgggcacctccagaccggtggtgcaacggctgatcgccgccgcgaaagaagaagggattgtgtcgattaatctgcaccatccggtagcgaactgcctcgattatgcgcagttgctgcaggaaaaataccgcttgatcgagtgcaatgtggtccccgcctttagcgaagaaagcaccctcgacagtgtgtcatttggctgctatcagctgatggctcgctatctgcaggatgataaagagaaaattatcggtctgggctcgggcctgaccctgaaaaaagcgctgcagcgcatcgattttgacagcctgaatacccgctgcgtggcgctgatcagcgccatgaacgccgacgggcagtgcaattattacgatgacgtgcccctgctgctgacccgcaaaattaaggccaagtactatcagtggccggcgccgcgctacgcccaaagcgcggatgagtatgaaatgtggtgcaccaatcgcctattccgcagcgtctccggcgtcgcccgcgaggcggacgtgatttttgtcggtattggtccgctgggcacgcaaagtccgatctttaaagacgggtttatcaatcaggcgcaaatggatgagctgaccgcccgcggcggcattggggagatcctcgggcggtttattgatgcgcaaggcgacgtggtagacagcgagatcaaccgcatgatcaccagctatgatatccgccagagccactgcccgcggattgccgctgcctgtggagaacataaacgaccggcgatcctggccgcccttaaaggcggctggatcaatggcctggtgaccgatgagcataccgcccgctggctgctgacgcggtaa

SEQ ID NO: 264885 - DNA, 1368 bp, Klebsiella pneumoniae
atgaacaatcaattcacatggcttcatatcggtctgggttcttttcatcgcgcgcatcaggcgtggtatctgcatcgtctgattgcttccggggataatcgctggcgcatcgcggcggggaatattcgcaacgacgccgagcaggtggtccaggcgctggcggcgcagggaggacgttacgtcctcgagaccgtcagcccggaaggggagcgcgaatatgaagagatcacctcaatccagaaactgctgccgtggcaggccgggctacagccgctgattaacgaaggggcaaacccgcagaccaaagttatcgcctttaccgtgacggaaggggggtactacctgaacactcgccatcggctggaaaccagcaaccccgatctgcaggccgacctgcaaggcgagtgcaaaaccatttacggcaccctcgcgcggatcctggaaaagcgcatggccgacaacgccgggccgctgaccctgctcaactgcgataacgtgcgccataacggcgagcgtttccacgacggtatggtcgagttcctgcagctcaccggcaaacaggcggtgattgactggatggtggccaataccacctgtccgaacaccatggtggaccgcatcaccccgcgtccggcggccgatctgccggcccgcatcaaagcgcaaaccggaattgatgacaaagcgccggtgatgggggagacctttatccagtgggtagtggagaacaacttccgcgatgtccgcccgaatctggaggcagtcggcgtggagatggtggagtcggtcatcccgtatgaagaggcgaaaatccgtattttgaacgcgtcgcacagctgtattgcctgggcgggaaccttaatcggccagcagtatattcatgaaagcacgctgaccgatgttatctacgccattgccgaccgctacgttacggaggacgttattccgtgtctcggcgacaacggcattgatctgccgacctaccgggatgtggtgcttaagcgctttaccaacccctatatccaggacaccaaccagcgcgtcgccgccgacggcttctcgaaaattccggcgatgatcgcgccaaccttgcaggagtgctaccagcgcggcgtccgcccggaagcgaccgccatgctgccggcgctgttcttcgtctttatggagcagtggcacaagggaactctgccgtatcagtaccaggacggcatcctggatgcgcaggcggtgcatgagatgttcgaggctcaggatccggtggctgtcttcgcccgtgataaagccctgtttggtgatctcgccaacaacgcggatttcctggcgctgatgcgcgagaaagtcgccgccgtttacacgctgattaactaa

SEQ ID NO: 264886 - DNA, 1464 bp, Klebsiella pneumoniae
atgtatctgggtatcgatctcggcacatcggaagtcaaagcgttggtcattgatgagaaccatgaggttatcgccagccatagcgcgccgctgagtattcagcggcctcatccgcactggtcagaacaagcgccggagctatggtgggaggcgacggagtacctgatggccacgctacgggaaaaatgcgcccagcattggccggccattaaggcgattggcctctccgggcagatgcacggcgcggtgttgctggatgcagagggggaggcgatccgtccggccattctgtggaacgacacccgctgcgccgcagagtgcgccgagctggaggcgatggcgccggagctgcatcaggtggcgggcaacctggcgatgccgggctttaccgcgccgaagctgttgtgggtgcgccgtcacgagccggaacactttcagcgcaccgccacggtgctgttgccgaaggattatctgcgctaccggatgaccgggaagaaagtctccgatatgtcggacgccgccgggacgctgtggctggacgtggcgaagcgcgactggtccgacgctctgctggacaagtgcggcctgtcgcgtagccaaatgccgacgctggtcgaaggctgcgaggtttccgccacccttgacccgcaggtggctgcgcgctgggggctgaacgcctcggtgatggtggccgggggagggggggataacgcggtcagcgccattggcgtcggcgcggtctcgccgggggatgcgtttatttcgctcggcacctccggggtgctgtttgtggtgaccgatgcctatcgtccggcgccgcagtcggcggtacatgcgttttgtcacgtgctgccgaacctgtggcaccagatgagcgtcatgctgagcgccgccagctgtttgcagtggttctgccgtctgaccggcaccacggaggtggcgctgctggcggagattgccgagctaagcgaggaggataaagccaacgcaccgttcttcctgccctatctctccggggaacgaaccccgcataacgatcctgacgcccgcggcatcttctggggcatgacccacgccagcctgcgcgcgcagctcggctacgcggtgctggagggggtgagctttgggatcaacgacggcctgcaggcattgaaagagagcgggacgccgatcgcgcagtgctcgctggtgggcgggggcgcccgcagcccgttctgggcccagctgctggccgatattctcgctatgccggtggtgacccacaaaggcggagagaccggcggcgcgctgggcgcggcgcggctggcctgcctggcggcgggcaaacccattgccgcggtgtgtgaaaaaccggaagtctggcagacctggcgtgcggatcccattcgccaccacaccctgatgcaacgctacgcgcagtttaaagccctgtatttaaacgatctgcactatcgacagcactga

SEQ ID NO: 264887 - DNA, 1278 bp, Klebsiella pneumoniae
atgtctatcaataataaacagtggctcggtttacccctgaacctgctctggggatacatcgccattgccgtatttatgaccggcgacggttttgaattagcctttctgtcgcactatatcaaagcgctcggcttctctccggcggaggcctcctttgcctttaccctctacggcctggccgccgcgctgtcggcgtggatttccggcgtggtggcggaaattatcaccccgctgaaaacgatgatgattggcttcgtgctgtggtgcgtattccacgtgctgttcctcgttttcggcctcggtcacgccaactatgcgctgatcctgcttttctacggcatccgcggcttcgcctatccgctgttcctctactcgtttatcgtggcgattgtccataacgtcaaaagcgacaacgccagctcggccatcggctggttctgggcggtgtattccatcggcatcggggtcttcggcagctatattccgagctttaccattccgcacattggcgaaatgggcaccctgtggctggcgctggccttctgccttaccgggggcgtgattgccctggtttccctgcgccatattcaaacgccgcagcatatgcagaatctcaccacccgtgagaagttttccgagctgggacgcgccgcgacgctgctctataccaaccgcaatattctgctgtcgagcatggtgaggatcatcaataccctctcgctgttcggctttgcggtcattatgccgatgatgtttgtcgatgagctgggcttcagcacttcagaatggctccaggtatgggcagtcttcttcttcaccaccattttctctaacgtgctgtgggggatcctcggggaaaaacttggctggatgaaggtggtgcgctggttcggctgcatcgggatggcgctctccagcctggcgttttactacattcctcagcactttggccatagctttgcgatggcgctgatccccgccatcgccctcgggatctttgtcgccgccttcgtaccgctggcggccgtgttcccggcgctggagccgaagcataaaggcgcggccatttcggtctataacctgtcggcggggatgtcgaactttctcgcgccggcgattgccgtggtgctgctgccgttcttcagcaccatcggggtggtgatcgcctataccgcattgtacgtggtggcctttttcctctgcgcctttatccgcgtggagcagccggggttctcccacaaggaagcaaccgcccgcgagcaggttgaattctcgtag

SEQ ID NO: 264888 - DNA, 663 bp, Klebsiella pneumoniae
atgaatatgcaggcggttatttttgacatggatggcgtgattattgattccgaggcgctgtggcgtcaggcgcagattgacgccctcgcgcagtggggggcaacggcgagcgttgctgaatgtgaaaccctgaccaagggcaagcgcctcgacgacattgccggcacctggtgccgctattttcagcttgatctcgctccgcagcggcttgaagacgccatcctgcagcgcatcacccgcctgattgccgcgaaaggcgaaccgatgcgcggggtgcaggaggcgttacgctattttcgcgaagcgggttataagattgcgctcgccacgtcatcatctcgtcaggttattgccgctgtgctgaacaagctttcgctctggcacttttttgacgcgatctccagcgcggatgatgaaccacgcggcaaaccgcacccggcggtgtacctcacgacgctgcggaagctcaatctcaacgccagccagtgtctggtgattgaggatagctttaccggcttttgcgcggcccagtcggcggggattgccacgatagtgattgcagaagatagccagcacgcgcgttttcaggccgccgctggccgctatcaaaccttacctgaactgctggaagcgcttagcgcggagccagcggcggtggtataa

SEQ ID NO: 264889 - DNA, 360 bp, Klebsiella pneumoniae; identical to SEQ ID NO: 135021

SEQ ID NO: 264890 - DNA, 552 bp, Klebsiella pneumoniae
atgacagcgccagcagagaaaaacccggatggcggcgcatggcgccttatccgggctacgctctggtgccgtatttttgccgggtggcagctacgccttacccggcccggtgatttggcgctcatttcgcgcccttcgcaggcccgcgcaagcgtagcgccgccgggcaagggcagcgggtgcggagccggttttgtgccgggtggcggctgcgacttacccggcctacggtccgtgcgacttgtcgttaatttattcaccattgttgctgaaactgccggtgctggcggcctcaaaatcgctgagacgttcccgaaaggccggggcagcccgcatgaatgcgggctgagggccgtgttttgcacggacgctgcctcggcccgacccgaagcctgcagggataagtcgaagggaccgcgtagcggcgattttgctggccggagcccgggggtacagggggcggcggcgactggccgccccctgtacccccgggctccctgcgccatgccaggcataacgcagaagattaaccgggagcgcaaaatacgctga

SEQ ID NO: 264891 - DNA, 843 bp, Klebsiella pneumoniae
atgagcctgttggtagttatcgccgggctgttgctggctggcgcgctggggctgctgtacttcccgtggtcgggcaaaggggcggtagaccgcgatgccctcaaccgcgccctgtaccagtcgcgcctgcaggagctggcgcaggagcgcggcgaggacaacccggcgctggtcgtcgagcttcagcgcacgctgctgaccgatatcccgccccaggcacagcctggcgaacggccgctacgccgctgggcgctgcttccgggcgcgctgctgctggtggtcctgagtctgggcctgtatctgaaaaccagcgatattggtcaggtgctgctctggcagcaggctgaacgacattttcctgcgctgttgcagcaggttaaggacccgacggcggcgccgctgcgaatggatgagctggcggagctgcggcttggcctgcgcagtcacctgcaggataccccgaacgacctcgccggctggcagctgcttgggcggctgggcctgttgttaaacgatggcgagacggcgatcggcgcctttggccgggtgcatgctctggcggcggacgacccggcggcggctttcgattacgccagcgcgctggtgcgggcgggagatagcggccaggttcggatgggcgagctgctgctgcgcgacctgcatcagcggcagccgaacagcctgccggtgctggagatgctggccctgagcgcggtgcgtaatgaagattaccccgaggccgtggcggccctgcaggcgttactggcccggctaccgaaaggggatgcgcggcgcgcggcgattgtccgccagctggcgcaggcgcagcagcaggcgcaataa

SEQ ID NO: 264892 - DNA, 459 bp, Klebsiella pneumoniae
atgagaagtgtaatagtcatcctgctggcgctgatgctgaccggccaggcgtgggccgccatcgatacctggcagtttaaggatgaggcccaggagcaggccttccgcgagatcacctcccaattgcgctgcccgaaatgccagaacaacagcatcgccgactcaaacgcgatgattgccgctgatatgcggcagaaggtgtacgagctgatgcagcaggggaaaacgaaagggcagatcgttgactatatggtggcccgctacggtcattttgtcagctacgagccgccgctgaccgcgggcacggtgctgctgtggctggggccggggttgttcgtgctggcgggcgcgggagtgatcatcgcccgcgcgcgccgtcgcgacattcctgacgcggcgctcagcgccgaagagcgccagcggctggcggcattattgcaagaaggaaaagaacgatga

SEQ ID NO: 264893 - DNA, 555 bp, Klebsiella pneumoniae
atgaaccggaagctattgtttatcccgctggtgctgtttctggcgctggccgccgcgctgttctggcagctgatgcgcaacgccgatggcgatgacccgacgaccctcgagtcggcgctgattggcaaaccgctgccggaatttcgccttgaagcgctgagtacccccggtcagacgctggaccgacggacgctgattgacggcaagccgctgctgctcaacgtctgggccacctggtgtccaacctgtcgcgccgagcatcagtttctcaacggcctggcgcagcagggcgtgcgggtggtggggatgaactacaaagacgatcgccagaaggcgatgagctggctgcagcgcctgggtaatccctacaggctgagcctctacgacggcaacggcatgcttggcctggatctcggggtctatggcgcgccggagacgtttctcatcgacggtcagggcattatccgctggcggcacgccggcgacctgaacgaacgggtgtggcgcgaggagctccagccgctgtgggatcaatacaaccggagggcgggctga

SEQ ID NO: 264894 - DNA, 1953 bp, Klebsiella pneumoniae
atgatgccggagctgggccactttttattgtgtctggcggcgggactggcgctgctcctgagcgtttatcccctgtggggcgcggcgcggcaggaccggcggctgatggccctggcgcggccgctggcctgtgggctattcgcctgtatcggcggcgccttcctgctgctggtgcacgcctttgtggtcaatgactttaccgtccgctacgtggcggaaaactccaacagcgcgctgccggtgtggtatcgggtggcggcaacctggggggcgcacgagggctcgctgctgctgtgggttctgctgctcagcgtctggaccttcgccgtcgccatcttcagccgccggatgccgctcgacgccgtcgcccgggtgctggcggtgatggggatgatcgcctttggtttcctgctgtttatcctcttcacctccaatccgttcagccgcggcctgccgcagtaccccattgatggccgcgacctcaatccgctgctgcaggatatcggcatgattttccatccgccgatcctctatatgggttatgtcggcttctcggtggctttcgccttcgccatcgcctcgctgctggcgggccggctggatactgcctgggcgcgctggtcgcgtccctggacccaggcggcatggatgttcctcactctcggcatcgtgctgggctcggcgtgggcatactacgaactgggctggggcggctggtggttctgggacccggtggaaaacgcctcgtttatgccgtggctggtgggaaccgcgctgctgcactccctggctgtgaccgaaaagcggggcagcttccgcgcctggacggtgctgctggccatcgccgccttctccctgtgcctgctgggcaccttcctggtgcgctccggggtgctggtttcggtgcatgccttcgcctcggatccgtcgcgcgggctgtttattctggtactgctgattgtcgccatcggcggatcgctgctgctgtacgccctgaagggcggccgggtgcgggcgcgggtggaacatacgctgtggtcgcgcgagtcgttcctgcttggcaacaatatcttgctgatggccgcgatgctggtggtgctcctcggaacgctgctgccgctggtgcataaagagctgggcctcggcagcatctccatcggcgagccgttcttcaataccatgttcaccgccctgatggcgccgtttgcgctgctgctggggctgggaccgctgatccgctggcggcgcgatgacgtcgccaggcagattaagcgcctgattatcgctctgctggtgacgttgtcactttctctggtgctgccgtggctgctgcaggaccgtatcaccgccatggcggtcataggcctgatgatggccctgtgggtgctgatcttcgccctgatggaggttcacgaacgggccacccatcgccacggcttctggcgcggcctgcgcactctgacccgcagccagtgggggatggtgctcggtcacgtcggcgtggcggtgaccgttatcggcatcaccttcagccagaactacagcgtggagcgcgatgtacggatgcgccccggcgacagcatcgatatccaccgctatcactttgtgtttaacggcgtgcgcaatatcgtcggccccaactggaccggcggcgaaggcattatcgccgtgacccgcaacggccgcccggaagcgacgctgtatgctgagaagcgcttttacaccgccagccggatgatgatgaccgaggcggcgatcagcggcgggctgacccgcgatctgtacgccgcgctaggggaagagctgagcgacggcagctgggcggtgcgtctgtactataaaccgttcgttcgctggatctggtacggcggggtgctgatggccctcggcggtctgtgctgcatgctcgatccgcgctaccggatgcgtaagaagctgcaggaggcctcatga

SEQ ID NO: 264895 - DNA, 459 bp, Klebsiella pneumoniae
atgcaagcgcgtcgtaaaacccggctgtatatcgtgctggcggtgctcgccggcctcgggctaaccgtcagtctgacgctgtacgccctgagcagcaatatcgatctgttctacaccccgggggaaattatctacggtaaaacggaaacccgggcgctaccccataccgggcagcggctgcgggtggggggctacgttcagccgggctccctgcagcgcgacccgcaaaccctcgatgtgcgctttaagctgtatgacgcccgcggggtggtggacgtcagctataagggcattctgccggacctgtttcgtgaagggcagggcgtggtggcccagggcgtactggatggcgagcggcatattaccgcccagcaggtgctggccaaacatgatgaaaattacacgccgccggaggtgaaaaacgccatgacgccggagaaaacgggggcgcagccatga

SEQ ID NO: 264896 - DNA, 231 bp, Klebsiella pneumoniae
atgagccccgccttttcgtctttcgccgccttcctgaatatgggcggctatgccgtgtacgtctggctggcggtggccgtggccgtcgccgcttttggcctgctgacggtgcataccctgtgggcgcggcgggcgctgttccatgaggtacgacgccagcaggcgcgcgagcggcggatcgctgccgcccgcgaacatgacaaggaggccgcggatgcaagcgcgtcgtaa

SEQ ID NO: 264897 - DNA, 738 bp, Klebsiella pneumoniae
atgtggaaagcgttacatcaactggcgatccccgagcggctgtaccgcctgtgcggatgctggatcccctggctggcggcgttgagcgcgctgttgctggtcatcggcctggggtggggctttggcttcgcccccgcggactatcagcagggggaaagctaccggatcatgtaccttcacgtcccggcggcgatgtggtcgatggggctgtacctggcgatggccgtcgcggccttcgtcggggtggtctggcagatcaaaatggccgatctggcgatcgccgccctggcgccggtgggggcggtctgcaccctggtggcgctggtcagcggcgcggcatggggcaagccgatgtgggggacctggtggatctgggacgcccgcctgacctcagagctggtgctgctgtttctgtatgccggggtcattgccctgtggcacgcctttgacgaccggcggctggccgggcgcgcggcggggatcctcgtgctggtcggggtggtcaatctgcccatcattcattactcggtctactggtggaacaccctgcaccagggctcgaccaacctgcagcaaaccatcgacccaagcatgcgtctgccgctgcggatctgcatctttgccttccttacgctgtcggtcaccctgaccctgatgcgcctgcgtaacctgatcctgcaactggagcgccgtcgaccgtgggtggtggcgctggtgaataaaggagccgcccgatga

SEQ ID NO: 264898 - DNA, 660 bp, Klebsiella pneumoniae
atgatgcgtgcgctgttggcccgggaactgcgcctggcgtggcgcagcggggcggagatcctcaatccgctctggttctttctgatcgtcatcaccctgtttccgttcggcgtaggcgccgcgccgcagctgctggcgcagattgcgccgggcgtggtgtgggtcgccgcgctgctggcggcgctgctggtgatggatcggttgtttcgcgacgactggcaggacggttccctggagcaactgatgctcctgccgacgccgctggtggcggtggtgctggtgaaggtggttgcccactggatgatgagcggcctgccgctgctgatcgtctcgccgctggcggcgctgctgctggggatgagtctgcatgacgccggtgtgctggcgctgaccttgctgcttggcaccccgacgctcagttttctcggcgcggtgggggttggcctgacggtcggcctgaagcgcggcggcgtcctgctgagcctgctggtgctgccgctggcggtgccgctgctgattttcgccaccgcggcctgccaggcggcggccgccgggctcccggtcagcggctatctggcgatgctggcggcgttcttaaccgccagcgccaccctgtgtccgttcgccaccgccgctgcgctgcggctgaccgtgcgataa

SEQ ID NO: 264899 - DNA, 624 bp, Klebsiella pneumoniae
atgctgcatgcagagcgactgacctgcatcgttgacgatcgaccgctgtttgcggcgctgacgctgtccctcgctgccggcgagctgctgcaggtcgccggtgataacggcgcggggaaaacctcgctgctgcggatcctctgcggcctggcgcgcccggaaagcggggtggtgagctggcagggccagccgctggcgaaggtccgggagtcatttcaccgtcagctgctgtggctgggccataaacccggcgttaacgcggcgctgaccgccgatgaaaacctgcgtttcttctttccggccagccgccttcagcagcgggaaagcgccctcgctgccgtcggcctggcgggctatgaagatctccccttgagccagctctccgccgggcagcagcgtcgggtggcgctcacccgcctgtggttaaccgacgcgccgctgtggatcctcgatgagccgttcaccgccctcgacgccacggcgatggaaaccctgacccgtcgcctggagcagcacgcccggcaggggggatgcgccatcctcaccacccaccagccgctgcggccgctgggctgtccgttgcgcaccctgcgcctcggcggcgacgctggaggcgggcaatga

SEQ ID NO: 264900 - DNA, 1338 bp, Klebsiella pneumoniae
atgaaaatgcaatggttatcggccctggtgcttggggcattgagctgcgcggccttcgccgaagaggcgcctgctgacagcaatctgattaagcagggggagtatctggcgcgggcgggggactgtgtcgcctgccacaccaacggcaaagcggggaaacctttcgccggcggtttgccgatggagacgccgatcggcaccatctactccaccaatatcacgccggataaagaacacggcattggcgggtacaccttcgaagagttcgacgacgcggtgcgcaagggcgtgcggaaagacggttccacgctctatccggcgatgccgtatccctcgttcgcgcggatcagcgaagcggacatgcgcgccatgtacgcctactttatgcacggcgtggagccggtgaatgtcgccaacaaggacaccgacatcccatggccgctgtcgatgcgctggccgctggcgttctggcgcggcatcttcgccccgacgccgagcgactttgtcgccaacccgcaggttgacccggtgctggagcgcggccgctatctggtggaaggcctgggccactgcggcgcctgtcataccccgcgtagcctgacgatgcaggaaaaagcgctcagcgaaagcgaaggcgatgaatacctggcgggcagcaatgcgccgattgacggctgggtcgcctccagcctgcgcggcgaaaaccgcgacggtctggggacctggagcgaagccgagctggccgagttcctcaaaaccggacgcaacgataaatcggtggtcttcggcggcatgagcgatgtggtggagcatagtctgcagtatctctctgatgacgacatcaccgccatcgcccgctacctgaagtcgctcccgccgcgcggcggcaaacagaccccagccccggtggaagacagcgtggcgaaagatctgtggaagggtaacgacagtaaaaccggcgccgcgctgtacgtcgataactgcgccgcctgccaccgtaccgacggcgcgggctataaacgcgccttcccgtcgctgaagggcaacccggtggtccagacggaagatgccacttcgcttatccacatcgttctgaccgggagcaccacgccggcggtgaaagatgcggtctccaacctgaccatgccgtcgttcggctggcgcctggacgaccagcaggtggcggatgtggtcaatttcatccgcaccagctggggcaacaacgcgccggcggtcagcgccagcgatgtggcgaaggtgcgtaaggagactgcggcgcatgatgagaaggcgttaggcaacgccgatatctcgaagctgccgggggccggacagtaa

SEQ ID NO: 264901 - DNA, 1785 bp, Klebsiella pneumoniae
atggccaccgtattgaaaaaaaccgatgtcgcgatcgtcggcttcggctgggttggggcaatcatggccaaagagctgaccgaagccgggctcaacgtcgtcgcgctggagcgcggcccgatgcgcgacacctggccggacggcgcctatccgcaggtgattgatgagctgacctacaacatccgccgcaagctgttccaggatctatcgaaaagcaccgtcaccatccggcataacaccagccaacaggcggtgccctatcgccagctggcggccttcctgccgggtaccggcgtgggcggcgccgggctgcactggtccggcgtccatttccgcgtcgatcccattgagctgcggatgcgcagccactatgaagaacgctacggcaaaaacttcatcccccaggatatgatcatccaggatttcggcgtcacctacgacgagctggaaccgttcttcgataaagcggaaaaagtattcggtacttccgggaccgcctggtcgatcaaaggcaaggtcgtcggcaaaggccgcggcggcaatgccttcgccccggaccgctcggacgacttcccgctgccggcgcagaaaaacacctggtcggcgcagctgtttgaaaaagcggcgctggaagtggggtatcacccctataacctgccgtcggccaacacctccgactcctataccaacccctacggcgcgcagatgggcccgtgcaacttctgcggtttctgcagcggctacgcctgctacatgtactctaaagcctcgccgaacgtgaacattctgccggcgctgcgccaggaaaaacgctttgagctgcggactaacgccaacgtgctgaaggtcaacctgaccgacgacaaatcccgcgccaccggcgtgacctacgtcgacggccaggggcgcgaaatggaacagccggcggacctggtgattatcggcgccttccagttccacaacgtgcacctgatgctgctctccgggatcggcaaaccgtacaatccggagaccggcgaaggggtggtagggcgtaactttgcctaccagaacatgaccaccatcaaggccattttcgataaagacacctataccaatccgtttatcggcgcgggcggcaacggcgtcggcgtcgacgacttcaacgccgacaacttcgaccacggcgcggcgggctttgtcggcggttcgccgttctgggtcaaccaggccgggaccaagcccatctccggtttcccggtaccgccgggcaccccggcgtggggtagcaagtggaaagcggcggtggccgatacctacacccatcacctgtcgatggatgcccacggcgcgcaccagtcctatcggcagaactacctcgatcttgatccgaactacaaaaacgtcttcggccagccgctgctgcgcatgaccttcgactggcaggaaaacgacatcaagatggcgcagtttatgttcgataagatggcgccgatcgccaaagcgatgaagccgaaatatatcctcggcagcccaaaaaacgccaacagccactttgataccaccacctaccagaccacccatatgaacggtggggcggtgatgggggaagatccgaaaaccagcgccgttaaccgttatctgcaaagctgggacgtgcataacgtcttcgtcatcggcgcctccgcgttcccgcaggggctgggctacaacccaaccggcacggtggccgcgctggcctactggtcagcgaaggcgatccgcgagcagtatctgaaaaatccgggtcccctggtgcaggcataa

SEQ ID NO: 264902 - DNA, 756 bp, Klebsiella pneumoniae
atgatgtcgagcgagaaaaccaacaattccaggcgtgatttcctggtgaaatcgatggcgctgatcccgacggtggtgatcggcggcgcgggagcaggggctattggcgtggccaccagcgcgaccgcgcaggcggcccccgcttcagagccagcctccgggaacaccgcggcggccagcgactggaagccgcagttcttcaacgatcgtgagtgggcgtttatcaacgccgccgtcgcgcgcctgatcccggcggatgaacttggccccggcgccaaagaggccggcgtgccggagtttatcgaccgccagctcaataccccttacgccaccggctccatctggtatatgcaggggcccttcaatcccgacgtgccgaaagagatgggttatcagctgccgctggtgcccaaacagatctataacctcgggatcgccgacgccgaggcgtggtgtcaggacaaatatcataaaaccttcgctgaactgagcagcgagcagcaggacgaggcgctcggcctgtgggaatcgggtaaagccgagttcaaacagctgccggcctcgctgttcttcacctatctgctgcaaaacacccgcgaagggttcttcagcgacccgatccatggcggcaataaaggcatggtcggctggacgctgattaattttcccggcgcgcgcgccgactttatggactgggttgaacggggcgaacgctaccccttcccgccggtatcaattaatggggagagggcgtaa

SEQ ID NO: 264903 - DNA, 372 bp, Klebsiella pneumoniae
atgttcgatcatgtgaaattcggcgttagcgactatgccgccagcaaagcgttctttttgcaggccctggccccgcttggcgtaacgctggttggcgaaggcgaaccgaactacggcgcagagctggccggcagcggcgatgcttctctatgcctctatcaaagtgcggaaaaaccggcgccgctgcacattgcctttcgcgccgacagccgcgagcaggtcgatgccttctggcaggcggcgctggccgccggaggaaaggacaacggcgcgccggggctacggccaaactaccacgccagttactacgccgcgtttgtgattgcgccagacggtcacaatattgaagccgtgtgccatctggcggggtaa

SEQ ID NO: 264904 - DNA, 216 bp, Klebsiella pneumoniae
gtgaacctgcactttgatacgcgtattaacgaaatctatgtcgatccgaacctcatcggcaaagtagtcattggtgaagagggcatgtccgtgattgtctacagcttcacagatgaccgtttcgaaatccgcgataaagtctcctcggattatgtcattgagtcacatacccacttcaacggactgttgtccgccctcattgagccggtcagctga

SEQ ID NO: 264905 - DNA, 264 bp, Klebsiella pneumoniae
atgccagttttattccccgcccagctaaagcgctatttcacgattggtaacctgaagtcgctgatggttgaaggtaattatcccgtagccgaccctgtagacccagacgtcatggcagatttaatgcacaaagtcgcgcctgctgaatgggaggacaagaaaagaagggtctatgaggatattcaacgactattgattagtcggccggactacgcggatatgttcaatattatggatgggggtgagtacaatggcatgacatag

SEQ ID NO: 264906 - DNA, 471 bp, Klebsiella pneumoniae
atgcgcctggtcgaggccgcggttaacaataatccccgacatcgaggcgatattgataatcgacccgccgccggactccagcatcagttccgcttccgctttgcaggagttccatacgccggtgagattgacatcgatcacccgctgccactgctcgctctccatctccagggccggattggcgttggcgatcccggcggcgttgacggcgatgtcgaggcggccaaagcggtttttggccagcgcaacggcggcgcgcaggtcggcaatctggcggacatcgccggtaaaagaacaagcctgaccgccgatggattcaatatggctgaccgtttccgccagcccgccgtcgtcgcgaagatcaaaacagactacccgtgcacccgcgctggcgaggctgcaggcgatggtctggccgataccgctgccggcgccggtgacgaaggcgacgcgatcccgcaggctaaatag

SEQ ID NO: 264907 - DNA, 717 bp, Klebsiella pneumoniae; identical to SEQ ID NO: 138179

SEQ ID NO: 264908 - DNA, 192 bp, Klebsiella pneumoniae; identical to SEQ ID NO: 226507

SEQ ID NO: 264909 - DNA, 441 bp, Klebsiella pneumoniae; identical to SEQ ID NO: 226506

SEQ ID NO: 264910 - DNA, 981 bp, Klebsiella pneumoniae
atgtctattcagaaaattgctcgtctggccggcgtctcggtggccacggtgtcgcgggtgctgaacaacagcgatacggtaaaagccaaaaaccgtgagcgcgtgctgcaggcgatcaaagagagtaactatcagccgaacctgctggcgcgtcagctgcgaaccgcccgcagcaatatgatcctggtgatggtctccaatatcgctaaccccttttgcgccgaggtggtgaaggggatagaagaagaggcggagaagaatggctatcgcattctgctgtgtaactccgggtcggatctggcccgctcgacctcgggcctgcagctgctctccggcaaaatggtcgacggcattattaccatgaatgcgctctccagcctgccggaactgaccaccatgattggcgacgcgccctgggtgcagtgcgcggagtatgccgacaccggcagcatctcctgcgtcgggattaacgacgtcgaggcggctcagggggcggtatcccggttggccgatagcggtcgccgccgcatcgcgctcattaatcacgacctcagctatcgctatgcccgtctgcgcgagcgcggctataaaagcgtgctgcacgtgcacggtctggcgtatcagcaggtgacctacgcgcaggatcttagcgcggcggccggtaaacgggcgatggagcaactgctgtcgcaagacgagaagcccgatgcggtgtttgccgtttcggactccctcgccgccggggcgctgcgggctatcgcccaggccggactgcgggtgccggaggatatcgcggtgatcggcttcgatggcaccgagctggcggaagtggtctccccgcagctgaccaccgtcgaacagccctcccgggcgatcggccgcacggcggtgtctctactgatgaaacgcatcgacgatcccgacgctgccgtcgaacgggtgatgatggactggcgcgtgatagaccgcgccagcgtctga

SEQ ID NO: 264911 - DNA, 1245 bp, Klebsiella pneumoniae
atgcaggaattaatatcgcaaattgccgccttaggaatcgaaataacccccacccgctcgctgatgattatcttcggcattatcttgttcaccgccgtggtcgtgcatctgatattgcacaaagtggtcctgcgcgcatttgaaaaacgggcgctggccagcagccatctgtggctgcaaatcatcacgcagaataagctctttcaccgactggcctttaccctgcaggggatcatcgtcaacgtccaggcggtgctgtggctgcaaaaaggcagcgaggccgcggaaatattaaccaccgtggcccagctgtgggtgatgatatatgccatgctgtccttcttctcgctgctggatgtcattttaaaactggcgcagaaatttcccgccgcctctcagctgccgctgaagggcatattccagggaattaagctggtgacggcgattattatcggcattctgattatttcgctactgataggtcagtcgccggcgatcctgattagcgggctcggcgcgatggccgcggtgctgatgctggtgtttaaagatccgatcctcggtctggtggccggtatccagctctctgccaacgatatgctcaagcttggcgactggctggagatgccgaagtacggcgccgacggcgcggtgatcgatatcggcctcaccacggtcaaggtgcgcaactgggacaataccatcaccaccattccgacctggtcgctggtctctgactcgtttaaaaactggagcggcatgtcggcctccggcggccgccgcatcaaacgcagccttaacatcgacaccaccagcattcatttcctcgatgaacaggagcagcagcgtttgatccgggcgaagttgcttaagccctatatggattcgcgccacgaggagattagcgcctggaaccagcagtacgccggggagcaatcgatcctcaacgagcggcggatgaccaatgtcggcaccttccgcgcctatctgcaggagtatttacgccatcatccgcgcatccgccaggatatgaccctgatggtgcgccagctggcgccggatgccaacggcttgccgatcgagatctactgcttcaccaacaccgtggtatgggcggaatatgaggggatccaggcggatattttcgaccatgtcttcgccgtggtggatgagtttggcttacgcattcatcaaacgcccaccggcaacgatattcgcgcgctgaccggcgccttctcccgctga

SEQ ID NO: 264912 - DNA, 1428 bp, Klebsiella pneumoniae
atgaatacgtctgctgtttcacccggccgcgccggtctgttgctgctgctgagcggccagatgctgccgcttattgatacctcgatcaccaatgtggcgctggacgccatcacccacaccctggcggccagcgccacgcagctggagcttatcgtcgcgctgtacggcgtcgcctttgccgtctgcctggcgatgggcagtaagcttggcgataactatggccgccggcgcctgtttatgtggggagtcgccctctttggcatcgcttccctgctgtgcgggatggcgaacagcatcggcgccctgctggcggcccgcaccctgcagggcgccggggcggcgctgattgtgccgcagatcctcgcgaccctgcacgtcaccctcaaaggccccgcccacgcccgggccatcagcctgtatggcgggatcggcgggatcgcctttatcgtcggtcagatgggcggcggctggctggtgtcggcggacatcgccgggctgggctggcgcaacgccttttttatcaatgtgccgatctgcctgctggtgctggctctgagccgccgctatgtgccggaaacccgtcgcgagacgccgtcgcggattgactggcagggtacgctgtacctcgcgctgatcctctgctgcctgctgttcccgatggccctcggtccggagctgcactggccgctgtggctgcagctgatgctggtggcggtcctgccgctgctgttcgccatgcgtcagagcgccctgcgccagcagcagcgtggcgaccatcctctgctgccgccgcgtctgctgcagttgaccagcatccgcttcgggatggccatcgccctgctgtttttcagcgcctggtccggctttatgttctgcatggcgctgaccatgcaggaggggctggggatggcgccgtggcagtccggcaatagctttatcgccctcggcgtggcctattttatttcggcgctgtatgccccgcggcttatcgcccgctacagcatggggcggatcctgctgaccggtctggcggtgcagatcgccggtctcctgctgctgtgcgccaccttctcccgcttcggcgtcgccaccaacgccctgacgctggtccccgccacggcgctgatcggctatggccaggcgctgatcgtcaacagcttttatcggattggcatgcgcgatatcagcgccagcgacgccggggccgggagcgcaatcctcagcaccctgcagcaggcgaccctcggtctcggaccggctatccttggttcgctgttcctggcgctggcccgtcgcggcggcggcaactatccgcaggcgctgattgattttctgctggtcgaggtggccatgatgctgttgctgggggcgatagcgctgtggctacgccatcatctcaaccgacagccggcgacggtggcctcgtaa

SEQ ID NO: 264913 - DNA, 867 bp, Klebsiella pneumoniae
atgaccacgatgccgcaacgggagtcgacgatcgccgtgccggacgatcgacgcaaacagctgggggcctttctgcgcgctcgccgtgaaagcctcgatccgcagcgcctggggttgccccgggtgggccgccggcgcacgccgggtctgcgccgggaagaggtggcgatgctcgccgacgtcggcgttacctggtacacctggctggagcaggggcgggaggtgaatccgtcggaggcggtgctggtgggggtggcgaatgccctgcagtgcagtccgctggagacccggcatctgttcgtgctcgccgggctgaccccgccggaagccacccaggtgacggtgtgcgaaggcatcagcccagggacccgccggatgctggacagcctgatgccgcagccggccagcattcagaaaccgaactttgatattgtggcgtggaacgacagcttctgccgcctgatgggcatcgatttcgccaccctcccggaagaagatcgcaactgcatttatctctatctgacccatgagacctggcgcagccggatcgaaaatcgcgatgtgctgccgaccttcgtctcctatttccgcgccgcgatggccgagcaccgcggcgatccggcgtgggaaaacaaactggcgcgctttttcgctgcctcgtcggagtttgaaacgctgtggcatcagcgctacgaggtgcgcggtgtggaaaaccagattaaacattttaaccacccgcagctcgggcgattcagtctgcagcagatgtactggtattcggcgccgcgcaacggctcgcgcctgctggtctatctgccgatggacgaggcgggcgagcaggcgctggcgtggctggaccaacattaa

SEQ ID NO: 264914 - DNA, 552 bp, Klebsiella pneumoniae
atggatgccattaacgcggccggcgggcttgctccagatgctgattggcgaaatgttgtgttaacacataacggtaaggatacgaagatatctttatatgcgttgatgcaaaaaggggacttgtcacaaaatcatttgctgtatccgggggatatactatttgttccacgtaatgatgatttaaaagtatttgtcatgggagaagttggtaaacaaagtacaatgaaaatggatcgaagcgggatgactttagcagaagcaattggtaatgccgaaggtatgtcccaagcttttagtgatgccactggtatatttgttataagacaactaaaaaatgataaaaaaggtaaaatagctaatatttatcagcttaatgcgcaagatgcttcagcgatggtacttggaactgagtttcagttacagccctatgatattgtctatgttaccactgctccacttgtaagatggaatcgcgttatatctcagctagtacctacaattacaggtgttcatgatatgactgaaactacacgctacattaaaaattggtga

SEQ ID NO: 264915 - DNA, 561 bp, Klebsiella pneumoniae
  misc_feature (509)..(518): n is a, c, g, or t
atgcgtctgcgtcattatttttatcgtaaaacattctggtatgagctaaaagaagtacttaggacgttaattattttctcaataatcgaactggcagttattgcattttcaaagtggtatttctctcgctacttatggttaatgacatggttgctttctgcattattagttccatttggtcggatgtcaataaaatggctgcttaacaaatatggattctggcgtagagagacttggattatcggtagcggtaaaaatgctaaagaagcactcgctgcaattaatagtgagaaaaacttaggtttcaaagttgtgggatttatatccgcaaacacaaatatagggcaaaactatgaactatttgaaggactaaaggtcattcacgttgaccatacatggttgaataatattgataaaaaaatgcagtttattgttgcggtcgaaacagaacaaagcgaagttcgcaattattggctgcgtcatttgatgataaatggttaccgctatgnnnnnnnnnnatgtgtctgttattccaacattgcgcggtatgccgttagatag

SEQ ID NO: 264916 - DNA, 783 bp, Klebsiella pneumoniae
atgaagaagacgattctggctctctctttactcgtgggaatgagcagcacggccagtgtgtttgctgctctgccgcagagcattcgcattggcactgacgcgacctatgcgcccttttcgtcgaaagacgcgaaaggggactttgttggctttgatatcgatttaggcaatgaactgtgctcccgtattaaggtgaaatgtacctgggtcggcagtgattttgactccctgatcccctccctcaaggcgaagaaaattgacgccatcatctcctcgctctccatcaccgagaagcgccagcaagagatcgccttctctgacaagctctatgccgccgactcccggctgatcgcggccaaaggctcgccgatccagccgacgctggaggcgctgaaaggtaaccacgtcggcgtgctgcagggctccacgcaggaagcctatgctaacgatcgctggcgcagccagggcgttgacgtggtggcatatcagaaccaggacctgatctattccgacctcgcagctggccgtctggatgcggcgctgcaggatgaagtcgccgccagcgaaggcttcctgaagcagcctgccgggaaagatttcgcctttgccggcccgtccgttaaagacaaaaagtactttggcgacggcaccggtatcggcctgcgtaaggacgacgccgagctgaaagccgcgtttgataaagcgctgggcgagatgcgcaaagacggcacttacgacaaaatggcgaagaaatacttcgattttaacgtctacggcgactaa

SEQ ID NO: 264917 - DNA, 585 bp, Klebsiella pneumoniae
gtgaaacgactgattattggcatttccggcgccagcggcgccatttacggcgtgcggatgctgcaggtgctaagagatgtgccggatattgaaactcatctcatcctcagccaggcggcgcgccagacgttggccatggagaccgactactccgtacgtgaggtgcaggcgctagccgatgtggtgcatgatgcccgcgacatcgccgccagtatctcctccggctcgtttaaaaccgccgggatggtgattttaccctgctcaatgaaaacgctctcgggcattgtccatagctacacggatggtctgctgacgcgggcggcggatgtggtgctgaaggagcgtcgtccgctggtgctctgcgtgcgggagactccgttccatcttggccatctgcgactgctggtgcaggctgcggagctgggggcggtgattatgccgccggtgccggccttctaccatcggccgcaaagcctggatgatgttatcaaccagaccgtcaaccgggtactcgatcagttcgacattagcctggaacaagacttatttacgcgctggcaagggtcacaggattgcaccaaatag

SEQ ID NO: 264918 - DNA, 465 bp, Klebsiella pneumoniae; identical to SEQ ID NO: 136489

SEQ ID NO: 264919 - DNA, 255 bp, Klebsiella pneumoniae
atgacccccacggctaccgacgccgcaggccgggaactcagctgcgccagctgtccgcatcgcgtgttatcgcgatcgcaaaccgccgtagtgcacggtattctcgaagggctggatatgagtaaaatcgccgccctgcagcgtgtgagtccccgcaccgccgcctatcataagaataagatcatggaaaaatacagcctgaataataatcatgaatttttccagtttatgaatcttttacgagagcgctggtag

SEQ ID NO: 264920 - DNA, 519 bp, Klebsiella pneumoniae
gtgtcgctgcgcggctccagcgtcgatctgctgcacctgctgttcggttcgattctggcggtggatagcgacgcggcgttctttgtcaccggcgtggcgagcctgacgctgctgtgcattgcgctgttttatcgcgggctggtcagcgaggcgttcgatagcgcctggctacaggtcaacgcgcggcggctaccggcgctgctgcacggcctgtttctcgcgctattggtactgaacctggtggcggggttccaggtgctcggcacgttaatggcggtagggctgatgatgttgcccgcggtagcggcgcgctgctgggcacgaacgctgccgggcattttgttgctggcggctgcgatcggcgcgttttgcgcctggatgggattgagcctttcgtgggcagtgaatttacccgccgggcccgccatcgtgctgaccgccagcgtgctgttttttatttcagtgttttttggcacgcgtagccggctggtcgttggctggcgtaaattgatggggtaa

SEQ ID NO: 264921 - DNA, 267 bp, Klebsiella pneumoniae
atgcagatgcagcagcgaggggatctgcgagagcagccacaacaacaggccgatggttccccccaccagggtaccgttgatgcggatgaactgcagatctttaccgatattgagctcgatctgccgcgacatatcgcgggcgtcccagctcttcactgtgtcgctgatatggcgggtgaggaaggcggcgaactccggcgccacccggtgcgccgcctgctccaggtgttcgttaagcgattcgcgcagcgcgtcgtcgcggagtaa

SEQ ID NO: 264922 - DNA, 819 bp, Klebsiella pneumoniae
atgatttatcattacacggatttgaatgcggcgaaatcgataactgaaaatgcccaaatatggttgactgattatcgttttcttaacgacaaagaagaattcacgaatggtcatgaggtacttttagacgctctcaacgaatataatgattattctggaaaatatccacaaaagtttattgatgatataggtaaagcagttgagtttattcgtgaccgggggagtaatgagtttacgcataataatatttttgtatcatcatttagccgcacacccgacctactgaaccagtggcgtagttatggaatgtattgcattgaactagatgaagttttttttagagatgatgaagttgttgttttagactgccattatcttcaagatgaaggtgatgcgctggattatgctatccttttgattgatgatcacatattacctaatctgatgaatgtttggaaaaaaaataaagcattactatcgttagagttaagttcacttatagatatttatgcactttcgttcaaacatcaggctttttttgatgaaaatgaaatcagattcgtaattagttgttctcctgatgatgatcgtataaatttcagaaccagaggaaatctattgataccatatattccattggcgtttgagcctcaactactaaagagcattactattggtccgatagataaccaagaactcgcatgtgcatctcttgcaatgttcctagaaaaaatctcacgaaaagtaagacaagaacaagatgatattgagtattgtctggttgtggaaaactcagagctcccatacagaaatatttaa

SEQ ID NO: 264923 - DNA, 144 bp, Klebsiella pneumoniae
atggattttgtcatcttcgtgttgataaactcggttgatccggaaagttccccccccttcaaccactacatcgtcaagagcctcaccttctatagcttcaccttcgatggtgataagggaatggccaggaacaatggcaactga

SEQ ID NO: 264924 - DNA, 204 bp, Klebsiella pneumoniae
atgctgtctactgataaccaaagaatttcagagatttttgaacgtttggcagaaatagcagctaaaactgctgaattaacaagcaaccccaatctatcccctgctcaaaagcaggcagcatgtgacagttactttatcgaacatgatcagttaacaaccgaagccctggagatcttcaaaaaaatcactaaaaatcctcggtga

SEQ ID NO: 264925 - DNA, 624 bp, Klebsiella pneumoniae
atgagcggcgatattaaagcagtatttgacagcaatttgcttgcaactaaggcgggtaccgttcaggtatttcattttgatatggcgtcccgtgagtttatcggtaccgaggagatttatattcatgtcggcgttggtcttccggcgttttcctgccttgaagaaccacctgtacaaactgaatatcaggttgccgttcgttctgaagataatgcggcctggtctgtaaccgatgattatcgtggtatcactgtctatgatattcagacgttggccagccgcgttattaccgaacccggccctatacccgatactgtaacgcgttctgtgccattaaccccatacgacaaatgggacggttctgcctgggtaacagatgcagatgcactgcatgctgcggatgtcactgctgctgacgttcaaaagaaacagctgattactcaggtatcagctgatatttccattcttcaggatgcagtaactcttaatatggcgactgatgaagaaaaatcccgactgacttctttgcaggcgtaccgtgtactgcttaaccgtgttgatacttcgcttgcccctgatattgtctggccgcttattacctattcggaggttgataatggctag

SEQ ID NO: 264926 - DNA, 396 bp, Klebsiella pneumoniae
atgaaagcatcaggacaattactctacggcgtgcctcacggtgacaccattcactatgactacaccgtgacggttccggtcattcgccataccgtcgctgcgctggcggcgacgacggaagctatgggagaagccgaatccccggccgcttccatgtactaccgtgccgcaattatggctgaagtgattgagtcgctgggcgacctccccaaagaggagatcaccgccgagctattgctcgatggcctgaccgatgaagatatggatcttctggatgccgagctgaccgggcttaaaaaaaagcggatgcgcgtgctgccggcctctcagggctcaggcgagccaccctcatcctcggacgattcggcatcagcgcagaccgtatcgaaggaatga

SEQ ID NO: 264927 - DNA, 171 bp, Klebsiella pneumoniae
atgaaagttaaagcccgtgaagggatccgagtaccgcgcgaggataacccgcgccgctacatcgagcaggagcctgtagaggttcccgggagcacctattaccagcgccgccttaacgagggcgacctggtcgaggtgactgaagcgactaccggcaaaggaactaaataa

SEQ ID NO: 264928 - DNA, 357 bp, Klebsiella pneumoniae
atgcctgaaattacgattacagcaaagcgcgacggcttccgtcgctgtggggtggcacaccgtgacgtgcctgtgacctggccggatggccattttacggacgaagaaatcgccatcctgcgtgccgagccgtcgctggttgtccatacaggcgcgatcagcggcgatgacgacaagctgaaggccgcactgggacgcattcaggagctggagacccagctggaggaagtgaccactgaccgcgatcgtctgcaggcagcgctggcacttcagacggcgagcctgtcaccggaggcgaaggataacgtcgctgccgatactgcagcggctgagtcttcggctaaagcgaaaaagtaa

SEQ ID NO: 264929 - DNA, 246 bp, Klebsiella pneumoniae
atgaacccagaccagctttaccagttacttctcggtcttgtcacgttgttcggcggtatctggatccgccgcctgcagctcgatatccgcgatctggaagaatcggttgaccgtatcagaaccgaataccagcgccgggacgatgcctcgcgtgattacagtctggtatcggacaacatccgggacatcaagaactcacttaaccgcatcctcgacaaactggacaagaaggcagacaggacatga

SEQ ID NO: 264930 - DNA, 264 bp, Klebsiella pneumoniae
atgtggaaagctattaacagcgacttaaacgcgcttatcaatgaagcggactccgagttcggatcagagcttacctcatcatttcatggttgttttaagctggggacggctgccagagacctttggactgataagatgatgaattctgccacgcttgatataacaaaaagcaactacgaaaatgcgaagcgagaatgcaagcagaatataattaacccgcaggccaaaaatgataatgtagcaatcattgacgttacacagtaa

SEQ ID NO: 264931 - DNA, 438 bp, Klebsiella pneumoniae
atgaatctgcaacaggtgacagaactactgcccccggcagtaatacagatagctgacctgattggcttcccggccaccgagcagctgctatccgcgttcggtggtaccactttccctattggtaaaggtctccgcgctctcggcgctaaccgcgccgctcttctccgcgataccatcggcgaccataatacccaactcctgatcaaaaactttggcggtgaggtgctttatcttcctcgttgcgatcgggcgttacgtgagctgcgtaaccgtcggttcctggctgagtttgactccgttcgtcaggatggcacctcttcactgatggccatgactcagctatgcccgcgttatggttttagtgatcgcttcggatggcagctgctggcgcaacaaaaagtagaaaaatctaatatgaatcaaaacgaattattctga

SEQ ID NO: 264932 - DNA, 216 bp, Klebsiella pneumoniae
atgaagagcctcctgcgtaatatgaccgccggtaactttaaccggcgttatccggtcggctcccggtttcggtattacatcgttcccgggatgcctgaagtggaagaagttgtcaccatctctgaagcctggcatgtacgtaacggccggctggtcgttcgggtagtagggaaaatcgggggcgtgtcggttaataaactcgaacccattcagtga

SEQ ID NO: 264933 - DNA, 279 bp, Klebsiella pneumoniae
atggctaaacaacccgaacactacaacctcgaaagcatttatgacgaaaaaatcagcccgctgatgcgccagattatcgacatttgcaaagagcataacatgccgatggttgcctcattcgcctatgagaacaacgaagagaaaggcattggctgctgcactaccaaactgatctttgaaggtaggtacataaaagaatttgcagaggctgcgtcaattattcgcggcaacccttttttatctgcgttcacaattatgtcgggagtaaaggaccaatga

SEQ ID NO: 264934 - DNA, 267 bp, Klebsiella pneumoniae
atggcaatgattacaaaggaacaacgtaagggttttatacagaaaataattgatgaaacccgaaaaaatggacgtcttactgttcgcgatgcctgtgaaatattaggaatgaatcgtgatgctgttcagcgttatttcaatatggcggcagatagcgggcaagttatccggcataagaaatccggtttatttcctgattatagggcaacaatcaactttgatctgcagcggtataccagtaagaaaggaggaagattagatggctaa

SEQ ID NO: 264935 - DNA, 519 bp, Klebsiella pneumoniae
atgggcttttataaaacatccgcaaaagctgcgcttgatgcatgggataatgaaattcttcaacgtgcagagctgaaagagaaatcacttgagtttgcaaaaaaattcggtggcaaaccggtattttacggtgatgctacaaatttccactttcacggtctgtcattcgatgtcgcgccacttattggacatagcagtctctggacgctttcccgttctcagaatggttatacccgcgagccccgtggtaagacccgtattccccgtgagcgccgcgaggaacatcagcagctgctggatgcatggggtgacggtcgccccacggaaagaatctcaagggagccttactggaaagcactgggtcttgaatggggaatgttgatcctgtgtggcattacccactatcgggtcggggacgtgatttatttcaaaaccgacgccagaccatccccggattccggtgcaatagagattgttgaatcggaatttaacgctgctgaaaaaacactgggctcataa

SEQ ID NO: 264936 - DNA, 264 bp, Klebsiella pneumoniae; identical to SEQ ID NO: 181793

SEQ ID NO: 264937 - DNA, 2928 bp, Klebsiella pneumoniae
atggccgagtttatcccgccgctgggcaccgcagaccctcagatttttatggataacgtcaggcgcctcgatcagcttatgcagtccacggagttaacctttcccgaccgtgctggtgaactgctgtatacctggcgaggtatccatcaaactctgatcccgctgagtaagcagtatatgacgctggcggcggcacaggcagacatcgtgaatatcccggtgaacgccacaacctacgtgcgtagcccggacggcagcgcgctggctgacgagtacatgaatgtggcggggacgctgacagcaaccgggcgcagaatgccctctcagcaatccgtagacgaaagccataaaaatatccttggctatctgactgatgcactgccaaatttataccggttcaaaacggtacattgccagactgcgccgactgcacaggctgcgagcgtcgctgccagctggtttattctgccggatgcgctgacggctggcctcatttcaaaagttgaactggccgttgcgacagcagggaagatctatgttgctactttctcaaaagcggggaatgtatttaccaggaaaaaggtgaaaagttttgatatcgctgccgggacagtttctctcacgccagagatgctggctgacgacggggattacatcggggtttatacggagggaggcttatatttcaacactgctgcgacgataactggcacggtttatcgctgggcatctacaacaccaggtagcgacaccaattttgacacggcattagcaacggggtcatacagctacacattccaggtacgcgcaaccgcgctccgtggaaatgcgctttcaattgctaccgatgccctgaatacgcagctgatcggcatcgcttcccgattcgacaatctgtctactgtttcccgcgccggagacggcaaccgcatgttcatgctgaatacgccagttaaatttgatggggtggtgacgggcgtcacctggctggcaaataacgcagggggtggcagtcagacggtcagggcgatggcctatcgtctctcgggttcgacctatacgctggttgattcacagatggtgtccgtcatcccggctgataatacggtagcggtacttccgctgtatctgagcgttaaagcgggcgattttctggttttttcagctccgctctgtttcgacagtctggtgaattttggcgttaattttgccgacgcgggatactccatttactccccatcggacagcactataccggccagcatcccggcgtcctcatttgctgcccagactggatcagtgttatgtgtccggtttgctgtgtcctacctggcaggtaatgcagagcaggataaaagcgttaaaaacgcgatgatatcgcggcttctgcgtaatgcagatggactctacctcaccgctgcgcgcccgattatttttgatgctgagggtgtcaacggaacagcgaacgccatttacgttccgcgtgtaatgaattacagctcgatggctgagcagcgctcaatcacgctgagtaacagcctggccgttgataatgtccgtgggccgtatacgaaaattacgttcagcaatatggatttccgggacgccagaacgaattaccgacttgtgtatatcgacctggcatctaacacgctcaaagtggtaaacggtatcagcgccatcccggcagtaaacatcctgcctgtgttggaaatctacggcaggctcgatgccatgaactatcgggtgttcgggggccttacatctatccaggcacagcgcccgaaaaacatcgacgcggtagctgacctttatgatgccattaccaacccgttgagggattcgcacatcgggcatatcggtgactcaattgactggggggtgggtgccacgggcattgcatctatcgatccccggtcacatcagctgtccgacgcgcgcaacaattttacctcccggacctgggtgaacttgttccgcaaatggactgctgagctgtcgtgtcatgcaaagaacacggttgatacgcaggccaccggcctctccacttattacaatgcggtaaacgtagaagtccaggatgcatggaaagatttcacgcctgctgacatcagcagtgggctgctgacccagacaaaggcggaaaccattcgtacgtttggagctaatcactgtatcgacattctcgccgggcgctcagtgtcgttccagttttccgggcctgccatcagcctggtgtacgctacgctgcagaacctgaacgcgtcgatctatattgatggcgtgctaaacacctctgtggttacggatggaacagttacaccgacttttggtacgagactggatatctcagggcttaccgataccattcatacgatgcgaattgagtgcgcggcatccgcgggtagtccactgcgcctgcagtacctggtcaggaacaagcgccattcggttatgaacagcggcctgattgggaccaacacggcggagtggctaccaggcggaacgcttctggtaccggaagcgctgcctgcaaacgtcactcacgtcctgattaaactgggaacaaacgacaggggaatggcgactggccctggttatatggctggcgcgcagggaacgttcgttaacctcaacgctatcgtgaattctctgcgcagcacgtatccaggagtacggatcatactcatcgcaccgccgtatgcaccaactgacagcgcgtatggttccagcgacgagatagcgcgcgcagttcgacgggcggccagggttctggagtgtggttttatcgatctgtactctccaacactggagctggagatgcagggtgagacctggctgagtgatggattgcatcctaatgactacggctatcgcatcatgtttaaagctgttcaggctgcaattgtatctgccggaagcaaataa

SEQ ID NO: 264938 - DNA, 2175 bp, Klebsiella pneumoniae
atggcctttgatccgccacttgggagcacatctcccgcggtgctgctcgataacgccactcgcctggataatttgctgaatagcctggcgctggtctaccctgaccgcgaaggggctgatctggatacctggcgaggtatcatgttgcgggtttcgaatacactggatgatatccggcaaaatctgatccctctcagccggcagtacatgacactggcagctgcgcaggcggatatcgcgaatattccggtgggctcgaccacgtattaccgcagcccggacgatagcgctctcgctatcgaggtcataaataacgccggaacgctggagccaaccgggcgaaaaatgccttcacaggaggcaataaacgaactacaaaaatacgtttctgaattaatcagcaatgatccgtccatcagcgcattcgttcagtgggaggccgttggcgggtttattctggggcaactctcaaaagattcgctgaaaactgcaggtttcgaagtcggtgccaaacgtctttcaatggatagcatggaaacgcttgccatagatgagcctgaattggttttacaggatcagcatgggtttgttattcaacgacaaacatccgaatatctggaaaatagcgcgggtaaattcatcccggcagataataacgattacgttattgaagatgagcatggattccatattttttcagcaatgcaatctggctctccgacctctacggaagacaagactgccgcgcgtgatgcatatattgcaaaaatggataatctggcgcttgcggtcagttctgcggtgaacaacacgctggttaccggcattcagaggcccgtatttgattttaacctggttattacatacggacagtcgttatcgaccgggacggaaggatgggcggcgctgtcaaatgaagcatttgaggctgaaaacgttctgatgtttggtgacgccgttcgccccacaacagaccgggacacaggcgggagtgtttggagtcccgtaggtggtgcagcacttaaacccctccaggctgttacacaggcgattggcggcggcagtattctgactgctgcagaagaagcagtactcactcccggcgccacaaacgaaggcgaaacatttgacgtgggggctgtgaatttctggcgcagattacagaacgattttcgtgggttaagcgttaaccctgaacggaaaatcattgtccttaactgtggtgttcaggggcggactgttgagcagttatcgaaagggaatccattaaatcattacaaccgtgttattcaagccgtaacaaaggtaaaagcctatatcgcaagtcagtatccgactgcaagtgttggcattaccgcgtttctgtacgctcaaggggaatggaattactgggcagccagttcagggacgcatgatcgagcgactttcctcgaactgacaaaacaacttcgcaccgatctgattactgattgcgcctatggtatttgtgggcaaaccctaccgcccgcctgggtgacttatcagaccggggccggatataccgtagacacgcaagatttagccattgggatggctcaaattgatatgatagatacggtccctggttgcttcatggctacaccagtttatcagcttactgataaaaacggtcatcttgacccgaatggttatcgatgggccgggatgcagtttggaaaagttctgcaccgtattctcgaccggggtatagactggaaaccgatgaagccgatcaaagccgttcgttattcagacgatgaggttcttctcagttttttaactccgtctccacccgctcagtttaaagaaacctacgtggtcaatacggccacaatgtaccccaataaaggttttcttgcgaaagatgatattggagttgtggacctcttatccgtagcaatagtaggccagtgctgcctgtccataaaacttagccgacagacttctggcgatgtgtatatctggtatgcgccagggacaacttatcgcgggaacggaaacctgtgtgacagtgatacaactgtttcgccatataactatgaatatcgtgcaggtagtggtcagtatccatcggcaaatattgctgcattggttgataaaccctatccactgaataactggtgctgtgcgttcagaattaaagttgaggaaaaatag

SEQ ID NO: 264939 - DNA, 198 bp, Klebsiella pneumoniae
atgccaaaaattaagaccgtacgcggtgctgctaagcgcttcaaaaaaaccggtaaaggtggttttaagtacaagcacgctaacctgcgtcacattctgactaaaaaagctaccaagcgtaaacgtcacctgcgtccgaaagccatggtttccaaaggcgatctgggcctggttatcgcgtgcctgccgtacgcataa

SEQ ID NO: 264940 - DNA, 126 bp, Klebsiella pneumoniae; identical to SEQ ID NO: 130791

SEQ ID NO: 264941 - DNA, 210 bp, Klebsiella pneumoniae
atggtattccgcgcggcgcgcggcctgcggctcggtggtgtcttcagaaatcagataaaacaggttgtcgccgtcgatagcgtgtttacccagcggcgtcgcctcgctgacctgagcgataacgtgttcgatagcctcgcgcagcgcggcaggcagccatggctgcagatggtggatattgccaataatcattgcttacctcaaatataa

SEQ ID NO: 264942 - DNA, 687 bp, Klebsiella pneumoniae
atgtctaaaaataatatcacagaagttaatattgaatttggccccgaggatttagaggatttaaataaatttgtctctatgattagagacaaaacagccgaatcatttataacaaaaaccgttcaggatatgtacggtattacaccatcaaaaatgacactggaagaacgtcttaactttgctgctgaaatagaaaatgaaaaaatagttgtttcatcaggaatgtctataagtgctggagatgttaacaagactttaaattacgataactccgatatgtcagacgtgctgaaagcatcagctatattagaggttatgggttttgagcgattagccaaccagatgagaaaacgctatggtgaaatgtttgttgaaaggcttatgggtagtttgcggcagatcgaatacgccaagaaagttataagtgaggacagaagtaaggccagaaaaggaaaaacaaataggcatcagcctacagccttaagaattgctgctgatacatgggataaatacccgcatgcaagccttgcggggctttcagaggatatttactcatatttgagaaaatcatggaaggatgttcccgtggcaggaactgtagagaaatggttaaaagagtcggggctaaatcccgatgtgaaacccaaaaataggaattttgagttaattatttccgagggggagtaa

SEQ ID NO: 264943 - DNA, 264 bp, Klebsiella pneumoniae
atgaaagatcatacccaaactcgcccggaatttacatggttattcctggcaacccctaagcagtatcccgacagcacaccagttgtactgcgcattgatgccgatacggaagaggaagcccgtgcagcgttctgcggctggaatatggttttcgccgccagaatatgtactcagatacgctggagaataacgttttacagcgatgattatcgtttgtccgccaacgttgaatccgagccggtagagggggtgtttcatgcttaa

SEQ ID NO: 264944 - DNA, 183 bp, Klebsiella pneumoniae
atgcttaaaaactatcaggtttacgggttcgccgttaataagcgcggccacacgataggcattcactacaccctgaccagcacaacacctgacgaggctaaattagcagcgcaattactggcgcagcaaggtggctataagcatatccgcatcaactttgttcgggaggtatccaatgactga

SEQ ID NO: 264945 - DNA, 1917 bp, Klebsiella pneumoniae
atgaaaggctggtataccatcaaagcggccagcgatggcagcagcgcaacgattaatatttacgaagagattggcggctggggcatcacggcgcagcagttctctgaagaccttaaagccctgggtgatatctcccatatcagcctgcatattcactcacccggcggtgatgtgttcgacggcatcgctatctacaacctcctgagcaaacaccccgcaaaagttacggtgcaaatcgacggtctggccgcttctatggcgtcggttattgcgatggctggcgatcgtattgttatgcctgaaaacgccatgatgatgatccacaagccgtggggtatctccggcgggaatgctaacgatatgcgcgactatgccgaactgctcgataaggttgaaaacgtgctcatcccggcttatgcgcggaaaacgggtaaatcagccgaagcactggcctccctgctggaagatgaaacgtggatggatggccgagaatgcgtggcgcaggggtttgcagacgaattattaccggcggtcagtgcgatggcctgcctggaatcaaaacgaattgaggattttgaacatatgccaaatgcacttaaagggatgatctccaacccgaaaggctctactgccagtgctgtaccggagcagaaccgcatcaacgggattaaagacctgttcgccatgtttggcggcaagcatgatgcactgaaaatgcagtgccttgaggatgttgaatgcacgccggaaaaggcaaaagacctgcttctggctgaaatggggcgcggtgcaacgccatcccaaaaaggtacgaatgcgcatatttacgctggtaacggaaacattacgggcgacggtattcgtcaggggctttatgcccgtctgggccatgagcgtgcagagcgtgggaacccttacgccatgatgagcctgtttgaaatggcgcaggcttcgctggtggatcgtggtatcagtgtcagtggtttcgggaaccgttcgcagattgttaacctggcatttacgcacagcaacagtgatttctctcacattctggctggtggcgctgaaaagtcagtattgaccggctggcaaaatagcggtgaaacattccagcagtggacaaagcgcggctctctgtccaacttccatgaagctaaacgtgttggcctgaacggtttctctgagctggataaagtgccggaaggggccgaatataagtatgtgaccaccagtgatagcggcgtcccgatcgcgcttgccacctacggcaatatcttctccgtaacccgccaggccatcatcaatgacgacctgagccagctgacaaccattccgcaggcgatgggccgcgcagctgcacgcacagtcggtaatctggtctatctgcaactgacggctaatgccagcttcactgatggtaaggccttgttccatgcagaccataagaacctcatcactaaagggatggacactgacgggctaaatgaagcacgtaagtctatgcgtcttcaggaggatgcgaacggcgatcctatcaatgttatccctgcctatattctcgtgccagcagcgctggaaggtgcggccaatcgcgccgtgctgtcctcatcctcgctgttcccggtagaccaggacggcacgatgaaccagaaccccggcattatcaacgtggtgaaggatatggcacaggtgatcgttgaaccacgactggacaaagccaataacgctcagtggtatgttgcagccgcacagggcaccgatacgattgaggtggcttacctcgacgggatggacacgccataccttgagcagcaggagggcttcaccgttgatggtatcgcgtggaaggtgcgcattgatgcaggtgtagcctctctggattatcgaggcctggtcaagtcgaatggtggtgcatga

SEQ ID NO: 264946 - DNA, 2433 bp, Klebsiella pneumoniae
atggctcaggctgtcggtgatttggttgttaaaattgatggagatagttcgaaatttgaagaggaagtgacgcaccttaaccggcagttggggatgatctccaaaacagctgatgcgactgctgccagtgtggtgaagtccttttcaagtcaggaggcgattgccagacgtgccggtatttccgtggggcagtataacgccgcaatgaggatgttaccggcacagttgactgacgtggcaacacagctggctggtggtcagaacccgtggcttattttgttgcagcagggtggtcaggttaaagattcgtttggcgggatcagcggtaccttgaaggtgtttctttcgatgctgaatccggtctatgttgctcttggtgccgtagccctcacctttggtacaaccgccgcagaagtctataaagcgcggaaagagattgaagccgctaacgttgccgtgcatgacggtctgggaatgaccggggactatgcccagaaactggcgctgaatattcgatctattgctgaagagtccggtagctccgttaaagccatctcggaaatgtttatcacgagcaaagatggtgccgatgaggctttgcagaagatgatttctgtgggctacagctaccaggatgcaaaagcgagggtcgatgaatacaaaaacgctacagacttcacctcccttaattctcttatcgagcagcacaaactaaaagtgctgggtattaccgatgcctggagcaaagcggcacaggaggtcaaaaactattatacagcagcagataagggtaaacagaatgttgcgctgggcggtgcaattgatccaattcttggcgttctggagcacgccaaagacctgcagacgacaatcaatgaccttcggatcaagggtaatctgaaggttaaagagtcggttgactggatcaataaggaatatcttgcagcggataaagtggctggcgcagaggccaggctgacagaggccagaaagcgggctaaagaaatacagttttccggcgataaaaaggccattgataatgccagcgctttgatagccgctcgtgaaaaagagctggagcaggccaaaaaagacagagataaaaaaccggcatacagaacgccggcaggtacacgggctgatgatactgtcagcgctcagacgctccagcttatggcgcagcttaacgtgctgcaaaagcacaagggccttaacgataccatcagtgaggagcggaaaaaactctggaaacttgaggcagatttctcagtacttgaggaagcatcgaaaacccgtgtgctgagcaaagatgaacaatcgttactcgccagcaaggataaggttctggcgcaggctgaggttaatgcaaaactcggggatcagatcgccgctcaggagcgcctgaataagcttcaggacaattcgctcaaatatgccactcagatgcgtgagaagacagcagcgctgacaaagagcgccggtctgggtgacagagagagccagcgtaaccttgaacgggcgcaattaagccagggctggcaaaatcagggcggaagcctggaggatgaaggttataagaaggagctggaagcgctagagggatactatgccgctcaggatgaaatgcggggaaactggctggccggtgttgagtcctcctggcagaattatgctgatatggctaccaactataaccaaatcgccgcagattctaccagctcagtactcaatggtgcgacttccagtattcaacaggcactatcggggattatcacgcaatccgagtcggctggcgatgcgcttaaaaacatggtggaagggtttggccagacggtcattcagacactgactcaactgggggcgcaatggctggtttatcaggcggttcagctccttgtaggaaaaacaactcaggcgcaagccggaacggccgtattcgccaacgctcaggctactgcgcttcaggcgcaattagccgcatatgcttctactgctgctatccctgtttatggccctgcgatggccccctttgccgctggcacagccgccgcatttactgagccgttggtctctgctattggtgcttattcactcgcgggcatggctcatgatggtatcgataaaatccccgaaacaggcacctggttgcttaagcagggcgagcgggtaactactgccagaacgtctgcaaagctggatgcgacactggaagctatcggtaaacaaagggaaagtgccggaaggtctgtaacgttaaatgtgaacaatactttcagcggcaagcctgatgatgcaaccatgatggcgatcgattcaaggaacagagaactgcgcaagcagctgaaagcagaactaaccgctgaaatagcgtctccgtcaggaccgtttggacgaacattacggggcgtttatcccaaccggaaaacgcgctaa

SEQ ID NO: 264947 - DNA, 261 bp, Klebsiella pneumoniae
atgagtgaagcaaaaccgcaggacggcagcactgtaaaaggctaccgcacattaacgccagctgacattgagatgatgaatgaggtcaaagctataagccgcgagttcctcaaaaagctggattttctcaaattcgttcatgaaagcgaatcagagccagaccctcaaactctgagcagcctggcaatagcccgcaccaaaatgcaggaagcctgtatgtgggcatgccgcgcagtcgcccggcctgatgctgactgttaa

SEQ ID NO: 264948 - DNA, 201 bp, Klebsiella pneumoniae
atgttaacagtaaaagtgatgtcgcctggtggcggcgaagaaatccattgtggcctgagcgttggtttcaaccccgaccagcagagcattgccgtatcgggaatggaccaagacatattcctgaaacagggagaggttgcgtacgtgatgaacgcaaacgggaagaccatttcccgttacgaaaacagggcgcagctgtag

SEQ ID NO: 264949 - DNA, 138 bp, Klebsiella pneumoniae
atgaccctcgatcacttcatgcagtaccaaaccgagagcgttaagcgcgccagtatgccgccagtagcaaagcacaacctgtaccagaccaaaccaaaccaaaccaaaccaaaacagccaaagagggccgcagcgtga

SEQ ID NO: 264950 - DNA, 1356 bp, Klebsiella pneumoniae
atgttggtgactatgacagacaaagaactttaccggcttggcattattcagcgagtatttgaccgggctttgcttcagcgcgacgcagcagacatacttaagctcagtgttcgtcaggtgcagcgtcttgtgcgcctgtaccggacagatggcgcaaccgcgtttgcatcttcccgccgtggacgtcctgcaaacaaccggatcgatgaagaaacacgctgtaaagccctggatttgatccggtgccactattcagattttggcccaacgctcgcaaccgaaaaactggctgaacgccatcatattcatctctctgttgaaaccgtccgtaactggatgacagccgacggtctctggcgtcctcattcccgccggcgaacccgggtttaccagccacgctatcgtcgcgactgtctcggcgaactggttcagatcgatggctctcaccatgactggttcgaaggcagagccccaaaatgctgtcttctggtcttcatggatgatgccactggtcgcataatgcatcttcgttttggtgaaaccgaatcagcctttgactacatgcttgctacccgtgaatatgttgagaaacatggtaagccgctggcattttacagcgacaaacacggtatttttcgagtaaatcatgccgccggaagcaaatctggaactcaatttggtcgagtcctgcacgatattggtgttgagcttatctgtgcgaacagccctcaggcaaaaggtcgtgttgagcgtgccaacaaaacacttcaggacaggctcatcaaagaaatgcgcctcaataaaataagcagtatcgaagaagccaatgcttggctggaaacgtttatcgtaaacttcaaccagcgcttcgccaaaacgcccaaatatccaaaaaaccttcatcgccctgtggcagaaacgattgtggatctggatgatattttctcatggcaggaaacccgtaaactcttgaaatcattaacattccgttatgataagatgatatatctggttgaacccacagaagaaaacacccgaattgccggggagaatattaaggtctttgattaccctgatggcaccctcgccttcaaatacggccaccgcgccctctcctatcaggtattcgataaactggactgtatcgatcaggggcaaattgtcgataataagcgactcggtgcagtgctccgattggctcaggataaaatggatgaattggatcgtaacggcaaacgtgagcgaagcacaaagatgccgaagcggcgtgctcaggctcgtatacaggaacagttacgagcaattaatccagttctggttaatccaaaagaatttcgtgcgagcttgaaaagataa

SEQ ID NO: 264951 - DNA, 303 bp, Klebsiella pneumoniae
ttgacgctctatatcgggatgagccgcgataccggcagagccataacggaaactgaccacctgcgccagtcggtgcgtgacattttgctggcccagccgcaaaacccggcgctgcgcctgcagatcatggctgcggtgtatgtggcgctgcggcgctgggagccgcggctgcaactggacaccatcacggttaacagcagcagcatggatggcgcaatggttattgagctggcaggccagcgtaatgacggcgtgcccgtgtccctttccgtatcgacaggagcagacaatggccgttattga

SEQ ID NO: 264952 - DNA, 888 bp, Klebsiella pneumoniae
gtggatgagcagtcaggccagctgctggggctgggtgttggcagcaccattgccggaaccacggataccaccaccaaagagcgcgaacccactgacccgacggtgatggcggacgtggaatacaaatgcgaacagaccaactttgatacggtgctgacctacgcaaagctggacctgtgggcaaaattccaggacttccaggtgcgtatccgtaacgccatcgtgaagcgccaggctctggaccgcatcatgatcgggttcaacggcgtgaagcgtgccaaaacctctgaccgtgacgccaacccgatgctgcaggacgtaaataagggctggctgcaaaaaatccgcgaagatgcgccggatcatgtcatgggcagcgaaaccaaagaaggcgtgaccaccaaaggcgccgtgaaggttggtaagggtggcgattatgccaacctggacgccgtggtgatggatgcggtcaacgagctgatcgacccggtgtatcaggatgatgatgatctggtggtggtctgtggccgtgagctgctgtctgacaagtatttcccgctggttaacaaagaccaggagaacacggagaagctggccgctgatctgatcatcagccagaaacgcatgggtggcctgcaggctgtacgcgcgccgtatttccctgcgaatgcactgctgatcacccgcctggataacctgtcaatttactggcaggaagatacccgccgtcgttctgttatcgataacccgaaacgtgaccggatcgagaatttcgagtccgtcaatgaagcgtatgtggttgaggattaccgctgcgcggcgctggtcgaaaacatccagatgggggatttcagcgcgccagctgtaccggaaggcgagggggcataa

SEQ ID NO: 264953 - DNA, 474 bp, Klebsiella pneumoniae
atgagtgagaaaatcattacgttatccggcgctgcgacggatgttctgtattcgctgttctttcgtggtgcattgctatgcgttgagctgccatctaaatctggtgctgctgagcttcgcggactggggttcgcggtaacccgatatacagcgacggaatatctgaaggaaagttatttcaccttcctgaccgctgaagggcaggagtttgctattaagcacctggcagatacgcgctttggtgttcctgctggtggttacatcggtggctctgtaaatattcagtttggccgtattgagactgaccctcgaaaaggctatgccatcaatgttggcatcggcccagaaattaagaccagtgtgaagttatcccctgaaatggaaaaagcgatttctgatgttgtgtcagctgaactgaaaaagaatcttaagcccggtggcacaatctgggattgcttacggcgtggagtctga

SEQ ID NO: 264954 - DNA, 1458 bp, Klebsiella pneumoniae
atgcaggtcactattgatggtgtccaatatgctcccgccatcgcccattcatcacgcatcggcatagccattaccacccacaaccggccggaagttttaaagcgtgccattgagcagcaccagaagcatctgccagccggtgcgctggtggttgttatcgatgatggttcaaaacctgtagcggtagtacccgatggcgtgcagctgcttcgccatgatggatcactcggaatcgttgcctcgaagaacgccagcctgtcagccctgattgatgccgggtgcgagcatctgtttttatgggatgacgacgcctggcctattgccgacaactggcatcttccttacatcgaatcccctgagccgcacctcgcctatcagttcctcgatctggctggccagcacaagctgaacgatattgcggtgctttaccgtgacgatcagcatgtggcgtataccggccagcgcggcgtgatgctttattaccaccgcagcgccatcgagaaggtgggcggattcgatccggtttatgggcgcggcatgtacgaacacagcgaccttgccctgcgcattcataacgctggcctcacgacgtgggcttacgctgatgtcgtcggttcagaaaggctgattcattctcttgatgagcatgaggccgtagagcgttcggtaccgaaaccagaccggcaggcgctggtggaacgtaacgtgaagatccacaacgaacggcgtgatgccgggtttactgggtacgttgagtatcgacagcagcgcgacgtcgttatcacaacgctgctcaccagccagcctgaccctcagcgcggtaccaaactgacggcctcgccggacatactggctaaatgggccgcatcactccggcagtgtggccgtatcgcgctggtggatgaactgcatgcggcaccggaagaagttgagttgtgccctgttgctgacgtgcagatgaatgtctacttccgacgctggctgcacatctggcagcatctgcgagatcaccctgaataccggttcgtctggtgtactgatggaaccgatgttgaaatgctccgcgcaccgtgggatgaaatggaacccggtaaggtttatgtcggttcagaaccgaaaacatacgctgacgcctgggcaaaacagaaacatcctgagcgcatctatcaggaattcattgaagcgcatcgcggcgatgtgatgcttaatgctggcctgctgggcggcatccgcgctgatgtgatggcgttcgctcacggcatcatccgtctttactaccggatcgagagttatcgtttctggaagaaagaacaggctggcgccgcggtgggggatatgatcgcttttggcattgtcgctaagtcttttggcgatcgcattgtcaccggcccgcgcatccatacagtttttaagactgatggtattggcaaagaatgctcctggtttaaacacaaatag

SEQ ID NO: 264955 - DNA, 678 bp, Klebsiella pneumoniae
  misc_feature (592)..(601): n is a, c, g, or t
atgaataacaaactctttgaaacgattattgcaaagttaaatttttcgctaattaagaaaacaccggtaattttacaatcagaatcagcggaatgtggtatcgccagcctggcaatgatctgcggacactatggattagatatagacttattcaatttccgccaacgcttcggcagtccatcgcaaggtgcttcactgctgcatttgagcaaaaccgccgagcgtgctggccttaaaaatcgcgcgctttcattagatttagatgaaataaaacagcttaagctcccttgtattatccactggggaatgaatcattatgtcgttctaacgaaagtacgaaaatctagctatgttgtgcatgatcctgctttgggtaaacgtataattggtttgcaggagatgtctaataatttcaccggcgtggctctggaactttggcccgatcagaactttcagcaagaaaaggcaaaagcacgcttacgtttattagacctgatgcgaaacattgtcggattaaagtctgcattaattaaaatcttcgcattctctgtcgtaatcgaagccattggccttttactccccattggtaccnnnnnnnnnncaccattggtacccaactggtcacagaccatgtcatcatggcccatgaccagagtctgttatccgtcatttgtatag

SEQ ID NO: 264956 - DNA, 192 bp, Klebsiella pneumoniae
atgccctactacctgcacgtgctggatcgggtgcagggagcggcgcacttcatggtcagcgatgatgaagcccgtgaaatcatgcgcgaactattgaccctcatctctggctatatggtgccgaagctggcgcgcgagattggcggggaacccagcaagacgccgctggatttagggctgaagcagcgttag

SEQ ID NO: 264957 - DNA, 1182 bp, Klebsiella pneumoniae; identical to SEQ ID NO: 149135

SEQ ID NO: 264958 - DNA, 390 bp, Klebsiella pneumoniae; identical to SEQ ID NO: 134624

SEQ ID NO: 264959 - DNA, 219 bp, Klebsiella pneumoniae
ttgtatgcgggtacgcaagcccacgccgccctgctgaaacagatgctgctggccgcccgtcagactgtggctttggtcgacggcagcaagctggggcgaacaggcgtcgcgcgtatcggcggactgggcgagctggactgtctggtgactgaaaggtttgtcgatccgctgctggaaaaagagatgacctggcataacgtcagcctgcaaatcgcctga

SEQ ID NO: 264960 - DNA, 585 bp, Klebsiella pneumoniae
atgactcgtctggccgttgagctaacgttgctaattttcatccggtccagtgagctgcgctttgctagatggtctgagatcgattttgaaacatcaatgtggacgataccggctgaacgagaagttatcgaaggggtaaagcattcacagcgtggttcgaaaatgcgtacacctcacttagtgccgttgtctagtcaggcattagcaattcttaaacaggtccacaagatcagtggtgaccttgattttattttcgttggagatcacaaccctcgtaaaccgatgagtgaaaatacgataaacaaggcgctgcgtgtgatgggatatgacactaaagttgaggtttgcgggcatggcttcagaactatggcatgtagctcgctgattgagtcagggctgtggtcgagagatgctgtagagcggcaaatgagccatatggaacgtaactcagtacgtgcggcttacattcataaggctgagcatttggaggagcgtaagttgatgttgcagtggtgggcggattatctcgatgtgaaccggggaaaagctatgagtccttttgattttggaaagataaatgattga

SEQ ID NO: 264961 - DNA, 648 bp, Klebsiella pneumoniae
  misc_feature (621)..(630): n is a, c, g, or t
atggctctgacagatatcaaagtgcgttctgcaaaaccgcaggaaaaggaatacacccttgtcgatggggatggcatgtttttgcttattcatcctaacggttcaaaatactggcggttccgctttcgttttggtggtaagcagcacctaatggcgtttggagtttatcctgaaacgtcattagctgatgctcgtcaaaagagggaagaggccagaaggcttgttgctgctggaatcgatcctcgcgaacacaaacgtgcggtgaaagaagaacaggcgaaagaaaatattacctttgagtccgttgccagagagtggcatgccgcaaataaaaaatggtcagaagaacatagccgacgggggctgaagagtctggaagacaatctgttctctgcaattggcaagcgcagtatcgaagagctaaagactcgcgacctgcttgcccccattaaagtcgttgaggctacaggtcgctttgaagtcgcttctcgtcttcagcaacgaacaactgccatcatgcgttatgccgtccaaagtggcttgattgattacaacccggcccaggaaatggctggtgcagttgcttccagtaatcgtgtccatcgcccaccccttgaattnnnnnnnnnnccatcgcccagcgcttga

SEQ ID NO: 264962 - DNA, 981 bp, Klebsiella pneumoniae
atgtctattcagaaaattgctcgtctggccggcgtctcggtggccacggtgtcgcgggtgctgaacaacagcgatacggtaaaagccaaaaaccgtgagcgcgtgctgcaggcgatcaaagagagcaactatcagccgaacctgctggcgcgtcagctgcgaaccgcccgcagcaatatgatcctggtgatggtctccaatatcgctaaccccttttgcgccgaggtggtgaaggggatagaagaagaggcggagaagaatggctaccgcattctgctgtgtaactccgggtcggatctggcccgctcgacctcgggcctgcagctgctctccggcaaaatggtcgacggcattattaccatgaacgcgctctccagcctgccggaactgaccaccatgattggcgatgcgccctgggtgcagtgcgcggagtatgccgacaccggcagcatctcctgcgtcgggattaacgacgtcgaggcggctcagggggcggtgtcccgactggccgatagcggccgccgccgcatcgcgctcattaatcacgacctcagctatcgctatgcccgtctgcgcgagcgcggctataaaagcgtgctgcacgtgcacggtctggcgtatcagcaggtgacctacgcgcaggatcttagcgcggcggccggtaaacgggcgatggagcaactgctgtcgcaagacgagaagcccgatgcggtgtttgccgtttcggactccctcgccgccggggcgctgcgggctatcgcccaggccggactgcgggtgccggaggatatcgcggtgatcggcttcgatggcaccgagctggcggaagtggtctccccgcagctcaccaccgtcgaacagccctcccgggcgatcggccgcacggcggtgtctctactgatgaaacgcatcgacgatcccgacgctgccgtcgagcgggtgatgatggactggcgcgtgatagaccgcgccagcgtctga

SEQ ID NO: 264963 - DNA, 867 bp, Klebsiella pneumoniae
atgaccacgatgccgcaacgggagtcgacgatcgccgtgccggacgatcgacgcaaacagctgggggcctttctgcgcgcccgccgtgaaagcctcgatccgcagcgcctggggttgccccgggtgggccgccggcgcacgccgggtctgcgccgggaagaggtggcgatgctcgccgacgtcggcgttacctggtacacctggctggagcaggggcgggaggtgaatccgtcggaggcggtgctggtgggggtggcgaatgccctgcagtgcagtccgctggagacccggcatctgttcgtgctcgccgggctgaccccgccggaagccacccaggtgacggtgtgcgaaggcatcagccctggcacccgccggatgctggacagcctgatgccgcagccggccagcattcagaaaccgaactttgatattgtggcgtggaacgacagcttctgccgcctgatgggcatcgatttcgccaccctcccggaagaagatcgcaactgcatttatctctatctgacccatgagacctggcgcagccggatcgaaaatcgcgatgtgctgccgaccttcgtctcctatttccgcgccgcgatggccgagcaccgcggcgatccggcgtgggaaaacaaactggcgcgctttttcgccgcctcgtcggagtttgaagcgctgtggcatcagcgctacgaggtgcgcggcgtggaaaaccagattaaacattttaaccacccgcagctcgggcgattcagcctgcagcagatgtactggtattcggcgccgcgcaacggctcgcgcctgctggtctacctgccgatggacgaggcgggcgagcaggcgctggcgtggctggaccaacattaa

SEQ ID NO: 264964 - DNA, 267 bp, Klebsiella pneumoniae
atgcggctccatcccgctgccgccgcgacctaccagcaggtcaaatttacgctcgcgcattgcgccgtagatctggttaccagtgccggtgatgattttggcgttaatccccgcctgcatcagcgtcgactgcacggcgatagcgatgttaagaaatggctgatcggagagtacccgcagcgtggtatcaaagccgttgggatatcccgcttccgccagcagctttttcgcccgcgccacatccagcctgtagccgggatcgggtag

SEQ ID NO: 264965 - DNA, 375 bp, Klebsiella pneumoniae
  misc_feature (330)..(339): n is a, c, g, or t
atgccgccatccggcaacatgtaccctacagtacaggcaaacagagatatgaaaaaaacctccttactgggagcgtgtattctcgcgctcgccatgtcgatggggagcggggaggcggtggcgaaaacgccgcccgaccagctgatcatcggcatgaatatgaataacctgctcacccttgacccggcggcgatgaccggtaacgaagtggtggggatcgtggtcaacctctacgactcgctggtggagcttgaccctgagcagctcaccaccgtcaggcccgcgctggcgaaatcctgggatatcagccccgacggcaaaaccctgacnnnnnnnnnngcgatgacgttaagtttcactccggcaacccgctga

SEQ ID NO: 264966 - DNA, 309 bp, Klebsiella pneumoniae
atgcgccagtcgctgatatacgggcttgaaccctggaaggcatcgggctgcatacgttttgccaaatctaatcgtattaattttaatcagtcttcaagatacaaggaaggcagcctcaccgccgttgcggccggagaggaagtcgttcctgcttctgagcttactgctgctctgaagcaggtccgggaacttcagcgccttctgggcaagaagacgatggaagttgagatcctgaaagaagccgtggagtacggccagtcgcgaaaatggatagcgcacgcgcccttgttgccaaaggacggggaatag

SEQ ID NO: 264967 - DNA, 204 bp, Klebsiella pneumoniae; identical to SEQ ID NO: 188309

SEQ ID NO: 264968 - DNA, 717 bp, Klebsiella pneumoniae
atgatgaaggaagggcgcggtcggagcaacagcggcggcaacttcctgatgagcaaaacccttgataactggtatttcgaactgaataccctgctggagaacggcagcacgctattccaggaccagcagtatcatggcaccgcactggaaaatgagaaaaatgtggcctatttgcgcccggttatcgcgtggaacagcgggcgcttctccactgccatcgccatggaaagcaacgtggtaaataacgcctatggctatcacgatgcgaaaggacgctgggtcgaccagtccagccgtaccggctatggctatacgatgacgtggaatgggcaaaaaaccgatccgcaggacggcgtggtgaccaaccttaacgtcgcttatatggatgccgaagatgagactgactttaccgcgggcgttaactccctgtggcacggttttgagctgggctacatttacgcgcataacaaaatcgacagctttaacaccgctgattttatcgctaactgcgacgataattgctggatcgccgatccgggcaactatgatatccacacaatccatgcgtcgtacctgtttccgaacgtaatgaatatgaagaacttcaacatctatcttggggcctacgcatcatggattgaatccaacccaaacaacggcgacggccaggaagactcccgctatggcggccggctgcgcttcaagtatttcttctga

SEQ ID NO: 264969 - DNA, 234 bp, Klebsiella pneumoniae
atgctggcctatggcctgtggtttcgggggattggccgcctctcaccggtggccgtgtcggcgatgagtctgctgagcccggtgaccgccgtggtactgggatggatattcctcggacaaaagatccaggggatggcgctgatgggattgatcgtggtgctggcgagcgtgatgtctatccagcgcgcgctggcgcgtcaggcggcgggagcaaaaacgaaaaaagccccgtaa

SEQ ID NO: 264970 - DNA, 363 bp, Klebsiella pneumoniae; identical to SEQ ID NO: 225386

SEQ ID NO: 264971 - DNA, 360 bp, Klebsiella pneumoniae; identical to SEQ ID NO: 140043

SEQ ID NO: 264972 - DNA, 438 bp, Klebsiella pneumoniae
gtgctcccgtcgttaaacagcagcgcggagccgcgggcgacgtacatcatgcctaaggtgcagataaacggcgccacgccgaagcgggtgatcaccgcgccgttgaccagaccgaccagcacaccgaagatcgccacgcagaggatcacctccgggacattaaagaagaggatatcgccgttccacagcggcaggccgttggtcagcagcgcgcccgcgaccatgccgcagatccccgccaccgcgccgacggacaaatcaatgccgccggtgagaatgaccagcgtcatgccgatggccagcaggccggtgatcgccacgtgctgggtcatgatcagcaggttagaggcggtcaggaagttgggtaccatcacgctgaagaacgcgatcaccagcaggagggcgataaaggtgcgggccttcagcaggtacatataa

SEQ ID NO: 264973 - DNA, 1545 bp, Klebsiella pneumoniae
atggcgccgcacgatctcgtcgctccccagcccgttgagtccgaagtgattatcgaaacccgcggcctgtcgcgcgtctatcccggcgtaaccgccctggataatgtcaattaccgggtctatcgaaataaggtcaacgtgctgatcggagaaaatggtgcgggtaaatccaccatgatgaaaatgcttgccggcgttgaaacgccctcctccgggcaaattatcctcgatggtgaagcagtttcattacagtcgacgcatcaggcagaaaaactgggcatcagtattatttttcaggaactgaatttatttcccaatatgaatgtgatggacaacatcttcatggcgaatgaattctttcagaaaggacgcattaacgaaaaataccagtacgcgctggccaaatcgctgctggaacggctggagctggatgtcgatccttacgctccgctgggtgaactcggtatcggccaccagcagttagtcgagattgcccgcgccctgtcgaaagacacccgcgtgctgatcatggacgagcccacctcggcgctgagccagtctgaggtcaaagtgctgttcaaggtgatcgcgcagcttaagcgccgcggcgtgaccatcatctatatctcgcatcgcctcgaagagctgatggagattggcgacaacatcaccattttccgcgacggtcgctttatcagcgagcgtcacgtcagcgacgccagcgtaccgtggatcatcgagcagatggtcggtgataagaaaaaacactttgattatcaaccggcgccaaaaggcgacgcagtgcttgacgtcaaagggctgaccgcgctgcatcccagcggcggttacaagctcaatgacgtcaccttcaccctcagcaaaggcgaagtgatcggtatttacggcctgctgggcgccgggcgcaccgagctgtttaaaggcctggtcggcttgatgccctgccagcgcggcgaggtgcatcttaacggcgaaagcatcggcaaatctcgctttcaacagcgcctgaaaaaggggctggcgctggtgccggaggaccgtcagggcgaaggcgtggtgcagatgatgtcgattcaggccaacatgacgctctctgatttcagcctgcaggggttccgccgcgcctggcgctggttgaacccgcaaaaagaagagacctgcgtgaaagagatgatccagcagctggcgatcaaggtcagcgacgccacattgcccatcacctcgctgagcggcggcaatcaacaaaaagtggtgctgggtaaagcgctgatgacccagccgcaggtggtgttcctcgacgaaccgacgcgcggcatcgacgtcggcgcgaaaaccgacgtctatcacctgatcggcaaaatggctcagcaggggctggcggtgatgttctcatcttcggaactggatgaggtgatggccctggccgaccgcatcctggtgatggccgatggccgcattaccgccgatttaccgcgccatgcggtgacccgcgaacagttaatcgcggcttcaacacctcaagattaa

SEQ ID NO: 264974 - DNA, 177 bp, Klebsiella pneumoniae
atgctgctgttccatcaactccgattgctggttataggtcttctgatcaatcatctggccatcgagctggcgtttaagttgatctctgccgtcagaataggctttattttccttcctgagcgggtcattgctgatcgcatcattaaggtctttctgtcgctgctgagcgtcaaataa

SEQ ID NO: 264975 - DNA, 366 bp, Klebsiella pneumoniae
atgagtaacttaattactacctatcgccgccgaattttaaaagcagccttgttacgccaccagcgaaagactgggagtagcttacttgtcattaagcttaacaagggtgggattagtactatcgaattaactgagattcttcttgatggattgttgcggaaattcgagcgactggccctcggtgaatacggaaatgtggaaggcgtgaaagctcttaagggaatctacagcaactctgttgatgttaatggcagcggcgaattcctcacagaaagcgggaaagagttaatcgacgagcttatttctgaactggtggagttcgtcaaaaagcagaaaccagttactgcggagtccggcaatgaataa

SEQ ID NO: 264976 - DNA, 201 bp, Klebsiella pneumoniae; identical to SEQ ID NO: 214892

SEQ ID NO: 264977 - DNA, 600 bp, Klebsiella pneumoniae
ttgcctaacccggccccggcatcgttaccgcccgtaccgggaacgccgatcccggaggaacaggaaccaaatattgaaacattgcccatcgaagaccgggatttcgatgactttattattgttgacccgatgggggttgtcccggcaatctatgtgtattttaagaaagcccctgtggaagagtatgaggttgactattatgaaaattttgaaggccgttcaaggcagggaaaatatcaagtcgatcatattccatctagagatgcggttcgtgtatatttagaggatttatatcctgatgagggaagtaaatatatagataagatggttgataaggttgcttcagttgctattccaatagctgttcatcaaaaatgtagtgaaacctatggcgggcgtaataatcgtaaggtagagacagaaagcggcgagatgataactaaaaaagagctagatgctcgtgacttagaagctgccgtcaatgccaactgggatgcgaatgctgaatgccttaagaatgaatatggtatgagtaacgagaaaatcgaagagatcagagcaaaactacataagttaaaccgaaatgtggggttatattaa

SEQ ID NO: 264978 - DNA, 951 bp, Klebsiella pneumoniae
atggaagccggagaccgcgccgcaggcgatggtgataaacaggaacgggaacaggttgccggtccataccgggccggtaccatcgacgaacttggtcagcgccggcatcgtcagggtcgggcgcataatcaggatgccaatcgccagccccacgatggtgccgattttcaggaaggtggagagataatcgcgcggagccagcagcagccagaccggcagtaccgcagccacaaatccgtagcccaccaggatccaggtcagctgtacgccggtgtaatcaaaccacggcgcccaggtcgggctttcagccacccagccgccggagatgatggcgaacaccagcataaccaggcctatcaccgacacctcgccgatgcgtcccggacgcagatagcggatgtagatgcccataaagatcgccagcggaatggtaaaggcgacggtatatgtcccccacggactgtgggtcagcgctttcaccacaatcatcgccaggaccgcgaggatgatcaccatgatcataaagcaggccaccagcgccaggacgccagcggtcggtcccatctcctctttaaccagttcgccaagcgaacggccatcgcggcgggtcgaaacaaacagcaccataaagtcctgtaccgccccagccagcaccacgccggcgaggatccagatcatccccggcaggtagcccatctgcgcggcgagcaccgggcccaccagcggccccgcgccggcaatggcggcaaaatggtgaccgaacagcacttttttgtcggttggaacgtagtcgaggccatcgttatgccgcaccgcgggcgtcatccgcgtcgggtcaacgccgagcacggttttagcgatatacaggccgtagaaacgatacgcgatcaaataaacgcagaccgcggcgacgacaatccacagcgcgtttatctgctcaccccggtttaa

SEQ ID NO: 264979 - DNA, 291 bp, Klebsiella pneumoniae
  misc_feature (205)..(214): n is a, c, g, or t
atggtggatacggcaacgacgaaagcggtcccggccgcagcggcccacgctacccggcaaggttactggcgcggcgtgctgcgccgcctactgcgcgaccccggcggggtggtggtgggcgtggtgatcctcctgctgctggccctggcgctgttcggtccgtggcttatcgtcaaagatccctatcaaacgtcgatgttcctgnnnnnnnnnnggtggtgttcgccttttttatcggcggggccatcgggattatcgccggctatacgggcggcaaaaccaataccgtga

SEQ ID NO: 264980 - DNA, 1065 bp, Klebsiella pneumoniae
atgggcatcgctcttcaaccgcgaatgggtgacgtcaaaagagagcgcgccgatgccggtgttcatcccggtccccaccaggaaggcctgatagtcgtcaaaaccggtgaccccggtgtagccggtcaacagattgttgatcccgtgctgccaggtcgcctgatagagcatcggcttgttgcgcagcgcgctgtcgtccactttaccggcggagagcgcgtagcgggtcattcccggacgcagcagctgggcgacggaagcgtaaggcacgctaaacacttctaccgagccatccgcttctttcaccgagacctcaagatcgctgccatagccggaaggatagacatcctgcagggtaaatggtccgggcggaacggtggtctgatagataatattgctgccctggcgcacggtgacgagggcgttgctctgcgccacgccgcgaatttccggagcatacgagcgcatgccgtccgggaacatattgtcatcggtggaaagattaaccccgcgcagaccgatggtgtcgaaaaattcaccattggtgaaaatctgcccgccgctgacgatggagttgagctgtgggatagggcgctggagataggtctggttgctgttccagtgcgctttaccctgctgctgctgccagttcaggttgccgatgtgcttcagcagccagccgtcccacgacagtccggcgttgacgcccagataggcgctgctgttatccgacccgcctaccgaagaggtatggctgttccaggcgttcgccatccagccaagattgagcgcggtaatacctttgtcccagaactccgggctgacatagtttttcaggcgttgatcttcatagatctgcggtaccgaaatgttcaaccgcagggaggactggaccaggttgtctttgacgttttcttcgttgcgccaggatttgaggctaccgcagtagccctcctgctcgctcagctgcggattgagcttttccgccgcgatgccatattgggccagcatcgctttggtgtagcagacgcccagccgaccatctttatcgcgcgcgatgcgtaa

SEQ ID NO: 264981 - DNA, 1062 bp, Klebsiella pneumoniae
atgcacgtagaagactatatgaatgaaacacccgcctgtctgctcgctatgctgacgcagacgcgggaagatctatggcaggcggcaaaagcgctaacggagcgcggcgtcacgcgtattatcctgaccggctccggtacctcttatcacggcgcgctgaccgcccgctcgtttatgcagcagtggtgcgggctacccgttgatgtctactggccttttctgctggatgattcggcgctgaccctcagcgacaaagcgctggtcatcggcatttctcagggaggcggcagcctctctaccctcgccgcaatggaacgcgcccgggcagccgggcatcttaccgcttccatggccggggaagcgccagccgttatcgaccgggcggcagatttggtcttaacagtaccctgtggagaagagcgggctggcgccaaaaccaaagggtatcactgcaccatacttaatctgatgctgctggggcttgctgtcgccagtcgccagcggcgcctgagcgatgaggagcgcaaggcgctactcgtccgcatggataccacgtttaatcatttgcctacgctcattgaggcctcgcaggcgtgggttctcaatcatgcccgaccgcttatcgacagcgcggacattcgcctgaccggtccggcaaggctgtttggcaccgttcaggaaggtgcgctaaagatgcttgaaacgctacgctgtccggttgccggttacgaatttgaggagttcatccacgggatctataacgccttcgacgagcgctctaccctgatcatgctcgatccgtttcccgatgagcgtcaggatcgcctggcggaaatacttggcggctggactcagcatatttatcgcattggtccacaagtcgaaaataacggcaaaaatatgcccttcgcatttattaacgatcccgactttgcggtctttgaatatattattccgttacaaatggtttgtgcccgactgccgccagtgaagggcatcgatcccgcaataccgaaggatccgcatttccaccagaaaatgaaaagtaaacaactcaattaa

SEQ ID NO: 264982 - DNA, 384 bp, Klebsiella pneumoniae
atgcaggcgcacgccgccggtttcaaaggagatgagaacgatcgggcggcgggccgggtcggtggtctgcgccgccagttcgtccgccagcatcagcgcgccgaccatttttgcgccgcccacctcgcccaccgcaccgccgataaagcgtccttcctgggagatgacaatggccgggtgctggccgagcaggccgatgccggtaacgatgccgtcgtcaaactccaccgcttcattcagcacgggcaggtgcgggctggttcgtttgtccgccgggccgatcagttcagtaaaggtgcctttatccaccagcgagctggcgcgaacgcgggcgctggcttccagaaaacgcagatcattcatgatgggtttctcccggcatag

SEQ ID NO: 264983 - DNA, 396 bp, Klebsiella pneumoniae
atggccccgcagggcgtgaaacagctcgcgatggttggggtcgtagaccacgccgatgaccggttcgccgtcggcgacgatcgccagcgacaggcaccaggtgtgcaggccgttgaggaaacagctggtgccatcgatggggtcgaccacccacagcactcgcgcgtcgggcaggcgagcgccgctctcttcgccgagaaaaccatcctccggaaacgcgctctgaatgcgctgtttgacaaaggcctccacccgcttatcggccacgctgaccacatcctgcaggtcgtcgcccttatggtcgacggtcaacgcctcgcgctgttgatagtattcaaacgccagctcagcccccgctttcgccagctcgcaggccagacggtagcgggcctgtag

SEQ ID NO: 264984 - DNA, 393 bp, Klebsiella pneumoniae
gtgaccgacgcccgcccgggcgtcggcttcctggaaaacagacggcgcgaaacgacgatgagcgataaaaaatggattaaggccgaggacgtggccagactggccggggtctcgcgctcggcggtctcccgcaccttcacccccggcgcctcggtgtcggagaagacccggcagaaggtgctgagcgccgcggaagccctgggctatcaggtgaatatcatcgcccggacgatgatcaccggcagcagtaattttatcggcatcgtcaccgccggtttcgacaacccgtttcgcagcaaactgctggcgccgctggtccatcagctggcgctcaatggctttatgccgctgctgatgaacgctgacgatccgcagcagctccccctcgcttaa

SEQ ID NO: 264985 - DNA, 840 bp, Klebsiella pneumoniae
gtgaaacaagaggccgccgatctcatcgatctgcagattgtcgcctttccgcaggagggaatcgaatcgtatcccaacggccgggagctgatgacgcgcgccatcgagatgggcgccgacgtggtgggcggcattccgcactatgagaacacccgcgacaaaggggtcagctcggtgatgtttttgatggacctcgcccagcgttacggccgcctggtggatgtccactgcgatgaaatcgacgatccgcagtcgcgtttcctcgaagtgctggcggaagaggcgcgggtgcgcggcatgggggcgcaggtcaccgccagccacacctgcgcgatgggctcttatgataacgcctactgctcaaagctgtttcgcctgctgaaagcctcaggaatcaacttcatctcctgcccgaccgaaagcattcatctgcagggccggtttgacagctggccgaaacggcgcggcgtcacccgggtggcggagctggatcgcgccggcatcaatgtctgctttgcccaggactcgattcaggatccgtggtacccgctggggaacggcaatatcctgcgcattctggatgccggactgcacatctgccatatgctcggctatgacgatctgcagcgctgtctcgactttgtcaccgacaacagcgcccgggcgctgtgtctgggcgataactacggcctcgccgaaggccgcccggcgaacctgctgatcctcgatgcggaaaacgactacgaggccgtccgtcgtcaggcacgggtgctgacctccattcgccacggcaaggtgattttgcagcgtgaggtggagcacatccgttacccggcatag

SEQ ID NO: 264986 - DNA, 678 bp, Klebsiella pneumoniae
atgaaaaccagctaccgtattcttatcgttgatgacgaagataacgttcgccgtatgcttgccaccgcgttttcgctacaggggcatgagacccactgcgccagtaatggtcaggcggcgctgcaacactttgccgacacgccgcccgacgtggtgctgatggatatccggatgccggaaatgaacggaattgaggcgctgaaagtgatgcgcgcgcagcagccgcggatccccatcattctgatgaccgcttacgccgaagtggaaaccgcagtcgaagcgttgcgtagcggcgcatttgattatgtgattaaaccatttgatcttgatgagcttaacctgctgattcagcgggccttacagctacaggcgatgaagcaggagatccgcagcctgcatcaggcgctgagcaccagctggcagtggggacatatcctgaccaacagtccgcggatgatggatatctgcaaagacacggcgaaaatcgccctttcgcaggccagcgtgctgatttgcggcgaaagcggcaccggaaaagagctgattgcccgcgccattcactacaactcccggcgggcaaacggcccctttatcaagataaactgcgccgccctgcccgattggccacgaaaaaggggcgtgtaccggcgcacaaacgcaacgccaagggctgtttga

SEQ ID NO: 264987 - DNA, 351 bp, Klebsiella pneumoniae
atgagccgattaaccgcaatcatcagcgctgtagtcattctgctgcttacctgcattttctcatggcgttctggctggaattctcacgctgaccatatcaacgccctcgcggcgaagaagaaagagaaagccgaaaagactatccagccagttgagcaaaaggccgctgccgctacagaagagggcaaggtcatctaccgaaccataacccgcgacgtggtgaaatatgtccagtctccgaatcgtactgtgtgccggtttgacgatgatgctgtgcagctgcgccaacgggccatcgacgctgccaactccatccccggatttgatgagccctccgtgcaaagcaagtga

SEQ ID NO: 264988 - DNA, 495 bp, Klebsiella pneumoniae
atgaacccgacgctgaggaataagctgattggtgcgatcgccggcggttcgggcgcaatcgcaattgcttctgtcatgcttggtaatgctgacggcctggaaggaaggcgttattacgcctaccaggatgttgtcggcgtctggactgtttgtgatggccacactggctccgatattcgccgcggccaccgttacaccgacagagaatgcgacaacctgctgaaggcagatctgcggaaggtggcaagcgccattgacccgctcatcaaagtccgcattcctgatcctacccgcgccgcgctttactcattcacttataacgttggctctggcgctttcgccagctccacgttgttgaagaaactgaatgctggagatgtgccgggcgcgtgcaaggaactgcagcgctggacgtatgccggaggcaagcagtggaagggactgatcaccaggcgcgagattgagcgtgaagtctgcgagtggggccagaaatga

SEQ ID NO: 264989 - DNA, 225 bp, Klebsiella pneumoniae
atgtatcgcatggaaaagataaccactggtgctgcctatggcgcttcagccgggagcatccttaacggcatgctaaatgcctatagccccgagcagtggaatgccatcggcgtactggtgggcattgtcatcgccgtacttacgtatctgacgaatttgtacttcaagattcgcgaagacacccgacgcagcaggagccgagatgaacccgacgctgaggaataa

SEQ ID NO: 264990 - DNA, 366 bp, Klebsiella pneumoniae
atggcgcgccaggctgagcatcaggccaagcgtcagctccgcggcggcatcggcattgcgccccggggtgtagagcacccggatgccgcgcgcctgggcggcctgggtatcaatattcaccggattcgcgcgggtgcaggcgatcacctgcaggcgcggacaggcggccatcaccgcgtccgtcacctcatcatagctggtcaccagcacctcggcgtcgtgggccagctcaatcagctgaccggcgctgagtttcggtttgcccagcgcccacccctccaccagcagctcgcccagctggtggaaggcgctaaggtcgccagcatgctcggcggtaaaaacgattttcatggttgtaggtcctga

SEQ ID NO: 264991 - DNA, 378 bp, Klebsiella pneumoniae
gtgtttgaaggcctggccttcgccattgtcgatgcgctgcagggttatccgcagggcggcgagctgtatctgaccggcggcggcgcagcctcggcgacctggctgcagattatcgccgactgtaccggacgcacggtggtctccagcgcctttaacgaactgagcgcgcgcggcgcggcgatcctggcggcccgtagcgtcgcggcgctggccgagacgcctccgctggcgcagacccgctatcagccgcgccctcaggcgcatgcccgctacgcggcgctgtatcccgtttaccgcctgctgcgcgagcagatgctgccggtatggcaggccagacaggccgcccttcaacctctttctcaggacctacaaccatga

SEQ ID NO: 264992 - DNA, 735 bp, Klebsiella pneumoniae
gtgggcccggggatcctgtggagcgatacccgcagccacgagctaatgagcgacctgctgcgccgacccggcttcgaccgccgctatttcgccgataccggcacccacctgcagccctgcaataccagcctgcagctgtactggctgaaacagtatcagccggcgcggctggcggccgcgcgctatctgtttttcgccaaggactggatccgctttcgcctgaccggcgtggcggcgctggagctgacggacgccagcagctcgttactcaatcagcagaccggcagctggtcctcggtggtgatgaacgagatggggctgaacgaactgctgccgctgtttcccccgctgctggccccggatgccctggccggcacgctgagcgacgcggtggcggcgctgaccgggctgcccgccgcgacgccggtggccgccggggcgctggatgtctgtagcgccgcgctgggctgcggcgcggtcaacgaaggggatatctacacgatcctcggcaccacctgctgcaccgggatcgtctgccgcggcccgcagacggtgaacgaggcgacgcgctttgtcacccataccgaagccggacaggtgatctccctgtttccgatgcaggccggtacgccaaacagagccaggcagcggcggcgtcttctggcagccgtacctcaatggcgaacgtgcgccgttttacagcccggacgcgcgggccggctttttcggcattag

SEQ ID NO: 264993 - DNA, 156 bp, Klebsiella pneumoniae
gtggcgatctggaagctgaaccgtagcgaaggtgcctcgcactatttcctcgatcccgatggccataagctggagctgcacgtcggcagtcttgcccagcggctggccgcctgccgcgaacagccgtataaggggatggtgttttttgctgagtga

SEQ ID NO: 264994 - DNA, 783 bp, Klebsiella pneumoniae
gtgcaggcggttaagctccgcacgcactgcgctggcgacctgcagggcgttggcggtgggcgtcggatagatccccagataggccgacgctttaccgttcagctgggcgccggagctgtagctgcgggcgcccagctcaatggtcgccacgtcggcgaggcgcaccagctgcccctgcgcgccgcggcggaggataatctcgccaaagctggccgcctcgttcagacgccccagcccgttgatggtcagcgtctgctgttggccgttaaataccggcggggtgcccacctgccccgccgcgccctgcacattctgctcgcgcagcgcctgggcgacatcatccgtggtgatgttgagcgcgttcatgcggtccgggcgcagccagatacgcatgctgtaatcccgggcgccaaacatctgcacctcgccgacgccgggcaggcgggccagcgcctcgcgcacctgggtgctggcgtagttgctgacaaacagcggcgacagcgtgcccagcggcgagtagaggcttacccccataagcagattgctggcgcgcttgcgcacctggacgccattctgctgcacctccgccgggagctgcgccagcgcctgcgccacccggttttgcacgtcgatcgccgccaggtcggcatcggtgcccgccgcgaaggttatgctcaggcggtacgtcccctcatccgagctggtggactccatatacagcatatgatcgacgccgttgagctgggtctccagcggggcggcgatggcttccgccacgtctga

SEQ ID NO: 264995 - DNA, 609 bp, Klebsiella pneumoniae
atgtggcaagaaagactcgcgcaactggtcaccacctgtcattggatcggcgcgaaaggctgggcgccggcgaccggcggcaatatgtcggtgcgtcaggatgatacctggtgctggctaagcgagtcgggccgcgacaaaggcagcctgacaaccgaggattttctgcaggttgagatcgccaccaaccaggcgccttccggacggaagccgtcggccgagaccggtctgcacaccctggtgtatcgcctgttcccggaagccaacgtggtgctgcatgtgcataccgtcaacgccactgtgctgtcgcgcatcgaaaaaagcgacacgctggcgctgcaggggtatgaaatgcagaaaacccttagcgggcagcatagccatctcgataccgttccgatcgccatcttccggctttctgctgcgcggccacggcctgacctgctgggggaaagatattcaggaggcccgccgtcaactggaggggctggagttcctgttcgagtgcgagctgatgcgccgccgctacgagccctgagccggagcaggtatggatttttatcttggtatcgatattggcacctcgcgggtgaaagcggtgctgtttga

SEQ ID NO: 264996 - DNA, 1104 bp, Klebsiella pneumoniae
gtgaatgcggttctccaccacaaaggccagcagcccggcttcggtcagggcccctttgatcgcggccatgtcggcggcggtcagcggcgttttttgttcacggctgctcaccagctccagcgcctggaacaggccgcgaccgcgcacctcgccgataatggcgtgcttctccgccagcgcctcgagaccggggcgcagcacctcgttgccgatagaggccgcgttctcaaccaccttctcctctttcatcgcgtcgatggtggcgacaatcgccgccatcgccagcggatggccggagtaggtcagccccccggcaaagaagtggtcgtcaaagtagcgggcaatcggctcgctaatcagcaccccgcccgccggcacggagccggcgttaacccccttggcaaaggtcaccagatccggcaccacgccatcctgctcgaacgcgaaccagctgccggtgcggccaaagccggccatcacctcatcgaggatcagcacgatgccaaactcgtcggccagggcgcgcacgccctgcatatagcctgccggcggcacgaggatcccggcggtgccggggatggactccagcaggatcgccgcgatggccgtcggcccctcgcattcaatgatccgccgcagatgcgccagcgcgcgctggcactcctcttcctcagtcgcggcgttgaactcgctgcggtaaaggtaggggttgaagaagtgaacgtggccacgggagaactcattcggcacccggcgccagtcgccggtagcggcgatcgcgctgccggtgttgccatgataggaacgataggccgacagcaccttgtcgcgcccggtatagagccgcgccatgcgaatcgcgttctcattggcatccgccccggcgttagtgaagaacaccttactgaagcccgccggcgccaggtcgacgatgcgcttcgccgcttcgccgcgggcaaggttggcggtggcgggcgcgatggtgaccagggtctccagctgcgacttcatggccgccaatacccgggggtgctgatagccaatgttgacgttcaccagctggctgctgaaatcgagccaggtgttcccctcataatcccatag

SEQ ID NO: 264997 - DNA, 810 bp, Klebsiella pneumoniae
gtggcgcgcgatctcggcgctgaccagattgccgccctgcaggataaacccggcgtgaaggtgctgagcatcccgtccgccgagcagaactacctggtgtttaataccgccaacagcgccaacccgctgctcaataatccggccttctgggaggcggcgcgctggctggtcgattatgagggcatcaccaaaaatctgctgaaaggccagtactttattcaccaaagcttcctgccggccggcctgccgggggcgctggagactaatccgttcacctttgatccgcaaaaagctaaggctatcctcgataaagcgggcattaaggatgcccacttcaccctcgatgtggagaacaaaccgccgtttatcaccatcgcccaatcgctgcaggccagctttgcccagggcggggtgaaggtggatctgctacccgccgccggcagccaggtctatgcccgggtgcgcgcgaagcagcatcaggcggcgatccgcctgtggatcccggactactttgatgcccactccaatgccagcgcctttgcctggaacgatggtaaatccagcaccgtggccgggctcaacggttggcagatccctgagctgaataaagccaccctcgccgcggtggcggagccggacccggcgaaacgcctcggcctgtacaaaacgatgcaggaaaccctgctccagcattcgccgtacgtctttattgaccagggaaaaacccagatcgtggtgcgtgacaacgtgaagggctatcagcagggactgaacgccgacatggtctggtacgataacgtgaccaagtaa

SEQ ID NO: 264998 - DNA, 501 bp, Klebsiella pneumoniae
atggccgatcgcatttttaaacgccgcggtatcgccggagagccaggtgtcgatcagcgcaaaaccgctgcgtggctcgacggtgtactgataaatatcgtcgaggcgacccgggcctggcgcccactgcagccgggcgtagaacagggccagcatcagcaggccgagccagaaaatgggcaccgagttgcccaacagggtaaaggtgcgaaccgccagatcccacggcgaaccggcgtaacgagcgcacagcaccccggcgacgatgcccagtaccgcgccgacgatcagcgccagggtcgccagctcaagggtcgccgggaagaccgccagcagatcgtggagcaccggctggccggtagcgctggcgatgccaagatcgccatgggccaggttgaccaggtagtgccagaactgcaccggcagcggctggtcgagacccagctgatggcgaacctggtcataggtcgactggctggcatggtcgccgacgatctgtag

SEQ ID NO: 264999 - DNA, 339 bp, Klebsiella pneumoniae
gtgcgccagcgcgataacgcccagggcggtccctaccccggcggtcgccaggccaccggtgttgcagtgggtcagcagtcgactgccgggcttcaccagcgcactgcccgcctcagcgatgcggtcgcacagctgtttatcttcttcgaccagacgcaaggcttccgcttccagcgcctgcgggtaatcctcccgggccagcgcctgcttcatgcgatccagattattcatcaggttgaccgccgtcggccgcgccgcgcgcagcgtctccagcgcctgctggagtgcatcccggttcaggccgcgctgggccagcagagccagcagcaggctggctga

SEQ ID NO: 265000 - DNA, 771 bp, Klebsiella pneumoniae
atgctggccgaagcgggagtggtggagcaggaactggaacaggataaacacccccagcaggtagaccagcggccagggcaggcccagcacgctgttgtcgcgaaaggcgaccatcagcggatcgctgaccgcgatgcgccgctggccggtcaacagatctgtcagaccggtaaacgccaccgaggtcgagagggtggccagcagcggcggcaggccggccgccagcaccagcaagccgttgatcgccccgcacagcaggcaaaccgccgccagcagcgccagcagcaggagatatggcgtgtgccattcggccagcccgaggctgagcagcgcgacgccgagcaccgccgtcgccggcagggagaggtcgatgccgccggagaccacatcatccccgcccacggcgataacgcagaccaggccgaaacagaggattgccagcggaacgctctggaccagcatcaggctgatattttgccagctgagaaagtagggcgactgtacactcagccataccagcagcgccagaaacaggatcaggggaaatttttcaatcagcgtcgccaggcccggacggccgcgacgctggatagcagtactcatggtgaaggctcctgtccgccgttgatcgccaccagcagagcgtccagcgttagcccgcgggtgggcagattggccgccagcgcgccgcgccagaggaccaggatccggtcgcatagtccgagcagttcgggggcgtcgctggaggagaccagcaccgcccgtccttga

SEQ ID NO: 265001 - DNA, 879 bp, Klebsiella pneumoniae
gtgttcgacgaacccaccgcccccctggaggcgcaggaggccagtctggtctcctccgctatcctgcgcctgcgcgaccagggcattgccattctgtatatttcccactacctcaatgagatagccaccctctgcgaccgcggcaccgtactgcgcaacggggaagtgatcggctacccggaccgcgacctgctgcaaaataccgaggcgctgatcgccatgatggtcggccgggaaatcgaccagctgtatactccgcgccagcgcccggcggcagacaccggggcgaccccgctgctctcggtgcgccagctgagcgacgggcggcagctgcaggatctctcttttgatattcagccgggcgaaatcgtcggcgtcgccggcctgctgggcgccggacgcgatgtgctggtcgacctactctacggcttacgcccggcggaacgcgggccggagaccgccacctttggctgggagcggcggggtatcgccgagcagaaagcgcgcgactggatagaacagctggcgatccgcccgggacgcccggggctgccggtacgctacatgagcggcggtaatcagcaaaaagcgatcctcgcccgctggctggggaccgatgcccggctgtttattctcgatgaacccaccctgggggtcgatatcggcgcccgccgggatatttatcaacgtacgcgccagctggccgatcaaggacgggcggtgctggtctcctccagcgacgcccccgaactgctcggactatgcgaccggatcctggtcctctggcgcggcgcgctggcggccaatctgcccacccgcgggctaacgctggacgctctgctggtggcgatcaacggcggacaggagccttcaccatga

SEQ ID NO: 265002 - DNA, 1302 bp, Klebsiella pneumoniae
atgaacatcaagatcgatgcgctgaactactacggcgcgacgaagaaatatcacctccatttcccggcgctacgggaagatattgaagccgatgtggtaattatcggcggcggcttctctggcattaacaccgcccttgagctggcggaacaggggatcaccaacgtggtggtgctggaggcgcgccatctcggctacggcggcaccgggcgcaacggcggccaggtgatggccggtatcggccacgatatcgaagcggtaaaaaagcacgtcggcaaagaggggctggagacgctgtttaaaatcgccaacctcggcgcgggcatcattcgcgaacgcatccgcaaatacaacatcgacgccgatttcgtgcccggctacggctatctcgcctataaccagcgacagcttaaaacgctgcgccagtgggagaaggagtttaaagccgctaccccggatgaagagatcgaactgtataccggaaaagaggtgcagcaggtggtgggctccgaggtctactgcggcgcgctgaaacatatgggcggcggccagatccattcactcaatatgctgctcggttcggcgcaggccgcccattcgctgggggtgaagattttcgaatcctcgccggtggtggaagtgaattacggcaaacaggtgcgggtacgcaccgcgatgggcagcgtcaaagccgccaaactgctgtgggcctgcgacagcttcctcaacaatatggagccggagatctacaacaagacgctggtcacttactcctaccaggtgtcgaccgagccgctctccgatgaactgatcgaacgcatcagcccactgcgcggcgccttcagcgatattcgcccggtaattaactactaccgcgtcacccgggaaaaccgcctgctgttcggcagcgccacccgctttgtggagtatacgccgaacgatttcgccgcctggaaccgcaccttgctggcggaggtcttcccctatctcagggatgtgaagatcgattttgcgtggggcgggccgatggcctgtagcgccaacctgttcccgcagatcggcaccttacgcgaccataacaacgtcttttacgtccaggggtactccggcttcggcgtcaccccgtcgcacatcgtgtgcaaaatcctcgccgaagggatcaacggcggttccgaccgctatcgtctgctaagcagcattcctcacgcgaccatccacggccgtgacagcctgcgtctgttattagtcacggccggaaaactgatgcatcaaaccgccggtttctggaaaggccggagttaa

SEQ ID NO: 265003 - DNA, 660 bp, Klebsiella pneumoniae
gtgctgattggcctgctcaatgcctttctgatcctcatctgccggatccgccccttcctcgccacgctcggcacctggtttatcgccagcagcgccgagcgcatctataccgacggcggcggcgcgatagcctatcggcggatggccccggagtatcacgacctggcggtgggcaaccttggtgggatccccacgccggtagcgatcgtgctggcgctgtggctggcggcctggctggttaccgagcgcaccctgtggggcaaatatgtccgcgccatcggccagaacagcgaagcggcgcgtatcgccgggatccgcgatcgcctgaccatgctcggcgtgctggtgaccgcctcggcgctctgcgccgtcggcggggtgatcctctccgccaacctgcggcagtttaccccgctggccgggcagtcttacctgatggacgccattgcggcagtatttatcggcactgcctttacccgtctgggccgggtcagcatcctcggcaccctcggcggcgtgctgttccttgccattattgataacggcctgaacctgatggggctcaattatctggtgaaggacgcgctggtcggcgtgattctggtggtggccctcgccctatccttctggcaggcgcgcctgcgccaaacgcatcgctaa

SEQ ID NO: 265004 - DNA, 759 bp, Klebsiella pneumoniae
atggtcgccacgctgctgctggcgcagggcgctctgacgcatggcgaacagcagcggcaggaccgccaccagcatcagctgcagccacagcggccagtgcagctccggaccgagggccatcgggaacagcaggcagcagaggatcagcgcgaggtacagcgtaccctgccagtcaatccgcgacggcgtctcgcgacgggtttccggcacatagcggcggctcagagccagcaccagcaggcagatcggcacattgataaaaaaggcgttgcgccagcccagcccggcgatgtccgccgacaccagccagccgccgcccatctgaccgacgataaaggcgatcccgccgatcccgccatacaggctgatggcccgggcgtgggcggggcctttgagggtgacgtgcagggtcgcgaggatctgcggcacaatcagcgccgccccggcgccctgcagggtgcgggccgccagcagggcgccgatgctgttcgccatcccgcacagcagggaagcgatgccaaagagggcgacgccccacataaacaggcgccggcggccatagttatcgccaagcttactgcccatcgccaggcagacggcaaaggcgacgccgtacagcgcgacgataagctccagctgcgtggcgctggccgccagggtgtgggtgatggcgtccagcgccacattggtgatcgaggtatcaataagcggcagcatctggccgctcagcagcagcaacagaccggcgcggccgggtga

SEQ ID NO: 265005 - DNA, 660 bp, Klebsiella pneumoniae
gtgggcctgcagcagccaggcttcggcctgctcgggcgggaactggcgaaacaggcgggacaacccctccagacgcagcgccgccagccgcagcggacgggtaaaatcgagctgctggtgcagggcgcgctgatggagcatctgcaggtccggatagtcgccggtgaccagctgcatcagaatgtcgcgctgcgactgcaggacgttttcgctgcggaccagcgcggtgccgatgcgctcggtgacaatcaccatcttcagcaggtagggctgctcgatcagcggcatgcccagctcgtcggcaagggcgatcagcgtggcgggaatggcgtggatataggcctcgccggtgaggatcaccatcccggcgatgccgcgctgtttgccctccatcagcaactggatcaggttggcttcatcccggggatggttgatgccggtgataaacaccagctcgccgcccatgatccactcggcgatatgttcattttccgccacgtagtaccagcgtacggcccgctgcagcccttgctttcccgcccgcagacgcagggcggagagtccctcaagggccagcagttcgctgaccgtcaggctcatggctcctgctccgcgacggcggcaggctggcgtttgcttagcagagtcagggcgatatag

SEQ ID NO: 265006 - DNA, 540 bp, Klebsiella pneumoniae
atgatcgtcgccggcgcctggtgcgctatcgtctatcaacaggccgatatcgttgaagtgctgatcctgcaggggctgtcggtggccgcggtgatcatgctctgtctcaacctgctgaccatccagggccccaccatctataacgtctccgccgccgcctgccatctgctgcgcagcgaacgtcgccggacgctgaccctcgccgccgccggggtgggcattgtgctggccattggcgggatgtacgaaatgctgatccccttcctcgtgctgctgggcagtattattccacccatcggcggggtgatcctcgccgactactggttcgcccgcggcgggcgctatcccctgctgcagaacgcccgcctgccgcgttttaactggctgggactcggcgcctacgccgccggcgcggtggtggcctatctttcaccgtggatcgcgccgctggtggggatctccgtctccgcgctggtctatatcgccctgactctgctaagcaaacgccagcctgccgccgtcgcggagcaggagccatga

SEQ ID NO: 265007 - DNA, 246 bp, Klebsiella pneumoniae
atgacagaaatcacacctgcagaacaaatccgactgactatcatcaagaaagttaactacgacactgcagcggccaagctggccattgactgggttggtgatagcaatctgaaagctgagctattcgctgactctttcgatcgcgtcttcactgaaagtgagattgtctcgaagacccgtaaagcgattcaggaagcgaccgaagcactggcgctgtttgataccatcgcagagcaggcgagctaa

SEQ ID NO: 265008 - DNA, 783 bp, Klebsiella pneumoniae; identical to SEQ ID NO: 215074

SEQ ID NO: 265009 - DNA, 1179 bp, Klebsiella pneumoniae
atggcggatattcagcgccagctgctgtcgctacccgaggcgacgatcatgaccttcgcaccgccgaccctgccgggcctgggcaatgcctcggggtttgatctgcgcatcctggcgcaggccggtcagtcgtcggcggagctggagcaggtgacgcgggagatcctccagctggcgaaccagcattcgcagctgagccgggtgtttaccacctggagcagcaacgtgccgcagctgaccctgacggtcgaccgcgaccgggcggcgctgctggatgtgccggtggcgcagatcttcagcagcctgcagacggcgttcggcggcacgcgcgccggcgatttcagccgtaacaatcgtgtctatcatgtggtgatgcaaaatgagatgcagtggcgtgagcgggctgagcagattagcgagctgtacgtccgcagccgcgacggcgagcgggtgcggctgagcaatctggtcaccattacgccgacggtgggggcgccgtttattcagcagtacaatcaattcccgtccgtgtcggtgagcggttcagcggccgagagggtcagcagccgcacggcgatggcggccatggagcagattttgcaggcccatctgccgccgggatatgactatgcctggagcgggatctcctggcaggagcagcagaccggcaatcaggcggtgtggatcgtgctggcggcggtggcgatggcgtggctgttcctggtggcgcagtatgagagctggacgctgccggcgagcgtcatgctctcggtgctgttcgccatcggcggagcgctgctctggctgtggaccgcgggctatgccaacgatgtgtatgttcagatagggctggtgctgctgatcgccctggcggcgaagaatgcgattctgatcgttgagttcgcccgcagccggcgcgaggaggggctgtcgatagtcgacgctgcgcgagagggggctacccgccgcttccgcgcggtaatgatgaccgcggtgtcgtttattatcggtatcatgccgatgatgctcgccaccggcgccggggcgcagagccggcggatcatcggcaccacggtattcagcgggatgctggtggcgacgatggttggcatcctgtttatcccgtcgctgtatgtactgtttcaacgtatgcgcgagtgggcgcatcggcgggggtaa

SEQ ID NO: 265010 - DNA, 561 bp, Klebsiella pneumoniae
gtgaaaaaaatgaaccgtacactccacaaatgttgtctgtcgggacttatcagcctggctttgtgtgcacctgttccggccgtgtatgccgccagcatcgagacgggatattctccggaaggaacggctctgcagttggtcctgaagactattgattctgcgcagcaggaaatccgactgatggggtattcctttacctcgcctgaagtcgccggtgcgcttgtcagggcaaagcggcgtggtgtcgatgtgaaagtggttctggactggaaagccaatactggcaagcaaaaccaggcgagcctggcggccatgaatcttctggtcaatgccggcatcccggttcgcacagtgtcgcagtacaaaatcatgcacgacaaagtcatcattgccgacggccgcaatattgaagtcgggtcttttaactacacccgcgccgctgatcgggtcaattcagagaacgtgcttgtcgtatgggatgatccagtcgttgctcaacgctatctgcagcactggttgactcgctggtcgcagggtacggactggaaacgggcttattaa

SEQ ID NO: 265011 - DNA, 888 bp, Klebsiella pneumoniae
  misc_feature (21)..(30): n is a, c, g, or t
atggcgccttccccggctgcnnnnnnnnnncattatgtcagcggggatgccgatcccctgtttcagaccgacaagttcgccgccacgcaaaccgaccccgcccgccagctggcggcggtgaaagagaaggccggggatctggcgcagcgtcggcaggcgctggcgccgaccatccagctattgaaacaggcggtttgtcaggccgataagccctgcccgatcttcgataccccgtggcaggtcgagcagagcaaaagtgggaagaccaccattagcggactgagcgtgatggccaatatggtggagacgctgcgtctcggctggagtgaaaacctgcctctcagccagctggcgtggggcaagatcacccaggccaggcagatcaccgccctgctgccgctgttaacggaaaactacgatctgagtaacgatgtgttgtataccgcgcaaaaacgcgggtcggtgctgctcaacgctatgctcgatggcgtcaaaccggaggcggatccgaacgtacgctggctgctgctggtggcccatgacaccaatatcgccatggtgcgcacgctgatgaactttagctggcagctgccgggctacagccggggaaatatcccgccgggcagtagcctggtgctggagcgctggcgcaacgcgaagagcggagaacgctatctgcgggtctatttccaggcccagggcctcgacgacctgcgtcgtctgcagacgccggacgcgcagcacccgatgctgcgtcaggagtggcatcagccgggctgccgtcagaccgacgtcggtacgctgtgtcccttccaggcggctattaccgccctcggtcagcgtatcgaccgatcatccgccccggcggtagccatggtcctgccgtag

SEQ ID NO: 265012 - DNA, 549 bp, Klebsiella pneumoniae
atgatctccggtcccgggatcacccgccacggtaaaatcgacgcctcgacgatggcggtgtatgacgtggcgccgacgctatatgaattcgccggcatcgatccgaacaagtcgctggcgaaaaagccggtgttgccgatgatcggcgtcagctttaagcgctatctcaccggagaagtacaggagccgccgcgcggcaactacggggttgaactgcatcatcaggcggcctgggtcgatggcgaatggaagctgcgacggctggtgccgcacggcctcaccgccggcgacgcgccgtggcagctgtttaatctgcacgacgacccgctggagacgcatgatgtcgcggccgaacatcccgatcgggtcaaagccatgagcgaggcctacgaggcatttgctaagcgcaccatggttaccaaagcgcagggcaaaatgatcgactacgtcggtatcgatagcaaaaccgggcgctatctggcggtcgaccccgccaccatgaagccggtgcctgcgccgcaggcgatccctgtgagcgagatccattaa

SEQ ID NO: 265013 - DNA, 723 bp, Klebsiella pneumoniae
gtgcagcagaccggctttaccaatgctgcggcagcggtaccggagaacacaaccaagccgtacagcaatattgagttcacgccgaaaatcactcctgtgacaaccatcgcgcacatgttcaaggcatccaagcagattctggacgacttcgcccagttgcagtccatgattgatgcggaaatgcgttacggccttaagtacgtcgaagaacaggagattctgtttggtgatggcactggcgctcacctccatggcattgtgccgcaggccacggcttacagcgcggcatttgccgttgaacagcagaacggtattgacgatctgcgcctggcaatgcttcaggctcaacttgcccgattccctgcatccggtcacgtcctgcacttcatggactgggcgaaaatcgaactgactaaagacaccctggggcgctatatcctggcgaacccggctgcgttgacggggccgacgctgtgggggcttccggttgtcgccactgaagcagcagctttccagggcaagttcctgacaggtgcatttaatgctgcagcccagcttttcgaccgcgaagatgcaaacgttgtgatctcgacggaaaacagcgacgacttcgagaaaaacatgatctctattcgctgtgaagagcgtctggcgttagcagtaaaacgccctgaagcatttatttatggctcctttactgtaccggcttccggcggccagtaa

SEQ ID NO: 265014 - DNA, 666 bp, Klebsiella pneumoniae
atgaaaaaaatcatcgcatcaggggtacctcttctgctggccggcgggtactacgcttcgctgtcggcagcgtgtcagatggtcagtggcaaaactatcgagtattcagtgaacgtcagccaggccagtatcaaccttgacgtcagcgatctccccatcggctccctgctatacagctacggagggatgattatcactaataacgaacgctgggagatcgcctgcagcggggtcgatgctgtagatatcccccggcttgccgtctcccgccgggcatcggctacagctttcagatgggggaacaggatggcattaatttcgatcccctgttcacggcctggccttccgcgccggtattttccggccagcgcgcatttcaggcggaaaataaaaaaccgaccatctatttctggcggattgccgataacggcggtctaccgccgccgggcgaatattgccttaatgattaccttggcgatatttatcttggcggagtacaggcgatgcgcttcagcgtcagcgggctctgtattcaggtcaaatcacccacctgcaagattactgacgacagtaaaaacattaacgtcttcctcggacggcataacaaaaccgcatttaccgggctcaacagcaccaccgccccggttccttttaacatcaacctga

SEQ ID NO: 265015 - DNA, 435 bp, Klebsiella pneumoniae
gtgacctttgagcgttttcttacgctggtggataaccatccgcgctgcaatatgctctatgacccgagccacctgcatctgcagcagatggactacctgacctatatcgatatctatcatgcgcgtattaaagcgtttcacgtcaaggacgccgaatttcgccgcaacgggcgcaatggcgtctacggtggataccagccctggcagcagcgggccgggcgtttccgctctcccggcgacggacagatcgacttcaaaggggtgttcagtaagctgaccgaatatgattttgccggctgggcggtgctggagtgggagtgctgcctgaaggatagtgagaccggcgcgcgcgagggcagcgagtttatccgccgccatatcattcccgttgccggacgggccttcgatgactttgccgccggcgggagggaataa

SEQ ID NO: 265016 - DNA, 177 bp, Klebsiella pneumoniae
gtgtacgaattccgccgcgagctgccgcgcgagcaggcgcaggaggccggctacgggctggcggcgctgatagacggcctgtggctgcgggcggcgctcagcggcaaaccgctggataaaacgctggcgcagtcgctgaccagccactttattcgtcagcatttaccgaacccataa

SEQ ID NO: 265017 - DNA, 918 bp, Klebsiella pneumoniae
atggagctgaccgacaccaccatgctgaccccggcgctgcgtttcgatcatcacagcattgtcggcaataactggagcccgtccctcaacctgtcgcagggcctgtgggatgacttcacgctgaagatgggcatcgcccgcgcctataaagcgccgagcctgtatcagaccaacccgaactacattctctacagtaaaggccagggctgctacgccagtaaagacggctgctatctgcagggtaacgacgacttaaaagccgagaccagcatcaacaaagagattggcctcgagtttaaacgcgacggctggctggcgggcgtcacctggttccgcaacgactaccgcaacaagattgaagcgggctatgccccggtctatcaaaacaataaaggtaccgatctctaccagtgggaaaacgtgccgaaagcggtggtggaaggtctggaggggacgttgaacgttccggtgagcgagaccgtcaactggaccaacaacatcacctatatgctgcagagtaagaacaaaaagaccggcgatcgtctgtcgattatcccggaatacacgctgaactccaccctgagctggcaggttcgcgatgacgtttcgctgcagtcgaccttcacctggtacggcaagcaggagccgaagaagtacaactacaagggtcaaccggtcaccggcagcgagaagaacgaggttagcccctacagcatcctcggcctgagcgcgacctgggacgtcaccaaatacgtcagtctgaccggcggcgtggataacgtcttcgataagcgccactggcgcgcgggcaacgcccagaccaccgggggcgccaccggcacgatgtacggcgccggcgccgagacctacaatgaatcgggccgcacctggtacctgagcgtcaacacccacttctga

SEQ ID NO: 265018 - DNA, 351 bp, Klebsiella pneumoniae
atgcgtttagcttctaaatttggacatactcactctattcggctggaccgtcctttaacaaatgaagaattgttaacagtagtaccttcaattttctctgaggaaaaacatacttcacgtagtgaacgttatacttatattccgactatcacgcttcttaataagttgagagaagaaggttttcaaccttactttgcttgccagtctaaagtcagaaatgatgataaacgcggtcacactaaacacatggtgcgtttacgtcgtgagggtaacaaccagggtaaagaagtaccggaaattattcttcttaactcacatgatggttcttctagttatcagaggctttgttga

SEQ ID NO: 265019 - DNA, 381 bp, Klebsiella pneumoniae
atgtttaaccctgataaataccgttcagtcacctggctgaagggcgggcgcgtatacccgcaactcgactgtttcggcattgtgaacgagatacgccgcgacctgaatttacccgtctggcccgattttgcaggggtaaccaaagacgacggcggcctcgaccgggaagcacgcaggatgatgcttacccttgagcgctgcgaaccctgcgaaggggccggggtggcctgttattccgggtcgactgtcacccacgttgggatcgtggtcagtatcgatggtctgctgcatgtggcggaatgcaatccgggaacgaacgtcacctttctgccgttgccgcggtttaagcggcgatttgtcaaagtggagttctggcaatga

SEQ ID NO: 265020 - DNA, 204 bp, Klebsiella pneumoniae; identical to SEQ ID NO: 235788

SEQ ID NO: 265021 - DNA, 381 bp, Klebsiella pneumoniae; identical to SEQ ID NO: 235517

SEQ ID NO: 265022 - DNA, 351 bp, Klebsiella pneumoniae; identical to SEQ ID NO: 265018

SEQ ID NO: 265023 - DNA, 219 bp, Klebsiella pneumoniae
gtggtgacgcccaacctcaaccgcgctcaccgaattatccaccagctggaagccggcatctgctggatcaacagctggggggaatccccggcggaaatgccggttggcggctacaaacactccggcattggccgcgagaacggcgtgatgacgctgcagagttacacccaggtgaagtccatccaggttgagatgggtaaattccagtccatattttaa

SEQ ID NO: 265024 - DNA, 204 bp, Klebsiella pneumoniae
atggaagcagaacagcgtcgggccgtcgctctcgcgcagcggcagaagcgtatccagccccaggcgctgggcctgctcatcgctgagatcggcggccagcagcgcgctcagtttgcccaccgtcgaggccaccatcacctgccccggggtcacctgccgcgccagctggcggctgagctgtgccgccaggcgcatcgccagtag

SEQ ID NO: 265025 - DNA, 483 bp, Klebsiella pneumoniae
gtgctgcggattggcgaactcggcccgcaccgctacgctgccggtgcgggcgtcgatccggttatcgatagaggtcaacaccccgtcgcgccgtttaccatcaacctcaatctgcgccagccacgcctgcttcagagcgtggatatcggcgtgctggccggttttgctgaaaaacgcggcttcgtcgagggcgaacgagacccgcaccggatccaactgcacaatgtccaccagcacgccgctggacgaattgaccagcgtcccgacgtgaaaggcgctatggcccacgcgaccggtcaccggcgccgcaatctgagtgtagctgagcacaatctgctgggcctcgacgcgggctttggcctgctgtacggcagcggcggcgacgtcgcgctgcatccgggccgtatcgacgtcgttgcggctgatggagtggttgttgataagccgctcgtagcgagtgagcaactgctgcgactgacgtaa

SEQ ID NO: 265026 - DNA, 648 bp, Klebsiella pneumoniae
gtgccttatctggcctgcccgctggcgctggaggcactcaacggtcagttatatgaggtggcggaaaaagtgtggatcgtgccggggctgaaagtggcgcaggctgcagattacgacgtaatgcgcggtgaagaaacgcagctgctgggcgcctggcaactgatgcccgcggagtgttacgtgatgcccggcacccactgcaaatgggtgcaggtgcaaaacggcgtggtgcgccagttcgccacggcgatgaccggcgaactgcatcacctgctgcttaaccattcgctgctcggccagcaactgcctgcgcagttgccggatgaagccgctttcgccctcggtatagaaaaagggttaaatcagccggcgttattgtccgggctttttagcgcccgcgccgcgcgggtgttaggcgcgctggcggcgacttcggtgagcgattatctctccgggctgttgattggcgcggaggtggcgacattcagcgaacgctatcgcgccagccgcgtggtgctggttggtgagcactcgctcaacgcccgttatcagcaggcgatggcggcgcgtgggttagccgtttcctgttgctccggcgaggcggcgtttctttcgggtatagcgaggatgattgatggacaagattaa

SEQ ID NO: 265027 - DNA, 531 bp, Klebsiella pneumoniae
atgtaccgcgtccttaaaaaagacgcgctgatggtgagcttctacagctggaaccgtgtggaccgctttatggccgcgtggaaggcggcaggattctatgccgtgggccagcttgtgttcaccaaaaactatgcctccaaccgtcgtaacgccagggcccgacgcggatttgtggactactgccatgaaggggcttatgtccttgccaaaggccgccccgtgccaccccttaaaccgctgccggatgtgctgcccttcccgtataccggtaatgccctgcatccgacgcagaagccggtggaggcgctacagccgctgattgagtcattcagcgccccgggcgcgattgttctcgacccgtttgccggaagcggttcgacctgcgtcgctgcataccgcgccggacgccgctatatcggcatcgaaatgctggcgcagtaccaccgggccggaaccgaacggctggccgccatgcaccgggccgtcaacaccccggcggcgaacgatgaatggctcccggaggctgcgtaa

SEQ ID NO: 265028 - DNA, 177 bp, Klebsiella pneumoniae
gtgctcaccgaaaccgtcttctcgtggccggggatcggccgctacctcaccacggcgctgttcgctggggataccacggcgatcatgggcggcacgctgctgatcggcgtgagttttgtgctgatcaataacctgaccgacctgctggtacggttaaccgatccgagggtgcgctga

SEQ ID NO: 265029 - DNA, 417 bp, Klebsiella pneumoniae
atgggtccggacgtgctggacgccgaagtcgcgcagcatgccgatggttttcagcgcccgctggcgggtgtcctccggggtaatgctcgctttgcgctggctccagcgggtgatgccttcaaacagggtgccgctgcggttccactccggctcgcccgcggtgagggtggcgtcaagatggatatgcggctcgacgaagggcgggatcgccagccggccctgggcgtcgatatcccctgcgtcggcagtctgcatcgcggcctgggcggtgatgcggtgaatcatcccgtcctgcaggtcaagagtaaacagcgcctcctggcggcgcaggcgagcgttaataattttcatggtgggtcctgtaaatggttttgcgataaacgccagatcaccagcgcgaccgaggcgttgagatga

SEQ ID NO: 265030 - DNA, 240 bp, Klebsiella pneumoniae
ttgagcgagctgaatcgcgagaagggctataccctggcggcggtgctgcacgatcttaaccaggcctgccgctacgccacccacctgatcgccctgcgcgacggcaggatcgtcgccgagggggcgccgaaggagatcgtcaccgccgatctgattgaacggatttacggtctgcgctgcacgatcattgaagatcctgtggcgcatacgccgctggtggtcccgctgggccgccggtaa

SEQ ID NO: 265031 - DNA, 258 bp, Klebsiella pneumoniae
atgatctacggcgagccgcaggacgcctttacctgcggactgttttcgtccactgaggggagctttaccatgacctatccgtttaccgagcacgccaccgtgctggagggcgaagtggagctgaccgtagccggcggcgagccgcagcgctttgcgccgggtgacagctggtttgttaaacagggcaccgaagtggagtggaaaattctgacgccgcgctttgtgaagcactacctggcgaacgtcgagacccgctaa

SEQ ID NO: 265032 - DNA, 240 bp, Klebsiella pneumoniae
atggccatgttactgatcagccacgatctactgctggtagccgcgcattgcgatcgcgtgctggtgatgtaccaggggagacaggtcgacgagatgccggcgcgggcgctgccgagcgcgacgcactcttacacccacaccctgtggacctgccggccaaatgcccacacctacggccagatgctgccgaccctcgacagaacccaggactttacggagacaacccatggcgatcgttaa

SEQ ID NO: 265033 - DNA, 129 bp, Klebsiella pneumoniae
gtgtttacgccggcgtttttgcaggcctatgccgatgagctgcagatgctgtatcagcagtatgcggatgataaagagaagctggcgcaactgaaagcgctgtggcagtacgcgcaggatattgtctga

SEQ ID NO: 265034 - DNA, 381 bp, Klebsiella pneumoniae
atgagcggtaaacgctggatcttcctgtggctaccgctgtcgctgctggcggccgagcgtgaccctttccagccggttgaggatccctgccgcacggcgcagctttcgcaatggcgctatggcggggcggttggggatgatgctggctggacggggtttctgcaggatgggaacggaaagtggcgacgggtacgcatggatgagcaattgcccacgggctggcgggtgagccggctgacggccggtgagctggacatcgtcacgtcttcgggatgtgaaccgccagcgtggcgctggcaacgtgaagggaaacaacatgatgcgatggataagcctgctgcttctgctgctgccgctggcggtggcccccgccgcccgtaa

SEQ ID NO: 265035 - DNA, 162 bp, Klebsiella pneumoniae
atgctgctgaatctcctggtcttcaccaacgttaataatccatccctgcttcacggcgatggcgcgcttgaaactaaaatgtgcgtccaccgtggcgaccttgccgttaatcaatacgcagtccgcataaacgacattatccatttatccctccctggctga

SEQ ID NO: 265036 - DNA, 2127 bp, Klebsiella pneumoniae
atgactaaagacttaaacactctggttagcgaattacctgagatttatcaaactatttttggccatcccgaatgggatggcgacgccgctcgtgattgtaatcaacgcctcgatttgattaccgaacagtacgataacttatcccgtgcgctggggcgcccgcttaacgttctcgatctgggctgcgcgcagggcttttttagcctgagtctggcaagcaaaggcgcgactatcgttggtatcgatttccagcaggaaaatattaacgtgtgccgcgcgctggccgaagagaaccccgattttgccgccgagttccgggtaggcagaattgaagaggtgatcgccgcgctggaagagggcgagtttgatctggccattggcttaagcgtgtttcaccatattgttcaccttcatggtatcgatgaagttaaacgtctgctctcgcgcctggccgatgtcacccaggcggtgatccttgagctggcggtgaaagaagaaccgctttactggggcgtttctcagccggacgacccgcgcgaactgattgagcagtgcgcgttttatcgcctgatcggtgagtttgacacccatttatcccccgtaccgcgcccgatgtacctggtcagcaaccaccgggtgctgatcaacgattttaatcagccgttccagcactggcagaatcagccctatgccggggccggcctcgcgcataagcgcagccgtcgctacttctttggcgaagattatgtatgcaagtttttctattacgacatgccccacggcatcctgacggcggaagagagccagcgtaataaacatgaactgcataatgaaataaagttcctggcgcaaccgccagcgggctttgacgcgcccgcattactggcccacggcgaaaatgctcagtctggctggctggtgatggaaaaactcccgggtcgtttgctgagcgatatgctggcagccggggaggagatcgatcgtgaaaaaatcctcggtagcttgcttcgttccttagcggcgctggagaaacaagggttctggcatgacgatgtacgcccgtggaacgtgatggtcgatgcccgacagcatgcccgcttaatcgacttcggctctatcgttaccacgccgcaggactgcagctggccgacgaaccttgtccagtcgttcttcgtgtttgtgaatgagctgtttgccgaaaacaaaagctggactggtttctggcgctcggcgcctgttcatccgtttaatctgccccagccgtggtctaactggctgtatgcggtctggcaggagccggttgaacgctggaactttgccctgctgttggcgctgttcgacaagaaagcgaaactgccgtcagctgaacagcagcgcggggcgacggaacagtggatcatcgctcaggagacggtgctgttggagctccagtctcgggtgcgtaatgaaagtgccggttcggaagcgatgcgtggggagatccatgctctggagcagcagatcgttcagctgcaggccgcacaggatgcgttaatcgagaaagctcaacagccggtggaagtcagccatgagctgaactggctgaatgaaaatatggcgcagctgaccgcgctcctggaatcggcgaaggcgcaaccgcaggctgatattcagcccgagttgccccctgaaaccgctgagctactgcagcgactggaagccgctaaccgggagatccaccatttaagcaacgaaaaccagcagcttcgccaggaaatcgaaaaaatccatcgcagccgttcctggagaatgaccaaaggttatcgttatctgggcctgcagatccatttgctgaggcagtatggtttcgtgcagcggtgtaaacattttattaagcgcgtcttgcggtttgttttctcgtttatgagaaaacatccgcaggtaaaacatacctcggtaaatggtttacataagctgggcctttatcagcctgcctatcgtttgtatcgtcgtatgaatccactgccgcacagtcagtatcaggctgatgcgcagattttatcgcagactgaactgcaagtgatgcatccggagcttttacctccggaggtttacgaaatttatctcaaactaacgaaaaataaataa

SEQ ID NO: 265037 - DNA, 489 bp, Klebsiella pneumoniae
atgagttcatgcgcgtttatgacgcaaagatttgaaccatacccgagtgtgtcggatttttctgatagggggaggggggtgaagattatcggctatatagccattgcgattggcatcatattcgcggtttcagcgctttttatggatgtgacagtagccgcaggtgatggctacagggtcaacaatcttgggcttatgtcatcacgtcaaaattatatgatatttggcgggtttgttgcgattgccggactcatcatcactttggttggcgacaagtttaaggcatcagcaacctcggttaaatgcccttactgcgcagaattaataaattccgaagcggtgaagtgcaagcattgcgggagtgagattaccccgatagcattaccagagccaaaatacaacggcactcaaattgcttgggatcgggtgctgattctcataggaggtattgtggctgttgctttgcttttcggagctatgcacgattga

SEQ ID NO: 265038 - DNA, 756 bp, Klebsiella pneumoniae
atgtctaatatcatccctatgaattacgatgaccgttcattcccttttacagcagattgctggttcaatgccacagttgctgcaaagcatcacggcaagcttccaaaggactggctaaagactgaggcgacaaagatttacatcgccgaattggctgaagagcttggaattgctggctccagcgtaaaagaggatttttctccccttttagtcagagtggagaacgggcgaaacggcgggacctggcttcatccggagttagcggtggaattcgcccgctggctgtctgtcaaattcgcccgcgcctgcgaccgacatatcaaaaatctgctgttgagcaaaaactttcagctctctgaagatcaaattgtcggcctgatggtttgccagcaaccaacatcgtgggaaaaacgctttaaagacccgttctaccaggcgctgtctaaaatgtccggccttccttactttgggcatgtcggcgggtgtcctgcactttttgggcagattaccgctcgatgggtgtacggtgttgcactaccagattacgtttaccaggcggcaaaaaaggcggcaggcgatagtaaagagaagattcatcaacacctgaagcctgatgccctggagaaagtggaacgtcagctcgttgctgtcaccaatatcgcgaattgcagcgttgaccagaaggacttcgaagccagatgcatggcggcttttccggtcaaagggcagatgaagctgctgtacgcggctgcatga

SEQ ID NO: 265039 - DNA, 210 bp, Klebsiella pneumoniae
atggattttcttacattcattagtaaattaattgaagtgctagcttggcctagtgtaattattttcgtggctcatcgttataaacctgaactttctggaacactaaaatcagtcacatcactcaggttggtgaacattttaatgctacctttagcgcccaagcagataaatttgccaaagctagtgaagaagaattgccacaagaattga

SEQ ID NO: 265040 - DNA, 930 bp, Klebsiella pneumoniae
atgaatcgtaatgattatgttttcgctctcagtgaacgcgagcaaataagtaacttattaaaaaacatgccaatcggtcagtccatcagcaggaaaagcttagaagatcgattaaaaaatgttgaaagaataatttctcaagctgacgttcgagagcatgaaccgacgcatgcggtgttaacctttagaggtcctacagtcattggtactcacgggatttcagcagtgtttgggtcgaaagctgtatcctgttttaatgatgcaatagcctatgtggcaagtgcatttaacggccctctaccagcatcaggaaggataccaaacattgaaaataaccgcctgatgatcacagcatcagcaaggggttcttttggatttgtacttgaagagttccgacctgatgcgccacttacattcgatgaagaaacaccagtctctaaagctattgataagacaagaaaaatattgcaggccagcttagataatgatgatgaagagctttccgacgctttagaaaatttagattttcgtgcaatagaaaaaatccgtagtttcatacattatctatatgaaaataaaactgtttttactttaaaaaacaatgacttcaatattgtttttagagagccaaagcaactcgaagttgtctacaatcaactaagtagcgataacattaagcaggaaaagattgttgaaacagtgatatttttaggcactcttcctaacaaacgccagtgtgagtttattgtgctgggtaacaccgacattaagacagcaagtatcgataaagcaattggtgatcctggtatcattaacaaacatttaggcgttactgcttctgcggtatttgttagaaaaaccgttggtaatgggagacctagatatacattagtgtctcaaccagagtggaaatctggctctaacatttag

SEQ ID NO: 265041 - DNA, 552 bp, Klebsiella pneumoniae
atgggggtaatcccccctatggatgaggcagaccctactagccatgcgcgctcgccatacaaaatggatatagtgcgttttgtaagtatgtttgcgcttagcccagcaagaatgaagatactcaaaggatttcttgattttcgtatgtcgttaagccaagcggggttagttgagggttttcagtgggttgatggcagcttcacagaaaacattgagctaattgagagaagatctccaaatgatgttgatgttgttactttttttcaattcagcgctggtgatgatgatgcgacggtaattggtagaaatcctgaactgtttaaccatgatcttgttaaaactaaatatttcgttgattcgtactatcaggggcttaatgctccaagtcatgagcttgttgaaatgactgtatattggtacagtatgtgggctcataaacgtgacttgtcatggaaaggttttattcaaatcccattgaacccacagcttgatgttgtggcaatgactatacttaattctgccactactggggaggcaaacaatgaatcgtaa

SEQ ID NO: 265042 - DNA, 489 bp, Klebsiella pneumoniae
atgtcgcaactgacccatattaacgccgcgggcgaagcccatatggtcgatgtctccggcaaagcggaaacggtgcgcgaagcgcgcgccgaggcttatgtcgaaatgcaggcgacgaccctggcgatgattatcgacggcagccaccataaaggcgacgtgttcgccaccgcgcgtatcgccgggatccaggcggccaaacgcacctgggagctgatcccgctgtgtcatccgctgatgctcagcaaagtggaagtcaatctgcaggcgcagccggaacataaccgggtgcgcattgaatcgctctgccgactcaccgggaaaaccggcgttgagatggaagcattgaccgccgcctcggttgccgcgctgaccatttacgatatgtgcaaagcggtgcagaaggatatggtgattggcccggtgcgcctgctggcgaaaagcggcggcaagtccggcgattttaaggtgggtgaatgccatgattaa

SEQ ID NO: 265043 - DNA, 2157 bp, Klebsiella pneumoniae
atgactccagagacaaacaataagccttccgctacagaagctgaggctattgatttcggtaggttaattggtgagttaatagaccatcgaaaattaattatcgcaataactactggctttacagttttatcagttttgtatgttttatttgctacgccaatctatcaagccaatgcgttaatccaagtagagcaaaaacaagggaacgcgattctaagcagtttaactcagatattacctgatgctcaaccgcaatcagctcctgagatagcattgcttcaatcaagaatgatacttggtaaaacagttgataatttaaatttgcaaacgcaaattgaaaacaaatattttcccttaattggccgtggaatacatcgcttgacaggtgatgtaggcgggaaaatagttatagaaaaactttatctacctgaaaatggtgaaaaggctcctaagattgtattgaatgttattgatgacaattcttattcaattgaaggtgacggttttacctataaagctaaagtcggtgaacttattgaaaataaaaatgtaatcattaaggttgcgaagattgatgctaagccaaatgaagaattttatgtgtcttacttatcgagattaaaagcaatatctaatcttcaggatgcatttaatgtaacagagcaaggaaaagataccggtatgcttagtcttacgcttacgggtgataatccttctttaataaaagatatattgaataatattagcgagaactatttggatcagaatgtcgaaagacaagctgcgcaagatgctaagagcctggagtttttgaatcaacaattgccaaaagttaggaatgatcttgatatcgccgaagataaattaaataattatcgtaagcagagagattctgtagacttgactatggaagcaaagacagttcttgatcaaatagttaatgtcgataatcaaattaatgagttaacttttaaagaggccgaaatatcgcaactatacacaaaagaacatcctacctataaagctttgatggaaaagaaacaaacgctacagactgagaaaaataagttaaacaagaaggtcagtacaatgccttctacacagcaagaagtgcttaggttaagtagggatgttgaatctggaagagccgtttatttacaactacttaatcgtcagcaggagctcaacatagcaaaatcaagtgcgataggcaatattagaattattgataatgcaataactcaaccaaaacctgtagaacctaaaaaaattcttatagtattaattgggttagtagtcggtatgatcttttctatattgcttgtccttttaagggtgtttttacgcagaggaatcgaatctccagatcaattagaagaactcggaataaatgtttatgccagcatccctgtttcagaatggttagcgaagcagcaagccaaaaatgggcgattgaaaaaaaatgagtctgatacattacttgcaattgaaaaccctgcagatttagctgtggaagctataagaagtttaagaaccagcctgcattttgcaatgatggaggcaaaaaataatgtactaatgatttctggagccagtccgaatgctgggaaaacatttattagtacaaatttggctgcgacgatttcttcgactgataaaaaagtgttattcattgacgctgaccttagaaaaggatacgtacataaaatgcttggcggaagtcaggcctatggtctatctgacatcttgtcaggacagaaagagataagtcaatgcgtgcaaaaagttgaaaactgtacatttgattacataggtcgtgggccaataccgccaaatccagcagaattgttaatgcatcaacgcttcgaagaattactaaaatgggcaagtagaacctatgatttgattataatcgatacgccaccaatacttgctgttactgatgcagcgatcatagggagatactgtgggaccgctttgctagtggcgaggtttgaaacaaatactgcaaaagaaattgctgtaagtatgaaacgattcgaacaaagtggtgttcatataaaaggatgtatactcaatggagttgtgaaaaaagcaagtagctattatggatatggttatagccattatggttactcatatacagaaaaaaaataa

SEQ ID NO: 265044 - DNA, 1326 bp, Klebsiella pneumoniae
atggcgctttcaagacaaaaatttaccttcgaaagacttcgcagattcaccttaccggaagggaaaaaacaaacttttctttgggatgcagatgtaacaaccttggcatgccgagcaactagcggagcaaaagcctttgtattccaaagcgtatatgcggggaaaacccttcgcatgactattggcaacattaacgactggaagattgatgatgcgagagccgaggcaagacggttacaaacattgatcgatacagggatagatccacgaattgctaaggctataaaaatcgcagaagcagaatccctgcaggcagaatcacgtaaaacaaaagtgactttctccgtcgcctgggaagactatcttcaagaattgagaaccggtatcagtgcaaaaactaaacgcccatattctactcgatacattgccgatcacattaacttgtccagtcgtggaggcgaaagtaaaaaaagaggccaaggcccgacttcggctggaccattggctagtttgctcaacctgccgttatcggagctaaccccagattacatagcagcgtggctgagtacagaaaggcaaaatagacctaccgtcactgctcacgcttatcgcctactacgtgctttcatcaaatggagtaattatcagaaaaaatatcaagggatcattcctggcgatctggcacaagattacaacgtaagaaaaatggttcccgtgtcagcgagtaaagctgatgattgcctgcaaaaggaacaactaaaaagctggtttagtgccgtgcgtagcctcaataatcctattgcatcggcctatctccaagtacttttgctcactggtgctcggcgtgaagaaattgcgtcgcttcgctggtcagacgtagatttcaaatggtcaagcatgcgaattaaagacaagatcgaaggtgaacgtatcatccctctcactccttatgtttctgaattgttaaatgtactagcgcaatccccaaattctgacgtaaataaggagggttgggttttcagaagtaacagtaaaagtggcaaaattattgagccgcgttcagcgcacaacagagcgttagtgctggctgagttaccacatatcagccttcacggtttacgtcgtagttttggtactttggccgagtgggttgaagttcccactggtattgttgctcaaattatgggacacaaacccagcgctcttgccgaaaaacactatcgccgtcgtccgttagatctgttacgaaaatggcacgagaaaattgagacatggatcttaaatgaagcaggtattaccataaaaaacaacgttgatatgcgttga

SEQ ID NO: 265045 - DNA, 225 bp, Klebsiella pneumoniae; identical to SEQ ID NO: 21326

SEQ ID NO: 265046 - DNA, 855 bp, Klebsiella pneumoniae
atgtctaatagtgttactaattttgagatgagcagcgttctaccaggaaaaaaaccttgtcaaggcaaaaacaatgagtcacaggtagtacagactactcccataaaaaaacactcagtcacgttcaaaaatcaatcttcattaggagtaattgatcattatgccagactaacaaataaatctcactcttccgtaatagcggaagttgtggatttggctatccctatattagaaaaatgcaatcgtcataactggtcaataaatgaaataaaaaatgacctgttaaagttctctataaaagaaagcatcaatcgaagccgaggtaaaacagaagtaactctggaagagtactgttcgttaatctggaaaacgaacatcatgagtccattaaaaatccccattgcagattactttcaactgaacgctaatgatgaattcatggggaaagatgaaaaaacagttatacgtgaaaggctatcctcgctgagggaaaattacgatatggaaaaagccatttacatttacaatcaacgacattttaatgtaaagcatcaaagtgtctcaggatattcaaacattattcttattcatagaacaacctttgaggattattactttgatgtcgggcagactctactcttgtcaacatcccaattaattatattcgggataaatgaagttcttagaagaaaggggattgttatgccttatccggttgtttgttggattgatatttaccatgtcaatgagatggtggttatgctgccagtgatccgtaaaacagatgtttccaaccgtgttaatgcaccggatgacatcattataaacccatactcacaggagagcagaacctaa

SEQ ID NO: 265047 - DNA, 699 bp, Klebsiella pneumoniae
atgagaggtaaaatactactttaccactcaaagtatcgctggcaatcacgctctatttttggttattttttatacaaaatgacattgttcaggtatcaaaaaataatttatgacaccggagtgcatcagatgcgttcatttttttacaccatatgcagtagcgaacagcaagaaagcattacagatcatcactcacttgctgagatatgccaaaaatttaatattctacctgaacatgttgtgatcgagcaggtagatattaaagaggttgtttcagagcaacgtttactcagacaattgattcatcatgaaatgaaccggcaggacacgcttgtcattccagatctaagctgtcttggcagaactgtggaggacttacagaatattttatttttttgccttcaaaaagaaatgtttatctacagctaccatccagcttcaaggatagagccttctgctgaaagttgcttgtcttttttgattgctcgtcaggatacgattgacattcacaatctgaaatcaactaaaagccgatatcgacatgttaagaaaaaattaggacgaaaggagggaagcaaataccgacgtgatatcacaatacttaagaaaggtggatttactcaggctgagattgcaaagaaattgagtatcagtttatcgactgtgaagcggcactggaataacggaatcatcggttaa

SEQ ID NO: 265048 - DNA, 627 bp, Klebsiella pneumoniae
atgaaaacatatcaaggtactcatggagtacatatcctcgaatatcagatcaagattaaaaaattattatgttatttgactaaccgttaccccaggttaacggcggtacgtgtcgatctgcattatccgaagatagtcgataacggagacaatatctgctgtttccctaatcttgaaccaggggtgatatcccgaatgcgtgattccctcagagctaaactggaggctgaccgtacccgtaaggagcgtgaaggtaaacgcatctaccgttgccctttatttattatatgggcgaaagagtattctgaatcaggtaaatgccactatcacatttgcctgttgttcaacaaagacgcttactaccacctcggggattacgatcagcacgataacctgagagggatgattacgggagcgtggtacagcgccctgagactggagagagacgatcacccaggtctggtccattttcctgataactgtaagtacgtgctggataccaataatgctgacttccagcataactaccaagcgctgttaacccgactggattacctcaccaaagtcgaaagcaaagtgtttggtgaaggagaccgtaacttcggctgtagccaaatcgatctgtaa

SEQ ID NO: 265049 - DNA, 1050 bp, Klebsiella pneumoniae; identical to SEQ ID NO: 264334

SEQ ID NO: 265050 - DNA, 1410 bp, Klebsiella pneumoniae; identical to SEQ ID NO: 264335

SEQ ID NO: 265051 - DNA, 1824 bp, Klebsiella pneumoniae; identical to SEQ ID NO: 264336

SEQ ID NO: 265052 - DNA, 600 bp, Klebsiella pneumoniae; identical to SEQ ID NO: 264337

SEQ ID NO: 265053 - DNA, 861 bp, Klebsiella pneumoniae; identical to SEQ ID NO: 264338

SEQ ID NO: 265054 - DNA, 438 bp, Klebsiella pneumoniae; identical to SEQ ID NO: 264339

SEQ ID NO: 265055 - DNA, 918 bp, Klebsiella pneumoniae
atggcgctggaaaaagggattgcttcgctggttgaggcatttattgcggcaggtcgtccgtcatcacgcgatcagcatattgatgatcggagggccggctatatcgccagtgcggtactcgccggggagacggaaacgcgagtgcgggtggaggatatcaccctggagggtatgcacttccgcgtcgtttcaccgcccactgccgacggcctgctacccacgcttatctactaccacggcggctgttttgtcagcggcggctttgccacccatgacaatcaattgcgccagcttgcctggttcagtgggtgccgggtgatcgccgtgcagtatcgtctggccccggagtacccttttccggcggcgcacgatgatgcagaacgaggtgccatgattatccaccggcacgcaaaacagcttggcgtggatgcttcgcgcatcaccctggccggcgacagcgccggcgggcatctcgccctggtcacggctctgcgcctgaaagcggcgggaacatggcagcctgcacagcttatcctgatttacccgatgctcgacgctaccgccagcatggcaagctacgccagcaacggcgaggattacatcattacccgagacacgctgcttagcggctacgaaatgtatttagcggccacacccgctacccatccggatgccagtccgctgtggcgcgaagattttcacggtctgccaccggtccacatcctgacggcggagttcgatcctttacgtgatgagggcgaagtgctgtaccgaaggctgacggagcaaggggtggagagttcctgtcagcgctatctgggggtgatccacggcttctttcagctgggaggcgtcagcaacgccgcgcgtgatgccatgcgggatatcgcctggcgtgtggcatcgccaggacgataa

SEQ ID NO: 265056 - DNA, 249 bp, Klebsiella pneumoniae; identical to SEQ ID NO: 138969

SEQ ID NO: 265057 - DNA, 852 bp, Klebsiella pneumoniae
  misc_feature (828)..(837): n is a, c, g, or t
atgagcattcaaaaaaaacagcattctaatgatggtgaaactcaagtcagcttgcccattgagggaatgacttgtgcaagctgcgttggacgagttgaagccgctctggctaaggttgaaggcgtacaaaacgtaagcgttaaccttgcaacagagcgtgcagatatccgcctaaatgcattcgttaatcgtatggcgttggttgaagcagttgaaaaggttggttatgaggttcctcaagcttctgtagagttatcagttcagggcatgacatgtgcatcatgcgtagggcgtgtcgaaaaatcgctccgagcggttaaaggtgtaaaagaagccactgttaatttagcgactgaaagagctactgtacgtggaaccgcaggagttgatgacctcataactgctatcgaaaaaatcggttatgaagccagcctggttgataaccaaagccagaataatgatagtgccgcagaaaaaaaagatgctgaaaaggttgcgttgaagaaagatttagttctggcgaccgtacttgcgttaccagtatttattctggaaatggggtcgcatgtgataccgggaatgcatcaatggataatggataccattgggctccaggaaagctggtatctccagtttgtattaacattgctggtgttggctattccggggcggcgcttttacctgaaaggtattcccgcgttattaagacttggcccagacatgaactctctcgtctccgtcgggactctcgctgcattcggttattcaatgattgcgacctttgctccaggtcttttgcctcaaggtaccgtcaatgtgtattacgannnnnnnnnnctcttattcttttag

SEQ ID NO: 265058 - DNA, 1383 bp, Klebsiella pneumoniae
atgacacagttaacatgctttaaggcttatgacatccgtggtgaacttggcgaggagctgaacgaggacatcgcctaccgtatcggccgcgcctacggcgaatttctgaaacccgggaagatagtggtggggggcgatgtgcgcctcaccagcgagtcgctgaagctggcgctggcccgcgggctgatggacgccggcaccgacgtgctggatatcggcctgagcggcacggaagagatttacttcgccactttccacctcggggtggacggcggtatcgaggtgacggcgagccataacccgatgaactacaacggcatgaagctggtgcgcgagaacgcgaagcccatcagcggcgacaccgggctgcgggatatccagcgcctggcggaggagaatcagttcccgccggtggacccggcgcgtcgcgggaccctgcgccagatttcggtgctgaaggagtacgtcgaccacctgatgggctacgtggacctggcgaacttcacccgtccgctgaagctggtggtgaactccggcaacggggcggcggggcacgtgattgatgaagtggagaaacgcttcgcggcggccggggcgccggtgacctttatcaaggtgcatcaccagccggacggccatttcccgaacggtatcccgaacccgctgctgccggagtgccgccaggacaccgccgacgcggtgcgtgcgcatcaggcggacatggggatcgcctttgacggcgacttcgaccgctgcttcctgttcgatgacgaggcgtcgtttatcgaggggtactacattgtcggcctgctggcggaggcgttcctgcagaagcagccgggggcgaaaatcattcacgacccgcgtctgacgtggaacacggtggacatcgtgacccgcagcggcggccagccggtgatgtcgaagacggggcatgcgttcatcaaggagcggatgcgccaggaagacgccatctacggcggggagatgagcgcgcaccattacttccgcgacttcgcctactgcgacagcgggatgatcccgtggctgctggtggcggagctgctgtgcctgaagaacagttcgctgaaatcgctggtggcggaccgccaggcggcgttcccggcgtcgggggagatcaaccgcaagctggggaatgcggcggaggcgatagcccgcatccgggcgcagtatgagccggcggccgcacacatcgacacaacggacggtatcagtattgaataccctgagtggcgttttaacctgcgcacgtccaataccgagccggtggtgcgtctgaacgttgagtccagagcggatactgcgttaatgaatgagaaaaccgccgagctgctcaacctgttaaaagaggaatcgctttga

SEQ ID NO: 265059 - DNA, 507 bp, Klebsiella pneumoniae
atggttaacatcacgcatcagcacggtattcacctttaccttgtcaaagccggcggcgaaggcggcgtcaatgccgtccatcacctggtggaacttatcctggccggtgatggcatggaactggcgggcgtcgaggctatcaacgctgacgttaatcgccgtcaggccggcatcgcgccagcgttcgacatcgcgcgccaggcggtaaccgttggtagtgaccgcaatctgacggatcgccgggttttcacgcacggcggcaatgatctcggtgaagtcgcggcgcagggagggttccccaccggtgaggcgaactttttcggtgcccagcgcggagaaagcgcgcgtaacccggcgtacttcgtctacgctgagaaagccattgttattgacggcgccgggcttataaccgttcggcaggcagtaggtgcaacggaagttgcacacatcggtaatcgacagacgcaggtaataaaacttacgcgcgaatgcatcggtaagctgtga

SEQ ID NO: 265060 - DNA, 1641 bp, Klebsiella pneumoniae
atgtcgttattgcctctgcgtcggccggtggtcagccgcacgacttatctgattctctttgcttgctatatcggtatctgtctcaacctggctttttatcgccaggttttcccgttactgccggtaaatagcctgcataactggctggtatttctcagtatgccgatcgtggccattagcgtgatgaatatcctcaccactctcgcctcgttcctgaagctggaccggctggtgattagcctgttcattctgctcagcgcctcggcgcaatacttcatctggaactttggcgtggtgatcgaccgcagcatgatcaccaatatcctcgacaccactccggcggaaagctttgctctactctccggcgaaatgattgccgtcctcggcctttccggggttttggcggtattcatcgcctggtgggtgaaaatccgtaagcccgccacgcggtggcgcggcgcggcgatgcgcctgctcaatatcgccgtttcggcgctgctgattattctggtggccgcgctgttctacaaagattacgcctcggtgttccgtaacaacaaagagctggtgaaatccctgagcccttccaacagcattgtggccgtgaactcctggtatgctcatcatcggatggacaacctgccgctggtgaagattggcgaagatgccacgcagaaagcggtgatgcataacgctccccgtaagaacctgacgatcgtcgtgctcggcgagacttcgcgagcggataacttctcactgggcggctatttgcgcgacaccaacccgctgatgcggcaggacggcgtgatctattttccgcataccacttcctgcggcacggcaaccgcagtttccgtgccgtgcatgttctccaatatgccgcgcgcgcattatgacgaagagctggcgcaccatcaggaaggcgtcctggatattctacaacgcgcagggatccaggtgctgtggaacgataatgacggcggctgcaaaggcgcctgcgaccgggtaccacaccagaacgtcaccgacctgaagctcaccgggcagtgcatcgatggcgagtgctacgatgacgtcctgttccataatctcgacagctatatcgataacctgcaacaggatggcattattgtgctgcataccatcggcagccacggtccgacgtactacaatcgctatccagcggcgtttcgcaaattcacgccgacctgcgacaccaatgagatccagggctgcacccgggagcagttgaccaatacctatgacaacaccatcctttatgtcgactatgtcgttgataaagcgataaaaatactgcaatctaaacaggataaatttaccactagcctggtttatttgtccgaccacggcgaatcgctgggagaagatggcgtctatttgcatggtctgccgtattccatcgcgccggaaacgcagaaacatgtgccgatggcgctgtggctctccgccgactaccagcagcgctacggtatttccgcgcactgtctgcagcagcgggcgcaaaaagagaattactcgcaggataatctgttctccaccctgctcggcctgctcggcgtcagcacccgcgagtaccaggcggcagatgatatcttaacgccatgtagagaggctggttga

SEQ ID NO: 265061 - DNA, 495 bp, Klebsiella pneumoniae
gtgaatggcgtcaccggcatcagcgcgtcggtcttctgggatttgcaggaatccggcaccgatgccgacctgcttaacgaggcaggcgttaccacgctcattcgtaaagacggtttccgcttctggggcaaccgctgctgctccgatgacccgctgttcctgtttgagaactacacccgcaccgcgcaggttatcgctgacacaatggccgctggtcacatgtgggcggtcgacaagccgatcactgccacgctgattaaggacatcgttgcgggtatcaatgcgaaattccgcgagatgaaaacggcgggctatatcgtcgatgcgacctgctggtttgatgaatcggccaacgacgcggcgaccctcaaagccgggaaactgtatatcgattacgactatacgccggttccccctctcgaaaacctgacgctacgccagcgcattaccgataaatacctggcgaatctggtgtcatcggttaacagcaattaa

SEQ ID NO: 265062 - DNA, 303 bp, Klebsiella pneumoniae
atggggcgtggcattaacctgagtcacatcggtcacaccttgcagactgacggggatgacggtctgcccaacagggggctcggggctgttggatggcggcgaaacaacggaagctggcttagcgcctgcctgtgccgctacgtccggcgcggcagcctccgggcctggggctgcgggtttcgccgtcgccaggcgggcaacaaattcgtccagttcagcatcgctgaccgacgcgtcagccgccagggccagcacggcgcctacctgaagcgtctcaccctcccgggcgagtatccgacgtaa

SEQ ID NO: 265063 - DNA, 990 bp, Klebsiella pneumoniae; identical to SEQ ID NO: 264498

SEQ ID NO: 265064 - DNA, 243 bp, Klebsiella pneumoniae
atgtcacccgaagacttcattcgcaagcacatcacggcggcgttgatggccgaaggcttctctgagagtgccggaaaggggcgattttcgatgattgcctctaccgagctcgtcagtgggctctcgggcagacaaccaccgcagaacggaaagcagcaaagaaaaagccggggcgagctggtggagttcatcccggcctgttctgacttctgctatgcacatcaaatctacctggcggggtaa

SEQ ID NO: 265065 - DNA, 354 bp, Klebsiella pneumoniae; identical to SEQ ID NO: 95439

SEQ ID NO: 265066 - DNA, 786 bp, Klebsiella pneumoniae
atgtatatatatgaattagttaaacctggtgccagcataaatcatgaagaccgggaggttgcctgtaaattttacaggcttttagggcagttagaatcagcgttttatgatgcaaatgtatcgttaaatttatttgagtttgaaaggaatggagtcgctaggcttaatgagcattctcccgaacagtgggaaaaagacgcccaaaaaaggcgagagttaacgcagcaggttcgccaagagcttggattgtcaatgtatgagttttccgatgaattagacttcgaagtaaatgctcggttaaaaagaggaaaatggcaacatggcgagttcccacaatcccatcgccgtagaattatttttttgcatgcaaagtcatttctttatgctttggatgccatcgataaatttttaaaagtgatatctgatgaatcaggggctccgccggaaataaaactgctacatactcagatagctactgattttccatacctaaggggggtaaggaattcaactcagcatttagaggatagggctcgtggcctaggcgcaggtagacctccacaacctttaagcttacaaccagtggctaacggttctatttttgcccctcaaggggcgttaattctgagtaatttaaatggaacaaagtttggatgcacaatggcagatggtcattttggtgaagtagatgtgtcaccggagtcgatggataaacttaagtccataattcaaaatacgtttaatgccttcgaatgggatggaccaaaagaacatcttccgacataa

SEQ ID NO: 265067 - DNA, 1467 bp, Klebsiella pneumoniae; identical to SEQ ID NO: 242376

SEQ ID NO: 265068 - DNA, 297 bp, Klebsiella pneumoniae
atgaatatgtttctgcagcaaggtcagggcagccatactgcgatgcccggcgatttcatcatccggaatgaccgtgacgtctaccagcgggaaagcgctgctgtagagtgttccggccagaatcgggtcgtcaaactcatccagccagcgggtggagtacggatacgggctgcgtttaccggtatagaaaaggaccggtatcaccagtggcagcttcttatggccagcttccaggtgtcgctgcatggcggccaccgcatagcgtatcaggcgaaaagccatatgtttgtcgggtga

SEQ ID NO: 265069 - DNA, 549 bp, Klebsiella pneumoniae
gtggcgctttcggcgaagccgtgggtcgtcggacagctcagctgcgcctggaagatggtcagcgcgccgctgacgctgtggccgcagacgtcgagggtgccgccggcttcggtaaagcggatcagcgccaccagaatatggtgcaggccaaacggcagcagcagtcgctcgccggtgccaaagatcatcggcccaaaatccccggcgctgttgatcatcttcccgagggcgttgatccccatagcgaagactggccacaccagcgggatcgccagcccaaccagccccagcaccacggtggtgacgatcggcacgaagcgggtgccgccgaagaaggccagggcgtccggcaggcgaatgttatggaagcgttcatgcagcagccagacgataattccggcgatcaccgccccgaggatcccggtatcgattgacggaataccgataatgttctggatattgttggccttcaggatcgcggcgtcggtggtgggcagaatacccttcgcggtcagccagaagttgaccgccaggttcatgaccgcgtag

SEQ ID NO: 265070 - DNA, 1005 bp, Klebsiella pneumoniae
atggcgtcattcgaaggaatggcagtcactatcgggcatccgcgagattttgacgggcagatcatctttgttacccctgataactggcgccagcttgctcatggtcacatccagaacgtacggcgcggcacggacgataaaaccgatctgctgctggctgatgtcatcgtcaaaaccccggaagccctgcaggccattgatgatggtgatgacgaggtcagctgcgggtacgacgccgattacgaacagatttcacctggtctcgcaaagcaatctgcgattaccgctaaccatctggcccttgtccctaacgggcgggccggtttccgttgtgcaataggggattctatgccaagcactactaaaaactggtttacccggctcctgaaggcccgtaaaaccggggacgctgccgaaatggcaagtctcattgataacccgcctgatgatgtcacgggcgataacgatgtatcgaccgctatgacacccagcggagtggtcattaaccttgcgccgcaaaatccgcttcccggtccggcattgcctggcactggcgatgaaggcggagaagtccccgcctgggcgcaggccatcattgcccggctggacaagctggaagcgctggaggtacaggagcagctgaccggggatgaggatgcagaagagaagaaagaggaggaaggcaaagtaaccggtgatgccgcttatcgcgccgatctgattcagccaggcatccagttgccagaaaaggctaagccgacagcgttcaaacgccaggtgctcgcctctgcagatcaatctctggtgcgctccattgtcggtgatgccgatatcagcaagctgaaaaaagccacggtggatatggctttcacggctgtttctgagctggcgaaaaaccgcaacaccaaaaccgtcgacagcctgcaaacgcagactgccaccactgttaaaaccattgccggtatgaatcaggccgcgcaggaattctggtctaaacgaggctaa

SEQ ID NO: 265071 - DNA, 495 bp, Klebsiella pneumoniae
atgggtaatacatttctttaccggatgcctgcgggcatcgccggggcaatttctcgtccgcaggatctgacggttgaacctcaactgctggactcctccaaccttttccccgcttacggccttggcggcaagatttcctccgggaaatttgtgccaatcgctgcgagcgatacagcgtcggtgctggtgggcatttacgttcgtccgtatccgaccgccagccagccggataaggtccagcaggtaggcagcggtaaaaacttcaccggcgattgcctggtacgtggttacgtcacggtaaacatcggcgcggatgcatccagcgttgcgctgcatggcccagtttatatgcgagtggccacaccatccgcctcaagccctctcggcgcgttccttgccgccgctgatggctcgaataccgtccagatcactaacgcttactttaatggccctggcgacaccagcggcaacattgagctggccttcaatatttaa

SEQ ID NO: 265072 - DNA, 939 bp, Klebsiella pneumoniae
atgcagacatttgaccaggcgacagtcgacggcactggtgcctttcttatccatgagttggagcgtctcgatcagacactgaatctgccgctggtgaattacacctggtcgcgcgatatccagttgcgtgaagacgtgtctattgctgatgagatcagctcgttcactaacaccacttttgctgctgccggtacgccgaatgccaacggcaaaaactggcttagcaaagccgcgaccgcgatggctggacttaacgtcgacatcgcaaaaactggcttcccgcttaccctgtggggtatggagctgggctggaccgttcctgaattgcaggcagctgcgcaggttggtcgcccgatcgacacgcagaagtacgacggcatgcagctgaagtggaacatggacacggacgagcaggtttatatcggcgattccggtctggcggtaaaaggcctgctgaacctgacgcaggtaacgccgaccaacgctgcgaagacctgggcgacctccaccgctgacgaaatccgggcgagcattaatgccgggctgagcgcagcgtgggccaactcggcttactccatggtaccgacggacctgctgatcccgccggagcagttctctctgctggcaagcaccatcgtatccagcgctggtaaccagtccctgctgacctatctggaaaccaacaccatcgcctaccaccagaacggacgtcctctgaacatccgtccggtgaaatgggcgaaaggtcgtggcgtgtcgaactccgatcgcatgatgttctacaccaacgacaaaaaatacgttcgcttcccgatggttccgctgatgagcgtgccgattcagtatcgcggcctgtatcagctcgtaacctattacggcaagctgggtgcagtagagccggtttatccggaaactctggcctacgtcgacggcatctaa

SEQ ID NO: 265073 - DNA, 282 bp, Klebsiella pneumoniae
atgaagaagatttatgtactctccccgtttaatttcaacgacggcaaagagcaaaagcatttccaggtaggtttccatgacgtcgatgattcggttgccgatcactggttcgtaaaagcgcactgctcgccggatggtgaagcgccagcggtagcagaagacccgcgcattgctgaactggaagcaaaactagccgagaaagacgcgcgtattgctgaactcgaagcgaaattgccggagactaccgataatggcaagaaatcaaagtctgccgacgcctga

SEQ ID NO: 265074 - DNA, 420 bp, Klebsiella pneumoniae
atggcaagaaatcaaagtctgccgacgcctgagcagttcagggcaacctttccgcagttcgctgacgaaacaaagtatccaacggcaatgatccaggctcgcctgaattttgctgatgctctactgagtgaatcgcgctttggcgtggatatctttccctacatcgtcgggctgtatgttgcgcactacatgtacctttacgccgcagatatgcgtggtgtggccgtgggtactgctggtggcgtcaatagcggcatacagacggcgaaatcagtggataaggtttcagccagctatgatgccagcgcgacactggaccctaacgccggtttctggaacaactcccgttatggatcggagttctgggaatacctgatgatgtttggtgcaggagcggtgcagctggggacgccggaatga

SEQ ID NO: 265075 - DNA, 507 bp, Klebsiella pneumoniae
atgaaaagcgggctcacgattcgggaagacaaatacagcatcgttctggatgcgctgaagcagctgtcaggcactgatgtgctggttggtatcccggcaggccctccgcgcgatgatgcgccgctgagcaacgctgagctggggtatctccagtccaccggggcaaccgtagagatagacggcgagaccgtcactctgccgccaaggccatttctggacatgggtattgaggattcgcgggataaaacgaccgagcgtttaaagctggccgctcagtctgcgctagaaggtaaagcggatgtggcggcgatgcatcttgaagccgcaggacagattgcgcgtgatgcttcaaaggctgtcattgaggcaggcgatcggctgaccccactatctgaaaagaccatcaagaagcgcagagcaatgaaaccgcctattcctggcgataagccgttgcgtgcccgcggattccttttcagagcgattcagtatgtcgtgaggaaaaaataa

SEQ ID NO: 265076 - DNA, 405 bp, Klebsiella pneumoniae
atgccgtttctcgatgtgactgatgttctgcttgatccggactttgtcgacctttcgctggtgtgtcaccgacaggtgcagatggtcgatgaggataacttccccattaacaccccgcaggaaatcccttttaacggcgtagtgactgttgaccgttcgcttgaagcaaggcgaatggccgccgggcaaaacatcaatggcgccatcctcatcgttacccagttcaggctaacgcaggggatgcctgccagtgattcaacgccagaactcgacgctgatatcgttttatacagcggcagacggtaccgcgtgacctttgtcgatccgtacacccgatacggtgccgggttcgtgcaggcacattgcgagctgctggagtttaacggaggaattcccgttgagtaa

SEQ ID NO: 265077 - DNA, 552 bp, Klebsiella pneumoniae
ttgagtaacgacagcacagagccgggatatctaacccccgtcggggatgctcctgagtacgatatggagctggaaaagcaactgagccgatgggtaaggggcgtgactgggattgcggttcacctggtattgcccaggtttaccgatccccagtccaaaataccgccgaacggcgagacatggtgcggctttaacttctccacgctctcacgtccaggaacacctgcgaatgtccaggtaagcgaagagcagagcgaacaatggtcatgggaaagcattcaggtgcttttctgtttctatggccccggcggttccgggatggccacgcggtttcgcgacggaatgtttgtagatcaaaacgcagatacgttgcgacgaatctcaggtttgtcgctggtgagtgctgatgatatacgaaacctccccgaattgatcaacaaccagtgggtgcgccggtatgaccttgccgtgaccctttcccgcaaaaacacccgtacctacaacgttaaatctgtcgttgaccctaacgtcacgatagttaccggagactaa

SEQ ID NO: 265078 - DNA, 1152 bp, Klebsiella pneumoniae
atggaaaaagggcttccccttaaccgtatcgctaacgtgacggtgacgctttctgctcgggccgcgcaggggcgcaattttggctcaatgctcatcctgggcgactcaactgttattccgatttctgagcggctgcgcctttactccagcgctgatgatattggcgatgactttggtgtagacagccaggaatatgcagcggctgttatctggttctcccagcaaccgcagccgactctggtgtatgtcggtcgctgggcgaaaacgctggctactggcgaaacaggaagcgcagaaagcctcctgcaggccgttaacgccttgctggactggaattcatggtatggccttcaccttgctgtgccggttgctgattatccttccgacaccgacattatcagtgtggcggcggctatcgaagccgcgagcgtatcgcgcatctttggcgttacctcggctgattcaacgattcttgaatcggccactacgacggatctggcttccaagctgaaggcggcgaaatacagccgtacctttatccagtactcgaccagcagccgctatgctgcgctgtcctcgtttgcacgtgcgttcactgttgacttcactggaagcaacacgacgatcaccctcaagtttaaacagtcgccgggcgtgacctacgaaaccctgggtacctcgcaggcgaacaacctggaagcgaagaactgcaacgtttacgtgtactacgaaaacgatacggcgattcttgagcagggcgttatggcaaacggcgatttcttcgacgagcgccatggtctcgactggttgcagaacgccgtgcagacggctgactacaacacgctctatacgagcacaaccaaaattccccagaccgatgccggtaccactacccgtatcgctaacattgagctggtgcttgataaggctgtgcaaaacggtctctttgcgccgggtaaatggactggtggcccgcttggtcagctcaataccggcgacatgctgactaagggctactacacctgggcagaaaacgttgatgaccagcttcaggtcgatcgcgaagcgcggaaaggtgtgccaattcaggttgccgggaaactggccggagccgttcattacggtaccgtcgcaatcacggtcgtgcgctaa

SEQ ID NO: 265079 - DNA, 348 bp, Klebsiella pneumoniae
  misc_feature (242)..(251): n is a, c, g, or t
gtggtggataccgaggaagaggccagcgatcataccatcaagcgggcgattggctccgccgccgcccactatctggaaacccggctgcggccaaaagatctgattggcgtctcctcgtggagctcaaccattcgcgcgatggtcgatgaagttcatgcgcaaaacctgaaagccagcggcgtgatccaactgctcggcggcgtcgggccaaacggtaacgtgcaggcgacgattcttacccnnnnnnnnnnagcgcctgaattgcgacgcctggctgctgccgtcacagagcatcgaaggatccatggaggagcgcaaccggctgctggccagcaaagacgtcgctga

SEQ ID NO: 265080 - DNA, 261 bp, Klebsiella pneumoniae
atgcatatgtcaaagtggaatatcgcctctttttcaaaggaggtgcaggataaagttgccgtcgataaggtggctgctgctgttgcctggcaggagcgcatgaacaagcccgtcgtgccggaacttgttgaacgggaacagcctgaacacctgcgcgaatatttccatgaacggctccgcgtacatagactgaacagtcagcagctgccgcgcgcaaatgcacccgaatataataaaccgggagatgatcagcagaattga

SEQ ID NO: 265081 - DNA, 954 bp, Klebsiella pneumoniae; identical to SEQ ID NO: 210180

SEQ ID NO: 265082 - DNA, 588 bp, Klebsiella pneumoniae
atgaatatcttacgaatcggcttagtttccatttctgatcgcgcctccagcggcgtctatcaggacaaaggcatcccggcactggaagagtggctggcacgcgccctgaccacccctttcgagctgcaaacccgtctgattccggatgagcaggccatcattgagcaaacgctgtgcgaactggttgacgaaatggggtgccatctggtgctgaccaccggcggaaccggccctgcgcgtcgcgatgtgacgcccgacgcaacgctggcgatcgccgatcgcgagatgccgggcttcggcgagcaaatgcgccaggttagcctacactttgtgccgacggctatcctttcccggcaggtcggtgtgatccgcaagcaggcgctgatcctcaaccttcccgggcaaccgaaagcaattcaggagactctggaaggggtgaaagatgctgacggcaacgtgctggtgcacggtattttcgcaagtgtaccttattgtgtacagttgcttgaagggccttatgtggaaaccgatggccgtgtagtagaagcttttcgtcccaagagcgccagacgcgaaactttatcctga

SEQ ID NO: 265083 - DNA, 1305 bp, Klebsiella pneumoniae
atgtcatatgcaaaccgaccgctcaaccgccaggattataaaacgctgacgctggccgccctgggcggcgcgctggagttttatgactttatcattttcgttttcttcgccgccgtcgtcggcgagctcttcttccctgcggatattcccgaatggctgcgccaggtgcaaacttttggcattttcgccgccggttacctggcgcgtccgctggggggcatcatcatggcccactttggcgatctggtggggcgcaagaaaatgttcaccctcagcatcctgctgatggcgctgccaaccctggcaatcggtctgctaccgacctatagctcggtaggtatcatcgccccgctgctattgctgctgatgcgtattctgcagggagcggcgatcggcggtgaagttccaggcgcctgggtgtttgtcgctgagcatgtcccggaaaaacgcattggtatcgcctgcggcacgctgacggccggcctgacggttggcattctgctggggtcggtggtggccacgcttatcaataccagtctgacgccgcaggggatccacgacggcggctggcggatccccttcctgctgggcggcgtatttggtctgatagcgatgtatctgcgccgctggctgcaggagacgccgatttttcttgagatgcagcagcgcaaagcgctggcgcaggagctgccggtaaaagcggtggcgctcaagcaccagaaggcggtggtgatctctatgctgctgacctggctgctgtcggctggcgtggtggtggtgatcctgatgtcgccggtctggctgcagaagcactatggttttgcgccggccattaccctgcaggccaacagcatcgccaccattatgttgtgcatcggctgtctgctcgccgggctggcggcggaccgcttcggcgccagccgcacttttatcgtcggcagcctgctgctggcggttgccagctgggcattttaccatcttgccggcgccagcccgcagcggctgtttctgctctacggtacggtggggctttgcgtcggcgtggtgggggcggtgccctatgtgatggtgcgggccttcccggcggaagtacgcttcaccggcatctctttctcctacaacctgtcgtacgcgatctttggcggcctgacgccgattgcggtcaccatgctgatgggggtgtcgccgatggcgccggcctggtatgtgctggccctgtcgctgatggggctaggattaggtatctggctgcgtcaggagttgacggcgccgacggggatgctggaaggggagctgcagcgttaa

SEQ ID NO: 265084 - DNA, 567 bp, Klebsiella pneumoniae
atgggcaacactaagttggctaatccggcaccgctgggccttatgggcttcggcatgaccactattctgcttaacctggcgaatagcggcctgttcgcattcgatgtagctatcctggcgatggggattttttacggcggcattgcgcaaatttttgccggcctgctggaatacaaaaaaggcaacacttttggcttaaccgcttttacctcctacggcagcttctggctgacgctggtggcgattcttctgatgccgaaaatgggcctggcagacgcgccaaacgcgcacttcctcggtatgtacctcggcctgtggggcgtctttaccctgtttatgttctttggcaccctgaaggcagcccgcatgctgcagtttgtcttcctgagcctgaccgtattgttcgcgctgctggcgattggccatttggtcgataacgaaggcattgtgaaggtagccggctgggtcggcctgatttgtggcgccagcgctatttacctggcgatgggtgaagtgctgaacgaacagttcggccgcaccgtgctgccgatcggcgaaccgcgctaa

SEQ ID NO: 265085 - DNA, 996 bp, Klebsiella pneumoniae
gtgaacaaactgaattatattcacagtattagaggaattgcagcatttttcattgtattaatacactgcaatatttttatgagtaaggaggggatgttaaacgctttcttttatcatttccttaccgagtggacagcgatttttttactgatctctggattcttattccagtttttattacctaagtatgagttttcttcttttatgaagaagaaaataaccaatgttattttaccatacattattgtttctattcctgctattcttatttatttacttggttataaaaccgtacataattggattgacgttagtgagttgctttcaaattctaaactatataccattttctatttttatctgactggagggcacctggggcccttatggtttatcccggtattaactttaatttttttcgtttcaaagccattaaagttcatcggttctaatcaagtcatattaagtatttgtgcattcatatctgtttttattgttttagtaactagtcgtcctgagaatgactcaaatcccatcattgcttttattcactttttacctgtatatattataggtatgtttttttgttcttttcgtgaaatcttaattaaagaatcgtataagtatgggtatttgttattgtttgtgacctttttttgtctagaggtatattgggatttgagtagcagcgtatccattttgaacaagttcatactttttttatctttatgttgcttcttttatagttcgccaaaatactttttgttgtcaattatggctgatattagctttgctttatattttcttcatggctatttcgtaggtgctttacggattttgcaaaatcgaattgatccgaatttaatgagcggcttttggtttggttttgtatcatctatactatgttccattataatttcgttaataattttttgtatttattctttaataagaaaaagcaatttagtgaattcaagattattaattggatcttaa

SEQ ID NO: 265086 - DNA, 1161 bp, Klebsiella pneumoniae
atgttgcgtacttcagattttagtgtagggattgttgctgattggtttgttacattcgcagggtctgaaaaagttgttgctgagctcataaaaattttcccttcttcagaactttattctattgtcgattttctatccgctgagaataaaaaactcttcaatgataaagatattcaaacttcttttattcaaaagtttccttttgctaaaaagaaataccaaacgtatttaccgtttatgccattagctatcgagcaaatggatgtatccaaacacgatatagtcctttcgagtagccatgcagttgcaaaaggcgtcttgactggtcctgatcaattgcatataagttatgttcattccccaataagatatgcatgggatttacagcaccaataccttaaagaaactggtcttaataagggagttaaaggtgctcttgcaaaattcatattgcataaaatgagaatttgggatgttcgtactgcaaacggagtggatcattttattgctaattcacattttatcgcacgcaggattaagaaagtttacgggagaaatgcaacagtaatttatcctcctgtagatgttaatcgattcactattagtgaaaagaaagatgagtattatttaactgcttctcgattagtaccttataaaagaattgatcttgtggtagatgcgtttgctcatttgcctgataagaagttagttgtcataggtgacgggccagaaatgtcaaaaattcgttctaaggccacgaaaaatattgaaatacttggatatcaagataaccaaagtatggaagaatatatgcgcaatgcaaaagctttcgtattcgctgctgaggaggattttggaattacgcctgttgaagcgatggcctgtggtacaccagtcatagctttcggaaaaggtgggactttagagactgtaaggcctcatggtgttcaatcagctacaggtgttttattttataaccaaacgactgatgcgattatcaatggagttttacatttcgagaagtaccaacacgaattcgaacctataacttgtagagaacattctctcaatttttcaacagagcggttcaatagacagatatcagaatttgtttttgaaaagtataatgaatttaatcaggccaaaaaaatcatttactaa

SEQ ID NO: 265087 - DNA, 1518 bp, Klebsiella pneumoniae
atgtatacatgtgcatcgttgcccataactaaagtttattcaaagccatctattccaagaaatgaatatttctttccggtcgacaaacttatctataaagctactcacaaaataacatatgcagaattaaaaacacttcaaccagaagaaggtgacttttatattatctatgaacctaatcatcctaacttgtattccgatttatatatcgcgtatagagataagaagaacataggtcaagataatacttcgtctgctcgcaatggcttaacatggcttaaggtagattatgacttcacattagaagattttggagctattagtaaccccgatgtcgattctacagcatttatacaagctgcatttaattctggcttaaaactaacatctaaaactgatgggaaatatcttttaaaagatacaatttttattgaaaatataccatggtatttccaaggtgcagggatgtctaagaccgtttttttcataaatcattttaaacatgcttttgttttcggttcgcctaaacctagcgatgtgaaatatcctgttaacttgaaaggttttacaataaaaagacttgacggaagtttatacaaaggcactgcaggagctaaaggcttatatatcggtaacggtttaaatgtaaatctgtcttatatagaagagtgctatggtctcggatatggattacatatagattactctgatcaaattacagtaagtcattgtcatattcatgatcataaagggatggcagctggagcagcaggcacagacggaattcatttctatcgttcaaaaaatattaatgcctttaacaatcttattcatgatattggcgatgatgcattgtcagctggttcattcgatatcaattatcctactaaaaatgttattttcaaaaataatactatttattctaccaaaggtggtatcaaattttattcttttgtacaagatgccattgttcaagcgaatagattagttgggtgtagagagggaggtgtatatttaacagatgataaaaattcgcctgataattccttggttgagaatattgtaataaagaataattcatttaattttattggtgtttttgggaaatcagatgaagccggtgcactgagaattagattttggccaaaagtgaatattggctcaaaagtgaaaaatattgtttttagtaataatgaggttttaaactcacgacttgggatctccgaattagcatataatgacaataagagattatctaacctctacatattaaaaaataaattttctttcgataaaaaaaaccatgtcggtattattaaaaatcactatattacaatcacacaatgcgataatgattttgttataaaagacaatgacttcattactcacgtagagaatgttctaattataaacgataaatttagtagtgtaagcgacatgaatatttccacaaataataattttatagatggcaattacgaaaataaaatctcaattaagattgtatcatctaattga

SEQ ID NO: 265088 - DNA, 177 bp, Klebsiella pneumoniae
atgctgcgcataaggtcattgtcgatcgtgtgggccttaatgcagacggaaaatcacctttcgacctggcagaacatttcatgctggcccagggggtggatatcaatggtgaagccgaaaccttcgcgccaggtgaaattaatgctggtgctgaactacgtagcaaaaacccgttaa

SEQ ID NO: 265089 - DNA, 300 bp, Klebsiella pneumoniae
  misc_feature (113)..(122): n is a, c, g, or t
atggcacgaaagctctatcgcaaggaagcgattgaatataagaaattgcactggaaaggaaaagcattattactggcaggtatgccagcatggcttatcgttactctgtcaannnnnnnnnncatcgcactcatctcgactcttatcctatgtacattcacccaacgtatagatgtacggggggaagtcatcacattaccgcattccgttaacgtctttgcaccgcagcaaggctttgtgttaaatcaatatgttaaggtcggagatatagtcaaaaaggtcaaaaatgatatgaaatag

SEQ ID NO: 265090 - DNA, 276 bp, Klebsiella pneumoniae
atgatattcccccttgcggctgagattgcgcacctccagcaccggcgtactgccctgcccctgccacagatcgcgcacctgaaagtcaaactcctggcccgtcatcagaaaaccgagccggcgggtggttacctctgccgccggcaaggtgccgaccagattgccatccttcagcacgctgatgcggtccgatacggccatgacctcttccagacggtggcttacgaagacgatgcagatccccctctcacgcagctggcgcaccacatgcaatag

SEQ ID NO: 265091 - DNA, 297 bp, Klebsiella pneumoniae
atgactctggtaccacgcctcttcaatctcgtcgcaaatcatcagcacggcgataccatgggcagccaaatcgctgatgatatgatagatcccggctttgtttgcgatatccacccccacggttgggctatcaaggatcagcagcttaggagagatcgccagccatttggcgatagaaacgcgctgggcattaccaccggagagggtattcaccggcagatgcgtatccggcgccttaatggtcaacgcgttgaccattcttgcgaccagctgctgagctttactatcactcaatag

SEQ ID NO: 265092 - DNA, 351 bp, Klebsiella pneumoniae
  misc_feature (323)..(332): n is a, c, g, or t
atggttcagattcttaatacaacaggtttaaactatcatgtagagcaaaccatcgctaatgccgaagagcgcattattttgataagcccttatctgaaacttagcgcaagaattaaggagctcattgaagacaaaaaccgtatgaaggttgatattcgtatcatctacggtaaatctgaacttaaccctaaagaccatgaatggcttgtcagtttaccttatgttcgtttgagtttttgccagaaccttcatgctaagttttatgctaatgaaaatcaaagcctgatatgcagcctaaatctatatgattttagtcaaaaaannnnnnnnnngtcaaatcaacaatcatga

SEQ ID NO: 265093 - DNA, 387 bp, Klebsiella pneumoniae
atgaatccctacagatatgatattcagacgctggagcgtaaagcccgcgcggtgcggcgccatattgtgcgcttaaacgccaatagtccggccggcggccacaccggggctgacctttcgcaggtcgaactgttaaccgcgctctatttccgcgtccttaacgtcgcgccggaccggctcgacgacccgcagcgcgatatctacatccagtcgaaaggccacgccgtgggctgctactactgcgtcctggcggaagccggcttcttcccggtcgagtggctggagacctaccagcatgccaattcccatctccccggccacccggtgcggcaaaaaacgccgcatttttttgatcaccggcgacggcgaactggcggaaggcagtaa

SEQ ID NO: 265094 - DNA, 336 bp, Klebsiella pneumoniae; identical to SEQ ID NO: 248519

SEQ ID NO: 265095 - DNA, 204 bp, Klebsiella pneumoniae; identical to SEQ ID NO: 188309

SEQ ID NO: 265096 - DNA, 261 bp, Klebsiella pneumoniae; identical to SEQ ID NO: 248529

SEQ ID NO: 265097 - DNA, 717 bp, Klebsiella pneumoniae; identical to SEQ ID NO: 248530

SEQ ID NO: 265098 - DNA, 279 bp, Klebsiella pneumoniae; identical to SEQ ID NO: 181237

SEQ ID NO: 265099 - DNA, 837 bp, Klebsiella pneumoniae
ttgatcggctgcggcgtcgtctggtggatcaatttctctatcggtaagctggtgcgctatgcggactccgtgaccgctgaccgcccgctgccgttgccggaggtcggcagcagcgaactgcgtaagctggcccaggcgctggagagcatgcgggtgaagctcgaaggcaaaaacgccatcgaaaactatgtctatgacctgacgcacgagctgaaaagtccgctggcggctattcgcggtgcggcggagattctgcgcgaagggccgccgcctgcggtggcggcgcggtttactgagaatatccttgcgcagaacacccgcatgcagctgctggtggagcggttactccagcaggcgcgactggaaagccggctggagataaagctacagccggtgtcgatagatgcgctataccaacgcctggcggaggagcgcgacatcgccctggcggcgaaagccattactctgcgctggcaggcgagtgggatgctggtcaatggcgatggcgaactgctggcccaggcgctgggtaatctgctcgacaacgcgattgattttaccccccagggcggcgagatcgccctgggggtagagaaacgaaatgcagaggtgcaactgagcgtaacggataacggatgcggtattccggactatgccctgacgcggatctttgagcggttctactcgctaccgcgtgaagacggccacaagagcagcggccttgggctggccttcgttcgtgaagtggcgcgcctgcatcatggcgatatccgtctgcgcaatcggcccgaaggcggcgtggtcgctacgctgagacttcaccgtcccttcacatag

SEQ ID NO: 265100 - DNA, 387 bp, Klebsiella pneumoniae
atgaacagtccgattcagatgttagaaattgtcgcggcggatatcgccgagaacacagttcttctggagctgatttataagcacagtaatgaagatcacgaaactgattgtgcaatggcttgcttaattcgctcaatgaagaagaccctggataccactaacgaatatatcaaatcgttaagcgactctcctgccccccccaaagggaacatggtgagagcgatatttctgatgagatatttcacgcgaccattacagccagaaaactcgaagagcttgcgcatatttataacgagttttacttcacagattgcgacaatggtaaacccgcaatgtatatggcagctgcaatttttgactatgcgattaaggtttgcagtgaactga

SEQ ID NO: 265101 - DNA, 390 bp, Klebsiella pneumoniae; identical to SEQ ID NO: 244657

SEQ ID NO: 265102 - DNA, 159 bp, Klebsiella pneumoniae
atgataaagccggaaatgttactcaagtccccgaccaaaaatttgtatttgattcttctgcaggtgaatatgagctatttgcagttgcagaccccaattcttcaactagtgttgttcccggcatttcgtctggctacattaaatattcagcagggatga

SEQ ID NO: 265103 - DNA, 141 bp, Klebsiella pneumoniae
atgttccgcccgtccagccagcacgtagcgttcgcgaaacagcaggcgctgatgcagccccggcggcgcgccctcgcgggtatgaaagaagagatctactgtatcgctggccgcctgctgctccagccgcgccggctgtaa

SEQ ID NO: 265104 - DNA, 2256 bp, Klebsiella pneumoniae
atgcaaggacttcatgcacaattcacaaagttttacgcatctgccacgcttcgtttttatagaaggaaatttcaattcaaccagtggcgtttgcagcatggactaaagttcggcgcactcttcgttccaggaggagtatttgcaaatattttcgcattgaagttactacaaccagtaaccgtaaattatttcaaacatatcgaaaatctaaacatactaagaactcttcttggaggagttggagctgcattgctcggagcgacagctatcgcattctccctcgtggtttttgcaatgcagatcaatatagaacggatgccccatggcttattcagaaggctaagttcagacaaaaaactacttggctcatttctcggagcatttctgatagcactagtcgttgctgctatgtctctcattcctaacgggagttgggcgctaaacgccatttttttggcgagttggggaactattgttatcttgacactattcctttatgcatacaggcgtgctcttcaactcattaatccgattgaacaacttactattatgtcaaacgccgtccggcatgatttgaaaaaatggagtcggctcgccgacaaggccgttattctgttgaatgaaaagtcacctgctgtggtcgatagtgaagtaaaagaaacacactttaatgttgctaaagcacaattctataaagttaacaccgactggaacaaaactgcgggacaggcaatccattacgctatttcctacgcaaagcgcttcgccactcatggtgatcatgaggttaccgaatacgctttcgagtgcatcatgcaagtaaatgctagttattgcactgcaaagcacggcacttttgttgggcacaatcctttcttcgaagtaactgatactacagatggctttattaatacatcactagaactattacgacagacgatgaaaaccgcattggcaggtggggatgagctgctggcgggaagcacattgcgcggcatagctcgcctttatgccgtatacctgctgatagattatgcaggacgcagccaaagcaagcatcatgcatcactagcggctagttatctgggatcggctgtagaatctattgtcccatacaatatgccagatctcatgatggaaggcattcggttgatggggaaggcatcaatactatcgctagatcacgctcctccttcagaaatagttagtattgccaataagatttcagccctatcaaccgttgggatagtcagtgtcaactatcaacctgtaacgttgacagcattcggacaacttgccgaaattacttaccaacttcttttaaagggtaagcacgacatccagtatccagttaaacaattacgttcaaatgttaccgaggcagcaaaacgttttttggctacttcggacacaccatatagctcccaacattgcagcactttaggcccgtatttttcgagcacaagcacttcatcgcttcggagtaggctcacttcactagtcaaccaattagttgagataccttcagacaatgtacgcgctagtgaaatcattgccaacatcgagacctggtcggatcagatctacgttatgcaaaaagagcttcttttacttgcattacagaaacgttcttctttcactttagatgttatttattggacggttggaatttctgagttattaaatgcgctatcaaacgccccttcctgtaccccatatttgaaaggccagcttagaaaaaatgccatctggcttatctctacactgtcgttccttcccgacgaaatggaatcagtaactttcgtcgaaaattactcatttactgagattcttttcgaagcagcgctgaatggattagagcgtgactgccaggaattctatgaaaattgcaagaaactcctgatagggtgggcaaagcaaggcggaagatacgaaacgggccatggtattctggaaaaagcggtcacagggcttgtagccctggctttaagggaagaaaatccaaatgcagtagttaatttaaaaacccagttccgcataatgctttctagtgatagagcaccttcaatggaggcaagggctcgaactacagcgcgtttagcaaaaaggtgcagagaatttcgacatagcgaaagctggcattctcaaatcgagaacacacttgctcatctcaatcgcactgatgtgaataaactaatatatgagatggcagaaatcctctcatcagacacgccgtcgaacccagacccagcttaa

SEQ ID NO: 265105 - DNA, 1923 bp, Klebsiella pneumoniae
atgactaatttttcttcaatggcggctttcttatggtccgtcgctgacttactacgtggtgatttcaagcaatcgcagtatggcagagtgattctgccattcaccgtgcttcgtcgtcttgagtgtgttctcgcgcctaccaaacaggtagtactcgataagttgcccgtggttgaaaagcttgatgagaacgctgctgatgcaatccttcgccacgcttccgggcaacacttttacaatacttcgccgttggatctcagtaagttgggggaaacacagccacgtcttaatcttgagcgttacattcgttcattcagccatgacgcgcgtgagatcttcgaacactttaaattctatgaatttatacagcaacttgatgatgccaatttactctacaaagtagctaaaaaatttgcagaggctgatttgagcccttcttctgttagcaaccacgatatggggctgatatttgaggacttgatccgccggtttgcagaaagttctaacgaaacggcgggtgagcactttacgccacgggatatcgtgcgactgacaacctctctggtgtttgcggacgacgatgcagcgttaactaaaccgggactgatccgccgcatctacgatcctactgccgggacgggtggcttcctttccagcggtatggaatacctgcatgggataaaccccagcgccagccttcgggcttatggtcaggagctaaaccctgagtcttacgctatctgtaaagcggacatgctgatcaagggtcaggatatcagcaatattaagctgggtaatactttgtctgacgatcaactctggaatgagcgttttgattactgtttgtcaaatccaccgtttggcgttgactggaaaaagattgatactgttatccgcaacgagcataaaaagggctacgacggtcgttttggacctggcttaccgagagtatccgatggttctttgctgttcctgctgcacctcattagtaagatgaacgataacagccgcatcggtatcattcttaacggctcgccactctttaccggaggtgcgggcagtggtgaaagcgagatccgccgctttgtgctggaacaggatctgttggatgctattgtcgcattgccgaccgatatgttctacaacactggaattgcgacttatatctgggtacttagtaatcataagccgaaagaacgcaagggcaaggtgctgttaattaacgccactgagcaatttaccctgatgcggaaatctcttggtagtaagcgtaaagagttaacggaagcgcagattaacgagattgtgaatcagtatacgcgctatcaaccttcggctaatgttaagctgtttaaaatctctgattttggctatcgccgtattacggtggaaagaccgcttaaactggcattttatcctcgcgatcctgctcgtcgtgaagcattgttggcagataaagactggtcaaaacatggtgatccagagttattagccgctctggatgcaatggatgataaatatttaagccgggaaaaattcaaaaaagcattgccgaaagtttctgctgctcagtttaagctgttgataaaacacttaagtgaaacagatgagaacgctgatgtttgtaagactaaaggcgagcctgaagctgatactaatttgcgtgattatgaaaatgtgccgttgaatgaatcaatcgaaacatattttgcacgcgaggttttgccgcatgtacctgatgcgtggattgatgtagaaaaaaccgatccttatgatgggcaaattggtttagtgggttatgaaattccttttaaccgacatttttatcagtttcagccgccacgttcattggaggagattgaccgtgatttggatgaggtgagcagagatattatggctttgctggcggaggtacattcgtga

SEQ ID NO: 265106 - DNA, 1311 bp, Klebsiella pneumoniae
atgtataagaaatatactgaatataaaccatcaggtatagattgggtaagtgcgattcctaaatcatgggaggttctacctgcgtttatagttgttaaagatgtatgtataaaaaatgttgatggcgtagaagataatgtactttcattgagctatggtaacatagtaaagcgtaatttagatgacaattttggccttctgcctgaatctttcaatacatatcaaatcgtatccgaaggtaatatagtcctgaggctgactgatctgcaaaatgacaaaaagagtttgagagttggttatgtgaatgaaaaaggaataattacctctgcttatcttaatcttgcttgtttaaaatacctcgaatctagatatgcctattttttactacattcatatgatttaactaaagtattctatggcatgggaggggggttaaggcaatctatgaagtttgaagatctgaaaagactgccaataattattccgtcctatagcgagcaattatctattgttcaattcttagacgctgaaatagcgaaaattgatcaactaatccgtaagcaagaaaaattaattgaactgttaaaagaaaaaagacaagcggtgatttctcatgccgtgaccaaagggttgaattccgatgttgaaatgaaatattcttgtgttgaatggttaggatatataccggaacactggagtatagtaaagtttagttactgcgtgagtattcgtagtggtttagttgaccctaaatctgaacaatataaaaaatactggttgattgcaccaaatcacatacaaagtggtgaagggagaatattaaagttagaaacggctgaagaacaaggtgctgaaagcagtaaatatctttgtaaaaaaggggaggtgatttatagtaaaattcgtcccgctttagctaaagtatgtatttcacctgaaaacaatgttctttgtagtgcggatatgtatccaatgactgcttgttctggtttgacaaatgattatttatcatggttcttattgtcatcaatttttaccagatttgcggttaatcaagcagatcgtgttgctatgcctaaaattaatagagagtctcttgctgagtgtaagataccttttccgaaaaaaagtgaacaaattgaaatagcttactacctgcagagaattacaaaaaaattagatgatttaattgtaaagtcacaagagagtatcagcttactaaaagaacgccgttctgccctaatatccgccgctgtaactggtaaaatcgacgtacgtaactggcaatccgatgctaaggatgcagcatga

SEQ ID NO: 265107 - DNA, 918 bp, Klebsiella pneumoniae
atgagtgatatccagctctttcgttacggtaaaaacggtgtctccgaactgccgggcaaatcagcagccattgaaaaagatctgcaaaaactgatcgagtctcatatggaggctttccttggggtgcgttttttggcgacggaatacagcacaggcaagacccacaaggggcgtattgattcattggggctggatgaaaacaacacgccagtgattatcgaatataaacgtcagagtaacgagaacgtcattaaccaggggttgttctatctggactggctattagatcatcaggccgagttccgttggttagtgatggataagtttggtaaacaggttgctgatgatatcgactggtccaatgctcgtgtgatttgtattgcggcagattttaccaaatatgacgagcatgccgttgcgcagattaaccgcaatatcaatcttatccgctataagctgtttaaccctgatctcctgatgtttgagctggtgaatgctgctaccgaaactcacaagcctcagcctgttgcaatagagaatcaggtgccgaagcagaagaaaaatgctcaacgctatcgtctggataagtcttcccctgaactggttgcgctttatcagaatatctgtgattttgccgatagcctaggtgatgaggttcagcgcaaagagttactgctttatactgcgtttcagaagataaagaattttctaagcgtcgtgatatggcccacagccaaagaaccacacgtcaagctttacttgaaactaaaaccggagcaggtgatcatctctgatatcgtcagagatgttactaatttgggacactggggaaccggtgatattgaggtggttgtccataatcaggcagatttagcaaaagctaagttactgattgagcaagcgtatcaagagaactga

SEQ ID NO: 265108 - DNA, 3105 bp, Klebsiella pneumoniae
atggtatctaaatccgcagaactattattccagaatcacattattgagcaattatcatccagtggttggttatttggaagctcatccggctacgatcgtgaaagggcgatttatccagaagatgcgcttgcttatgtacaggaaacccagccggaagtctgggacaagttttgtggaatttatccaaaagatacagatgtacattttctcaacgcggttgagagacatcttgtggctaaaggaaccttgtggacgctgagacataccttagcggatcgcggtgctcgttttcagctttgcacctttaaacccgatcatgaccttaatccagacttactggttcgctattgcgctaaccgtttacgggtagtacctgaactgatttattcgcccaatggttatgatggccgcattgatttgacattgttcctgaatgggttgcctgtcgccacgcttgaactgaaatcagcgtttaaacaatcgcttgatgcggcaaaactacaatacatcaatgaccgccagccaaaaaccggaaataaattagaaccactgttgaccttcaaacgcggtgcgctggtccattttgcggttaatcagtatgaggtggcaatgaccaccaaactagatggaaagaaaacctttttcctgccttttaaccggggaaccgcagaaggcggggcgggtaatgatcaaccattagaggggtatgcgacagcctatctatggcaggaaatcctgcaaccagataactggctgcgtattctggggcgctatttacatctggaacaaaagcgcgttgatgatgcgcttggtcaccaggaaatcaaggaaactctgattttcccgcgttaccaccaatgggtcgctgttcagtcattactaaatgctgttcgggtggagggaacagggcaaaaatacctcattcagcatagcgctggttccggtaaatccaactcaatagcttggttatcccatcagttagcgtcattgtaccgcccggatggcaacaaattttttaattcggtaatcgttattactgaccgcactgtattggatggtcaattgcaggacacgatttaccagtttgaacatcaggatggagtggtttgtaaaatcagtcgtgagtcgggtagtaagtcttcgcaactaaccgaggctttatcgtctggtacggcaattatcatcgtgacgatccagactttcccgcatgtgctcaaggctattcaggaaagtactggactgaaaggacgaagctttgcagttatcgctgatgaagcgcactcaagccagacaggaacgacggctcgacaacttcgcgaagtgctgatggcggaaaaaatagatgaagaagaaatggatggtcaggatgttatcaatgcgacgcttgaggctcgcagaggttcctctgatataagctattttgcctttactgccacgcctaaagctaagacgttagagctgtttggtcgaccgcctcatcccgaaatgcctttggcgaatgacaataaaccgaagccatttcatctgtattcaatgcgacaggcgatcgaagaagagtttattctggatgttctgaaaaattacaccagctacgggcaggcgtatcgtctggcgcatgatgccgaagataaagaagtcgaccgcaaaaaagccaaaacgcagttgaacaagtgggttcgcttacaccctcacaatattgcccagaaatcacaggtcatcattgaacatttccgtgagcatgttgctcatttactaaatcacgaagcgaaagcgatggtagtaaccagtagtcgccttgaagcggtaaaatataagcaggcgtttgatagctatgtgcgggaaaaaggctatcaacgtttaacagcaatggtggcgttctcaggtgaagttgtcgatgagggcgaaagctacacggaaaactcgatgaaccctggcctgcaaggtcgggatatgcgtaaagcattcgatactgatgattatcaggtgatgctggttgccaataaattccagacaggctttgaccagcccaaactgatagccatgtatgttgataaaaaactcaagggagtggattgtattcagacactttcccgtcttaatcgtacgtatccggggaaaagcagcacatttgttcttgattttgttaacgatcctcaggatatcctggctgattttaaagagtattatcagaatgccgaattggtgcaggtatccgatcccaaccttgtttatgccattttccataagctgaacgaacagcatatatggcaatggcatgaagtgattaatttttctgatgcctattttgatccgaaacgtggtcctgaagcgctaacggggtattgtaaacctgcggtagatcgttttactcaccgttaccgttccgcgatggatgtattacgaagggcattatcgacactcgaagatgcaaagaaaagtggcgatgaaacttggcgagtaaactgcgaacgtagtgtcaagcaagctcgtgaagcgaaggatgtgctggatacgttcaaaaaagatatgaatagctttatccgcttttatgaatttgcttcgcaaattgtcgatctggcagatgaggaactggaacgcttaaatgtctttgctcgccacttgttaccgttgctaagagaggaacggcttgatgacgatcttgatattagtcaggtacagctaacacactataagttgtgggaaaagcgtactcaggatctcaagttacaagaagggggagaagggcttaaagggatcaccagcgtcggtggctcaattgcggaaaggccgaaagatctattatcgcatattctggaacagttaaatgagttgtttggcgaagaaacgaccgatgctgacaagctggtatggcttgatggcgtggcggctaaagtttccgaaaatgattctgtgatggatcaacttcgccataacgatatcgagcaaatcatgcttggggattatcctcaggccgtacagaatgctgtcattgaaagcatgggggcgtttgagaaacattcagttgcttacctgtctgataaggatattgcccgtttagctaatcgtttcatacttgatgtattacttaaggggcttggcagatga

SEQ ID NO: 265109 - DNA, 492 bp, Klebsiella pneumoniae
atgaactctatcaataattgtgtgattttaatgggatctattgaatctgtggggtgtacttctcggggggaacagaattactcagtaagcccggtgatgccgctttacacactttctttggggaaagacggtttgctatgcaaggactgccttacagttggaagtcgcgaatggaagaaatcttatgccaaagaagagacaatacatgccgcatctcatgcgccagagtggagtgacgctgcactattcggtttttgtgcccctcaaattacttcggataaagaatggtgggagtatgttgaagaacgtatagccagtgtacaaaacaatgcaatcggtgcgatgcagtttcctaatctagaaaagggggcgtcaaatgctgctattaaattagattccaactttattaacgcgaggaatgttgcttggtatgctcgggatgccaatatgtttgtaattgaagctgaaagagtctcgactgaagtggagtga

SEQ ID NO: 265110 - DNA, 309 bp, Klebsiella pneumoniae
atgataactttcatcgtaatatttgccatatcattattttttgcaaaactaatatcatatcttttgaataaaaccaatgttgatttattaaaaaccaaatgggtagcattaatattaactatcctatacattccattgaattattatcttttgatttttataacatttggcgcctcattaattgctgaggggtattttaatggtcttggtcaacagggagcaattttaataatcagaaatattgttatctgctcattattatgtgctcctgcattttataaaatgatgcggcataaaaatatccattaa

SEQ ID NO: 265111 - DNA, 651 bp, Klebsiella pneumoniae
atgaatacatatttatcatctttgcataaaaggcttggaattccccccctgcaacaaagcgaggggaattctgacactaaagatatttatcttccatatactcaggagctggcaaataaaatcaagacttggattaatcatcttgataccgagactcatgatagtgttttttatgaatgtgatctttgtaagacattcaaatgcagcaaagaagaccttgccatagctgctgaaaatatacctctctacagtcatattaaaaatattaatggtgtaaaaatccgctactatacagaaacaccaccttcaactagcctgcgagaactcaccgatgttcaacaattcatgtttaaatgtttacaaaggggatatatttccacaccagaaaatggctggagtccaattgttcaatctttaaatctctatgaaacattcactcgtagcgaagaatatcggggaacaaatcgctcttcttttggacgaagtctttccagaatgggattggctaaatccatacttgcaggaaatcctccatacagatgtcgttcattcttgttcaaagggctaaatgagtccaggtgtgcttttgcatcgaatatactgaaagataaaaatttcgtttggggggagaacagtccccctccaatgtaa

SEQ ID NO: 265112 - DNA, 2706 bp, Klebsiella pneumoniae
atgagtgataaacaccccatcattgaagcagctattgcactggcgaaacagaatattcctgttcatccgttgaaagctgggactaagctccctgtgaataaaggttggtcatccgcgccgctcctgacagttgatgaagtagaaaatcaggctcccacatgggcagttaaaaattataacttagggatgaggacgggttatccactggatgatgacagtatattattagtagtggatattgatattcatggtgcagcactgactgaggatatgaaagacgaactgaataaccagctcagggcatttgggttagacccaaataatcccacggttattactggtagcgggaaaaattcttgtcactattacgtgtcatttacagataaagatctggccacccaagtaggtgcagctaagacgctttctaaatcaacattctacaatgatgaaggtaaaccttgctggattattgaactactggggaaaggtaaacaagttgtctgcccacccagtatccatccagatacaggcaagcactacacatcaatcaatgataggatcataaaagcacctgaaccattagttcattcactgcgaactatattggctaacaaacctgttctatgccataacattatgctttcagatatctctgaggatatgcagacgatttttcaccaatgttttgataaggcaatggatagtttcacggatgttgaaaaactgaaaagtgcattgaatacaatcagcgctgactgcgactatgttacctggcgaaatgtcgtctggtccatacgatcacataatattatggatgcagaaagtattgctcgcgactggagcaaatcctccagaaaatatgacgaagatgagtttactattctctggaagtcatacgccccaaccggaggtattggtgcaggtacgctttactatatcgcaacacagcatggctggactgggtacgaaaaaaatgcagtgagtcagacagtacagcctgtaccgagtagcaaccaatgcccttgctttcgtatttttgatagcaaagtttatcatagcactggtaattattgtgctggcgtatggcatttttatagtaatgaaaatgaagttaaaggtgagttagtttgttccccagtaactatcgatgctattacatgtgacacatcggaaagaaacttcgggcggttattgacaattaccaaccctctcggaaaaaaacaaaaatgggctatgcctatggaactcctgagcggtaacggtgaacctgttcgtggaatattactgtctttcggggtgaaaatatctagtaataaacttttgaatatgtatttatccggtgctgttccggataaaaaaatacgttgcacaccacaattaggctggtttgaagatgttttcgtcatgccagatatcacctacggaatccataaacagaatgagattgtctttcagtcaacagatgatcctattaatatttactccaacggcggaacaacagaagaatggcgcaataatattgcagcacttgctgtaggtaactcgttattgaccactgccatttgttgtgctttctctggtccattgatcgaaccctgccacgcagaaagtggaggcttgcatttttatggtgactcatctactggtaaaactactcttgtccaggttgcctgctctgtctggggaagccctaactatatgcgtagctggcgagctactgcgaatggtattgaaggggctgcatctatgtttaatggtacgttgttggctttggatgaaattagcgaatgtaatcctcgtgaagtaggacaaattatctacgctctaggtaatggacaaggtaagcaacgcgcatcaaaaagagggacagcacgcgccatagctcactggaaaacagcagttatctcaagtggtgaattaactactgctgcaactattcaactctctggtgaaaatgctaaagcaggacaagccgtaaggttagtagatatttctgctcaacggattcatggtgcatgggataatcttcatcactttaactctggtgctgaactatcagaacaccttaaagcccaatcaaaaatcaattacggcgttgcagggcgtacattcctttctcacttggtgaatggcaagttaaaattatccactcatttccataagtttgaatccctcaaggaatttaacccagctaacgcgagcggacaggctaggcgtgttgccagacgttttgcattgctagcattggcaggagaactcgccactaaattcggactgacagggtgggaagccggttatgcaacgaacactatgatttcaatgtttcagtcatggttaacatcagtaggtaatgcgccactggaaggacagaatattctccagcaagtccgtgattttattgagcgttatagtgacagtcggtttagcagtaaagaaggttatccatcaaacagatttattaatgaacgtgctggctggtgggacgaatccccgactggggggaaagtatatctgttcacttcggcaggatttcgtgaggccacgcgaggctatgattttaagcgttctattaaggcattaaccgaggctggaattctgaaaccccaggaaaataatcaaagcggtggtattcgggtaaggattgaagggcagcagtacagagtttatcctatttgtttttgtgacgatgaaaataataaggattaa

SEQ ID NO: 265113 - DNA, 210 bp, Klebsiella pneumoniae; identical to SEQ ID NO: 110668

SEQ ID NO: 265114 - DNA, 843 bp, Klebsiella pneumoniae
atgaagcgtaataaaaataatcataaagaatatgatcgcaattcacggcgtacaacaatgttcaagctaggaaataaggtgtctgctggtaaaaataatgcctttggtggtaatccagcaaaacggattagagacctgcacatcattcatgactatatgaattttatgtctacaaaggaccatcctttagcagtaatgatgctatacaggaaagaaaattctgtgctttatgagcgcatatgtagctctatctgcaatgagactctatatgttgagtttggttatctggcagaacgcctctattatgaatatcatagaagaggaatgaagagttttagcaaagttctgaatccgactgagaaagaagctgtgctatttttaagcaatagatactatttatcagaggaagcaattcgttcaatcataaagaaatctcgttccaagccgtcaaaaaatactaattccataccagcattaattcatatgcctcctaaacgaatttatctggataatttaactcatcagcaacaattagaagtagagcagcaaaatatagaccacatggagtcagtgacagtctacgacatagaggaatcacaataccaaagtgaagatgacagacaagccgccattgaaagttcaaaactatattatgatgaattaaggaatcaactagcgtcattagaacgtagagcaaaagaagaacctgatgggaaagcctttttgacaccttccccccctcgtcctacatatctacatacaatcctcagctcagaggcttatcatgaatacgagcatcagaagataaaagaatataaaaagcgcaataaatcagataaataa

SEQ ID NO: 265115 - DNA, 1242 bp, Klebsiella pneumoniae
gtgccaaaacaaacaaagccgttaacagatactgaaatcaaagcagccaagcccagagagaaagactattctctctatgatggagatgggctaaatatcttagttaaaacaacgggtaagaaaatctggcaattccgatattcaaggccagtgaatgggctacgagccaagctcactttcggtacatacccagcaatatccctcaaagatgcccgcgagcagcgtgacagtgcccgcgcattgatagccaaacaagttgatccacaggaccaccagcgcgatcagttgaggcaaacccagcaagaacgagccaatacctttcaggtaattgctaagctgtggtgggaagtgaagaaaacaagcgttaccgaagactatgcccaggatatctggcgctcgttagagaaagatatatttccaatcattggtaatgtagctatctccgatatcaagacacgaactttagttcaggcaattgaaccggttgaggcccgaggtgcgttagaaacagtccgtcgcctctgccagcggattaatgagatcatgatttatgcacaaaacacaggtctgattgatacggttcccagcattaacatcggtaaagcttttgagaaacctcaaaagaaacatatgcccagtatccgtccagagcaactaccaatgctgatgcagacaatgcggcttgcgaacattgaattgcccacccgctgcctgtttatgtggcaattgctgacactgactcgccctgctgaagctgctggcactcgttgggaagagatcgattttgctgctaagttatggcgtatacccgccagcaggatgaagatgggacgtgaacatacagttccattaacagaacaaacacttaatattttagagctaatgaagccactaagcgaaaacaaggaatatgtatttccgagcagaataaaaccaacccagccgatgaacagccaaactgtcaatgcagctctcaaacgggcggggtttagcggcatgttagtttctcatggtctgcgttctatcggcagtaccagactcaatgaagaaggctttccccctgacgtaatcgaagcagctttagctcatgttgataaaaatgaagtcagacgcgcatacaaccgcagcgattatctagagcaacgcaaaccaatgatgcagtggtgggctgattttgtcactgcggcggatagcggcagtattataaataatagtattcgaggattgaggtctgtgggatga

SEQ ID NO: 265116 - DNA, 465 bp, Klebsiella pneumoniae; identical to SEQ ID NO: 215396

SEQ ID NO: 265117 - DNA, 201 bp, Klebsiella pneumoniae
atgccagactcattacaacctcaagaagcatttgcaacacgccagatattaacaactaatgaagccgccgacttcctagggctgaaaccgcagacgctacgttgctgggcgtgctatggcaaaggaccgataagcccagtaagaattggtaatcgcctgcgctggaggttgtcggacttagagaaactggtcagtaaatga

SEQ ID NO: 265118 - DNA, 1203 bp, Klebsiella pneumoniae
atggcaaaaatcaaactcaccaagtccgctgtcgatgcggcacacccccaggcgcaggccgtcgaactccgggatacgttggttcccggcttcttgtgcaagattaccccgtcgggccgcaaggtgttcatgctccagtaccggacgaacgctggcgagcgccgcaagcccgccttgggtcagtacggggaactgaccgtcgaacaggcccgttcgctcgcgcaagaatggctggcccaggtacgccggggtggtgatcccggcgcagccaagacggaagcacgcaaagcgcccaccgtcgaagagttgtgcaagaagttcatggaggaccactccaagaagcgcaacaagcccagcacccgagtcggctatcaaggtgtcatcgaccgctgcatcatcccgttgttgggccgcaagaaggtccacgacgtgaagcggcctgacattgccggactgatggaaaagctttcctacaagcagaccgaggcgaacaaggcgttcagcatcctgcgcaagatgttcaatttggctgaggtgtggggctatcggcctgacggcaccaatccctgccgccatgtcccaatgttccctgccggcaagtccacccaccttatcagcgacgaggacatgggaaaacttttccggcagctcgacaagatcgaggccgaggggctggagaactacgtcatcccgttggcgatccgcctgcaattcgagtttgccggccgccgtggcgaaatcgtctcgctcgaatgggaatggatcgatctggaaaaccgccgcgtcgtctggcctgacagcaagaccggcggtatgtccaagcccatcagcgaggaagcctaccggctgctttcgacggcgccgaggcaggaaggcaatccttacgtcctgccgtcgccgcgccatccagggcaacacctgaccacgggcgagtattacggcggctggagccgtgcgctcaaagcggcgggggcaacgcatgtggggacgcacggcatccgccaccgctcggcgaccgacattgccaattcgggtatcccggtcaaggtcggcatggccctgacggcgcacaagaccgtggtgatgttcatgcgctacgtccacaccgaggacaagcccgtgcgggaagccgccgaactggtggcgaatcgacgcaagtcggtcgtcagcatgcatcaagaaccgaaagaggtgaccgcatga

SEQ ID NO: 265119 - DNA, 384 bp, Klebsiella pneumoniae
atgacgcgcatcctcaaacgaaaggattttgcgcggtggcaggcgggcgaaaagctgtccgatgccgccttgtgcaaagcggttcaggagatggaaagcggtctgattgacgcggacttgggcggcttcctttacaagaaacgggttgcccgccctggtggtggcaagagtggcggctaccgcacgttattgtcggcccggatcggcagccgctatgtgttcctgcatgggttccccaagagcgacaaggcgaacattacgcaggacgagaagaaggcactgcaattcgccggcaaggtgttcctggaactgtccgccgaagcattgtcgaaggcgttgcagtcaggcgtgttattggaggtgcattgtgagcaagatcattga

SEQ ID NO: 265120 - DNA, 303 bp, Klebsiella pneumoniae
gtgagcaagatcattgaatccctgcgtggcgatctggccgcgctccacgaagcgggagcgatcggcaaggtaacgatgcgcgagttcgacgcaatctgcccgccgccggtgcgggagttcagtgctttcgatatcaagcggctgcgtgaagccttgaagtttagccagccggtgttcgctcttcatctacacacgtcggcctcgaccgtgcgcaagtgggaacaaggcgaaacccatcccacggggccagcgctcaaactgctcaacgtcatcgccgacaagggcctgcaggccatcatctga

SEQ ID NO: 265121 - DNA, 819 bp, Klebsiella pneumoniae
ttggcgacgcgaattacccctttcaactcacagcatcttgaagccgcctgccgcgtgctcgccgataccgaacgcggtctgagcggtacacagatcgagcggctgctgcaggaaatcgaggttgccgacacgtcgcccggcatgacaaagtggaagcggttgttcaatgcgctggccggtgcgcagaaccaccaccagatcggcaaccatctcatcatgttcatcaaccgcgcgatgaacccggtgaactacgcccgcgatcccgcgacgttcgcttggcggcgcgacgaactcaatgtcgtccttgccttctccggtttctacgtgcgcgatgacggcaaggttgctcacgccgataaggccacgacgcttgatgccgcccgcgcccgcgcgggacgactcaaggccgcactggaaagccgcgtcgtccatgcggaagtgctgaactactgccgcgccgagttgctggaggaaaactacttccatgccgtgttcgaggcaacgaaaggtgttgcggagcggattcgcctgctgtcgggcctgaacggcgacggcgcggacttggtgaacaaggcattcgcaggccagcaacccgttctcgccttgggaccgctcaccaccgagtccgaaaagagcgagcagaaaggctttgccaacctgctgatcggcttatttggcgccgtgcgcaatccgctggcccatgcgcccaagacgaattggcccatgtccgaacaggacgcactggacatcctgacgctggtatcgctgattcaccgcaagctggatggcaccacgaaattagcggccgtatcgccgtaa

SEQ ID NO: 265122 - DNA, 1284 bp, Klebsiella pneumoniae
atggacgaggcgatcgttgtcttctctcgaaaagggattttccagaccacgattgccgcgcgcgacgttcgcagccgggaacatgcgcgcaagctgtggcccttggtgtctccaggcgcagagcgccagatggtgacatgggtcagcccctcctttgaaagcgggaagctgcgtcggcgatcccatttccgcgtacttcctgcccagcacacctttaaccccaaagcgcacttcgacgatgaagaagccagccgatggcgcgccgtgcaggaaagtcctgaacaccggcgggcgaaagaacttgtcgcggccgaactctcacgacgtttgaatgccgggcttgcgatgccgtgggcgttcaaggatatggatgcgtcggactatccgctggaaggcaacttgttgctcggcgccgaccaggtggcaaccgagcatcccctggagacgccattcggcagcaaattccggctcgacgttgccgtgctcggccccccggtccaggctgaaccgatggtgctgggcggcgttgaaatcgaactcggccacgccttcgacgggcgcaaggctcttatcgggaagtcgctcggattcccgctcatctccatcgacatcaccgagatgacgctggacgaactcacgcccgagtgggcacggcaggtattgactgcgaccacgcggagccacgagcaaggacgccggcagacctacatctatctccacgacctgctgtaccccctctacgcgcaattgccggcgtttctggacgacgagcagcgccatcagttccttgtgtttgccgacgatgagaccctgaacaagttggtgcgctggatgaacctgctcgccgaaaagctggagtacccgaagggtacggtcgccgttgccttggtcaatggcaagaacgaacagtcgcgcaagatgctggaacgcgcgggacaagtcgttggccccgactggagcgagttcaacggccagcgatgcctacgactgaccctgccgcgtcccaaaggcccggcggatctccaggcccatcgcttccacatgacgatggcgcgcatcctgctgtcgcacactgattcgctcgttggctacaagtattgcaacggcgtagacaaccaccaccctgaagaagacgtgtgggttgcgcatcgctggatcgccgacttgaaaacccatacccagcatcgcgtcttgccgaagcggctggctgaaccgatcaacagattgatcgcggtggtttcggacctgcatcgcaatcacgcggctgccagccaagaggcgtga

SEQ ID NO: 265123 - DNA, 789 bp, Klebsiella pneumoniae
atgacaactatttttgaactggtcaaagacccctatgagcgcaaggcgcgcgtaatcccaggacttcttgtagcgttaccgctgctcgttcctttgttgtgcgtctacggcgcaaagcacccggtacttacaggcgtgatcggcttgcttggtggctgcggtgccatttatgcgcttgcgagcgtagctcgcgggcgcgggaagaagcttgaagagatcctggttgcaaggtggggcggtatgccgacaaccatcgcgttacgccatcgcgacaagtttctcgatggtgtcagcaagcagcgctaccacacggcgatcacggccaagctgggcatcgccatgccaacggcagaagaagaatcagcaagccctgacaaggcagacgacatctacgttggcgccacaaagcggcttcgcgaactcacgcgttccaacaagcagctcttgctgaaagagaacatcgcctacggatttcaccgcaatatgctggcaatgaagcctgccggcatcgtgtcgtgcctcctgggcatcgtctacggattgctgattgcaaagattctgcaggtagtacctcctcattttaacctagagcaccttgccgatccggggcttgccgcaggcttgacactgctcatttcgctggcattacttgccgcttggctgctgtatttcgatcagggcgcggtcagacggatggggttcgtctatgcagaacgcttgtttgagtgcttgccgtctttgccttcttcggccccgcggaaaagagcctcaaaaccgactacggactga

SEQ ID NO: 265124 - DNA, 903 bp, Klebsiella pneumoniae
atgcaagagccctctgtcactgccgccaatcctgctgagcccaaagggctaagttgggggttggaaagcagacttcaattcatcgatttccgtttgcgctgggaacggcacattaatcgaatggatctcactgagcacttcggcatatcggttccccaggcgtcactggacattgccaagtacacggagttggcgccgagcaacctaacttacgaccgcagttccaagacctacacggcagcgccgagttttcacccgctttaccaacgaagttcggcgcaacactatctagcggagctgctggccaccaagatgggagtcatcgagcctgcggccagctttatcggctcagcacttgaggcagattgggcgccgtccccctggcgcacgatcaatgaacagaccgtcgaagcagtggtccgggcaattcggcagcaggaagccatttgggtgagctaccagtccatgacgtccatggacgaatcggttcgtctgctgtctccccacgcccttggtaatgacggttttcgctggcacatgcgcgcgttttgccacaaacgccagcgcttcagtgatttcgtcctcgcccgaatcctgcgcatcgacggcttcgaagcgagccaagtggacgccagccaagattcgcactggcaaactctcttgacgctggtgcttgcaccgcaccccgatttgcccgctgccaagaaacgagtcctggagttggactatggaatggaagacggacaggtcaaacttccatgccgccaagcgtttttgtattacacgctgaggcgtttgggcttgcataccaaggaagcacccgaccctctcgcgcagcagatcactttaaagaaccgcgatgaaattcaaccctatattgatgccttgtcggcccaaagctga

SEQ ID NO: 265125 - DNA, 1194 bp, Klebsiella pneumoniae
atgcccacaaccatcacgttttttcccgtcgacaacggggacatgaccctcatcaagttcggcgacctcgacgcaaccaccctgctgatcgacgtaaacatcaggcaagacgccgacgaccctgacggtgaggcgcgcgatgtcgccaaggatctgcgcgaccgactgaagaaagatgagaacggcaggccgtatgtcgatgcgttcctgctgagccacccggaccaggaccattgccgaggcctgacgcggcacttccacctggggccgctggacaagtatccggatgacaagaaggacgacaaggacaagaagatcgtgatccgcgagatatggtcgtctccgatcgtgtttcgacgcgccagcaagacgcacaccttgagtgacgacgccaaggcattcaacacggaggcgcgtcggcgcgtacagctgaaccgcgacaagaatttcgtcgtcgggaacggcgaccgcattcagatcatgggcgaggacatcgacggaaaaaccgatgatctcacctcgattgtgcggaaggtggacacgcgcttctcgacgatcaatggcaagagttccgcattcttctccgcgattcttctggcacccttggacgcccaggacgacgaagaagaggaagagtgcctggtcaagaaccagtccagcgtgatcttgaacttcacattggccgctgatgctcagacgccggatggcgcaaaattccttactggtggcgatgccgaagtatttatctggaaccgccagtggcagcgccacaaggccgaagccgatgtgcttgagtacgacatcatgcaggcgccacatcactgttcctggcattcgctgtcctatgacagttggtcggactaccgcgaaaaggccaaacttgatgccgacgctcgcaaggcgctttcgcagacccgcaacggtgccgtcatcgtcgccagttgcaagccgatcgcagacgacgacagcgatccgccctgcatccgcgcaaagcgtgaatacgtagcaatcgtggacgaagtaaaaggcgacttttactgcacgggcgaatatccgagcgaaaaatccgtggagcccctcgttttcaccgtcaccgctcagggtgtgcagcctccctcgaagaaggaagccggatcgaaggccgccgccgtgatcacctccgcgcgcgcgcccatgccacacggggcatcatga

SEQ ID NO: 265126 - DNA, 2256 bp, Klebsiella pneumoniae
atgacgggcaccatcgcggacgcactgcatcaacttcagcggcacaggggccttgtccgcgttggcgagccaaggaaaagtggtgaatcgacgcagattgaagtcgatgttgctgttgaattgccgagcaggtctcggcgcaatggcgtatccgggaccggagtgcgctcggtcgagacatgcgttctggtattcggcagtgactggcccatgtctgcacccaagcctttcttgcgtgcggacttcccactcaacttgccgcacatcaatcctcatcgcgaaggcgagttggtctcgccttgtctgttcgagggatcgttggacgagctgctgcatcggtttggtctggacgccatcgtcgatcagttgatcgtttggttgcacaaggccgcagccgggacgttgctggaccttgaacaggggtgggagccgactcgtcgagacagttgtccttcgacccttgtattcagtgccgagaatgtcgcggccgccgctcccgctgacggcacgattttggtggttcccgcaggctacgtgacgattgatggcgggctatacgccatcgtcaatgccgaactgactgctcaagtcgatcctgtgttctatcaggaggttcacaacgacaagttgggtaaatggggaaatggccataccgcagccttcattgcgcgggctccaataaccgacggcaacccgcatgtggtcggccactatcaacccgagacggttgtcgatctcgcgacgttgcttgatcgagcagcggaactcggcgtcgatcgtgacgctttggctcaaggcttggacggctactatggacgttcgattctggatatgcagcaagactcgcgtggctggacgcatggcttgtatgcgattgtgattctgactgttcaaaggccagcgtcgcttgtgggctcaccggggagaagtatcgaggtattgccctacgtggtgcgctatgaactcaacgctcaatcgctcctggagcgaaacgccacggttcacccggcttttcacgcacatgcgttgtctcccgaactgctggcaagaacgtccggcattccatctgcggccacatcgcagccgctggtcttgctcggctgcggaagcgtggggtcgaaaatcgcgatgcaactggggcgagcgggtttcggctcaatgaccttcgtcgataacgagtccatgtcgcctcacaacgcggcccggcatgcactcattgagcgggcatcggtgctggtcccacctcggaagtcggcgctgatgaagacggcctttgagtcgctgtcgcatcttcaatcgcaagcgttcgacaccgacgcagtgactctcttggtcgatgctgcgcagtttgctgcaaccgttccgcaggatgcggccctcatcgtggatgcgacagcctcacttcaggtgttggccgcagaaacgcaatcaacggcgctgaaccaatcccctgcgcggttggcacggatcgtcatgtatggccaggggcgctgtgtcgcggttttgcttgaagggcctggtcgcgccggtcgggttgacgatcttacggcattcttgttcgagtgctgtcggtttgtgccggaactgcgggcgtcgattgctggcgatacgtctgagccgacgcgtatttttgtgggcgacaactgccgttcactgacgatgccaatgtccgatgccgttgtttcgcgttctgcttcattagctggcctgcaactggaacgctggctcgttggcggactcccgaaggaggcgacgctttgcgccggggtctcggataccgaaggcctcggcatggcatggaccagcaccagcctcggcccgaccactgtgctcaacgtagcagacgatggtggctggaacattcggattctgcaccctgtcgtgcaagcgatccatgctgatgcgctgcgctggggcgctctggaaacaggtggagccttggtcggtcgtatctcgtttgagaatcgaaccatcaccattgctggcctcgtggatgcgccgcctgacagcattcgggaggccgcccgcttcgtccttgggacgaatgggcttgttcaaaatttgcgcacagcgaatggaacctctttggggtatctggccttcatcggcacttggcatagccacccgaaaggcggcgcacattcgggcatagaccgaaatacgttgcgcggcatcgccgaggatgctggcggccttcccgccgtgtcgttggtatggactccgacaggactcaggtgtgcggtggatcgctggtaa

SEQ ID NO: 265127 - DNA, 1071 bp, Klebsiella pneumoniae
atggctgactacttcgagatcgattttcttggcgtcgaaacagcgaaaagcggggatgcaatcacgctacgctattcggtgaatggcacagagggcgtgcacgtcgttgacggtgggtatctggatacgggagatcagctcgtcgagcacctgaagacgtactatggaacaacagtcatcgaccatgtgatcctcacacaccccgatcgcgatcacgccaatgggctgcgaaaagtcctggagcaatgcacagtcaaaaatctctggatcaacaggccgtggatctatgcagatcagttgattgatcgattcgagacctatgaatcagttgaagcactgagacggaaattgcgctccatctacgatgccacggcaattcttgaggatcttgcggttgagaagggaattccaatccatgcccctcttcaggggcagaacatcggtcccttcatggtgatggcacccacactagatcgctacttcgacctgatcgtggactccgcgaagacaccggaagctgttgaagaaagtgctttggatagcgcgctgagcagcatattccgggtggtgaaggccgcgaccgcctacatcaagtccctgtggggcgaggaatattttccgccggagcctaccagccgtgaaaatgaaatgagtgtggtccagtcggctgttctgaacggtcatcgtgtcatgcttactggcgatgccgggcgtgaagcgctgcaagaggttattgactacgcgccttttgccggactcgcgttgccaggcattcggtatttccaggtgcctcatcatggcgggcgacacaatgtctcgactgaaattctggatcaactggttggtccacgattggacagcatgccggacaagcatacctggaatgccatttgcagttctgccaaagccgatgaggatcacccgcggaagtccgtaattcgcgctgtattgcaccggggtgggcactgggcggcaaccgaaagcaagaatctccgcattggggcgggcattacccgcgatggctgggtatcaattcctcaagcagagtaccccgaagagcaagagagttga

SEQ ID NO: 265128 - DNA, 1017 bp, Klebsiella pneumoniae
atgcatgcgatgtcgctctctgagtttccaatttctgtgcttgaactccacacatggccgtggtggcgaagattttggaatcgaccgccggcgcttgtacggaagcggtgtgaagcttggcgtgagctattggggctcaaggagtcggcaggaaaaaatgtgctcctcaacaccgcaaaatcgaagatttttgatgactcacgccgtcgatgggacatcctggacaatcttaatcgcagcaactttactttgcggagccgattttcgggcttagcctcgggcgctaaggaggctttccaaagtcctcatggatcgctagtgcaagtgacgatggtgcctcactttgaatgcgacgcaagcgatatagagggcatctccgcaagcaagtcggcagatatgccacacgaaagtgtggatgtctttggtgcctactatattgatgagcagaatcgatatgccagaaaaggaaagcccccgctcggactggatgatgcgagcttaaaagagctttgttctcatggcgaaattcggctactgcacggacgtggctccgacacgtttagcgtgcgagcttgggatggccgtttgttccttgacaacagtggcggatctcaccatcttgcgggcgccgtgcatgtcgctaagcgcattggcgcgcgcattcacctcgcctcgaaactctatctctaccagctcaaccatttgactgtgcaatggctgctcgatggatttcatctggtattgctccccaaggatttggccggacagatgctatggactgtgaagagcttggtaggttctggttcgaacatggagttcccgcctgtactggccgaaggcacgcttttggcattcccccggggttcgcaaatcgccgagtccgtgatggcagaactattgagtcaggggcaccacgatttgggcaatgatttgagggaagcgctgactgcgcaacagcggttcttgactgaatcgacggctctatggacaaagcaattttcatctccaacctgctga

SEQ ID NO: 265129 - DNA, 507 bp, Klebsiella pneumoniae
atgtcgcaactttctctgtctctcgattcctcgctgctggtgcgtgacgaccaggggcgctatctgccggcgactgccgaccaaattctggaagctgcgcggtacgttatcgaccagaaaactccgcgcgggacgctgttcacttcgccggcgctggtcaaggactacctgcgcaccaagctggccaacttcgagcatgaggttttcgctacgctgttcctcgacagccagaaccgtctgatcgaatacgtggagatgtttcgcggcaccatcgaccaggcatcggtgtatccgcgcgaagtcgtgaaaacggcactgcaacacaacgcagcggccgtgatcttttcgcacaatcatccgagcggcaattccgagccgagccaggcggacaagctgctgacccaacgcctcaaggaagccctggcgctggtggacgtgcgcacgctggatcacatcgtcgtcggcggcgaggccactacgtcattcgctgagcgtggcctgatctga

SEQ ID NO: 265130 - DNA, 390 bp, Klebsiella pneumoniae
atgaacgataaatcacatgtttccctcgaacagcacgtttgcctggtctgcggcaaagcgttcgataccggcaccatcctgctcgacaagcgcctgcgtgcaagcatggagcaccatacgaagacgggctggggcctatgccccgagcaccagaagctggccgacgatggtttcgtcgcgctagtcgaatgcgacccgcagcgcagcggctcgccgggtggccgcctgaagcccgagcaggcttatcgcacgggccggctggcgcacctgaagcatcatgtgttcgccaaggtgttcaacgtgccgatcgaggccaaccagccttgcgtcttcgttaagccgggcgtcatagagcagcttgaagcgatggtgtcgccggcgacgagctga

SEQ ID NO: 265131 - DNA, 369 bp, Klebsiella pneumoniae
atggaagcccgtcaggggcgagacgccgcaggcggctcgatgcgcaacgcgcacgacagcgcgaccggccatgtcttcttggccggggacgccctgacttcgatgctcgatgaacatcacgcccaggacagccctcatgcacaaggcatcgagaaattgcttctgctgctgggactgcgattggcttctggccgatccggcgcagccggttcggcggtcttccaggggcgccaagcatcgcgcggcggggatagcccgcagggctttcccctggaggcaagcgaagcgccgcgggcgcgaaggcatcggcatcgggcgcagcaaaaagaatggcgcgtcgcccgaaaggacgacgcgccgggttgttag

SEQ ID NO: 265132 - DNA, 915 bp, Klebsiella pneumoniae
atgaacccgccgaagcactggccgcttgacccgcacggaaggcaagcgccccggcctcgaccggggcgcttcgctgcaaggagaaaccccaatgacccgcaccacgaccagccgcccacgcatggcggcgacctatgcccccggtacggtacgcgcccgccgctggcacggcgaaggcgacgtgcgcggctaccgtccgcctcgcggctggacagcccgagccgacctgaccgactttcaccccatcacgggccgcgccttgccgcgtgccgtgtggtggattatcgaaaccaaggactaacccatcattcacgccagccccagtccgttccgccctggggctggtggtcaaaaatccgggcgcggcggtggccgcgcccggtttcaaggcccaaaaccaaaacgccccttcgccgccttcgggcgggcggcgaaggggccgcgcacaagcggccttgtgcgcgagaaaccacgaagcccacaagtgcggcggcgcaccccgccgccggtgtttggactgcgccccgccgcaatgggcggggcttgtggggctacgccccggcttgctgcggcaggttgtgcgaaagcgtgccgtcctcgacgctggcggttcgttgcctgtatgtcacgaaggacggttcaccgacacaccgcccggcctcgcccgatggagcctccacgccacgcctcaagcatgtgccgcgagctgcggcaggggcgctccggccttgtcgtcggggcattgacctggcccgcgtcagggcgcaagccggtgaagccgtcacgcggggatgccgagtcggccatgtctccattcgggagcggtcggcctgtacgtccttgtcttgttgtgaatcctggcggtggcgcggctgcgccttgggcttcatggccgcaaccttccagcaaaaataa

SEQ ID NO: 265133 - DNA, 315 bp, Klebsiella pneumoniae
atggcaaacatcggcaccttcaccgcagagaaagacggcttcaccggcacgctccgcaccctgacgctcaacgtcaaagtcaagctggttcccaacgacaagggcgacaacgagaacgcccccgactaccgcctgcaagcggcaagtcatgacatcggcgcggcgtggaagaagaccagcgaggccggacggccctatgtgtccgtgaccctggacgatccttcgttcccagccaccgtttatgcccgcctgatcgaaggcgagaacggcacgcacgacctgatctggtcgcgcaacaagcccaaggcggcctga

SEQ ID NO: 265134 - DNA, 333 bp, Klebsiella pneumoniae; identical to SEQ ID NO: 199652

SEQ ID NO: 265135 - DNA, 552 bp, Klebsiella pneumoniae; identical to SEQ ID NO: 199653

SEQ ID NO: 265136 - DNA, 768 bp, Klebsiella pneumoniae; identical to SEQ ID NO: 199654

SEQ ID NO: 265137 - DNA, 276 bp, Klebsiella pneumoniae
atgacagcgcagcagccacccaacagcaaacgcacgggcaagcgcgtcggcatcggcgcacgtccgcccgcgaatccgcacgccgaggcgtggattcgtcagggcgatgccgacgcgctgggcaaaggcgacctctacacggcccgcctcacgctcgacatcacgcccgccatgcgggcgcgcatcaaggtgtcggccttcacgcaaggcgtgaccgtggccgacctgctgcgcggcctgctggagcgggagtttccgccggagaacacaccatga

SEQ ID NO: 265138 - DNA, 546 bp, Klebsiella pneumoniae
atgaacgcattcgcttggcctgccgcgaacgcggcaccggctgcgccgctgcctgcgctttcggcactcgccggacaggccggcaatgtgccgctgacgcgcgtttcgctggcctacctcgaacatcgcttcaagctctacctgcgcttcggcgaaccggcgcgcacgcttcagctcgaccgctggcggcgctgcgcggtgttcctgccgggcgcgatgctctgccgcatccgctggcaggccaacgactacggcacgatccgctggcaactcatggtgatgcaggcttgcacaccgctggacgcggcgcagcgcatccccggtgttcagccgggcgcgcgcttgctcctacacaccgaaggcgatgccaacgtgcgcgccgtgctggagcgcatcgacggcatcgaggcgctgggcatcgctgccatcgacgtgtcgccggcgtactggcgcacgctgggcaaccgtcttgcggctcgccttgcgctgcctgaatacaccaccgagcggcataccgcctggctggccgggaaggtgctgccatga

SEQ ID NO: 265139 - DNA, 600 bp, Klebsiella pneumoniae; identical to SEQ ID NO: 199320

SEQ ID NO: 265140 - DNA, 1983 bp, Klebsiella pneumoniae
atgaccgacagccgcgacgacgactttcgcgtgcgccccagcgccccgaagaaccggggcaagggccaggggcagagcttcgtttccaaggtgctcaagcaggccggcaaagccagcagcggcaagtcggcagtacgccgtcctggcgcggctggcaccggccagcggcccggctctcggctcggacgtggccacacggcggcgcgcttcgccggggcgaagctaatgcccatgtcgcggcgcgtgaccatcaagaccttgctggtcaatcaccagcgggccagcccgcaatcgctcgccaagcacctgcgctacatcgagcgcgacggcgcgggtcgcgatggcgaaccgggccggggctacgggccacaggccgacgaagccgatctggacgccttcaaggaacgctgcgccgacgaccggcaccatttccgcttcatcgtctcgcccgaggacggggccgagctggacgacctgcgcacctacacccggcatctggtgagccgcatggaagccgacctgggcacgcggctggattgggtggcggtggatcactggaacaccgacaacccgcacacccacctgatcgtgcgcgggcgcgacgacaccggcaaagacctcatcatcgcgggtgactacatcgcccacggcttccgccatcgcgccgccgagctggcgaccgagtggctggggccgcgcaccgaactggagattcagcagaccttgaggcgcgaggtggaacaggagcggtggacgagcctggatcgcaccttgcagcgcgagaccggcgaggatggccgggtgcatgtcgaacggctcaacgagccgaggttgcaacgccagcgcctgctgctgatcggccgcctgcaacgcttgcagcgcctgggcctagccgacgaggtgcagcccggcacctgggccattcatgccgatgccgagaagaccttgcgtgccctgggtgagcgtggcgacatcatccgaacgatgcagcgggccatgagcggccagccgcgtgagctggcggtgttcgagccgggcgacgatggtcgcagcctcatcggccgcgtggccgcgaaggggcttgccgatgagttgcacgaccgaggctatctgatcatcgacggcacggacggtaaggcccactacgttgcactgaacgcccgcgacgaactggcgaactatcccacgggcgctgtggtagaggtgaagggttcgactgaggtgcgcacggccgacaagaacatcgcctcgctggcgagcgatggcctgtaccgcaccgatcatcacctggtaatcgagcagggccgggctacgcccggacgcgacccgcaggaagtcgtcgccgctcatgtccggcggctggaagccctgcgccgggcttgcatcgtggagcgcgtggccgaagggctatggaaggtgccggacgacatggccgagcgtggccgtcagtacgacgcgcaacggctgggcggtgtgtccgtggagctgaaaacgcatctgcccatcgagcggcaggtgcgcgtgatcggcgcgacttggctcgaccaacaattgatcggcggcggtcgtgggctgggcgaactgggctttggcggcgacgccaagcaggctatgcagcagcgcgccaacttcctggccgaacaagggctagccgagcggcgcgggcagcgcgtgatccttgcccggaatctgctgggcacgctgcgcagtcgggaactggcacaagccgccaaggacattgcggcggaaaccggcctggaacatcgctctgtcacagacggccagcgcgtcgccggcatttaccggcgctccgtcatgctctccagcgggcgctacgcgatgctcgatgacggcatggggttcagcctagtgccgtggcggccggtgattgagccgcggctggggcaacagcttgccgccaaggttatcggcggaagtgcctcttgggaactcggacgaaagcccggtatcggtatcacttaa

SEQ ID NO: 265141 - DNA, 1452 bp, Klebsiella pneumoniae
atgctatttgcgggggtaaagcgactggaggcgtgtagatccacgcggttgggtttggcctgcgcgatggcgatggtagttctgacagggtgctccacctaccgtccttggatcaacccaccactttccgaggccaccttagtggcttccgccgagggcgaccaacgcatccggccgccagaggtcaaccaaccggtcgttgtcgcggtaacactgtcaggtggaggcgcgcgggcggcggcctttggcctgggcgtgctgcgcgaactcaaggccacacgcttcgctctagagggccaggagaccactctgttggatcaggtgttcctggtcagcggagtgtcggggggcagcatccttgccgcgcatttcgcggcattcggcgatgccacgctgactcgtttcgagccggattttctgcttgtgccttttgaggggcgactcatacgtgaagctctgtggcctgagcgtctttatagactaacttcaccttggtttgggcgcagccagatcctggctcaacgcttggacgaactttttgaaggccgcacctttggtgacgtgcgtcgacgaccgggcgcgcccgatctgatgatcacggcaaccgacctcactaccggtgcccctttcgatttcactaccgagcagttccggctaatctgttccgacctcgatgccacgccgctgtctttcgcggtggcggcctcgtcggcagtgccgctgctgctgtcgcccgtaacggtacgaaacaacgcgaatacttgtccgccgcctcttcgatctttgcctatccgtgggcaagatttcagatcacgcatcctgcaaagcagcatagacagctacctcaatgcgcacgatcggccctttatccacctcgtagacggtggtgtctccgacaacctcggcgtacgtctgatgctagaccggctagtagcctcgggctcaatgagcgccaacttctcggacgtcaagcccggaagcctgcgccgactcgtgttggtgacggtgaactccgaacgcggcctgagcgagcgcgtggacagtagcgaccgagtccccagtacgacgcaagtacttgagtcgctgatcttcggtgcaggcgctcgcgagacccaggtgacgctggccatgcttaacgacgacctgcagcactggcgttccgagattgtccgcacccgtggccaagcggacagcccctttgcagctgacgcagaaatccatgtagtaagcgtaagtctgaacgacgtgccggacgacaagatccggcactcgctgctacgcgtgcccacagccttcacaatcgaggccaaggatgtcttggacctgcaaactgcgggaagcgaagcactgaggcaatccgaggagtttctggcgctgattgaatctttaaaaagaatctcgacgggcaagcagacagtgcctaggactcagctccccttgatatttaagtga

SEQ ID NO: 265142 - DNA, 618 bp, Klebsiella pneumoniae
atgaatacctctatttcaccggcccggctccttctggtgctaagccttgctgcgaccttgtctggctgtgcatcaaacggaatgactcgatcagggtttcttggtaattacgatgcattggaaaaaacgaagtacgagaacgttttactctttaaagcgcctggctttgagccccgtcattaccgggaaatagtagtcgagggtgctcagatagtgacgggaactggacgcattgatggtcttgactcggagcaagtgcgtgagcttctcgatcatgtcaacagtgaactgcgacacctccaaaccaagtccgaagctccctcctcgtcaggccgcatacgtgtgcgtgtggcaattacgaccattgagacacctaatcgagcagtcaataccctaacgacgttgcttgttgggccagtgacaaccggcggagccagtttggagttcgaggcagtagatgaacaaacaggtcgtcgagttgctgctgctagctgcttcgggcacggcaacgctctcgctgatttcaaagggtcctatacactgctcggacatgcaaagtctgcaatctccacctgccttgaacagatcaatagcgcttggagaagtgctgactcgtga

SEQ ID NO: 265143 - DNA, 336 bp, Klebsiella pneumoniae
atgaacccgctgatgtggaatccatggctagtgcttctgcttgctggacttttcgaaataggttggccactcggcctcaagctgggtgcaatcaatgtggcgatgcgctacgtggggccggccattgcggttgcctgtatggcagccagtggatttttcctatggctatcactcaagcatattcccatgggaacagcctatgcggtctggaccggcatcggttcactaggtgcatttcttgtgggtgtgtatgtgttcggtgacacggcttccttgatacgttgggccggcattgcgcttgttgtctccggaattgtctgtttgaaaatgggataa

SEQ ID NO: 265144 - DNA, 3117 bp, Klebsiella pneumoniae
atgaagatcacagaaatggcgctgcgcgccagcagactcacctaccttgccgcggtcatcattcttgttgccggcattgccacgtttctcaatttcccttcgcaggaagagccatcggtcacgattcgagatgcggttgttgccgttctgaaccctggcatgccagccgaacgtgttgagcagttgatcgcgcgtccgatcgaggagcgtttgcgggagctggccgaggtcaagcgtgtaaccacaaccgttcgcgcgggcggggccgtcatacaggtcacgatctgggagcggtacaccgacctagcccccatatggcagcgcgttcgcgcgaaggttgccgatgctcagcctctgcttccacagggtacgttggggccatttgtcaacgacgacttcggccgtgttgccgtggcctccattgcggtgaccgcgccgggctactccatgggcgaaatgcgtgtgtcgttgaaagagatgcgcgatcgcctatacgcgcttcccggcgttgatcgcatcagcttctacggcttgcaggaagagcgcgtctatctcgaatttgatcgaccaaaactagcccagcttggattgaccccacaaggggtgatcgatcaactcgttaaacaaaacgtcgtgctttcaggcgggcaaatcgccatcggcggcatcaacgcttcgctggctgttagtggagaggttcgcgacgccgcttcgctgcgcgcgttgccgatcatgatggcgcaagctcagggtgcgcgcggtgcttcgcctgctccttcaatctcactgggagagcttgcgcgcgtgcaggtacaacctgcagatcctcccgagtctgctgcagtctataagggccagcctgccgtagtgatggcagtgtccatgacctcgggccagaacgtggagcaattcggcgtagccctcaaatcccgtgtggccgagcttgagaaacttctgcccgcaggtttcgagctctcctatgtgacattccaggcagacgtcgtcaaacgtgaaatgggcaagatgaaccaggtgatgatcgaaacgattgtcatcgtgctcggcgtcgtcgtccttttcctgggatggcgcacaggattcatcgtcgggatgatcgtgccgcttaccattctgggggcactgatcgtgatgcgcgcgctgaacatcgagctgcaaagtgtttcgatggcagccatcatcatcgctttggggctcttggtagacaacggcatcgtgattgccgaagacattgaacggcgcttggcagccggtgaagaccgcaaacaggcttgtctcgaagcgggtcgtaccctcgcactgccgctgctgacgtcctcattggttatcgtcatcgccttctccccgttcttcttcggccagagtgcgacgagtgagtatctgcgctctctcgtcattgtcctcgcgctcacgttactcggatcttggctgttgtgtctgaccgtcactccactgctgtgctaccacttcaccaaagtgcatcatcaaccggcgaatgacgcgcaaacctacaacacacgcttctatcgcggctatcgcaagttgcttgagtgggtgcttgaccacaaggcgatctacgttggtgtgatgacgggtgcattggccgtagctctgtacggattcacgacactgccatacgacttcttgccgaagtccgaccgagttcaattccaaataccggtgcagctcgcccctggaacggattcacggctcactcttgccaaagtgaaggaagtgagcggctggctcggtgatcaagaaatcaaccccgaaatcacggatcacattggctacgtcgctgacggtgggccgcgcttcatccttgggctcaatcccccattgccagcatcgaacatcgcgtactttgtcgtgacggtcaaggcaggcaccaacattgacgtcgtgattgcccgaactcgggcttacttcgcgcagcatcatggagatgtacgcgcagagcctcagcggttctcgctaggcactaccgaagccggcacagccgtctaccgggtcagtgggccggatcatgaggtgctgatgaatgcggcggcgaaaattgagtccgcgctacgggagctgccaggtacggccaacatcaagaacaactgggatacccgtgtcggccgtctcgatgttcgggtcgatcaagatcgtgcgcgacgtgctggcgtcaccaccgacgacatagctgcctggcttggcacccgctacatcggccagtcgatctctgtgatccgagatggcgataccagcgtgccaatcgtgatgcgcgggacgtccaatgatcggcgcagcactgcggacgttggttcgacgaccatctatccagcgtcgggtggccagccggtttccctggcgcaagtggccgatgtcacgctcgctagcgagccgtctgtgatccagcgccgcaatctcattcgtacagtcacagttcaggggcagaacaccgcatacaccgcgcaagagatcgtggatcacctcgcacctcggatcgccgcaattgaactacctgcaggctatgccatagagcttggtggagaaattgaggaatcggctgaatcgaatgcatcgctcacgcactacatgccgttcgctcttctggcgatgttgctgctattcatctggcagttcaactccttccgcaagctgatcgtgattctcgcaacgattcccttcacgttgattggggtcgtgattgcattgaaggcgacagggacgcctttcagcttcatggcgacctttggtgtgctcgcgctttttggaatcatcgtcaacaacgctgttctgctgctcgaacgcattgaacagggcctcgcggaagggctcgcgcggcatgaggccctggtgggggcggcgatgcagcggctgcgtccgatcgtgatgacgaaggtgacctgtatcgccggtctggtgccactgatgttgtttgcagggccgctgtggaagggcatggccatcgccatgattggtggcttagcgcttggcactctcgtgacgctgggattgatcccgctgctctacgaagtgctgtttgggatgaagtggcccggcagaaagcagcgtcaagaagcgacgcgacatccgacgcagccgatttaa

SEQ ID NO: 265145 - DNA, 1167 bp, Klebsiella pneumoniae
atgaaaggccttcccgtgtcttgcactccctttaaatcccagtcctggcaaatgcagaaagtcggcctcgcgtttgttctgctcgcatcgcttgccggctgtggtagtcagaaggagcctgcttccgatccaccgcgagcggtcaagctgctcacggtgggggatgtaggttctgtggccaatcgcattgaattgagtggtctagctcgctccagtgagcggagtaccttggggttcgagactggcgggcgtatcagcaagcttcatgtggacgtgggagatcgcttctctcgcggacagcttctggctgagttggatgttcagcccgagcaactccgcctagaacaggctcgggcgacactcgctgctgcggaagccgcattggcagacagaatcgtgcagacaacgcagcaaagggggctgcttgagggcaacgtaatctccccggctgcattcgagagtgtgaaagcacagttggttgcagctgaaggccaggtgcgcaatgcaaaggccgcattcggccttgccgagcgtgcgcgaaggggggccgccattcatgcgccattcgacggcgtcgtcgcggagaaactcgctctgccgttcacagatattgcagccggagcgccggtgcttcaagtggatggactacgcagcggcgtagaagtccttgcgactgcatcgacgacccaggcggcaaatatcaaaattgggcaggtcgccgaactgcgcctgagcgagtcagcaagtcccgttcgtgcttcggtacaacgcatcggcttgcgtgctgaaaatggctcacttttacctgtcgtgctcgttcctcaagatgctactcttgcgcgcagtcttcgacccgggtctgccgttcaagtattgctgaaggcaccggaagcgaaggatgcctcaccagatcgtctgatgcttccctattcggcactggtgctcagtgagaaagcaggacaagccgcagtgtttgtatatgacgtgaccggaaagaaggtgcaccgccgggaagtgcaattccagagcgagccaggcggcgacaacgttcgcgttgtgggcggcctgaagcgcggcgagatggtagtcgcggctggcgcgagttggctgacgaacgagcaacaagtcaccccactcaaggccacgacccaattggccggacgctga

SEQ ID NO: 265146 - DNA, 636 bp, Klebsiella pneumoniae; identical to SEQ ID NO: 158955

SEQ ID NO: 265147 - DNA, 315 bp, Klebsiella pneumoniae; identical to SEQ ID NO: 170288

SEQ ID NO: 265148 - DNA, 315 bp, Klebsiella pneumoniae; identical to SEQ ID NO: 170289

SEQ ID NO: 265149 - DNA, 945 bp, Klebsiella pneumoniae; identical to SEQ ID NO: 158953

SEQ ID NO: 265150 - DNA, 276 bp, Klebsiella pneumoniae; identical to SEQ ID NO: 158952

SEQ ID NO: 265151 - DNA, 2016 bp, Klebsiella pneumoniae; identical to SEQ ID NO: 158951

SEQ ID NO: 265152 - DNA, 333 bp, Klebsiella pneumoniae; identical to SEQ ID NO: 82726

SEQ ID NO: 265153 - DNA, 1377 bp, Klebsiella pneumoniae
atgaatgacgtgaccatcatcgacaagttcctcgatacattctcgcgctacatcgactccggtttcggactgctgcaaggcgaggtggcgttcctgacggccacgctcatcgtcatcgacatgaccatcgcgggactgtactgggccatgagccatgcgactggccaaggcgaggacgtgatcgccaaactggttcgcaaggtgctctacgtcggcgccttcgcctacatcatcggcaacttcaactggctggcaagcatcgtgttccgctcgttcgccggtttgggcatcactgccaccggctcggccatcacgatggagaactttcttcagccggggcgactggcaaagaccggcatcgacgcgggtgcgccgatcttggaacagatcggcgacatggcgggcttccccgaggtgttcgtgaacatcgaccccatcgtggtgatgttcctcgcctggctggtggtgatcctgtgcttcttcgtgctcgcggtacagcttttcatcacgctgatcgagttcaagctgacgacgctggccggcttcgtcctgatcccgtttgcgctttggaacaagacgagcttcctggcggaaaaggtactcggcaacgtggtgtcgtcaggcatcaaggtcttggtgctggccgtcatcgtcggcatcggatcgggcctgttcacggagttccaggttcaccccgacgagccatccatcgaccacgcgctggtcgtgatgctggcctcgctcgccttgctggcgctcggcatcttcggccccggcatcgccacgggcctcgtgtccggtgcgccgcaactcggcgcgggcgcgatggccggcgcggcggttggtgctgtcggcacgggtgttgccatcggcgccgccgctactggcgtgggcggcgcggtcatggctggagcgcgcatggccccggccgccgccaagctggccggcgcgggtgcgcgtgccgcgacctcggcggctggtagcgcccgctcggcgttccaggccggttccgccgctgctggcggcggggccaggggtgcagcggctggcctaggcaatgtcgccaagacgggcgcacaggcggcgggccgccgcgccgcgtctggcgcttccgctgccgggcagaaggtggccgattcattccgcgccggctggaacggcacaggcgctggcgctgctggcgcaggccaggccgccgctggcgaagcagcagacggtgctgccggctcgcccaagcaggaacaacccgcctgggccaagcggatgcaccgccgccagcaaatcacccatgccgcgaccaccgccgcccacacgcttcgcgggggcgacggcggcggctccgggcaaggcccgagcctgcgcgattccgatacctga

SEQ ID NO: 265154 - DNA, 246 bp, Klebsiella pneumoniae; identical to SEQ ID NO: 82729

SEQ ID NO: 265155 - DNA, 222 bp, Klebsiella pneumoniae; identical to SEQ ID NO: 237412

SEQ ID NO: 265156 - DNA, 315 bp, Klebsiella pneumoniae; identical to SEQ ID NO: 159348

SEQ ID NO: 265157 - DNA, 216 bp, Klebsiella pneumoniae; identical to SEQ ID NO: 230738

SEQ ID NO: 265158 - DNA, 255 bp, Klebsiella pneumoniae
gtgagtgacgtaaaaagcaaaatcatgcaggtgatgactgatgctgctgcgctgcaggatgcgacactggggagcggataccctttccgcatggctacctggaatatccgatgcgcgatggagcgcaaattccctggggtggaatggaggagcgccgacctccgcaaagagcttattgaactggcgaaagagggctggtatccaaatgtccccacgagagccgcattggccaggccgtctggcgcctggaggtga

SEQ ID NO: 265159 - DNA, 2964 bp, Klebsiella pneumoniae
atgctatccaacactggagtaaacgctgccatctatggtactgaaatggaagccagtactgtatcaaaagggacactattcgcagatgttggccaccaggcggattttatccccggagccttttatgatatgaacggtgtgttacaaagcggagcaacgtggagcacgtattatgtttatgtggctcctggccaggttataagggcgtccgtcgtaacggggtcgtatagaggtaaagaagagatcccgctattcagtttgctgggaaaagataaaactttcctttcacatctgaaaatagtggtatcggagggcacaccacgcagagacacattttatgtagaagctccgcaagacggaataattgcaattcgcgtacgcgtggatagtccttctttgggtgcaaattcagtcttcatcaattcaacagagattacatctaaatcgacattgagagcggcgataactgatgctctcaattcgtcttctcgctatgggacacctgaggattactctactgcaacccgccttttctccggtgcaagatttttatatggaggagtgctggaaaccggtaaaggtaccggctacggattgcgttacatccccgttcgtgcgggagagatagttatccttagaggggccgctggcgtggcatctcgcggtgaggtaattccggtgcttgtgcagtgcgattcgaaccgcaactacgtctccaccctgttatcccagacctctgacggatatatcaccacaggggatttttatacagtggcaacacaaaccggatatattgccgtttgctatcgcatagtttcaggcgtaacgaccgtaataaaaaaatatacccggctacttgattataaaaccgggatcacggacgcggtaatgcgtgaggtaaaccacgagacagaggtgacatttggtaagcgtatctccagcgcgggtgcagtagaaaccgcctcgggttgggctatgggtatactcccgacgaagtctggtgataccgtctccattaacgccttacatgacagtttttcttccaccgataaaactgttgttatcgcacaactcgacggagcgaaaacgtttgttagcgccctcgctacattcactaatacgggcgccgggccgaaaaaagacacattcattgccgacgctatacaggacggatatatcgctgtgagtttccgtaactccggtaacgctccgtttcttatctcatcatcccgatcgggtttcagcgatccgttagacgtttaccttgagcagcatctcgatgcaaacggtgaagcggattacacgcgagttgctaagtacgaagttaacaacacggtaattgacagcacattcaaactgctgacagatacaaattatcgcactatttggattcctgtccgtcgcggtgagtccgtttcggcgtacacggcaacgggtgccgctgcgaccggcgaaacccccgccgctgacgggtctgtgccggtcatgattcagtacgacacccgccgggcaaaccccgttatccgcgccacagcgagcggtacaggctcgctcaccggttatcagaccgtgtcggcgaaagcgacggctgacggatatatggcggtacgtctgtacgcggcagaccgtggctggccgaccgtgaagcgcctggcggcaaaaaatggttcagattccggcgtcgcatcgcttcccgtcgtgccggggcagttcgaacgcctgccggtcaatgcagacactaactgggattacaacaacagcccgtactcacaggataacgttgtgattgccggggattatcagtacgcggtggtgattggcgcggggcgggtgccgtacatcgcccagcgcagcaaatggggcggtgcctggctggccgtttttgacctcggcacaattgccggtaatccgctggcgtcgccgaccactgccgacggccataacgtctataacatcggtgtcagtaaaatcgggcatattatcgtcgccgggaatatgcacggtgacggcccccgcgcggttgtgtcggataatccgcacaatatcaccgcatggacggcggtggatttctcggcgggaatgttcacgaaagacgtgacctatccgcatttcatcagctaccccgatggtacgctgcaatgctattaccgctggggcgtgcgtcactatctgacaacctatgatgagtccacaaaaacgtttatcaccccgcgtcacattgtcggggcgaaggcggacggccgcggcgggccgtatgagcaaaaatacgtcgtcgataacgacggtattctgcacgcgtgctggggctaccggatggatgccacctctgcgctggcgaatgagggtctgtactattctcagtccgcagacaaaggggcgacctggcgcgcggcggacggctcagtcatttcggcggcaggcacgcgcaacgatgcaaattcaacccggattttcagcgcggaaaccggcagcggctacgtcaatcagaacggcggttgtgtcgatattcacgggcattatcacacctgcctgacgcagtacgacgataacggcaatacccagattgtgcatgtgtggtgggacggttcggcgtggaaatcagaggttgtcacggattttgatttcaggatgaatctgtcgagcaacctggtcatgaatgatatcacccgcccggtcatcggcgcgacgccatcgggccgggtttatatcatctatcacaccacgtacaacggcctgagcggagccattatggcgattgatgttaccgatgagggtaatcctcagtcgatggtggttgcggggtttgatatcggtactcagtcgatggggttcaacgtggcgcatatgctgaaaaccggtgattttatggcgctgatggcgaaaggtgttgcgaacagcagctcacagggttacggcacattcagcgcccagcctgtcatgatcgccaccgtcccgatgccgtaa

SEQ ID NO: 265160 - DNA, 624 bp, Klebsiella pneumoniae
atgtctggcgatattaaagcagtatttgacagcaatctgattgcaactcaggcaggtaccgttcaggtatttcattttgatatgacgtcccgtgagtttattggtactgaggaagtttatattcatgtcggtgttggccttcctgcattttcatgcatcgaagaaccgccggtacaaagtgaatatcaggttgctgttcgttccgaagataattcgtcctggtctgttaccgatgattatcgcggtatcaccgtctatgacattcagacactggccagccacgttattaccgagccaggacctatccccgacactgtaacgacctctgcaccatctactccatacgataaatgggacggttctgcatgggtaacggatgctgctcaacagcatgctgcagatgtcgctgctgctgaaactcaaaagaaaaagatgattaatcaggtatcagcagatatatccattcttcaggatgcagtcactcttaatatggcaacggatgcagaaaaatccaccctgactacaatgcaagcatatcgggtgctacttaaccgggtagatacctcgcttgctcctgatattgtttggccagttatgactaagctggagattgataatgtctaa

SEQ ID NO: 265161 - DNA, 123 bp, Klebsiella pneumoniae; identical to SEQ ID NO: 187323

SEQ ID NO: 265162 - DNA, 375 bp, Klebsiella pneumoniae; identical to SEQ ID NO: 187322

SEQ ID NO: 265163 - DNA, 453 bp, Klebsiella pneumoniae
atgcctgaaattacgattactgcaaagcgcgacgggttccgtcgctgtggggtggcacaccgtgacgtgccggtgacctggccggatggcagttttaccgaagagcagatcgccatcctgcgagccgagccgtcgctggttgtccatatcggcgcactcagcggcgatgacgacaagctgaaggccgcgcagggacgcattcaggagctggaaaccgtcgccctgcagctcaaagaggactcggttggtctgatgcaacaactgcttgaggtgaccgctgaccgcgaccgcctgcaggctgagctgacggtatcaggcagcgtgcctgtcccggaggtcaaggataacgccgctgacggtacggcaggcagtgcgtcagctccggaggcgaaggatagagccgctgtagatgatgcagccgctgcggacacctcagccaaagcgaaaaagtaa

SEQ ID NO: 265164 - DNA, 243 bp, Klebsiella pneumoniae
atgaaacaaaaactcactattgaccagcgcatcgaagttgcccgtattaccgcatctcttttcgaatccaccttcccggagttcggaaggggaacgatgaagatgtcttatgaacttaaaattgctgaaatgaatcaggactcgccccacaaggactcaggacctgacaattaccgcaaatgctatgcatggctctttgatgtggtcgcctcaaaagttacggatgaatctgactctctctga

SEQ ID NO: 265165 - DNA, 210 bp, Klebsiella pneumoniae
atgcccattccctcaacggaaaaattacccgagccttgcgcgcgtcgtgaattactgcgtcagcgcattatcagcgcgattcaggctgaattcggtgaagaagaaatgtaccagctcctgttttttgaggcgatgtggctggcaatgcagtcagtctgcggccccgcagaggccgcagccgttatcagagagagtcagattcatccgtaa

SEQ ID NO: 265166 - DNA, 528 bp, Klebsiella pneumoniae; identical to SEQ ID NO: 187318

SEQ ID NO: 265167 - DNA, 192 bp, Klebsiella pneumoniae; identical to SEQ ID NO: 181974

SEQ ID NO: 265168 - DNA, 192 bp, Klebsiella pneumoniae
atggtagacattgaaatgattgacgaggaagaggcgatgcggatgatccgagtatcttcacgcgtgaccatccggaaatacaccgagcgctataatttccccaagccggtccggacctaccctaaacagtatctgcgctctgctattgtggagtggatcttaaacgggggtgtcaaccagaaatcttcctga

SEQ ID NO: 265169 - DNA, 1026 bp, Klebsiella pneumoniae
atggggcttgggcgctacccagcgctgacgctgcgcgatgcccgcaatatcgttgcagacctgagggaatcggcagacaaaggcattgacccccgaacgctggctggcggtaagaaatccaacagtaagccaacggtgaaggattgtctggattactggaaggagaattacgttgatgtaactctaagggctaagactatagcgctttataagtcaacggttataaagcacatgcgcgacgctttttccggtattccggttgaggatatccctgtccgcttgtgggtagagaggtttaccgaagaagagaaaatcaaccctcgccgagcccggcatttattgatacagctcaggtccgccattgggtggtgtacgcgccgacagttcattagcacaaccgaactcatgcttttgcagccgaaagacatcggtgttaaacctgtgattggggagaccacgctcagctataaccagcttgcaaaaatctggatggctatagaaagaagtcgtgggtcaacttctaaccgattgcttcatcaactgctaatgctgtacggcgctaggaatagcgaacttcggctggctatcaggggggaatttgaccgagaggaggggttatgggttgttccagcagagaaaagcaaaaccaacaaaattatcaggcgcccaattttctccgcggcagatgatttgctgaaaaaagctgaaatgacgtatggggatatacttttcccgggcgaggacctgaaaagccctataactatttctggtgcaaataaatttctgagaagaatcaaagactcgttggggtttggtgagtttacttcacatgatttccggcgcaccttggcaacccgactatccgaagagggggttgccccgcacgtcatcgaaaaaatgctggggcatgagctgggcggcgtgctttctgtctataacaagcatgactggattgccgaacagaaagacgcctatgatctgtatgctgaaaagatattttggcatatcaggaagatttctggttga

SEQ ID NO: 265170 - DNA, 396 bp, Klebsiella pneumoniae
atgaaaggattgatagtcgcattcgcggtgcttctggtcttgtttattacggtctgtatcggatttaacggtgagacaaataaacgccagtcagccgaaaaaactctggctgataccacgctaaaactgaatcaaaccggcgaggtgctggccgaggtcagggcgctgcgccgggacgtcagccaggtagaggccgggctaaaagcactcagtcagcaacgaaacgcaacaggagaacaccgacgtgaaaacatcaaaaccgcactggccggtaacgactgcgccgttgctcctgtgcctgttgctggcgctgacagcctgtaccagcgagccgaaaaagtcagcgccgcagattattcaggaacctttaccggaaagcctgacggcaaaaactga

SEQ ID NO: 265171 - DNA, 174 bp, Klebsiella pneumoniae
atgaacaagattgatgccgttgtaacgcgggttttggacgtccgcccttatcgcgatttctggatcgtggaggtcgaggtgtcgagttggggcggatatagccagacgacagttatctgcaattccgaaaaagaagcccgggaagtgcgaaccggcgacaccgtgacgatctaa

SEQ ID NO: 265172 - DNA, 195 bp, Klebsiella pneumoniae
atgagccattcaccggaatacatcaagggcgcgattactgcgctcaacgaagttaaggccatcgggttagccgcagccatgcacgcggggatcattcacggaaaagaaaccgggaatgccgtaagagcaacagtcgatagtgttgctgatccgctcattgataaatacaaagcgatggtggtgaaaaatgattaa

SEQ ID NO: 265173 - DNA, 381 bp, Klebsiella pneumoniae
atgtctacatttaatacccataaagaccgtaatcgccgcggtaaaccattgccgcactggcgcgtgcagtacgcaactcactatcgtataaaacacattcactacaccgttcgatatggagacaacgcgccccgtgtgaatcacggcaaaaatccgcgtctttggaacagcttcttatatatgacccgccgacgtcgcattgatgatcgcgccctagcttatgctgtagtaactggcgaagattctgatagcctgctatggtaccgaacaatcggcccttggaatattactggtaaacctcaaacccgatgcagcgggttttttatcccaagattaacgctacctcttattgaggtggtcagtagcaggtattggctttga

SEQ ID NO: 265174 - DNA, 1413 bp, Klebsiella pneumoniae
atggggctggggaaaacgctgcagattctgaccttcctggtgtggttcattgaaaaattccctgacgagccaccaagtctcatcgttgcccccgtctctcttttggataactgggagcgtgaactcgacaatttcttctacacctctgggatttcggtgatgaaattgtatggcgacactatcaaagcggtgaaatacccgaaacaggcgattcctgctcatctccaaagtcaggggattaaaaatttgctcaaacccggctggcagggtgaagcgaaaatcattctgacaacctacgagacgcttcgcgatcaggagttctccctggcgcgccagccatggtccatcatggtctgcgacgaggcacaaaaaataaagaacccggcggcattaatcactcatgcagccaatgcgatacaagcaagattcaaagtggcatgtaccggcacgcctgtcgaaaacacgcttgtagacctgtggagcctctttgatttcgcacagcctggcctgttaggtgcactcaatgaatttggcagacactatgttcgcccgatagagaacgaagcgggtcgggatacagggcagcttgaaagcttacgagcgttgattgaaccacaaacattacgccggactaaagaagaagttgcgcgtgatttaccgcaaaaaatcgaagtcgttagttgtaagcaactgccgctttctggccctcaaaagcaactgtatctttcttcgatagcgaactggcaacaacagcaggcacttagtgaaggaatgcagcaggcgggggcggggatgctggggttattacatcgtcttaaactcatttgtgcacacccagcagtcgttaaccctgagcctcgatatagggaagggtcgccaaagctaaactggatgttgaaaacgctagatgaaattaagcacaccagcaaagacaaagtaatcatctttactgagctgcgcgatctccagcgcgagatacagcatgctattcaacagcgattcggtttccgtccggtgatcatcaacggcgacaccagtactaagagtcatagccagaatagccgccagcgattgattgataatttccagtcccaatccggctttggcgtgattattctctccaccgtcgcagttggatttggggttaacgtgcagaaagcaaaccacgttattcatttcacccgctgttggaatccggcaaaagaagatcaggcaactgaccgcgcttaccgtatcggccagacaaaagatgtatatgtgtattatccgacggtaatggactctgaaatcacgacgtttgaagaaacattagatgaactccttcagcgtcgccgtgcattggccagagatatgttatgttctacacctgagctgagcagtgccgattttgagaatattttaaaagggacataa

SEQ ID NO: 265175 - DNA, 300 bp, Klebsiella pneumoniae
atgcaattgaaaattctgggtgtgggtaatgtgcctttactgtctgtcagcgttaagaccttggacgatgcaggactattaaatgtctcagcactctgccggaagctgggcgttaagcgctcgaccttcctcagcaaggtagccacactgggaagccttgaacaggcactcctgcattatgcagtgctcaaaaaacagcgggatgtgctcgccacactgtcagagaaagatgcagtcgcgtttttagcagcctgcaacgctaacagcgtgagcaataccagcaacaacgccgcacattaa

SEQ ID NO: 265176 - DNA, 612 bp, Klebsiella pneumoniae
gtgaatttacaagcgtgggataatattgtttcgatagcatcgaacaccgtaacagctttaagtgtccttgggggagtcatctttagcggatcaaaactgcaagattatcttgaaagaaaaaataaagaagtcgctttcagtgccgctctatctctctatgagcaaattatttcctttcgaagagaatacagtcaatttagaataaaattaaactatatactcgatattgccggagagtctcacaaaaagaaagagcctttaacctcacgagagtatatcgaaatccaagaaattggaatttctatttttgattcatcattaaccattggcaatctcttcataaaaagcaacaactttaaaacaatatataatagcgacactttaaataaaataaaaaccatcttgaatatctccgagaaaatatccgatcagataaatttatttttcaattgcgtactgcaaccacaaaaggaaaataagataataacagatgtagaacttgccaaattatattcatatagtcaagagtataatagacttacgaaagaatatctggctgcgtgtacaactatacaacaaaccaaatttgaagatttttgtaacttcaaataa

SEQ ID NO: 265177 - DNA, 465 bp, Klebsiella pneumoniae
gtggaggtgcaggcgcagaatgccagcctgcggctgtttgcggagaagaagctgacgctgagttcagcgagtgatatctcgtttgccgggaagaagcgtatcacgcttatcggtggcgggagctatctgcgacttgaggccgggaaggtcgagtatggtacgacggcgacgtatatacggaaggtgaagcggacgatgtttgctggtgcaaattcaacaccaacgccatcaatatcaataccattagttgacgatttaatccggaatggattcttcgatgaacaattccgaatcttggatgatagtggtaagcccatggctaatgtcccatattttatctctagcgaaaatggtgaaacatttaaaggtgtcaccgacaatcaaggtttgtgcaaacgcgttttttcaaaagaatcagccaaacttaccgtttggctaggtgtcctggctctggagagatggtag

SEQ ID NO: 265178 - DNA, 201 bp, Klebsiella pneumoniae
atgaaacatgagatgcaacccgatagccttgttgatttgaagtttatcatggccgatactggcttcagcaaaagcttcatctataaacgaatcaaagcaggagacctcgcaaaaagcagggttatacacggtcgagcaagatggctatttagcgagcactgtgatttcaaaaaaaggctactgtcccgctccgatgggtaa

SEQ ID NO: 265179 - DNA, 474 bp, Klebsiella pneumoniae
atgaaggggatttgggctatatgcgctatcgctctgacgcttactggctgcggtgagaagaccgatgaacaattaataaagagtgcgcaagaagctgtaaaaaaagaactaacgagtaaatataagccgggcgaatgtgataactggacattcatggcttccggcggtgcgatctcgaagagagcggcaatagccgtgtgcgatgataacttcaatgtcagcaagggcctcacgttttctgacgttaaggtatatcgccatgaaagtgggggggcggtctgcggtattgtttcaggccacacagacattagccgtattggcgctaggtttgtttatcaggatggtgacagcgaaagcgtggcaataaaaaaatcaaaacatcctatgcgtgagcaggagaaagactccaaaagccttgagcttattaaactagaaaacaaactattcgaatcgtggtcaaccctatgccagtaa

SEQ ID NO: 265180 - DNA, 276 bp, Klebsiella pneumoniae
atgataaaggacagtaaggccgaggagctggaagcgaaggggctgtatcgcagggcagctacacgctggcaggaaatcatgatgatttgtgctgaggacgatgatcgggaatgggttaagcagcgccgtgatacgtgtctgacgaatgcgaagcgcccgccagtgaaaaccgatgattatggcgatctgcataaagcagtcactgagacacaacaccgcatgggaattgccaggccgaacggcgaagcattcaggctgaagggcaaggctgtttag

SEQ ID NO: 265181 - DNA, 762 bp, Klebsiella pneumoniae
atgaacaatagcgcaaaaatcgccctggtgacaggcggcagccgcggcctgggacgcgcgaccgtcgaagcgctggcacagcgcggcgtaaatgtagtactgacctacaaaacgcgtcttgccgaggcgaacgaggtggttacacgggttgaagcactgggcgcccgggcgatcgcgttgcctttcagcgccggcgaaatcgacacctttgacgcatttgttagcgcttttcagggcgcgctgacggagctgggcgccgataaatttgattatctggtcaataatgccggcaacgccagcggcatgggatttcttaacgccacggaagcggaattcgatgcgctgtatcgcatccacgtgaagagcgtttttttcctcagccaaaaactattgccgctgctggccgatggcgggcgaatagtgaatgtttcgtctggcctcacccgcatcgtgatggcgaaccgggcgccctatgcgatcatgaaatccgcggtggaaaccctgactcgctatatggcgtttgagctgggcagtcgcgggatcacggtgaactgcgtggcgcccggcgccatcgcctccgatttcagcggcggggtggtgcgggataacccgcaggtcgctcaggcggtagcgaacatgacggcgctgggccgacctggcctgccagaggatatcgggccgatgatcgcctcgctgttatccgatgatcatcgctgggtgaatgcccagcgcattgaggtttccgggggaatgcgcatctga

SEQ ID NO: 265182 - DNA, 1533 bp, Klebsiella pneumoniae
atggattttgaaaatgaattgaccagtaagatccttgatcccattcacggcactattcgtttgacgacactcgagattgcctttatcaatcacccccttttccagcgcttacgcaacattaaacagaactcttttttatataaggtgtttccctctgcggtgcacagccgcttcgaacactctctcggggtgctgcatttatcaagtgaaatactcaataatttacgcctgaatgcgatacggtatcaaaagaaatatgatgatggccatgtgtttggtcatatcgatcagataccaaaacacaacattcaggagttgagactcgctgccctgatgcatgacatcgggcacgggccggtatcccaccagtttgagagttttatgccttgtaagcacgaattctccgatgttctccccacggcctaccattcaatcattgatgtattaagcaagccagaacagaaagttgaacatgaacagctttcgctgttgttcagcctgatgatttatcatgatctgagaaaacaaggtaaggtcgatgacgaaataaatatcgaaaatgtgttaaaaattatcgaaaaaagatacggtgaccaacagatcattgaggaaattaatggaaaggcaacagatatcctgccgttaatgacctcgatcatctcttcctgtccgatcgatgccgaccggatggattacttgctcagagatggctatttctccggcgtcaagtgtggcatctacgattacaatcgcttgtttatgtcaattgtcccggtcgaggaacagggaaaattgtaccttgcttacaaagagagtgggattgattcgatcgctgagtttattggggcgcgctccagccttttttcgcaggtatattaccataaaacaaaccgcgcctttgcgacgatgttgagcacattatgtgagattatgcaaagcaaggatccacaaaatgtcattatcgctgacgttaccgaccgtatcgttgaccatagcgatgaaagcttcatcgacgcgctgaaggagttttatttggcgtgcagtgatgattattttttgaatgacaaggttggtgaatggatagatatcagcgataccgaggcggttaataaaaaaatacttgatgacattattaaccgacacccatggtctaaggtctatgaggccaaacactctgtgtataaagctaacatcgctgacaaggaaaataaggcgtggaagagtcaactcaccgggttattgacttctgtattacagcctcatttcaaaccacatgaatttgccgttgatattgtctccgactgcgcctttaaagacctggataaaaccgaagttaagcttttggtgaaagatcttaagaaccgctacgaaataaaaccgttaattgaatgtggtgataagttaaatcagtatcaaatcatcaaatattgcattcgggtatttgttgaccgcgatatcaaagaacgcgtaactcctgaaataatctataaaatcaatgaaatagtggtcaagcagatcgcgttgctgaattga

SEQ ID NO: 265183 - DNA, 489 bp, Klebsiella pneumoniae
atgattggccaccaggtcgatgccgtctgcccggataaaaccgctggcgactatgtcatgaccgcaatccatgactttgacggcgcccagacttatagcgaaaagccgggccatcgcttcacgctgaacgctgacttcgccgcagtaaaggccgagaactacgatgcgctagtgatccccggcggccgggcgccggagtatctgcgcctgtacgaggaggttattaaactggtacaggcattcgacgccgcgcgtaaacctatcgccgccgtctgccacggcccgcagctgctggccgccgccggtattctgcagggccgcacctgcagcgcctatcccgcctgcgctccggaagtgcgcctgagcggtgggcactatgcggatattggtatcgaccaggcgcatgtggacggtaacctggttaccgcccccgcctggccggctcatccacagtggctggcgaaattcgccgccctgctggcggaataa

SEQ ID NO: 265184 - DNA, 1026 bp, Klebsiella pneumoniae; identical to SEQ ID NO: 265169

SEQ ID NO: 265185 - DNA, 192 bp, Klebsiella pneumoniae; identical to SEQ ID NO: 265168

SEQ ID NO: 265186 - DNA, 147 bp, Klebsiella pneumoniae; identical to SEQ ID NO: 215397

SEQ ID NO: 265187 - DNA, 465 bp, Klebsiella pneumoniae; identical to SEQ ID NO: 215396

SEQ ID NO: 265188 - DNA, 225 bp, Klebsiella pneumoniae; identical to SEQ ID NO: 215395

SEQ ID NO: 265189 - DNA, 723 bp, Klebsiella pneumoniae; identical to SEQ ID NO: 215394

SEQ ID NO: 265190 - DNA, 579 bp, Klebsiella pneumoniae
atgcttcagaacatgcttaacccggaaccaacctcaacagggatccggtctggaaaccgggtgattggctactccgctgctattcgcctgctggataacggtcgctatgacaaacaccttgccgatggaatggaaattctggcctgcatcatggaagcggtagaaagcaactggataacgctcaatatcgaaaaagagttgatcctctggcgctggctactggctgccgtgttcatcactgaggagctggagaaaaacggaactgtcgacgttccgaatgatactggcggtgttgatactgctgttatctattccagcaagcatggcgccattagcatctatccgggacctgaacgctttgcactcgccaaccatattgagctgggggcaatcgagaaatatgggccagaggttggccagcagctggcgctgcggatgtatcaggacatggttattgctgacgaagaatttgggttcaggttatcagcacttggccgggaggggcttaacctcctccatgacagctttatcgaacacatccagatcgaaggtgtgccagaagcaccgattatgcattga

SEQ ID NO: 265191 - DNA, 210 bp, Klebsiella pneumoniae
atgacggatggctggccgctgtatgaatcacgtctgaagggaaagctgcacgttatcagcaagcgttacactcagcgcattgagcgacataacctgaatctgagacaacatctggcaaggctgggacggaagtcactgtcgttctcaaaatcggtggagctgcatgacaaggtcatcgggcattatctgaacataaaacactatcagtaa

SEQ ID NO: 265192 - DNA, 783 bp, Klebsiella pneumoniae
atgacaactggtaataaagtggcacccacaagtacagcttggcaagcccgagtaattctgtaccagccaagccagcgtcctaaggaggtgaagggacaatggatggagactagttttggtcgttgtcgtgttaccggacggctcggacagcgtcatgccgatatcgtagagacaatattatatgttgccgagcaacgtcgtgaaatttctgatggtggaatcgaattattagtagatccagcgaaagtacgccgaacgctatccgatgcacaatacagttatggtcatatacagaaattgcttttagatctgcgcgtcgcaacagttgaaattataacgccagagctggagaaaagcggcgactgtataatagggggactgatcgatcatgtagtgccatcacctatgacgcgtccagatcctttgactgggggagaacgccgtttatggcgtgtccgtctgggtgttgcattagcgatgttactcaaaaaagatttgccattttattatcatcctggccccatagctcggctacaacatggtattagccaggcagtcgctcgtcatgtcttaacccataggaataatcctttaggagggtggtatatggatacgttgatattagcagtgtgcggtgaaggaacgagtaatatgactttacgtaactatcgtcggagattgaaagaagattccgtgcaattgctggaaattggaattgatttgaatggttctaggataaaacgtgtcacaacggcccgatattgtgtcacaacggcccgatag

SEQ ID NO: 265193 - DNA, 1065 bp, Klebsiella pneumoniae
gtgcctttgtttgcatctgccttcctcctgtttccaatcaggcctatacaatgccaagcattaccacttgctaaaacctattcattggctaaaatggttgacatgaaaattactatctgggaaggctgtgacctcacagttgcagctgcaattaaattatttgtagagggtagttatccgtactccatattttcacggaggtatccaatactgcgtctcatacaggaagttattgatccagcagtagctgcttatgtaaattccctgccaccaagtcataaagactacatttctggagtaaatctaggatttagtgatgtacttaaaaaagtgggcttaaacgtcgtagtacaggcacaaagacttcttttgcgtaatttcgttctgactttagatcaacaaacttctcttgataaatgctttaccgctacgattgagtctcttattgaattagtcagtgagtgcgcatccaagcggccgaagaaatcctctcctgcaaaaggagtaactataaattcacagcgtaagctcggttattgcgagttctgcggtaatctaaccgaattttccaagttaatcagtgagatatcagaatttgttgctaacgataatgagttccccgttcatgaaaaacaggtccttagtcatcgatattgttctgaccataggcccaaactcaccaatggtctatggaatccaaaatacagacaaggaaagcggtctctcgaacagttcaataaagaattaataaggcttagacggcaatgcgctaaaccgcataaagctaacgcaaacacaggggatatattgattgatacctattttcatgagtggatgcagggtcaaactttaaccccagcagatctagataaacttaggaatattgccagacgaatggttgactccaaattcactgatactaagaaaaaaataatcatattaaaacaccaaggttttaaccagtttgaaaccgcacaggttttagaaaaaaatcactacacaactatgacaaagcaggctgtgtccaaggccttagcgtctgtgaggaaagaattttatatttaa

SEQ ID NO: 265194 - DNA, 831 bp, Klebsiella pneumoniae; identical to SEQ ID NO: 211357

SEQ ID NO: 265195 - DNA, 243 bp, Klebsiella pneumoniae
ttgcccggaggagggcgtttccacaccggcaagcattttcatcatggtggatttacccgcaccattttctccgatcagcacgttgaccttatttcgatagacccggtaattgacattatccagggcggttacgccgggatagacgcgcgacaggccgcgggtttcgataatcacttcggactcaacgggctggggagcgacgagatcgtgcggcgccatattattgtccccctgcatgaatga

SEQ ID NO: 265196 - DNA, 171 bp, Klebsiella pneumoniae; identical to SEQ ID NO: 260106

SEQ ID NO: 265197 - DNA, 612 bp, Klebsiella pneumoniae
atgactgatatcaccgaactggcgcagagcctgaaagcggcagcagagaaggctactcctggcgagtggcgtagggcttcaactcaattcaacggaattacggcaacgcctttcatgcttggaagaaaagaggtgatgattgccggagtttctgaaaagtgcgacgctgaattcattgccatggctaaccctgccaacatcctctcgctggtagaggcgctggagtattacaagtcacgcgaagagcgcgtgacaagtctggtgcgcgacaactcaaaaagttgggatgagctgtatcgacaggttgaggccaaaggaaaacgaaacgttgagctggtagatgcgctggagaaggcgcagcagcgtatcaccgaactggaacagaaacactgtggtggagcccttatggagagagagcttgcgcacagcgaagtcatcaacaagctgatgtctgaaattgataatcgcgattctcgcatcgccgagctagagtcccgcgccgtgaagctgccgccatgtgttgacgatgtgcatggtattgggatggtcatgtctgctgacgcagtggtagaggcgcttaccaccgctggcatcaaggtggaggttgagtga

SEQ ID NO: 265198 - DNA, 168 bp, Klebsiella pneumoniae; identical to SEQ ID NO: 198688

SEQ ID NO: 265199 - DNA, 330 bp, Klebsiella pneumoniae
atgcagcgcatcaatggcaacatcatccccgcgcctcaccgggagcgtggcaataaaccagccgctggccgcctccgccacaccggccatcgtcatacgctggccgcgcgtgatggtcgcctcatgcgtcaccgggcgcaacacggtatccgcaataccgctacggtaatccagcaggcgggggaatctggtcacggcggtggtgataccggcgataacgcgccagcagacggcaatataaccggtctgtgccgccacggcgtaaaagtcgcctttcgagtagttgccgtcagaggtcacggactgcaacacagagacgaaccggcgtga

SEQ ID NO: 265200 - DNA, 570 bp, Klebsiella pneumoniae
atgcgcagtgccgagagcgcatcggccagactgtcggccattacagtggcgcttcgcacgctgtggacgccgacggcatgccctgttgatttgttgccgtatctggcgtgggcgctgtcggtagaccggtgggacaaaagctggccggccgctaaaaaggtggcggcgattcagcagtcatactggctgcatcgccgaaaaggtacacgcgccgccgttcggcgggtgattgaagatatggggttttccgccacatttgcggagtggttcgacgtcggcgacgagccgggaacattcaggcttgaggtggatgtgaatgacgtcgggctgacaccaaaaacgctggatgaattaaaccgcctcatcggcgacgcaaagcccgtcagtcgacacctggcacaaatgactattgcggttagctcaaagggtcacgcatgggcaggggcagcagtggttgacggagaaatcataacggtttatccggcggggtacaggccggatgacgcgatctattttgacggggaaacccattacgacggaaattatcattattcgggtatgaaagaatga

SEQ ID NO: 265201 - DNA, 375 bp, Klebsiella pneumoniae
atgaataaatacgcggaagccgctttaatggttgttaccgattgctctgggaaggatagcccagacattcgttcggcatggggcaatgccatcaacacattgagtgtttatgatgaaggatgcccaaaagtagcattcatcggactatgttcagaagggatggtaaaagggattccagcaaatagttatggcttaaaacgaggggcaaagaataagcgatatgcagttgatgccgctaaattgcttctttcaggccatgatatggatattccatccctatgggaaaaggttactgataaaaagatagttcatcatgggcagatcaatattgtaatccgcttgtaccaagcagaattgctacagttccctgagtga

SEQ ID NO: 265202 - DNA, 240 bp, Klebsiella pneumoniae
atgaagcgagaattattcatccttgcatatgtagttataatgggcgctattattgtttctactgtttcttttttgggacagttggctatttttttagtaaacgaaatgaattcaggaaatgagaatataccgtataaggagctgttgtatgttagttttaaggtaggcatcacaggtggtgttattggcggggttggtacctggctgatgaatcatttttcttctcaacgtagaaaataa

SEQ ID NO: 265203 - DNA, 2358 bp, Klebsiella pneumoniae
atgcagactgcggattccagtccggagagcatgataggggtcaacctctcctgggggagccagtcctcgaaatccactcagcgacaaacgcagaacaccagccgcggcagcagcctgatggccggcaacaatctcagcattatcgccacggagacggatatcaacgttgagggcagccagctgcaggccggcggcagcgcgttgctcaatgccgcgcgcgatgtgaatttattctctgcggagaacgccagcaccctgagcggtaaaaacgagagccatgggagttcgtttggcgtcggtattaacttcggtcagggcgcgaacgggctgacggtcagcgccagcgccaacgccgcgaagggccacgagaagggcaacagcctgacgcataacgaaacgaccctcagcgccggtgagcgggtgactatcgtcagcggtcgcgatacgacgctgaccggggcgcaggtgagcggccatcaggtgacaatggacgtcgggcgtaacctgacactgagcagcgagcaggacagcgataactacgattcgaagcagcgtagcggcagtgcgggggcgagcggcagcatgggcggcggttcggggtctcttaacctgagccagagcaaaatgcacagcacctgggcgtcggtggaggcgcagacggggatttttgccggcgagggcggttttgatgtgaaggtgggcgggcatacgcagctgaacggcagcgtgctggcgagcacggcggcggcggagctgaaccggctggataccgggacgctgggtttccgggatattaaaaactatgccgagtacagcgtggagcagcagagcgcgggagtgagcacgagcggtagcgtggcagggcagttcctcgggaatgcggccagcggtctgctgatgggggcgaacgggagcggcagcgacagttcgctgacgcgggcggcggtgagcgagggcagtatcgttatccgcgacggcgcgaatcagcagcaggacgtgacggggttaagccgggatgcggcgcatgcgaaccagacgctgagtccgatatttgataaggagaaagagcagaaccggctggcgacagcgcagaagataggtgaaatcgggcgccaggtgagtgatgtgctggtgacgcagggcaagctgaacgcgcaggcggcgcagagcgacccggcggcgcgggcgaagctggtagcgggagggaatggcagcccgagcgaggagcaaatcagcgcgcaggtgagccggacggcgacggcggactacgatacgggcggaaagtaccagaaggtggcgcaggcggtaacggcggcgatgcagggtctggcggggggcaacctggcgcaggcggcgagcggggcagtgagcccgtatgtggcggaaatcattcacagccagacgacggacagcgcgacgggtaaggtgaatgtggaagccaatgcgatggcgcatgcggtgtggggagcgatagcggcggcatcgggaaataacagcgcgctggcgggagcggcaggcgcggtgagcggcgagctgctggggcgctggatagcgacggaatactatccggatgttaagacagaagagctgtcggatgagcagaagtcgacgataagcgcgctgagtacgctggcggcgggactgatgggtgggcttagcggaggcagcagcgcggatgcggtggcgggtgcgcaggccgggaagaacgcggtggagaataatttacttggcggtagtgaatggcttcagacggaaaaagccagggaacatggtgctgatgtactttcctgtaatgatgctccagatggtgaagcctgcaagcgaggcgaagcagttaataaagcttatgccggagcattggcttccgctgggttaatttatttaccaggcgggatgcaagtaactgctgggataggcggttcagcaaatgcaggaatacaatatgcattaactggtgaaattaaaccgacagaggttttaatagccagctatataggtgcagctactgctaatacaggattattgggaacgattggatggaatgcggcgggtggtgcaacgtcaaattatttgaaaggtgatgacccgctgaatggtgctggttggggggctgctggttcagcactgggttacgggatgggtaagtatcttattgaaatgccgctaaataaagtactcaatcctacatggaaaaactatgagtgggttgatgttggaatggggataagtaagcctttacagtttgacgctcgtcccagtacttggggggcaatatctggctctgctgcttcggaagcaacctctcagggtggaccaaaggttgaagacgctatcacaaaaaaaggtttaataaaatga

SEQ ID NO: 265204 - DNA, 306 bp, Klebsiella pneumoniae
atgcagtttaaggtttatgcctataaaagagagagccgctatcgtctgttcgtggatgtgcagagtgacatcatcgatacccccgggcgacggatggtgatcccgctggccagcgcccggctgctgtcggataaggtttcctgtgaactctatccggtggtgcacatcggggatgaaagctaccgcctgatgaccacggacatggccagcgtcacgtcctccgtcaccggggaggaagtggccgatctcagccaccgggaaaatgacatcaaaaatgcgataaacctgatgttctggggaatttga

SEQ ID NO: 265205 - DNA, 816 bp, Klebsiella pneumoniae
gtggcctgcttcacatgccgttctatcagtccatttcggtggaaattattgattgaagcacagtttctgtggtgtagaatttatcgcatccactacagcatggttatcattaaaatgaaaaaattggcccttctcggattattgtcagtttcactatgcacgggtacttcccttgcagcttcatttgattgctctaaagcaaaaagctttgctgagaaaacaatatgtgagaaccctaagctttcaaaggatgatgatgacttaaaatatttatatgcaaacgctaaggcatacaccaaagaccggaaggcgttttctgagataactaaagctcttttggattcaagagagcgttgcagtgatctcaaatgtgttgatgaatggtatgatactgcgttcgcaatttacggcgccataaaggaaactggcataccagaaaccaatggcgtaaatgatatattaaagaatgaaggtgtaacaaaaccttcagaaattaatgaaaaacctactgagattacaacgccgtcagccaagaagacaaaggaaagcaaaaaagattttagcttgtacgattcaaaggacagagccgcgccagttgaacataacgcaatattatacaaagacactccagaggcattcgaatttatagatacacttgttgggtttgtcagacaaagctcttacaaatgtgactctgtaagttctttcatacccatggtttcatctaatggatttacgctcgcatgtaataaattcagctacaaatatgaaattaaaaataacggcggaaatgtctctgtttctgtagataattaa

SEQ ID NO: 265206 - DNA, 354 bp, Klebsiella pneumoniae
gtgatcccgttcgtgacaccattgctgcagcgggtcacagtgacgtatcagtgggggaccgaaagtgttaactacctgactgatgcgacgatcgcctctctggtctcggcgcctacgattcagtatgtgaatggcatattcgccgggaaaccgctgaacgttaacaacctgaaagacgcattcttacaggcgattaactcgacaatcgacatggggctgatcagcactctaaacgtcgtggtcaccgtcaatggtgtgataacgccaccggatgccgggacgaatatcatcagcggagataagttcagttatttttatatcgcgtcggatggcgtgatcgtaacaggggcgtag

SEQ ID NO: 265207 - DNA, 624 bp, Klebsiella pneumoniae
atgagaaagctcacaccaatttacaccatggttaactttgtcgatgacgcccatttccggcgtgtctggaagcatcctaagaagaccatcacaaccaagcaacgagcctgggtgcagtacatgatgtcagtgtggggcagaattaatcgcggcgatgactcaccagctggcgctgttaacgttattggccgcctgatgatccggactcaatggaatcctgatatgggtggacacatcgagagaatggtcaactggctttatagcgacgagggtggcgcgctgagaggtgaggaactctataagaaagctcgcgaactggtcatccctcaatcctctaccagcaacatcatcgctctcgccaaagaatcagatgatgcagcgttcgttgaaaaggtgatggtcaagttattccaccgtgaaagcccagtccgcgattacgccattaaacgatactgcgaacgcaactgcacgcaagatatcgccaggaagatgcacctgatcaccggattagatatccaggcttgccgccgccgggttgtctggtgtgaaaaagtattcgaatcagaatttttctatgcaatgaagcgcgaaatggagaatgagatttctctaattgctgattaa

SEQ ID NO: 265208 - DNA, 612 bp, Klebsiella pneumoniae
atggctaagttaccgcgccgcaagtgcgcccataaagcctgttgccagtggttccacccggtacgcgacgggcaggtagtttgctcattcgagtgcgccagcgcgatcggcaaagaacagacggcaaaagcccgtgaagccgccaagcagaaggaagcgcagcgtcagcgcaccgaagagaaggcaggacgccagcggcgcgctgcacgtcgcaatgaactgaagccgatccgtcactgggtgcagatgactcagcgtgccttcaacgactggcgtcgcgaaatgctgctggccgccgggcacggctgtatctcctgcggaaccaagaccgcttttgcctggcatgccgggcattatcgcaccacggccgccgcaccacagcttcgctttaacccggacaatatctggctccagtgctccgcgtgcaacgttcacaaatccgggaacatcgaggcgtaccgttccgcgctggtcgatctgatcggcgaagaacgcgtgctggcgctggaatccaacaacgaaacccatcgatacacacgtgaagaactggacggcatacgcgccaaggccagggcagaccttcgcgcgctgaaacagcgggaggccgcatga

SEQ ID NO: 265209 - DNA, 348 bp, Klebsiella pneumoniae; identical to SEQ ID NO: 136986

SEQ ID NO: 265210 - DNA, 2028 bp, Klebsiella pneumoniae
gtgcaatggcaggctgacggtacaacagtagccgctaccggctgggattatggcgtgttgtctgtgaaggagggggataccgtcctggttgacgggtggcacgacgatttcaccaccggagtatctcgcccggtaattgttcagctggaccagaataaatcgtgggtatctaatctggcgacattcaaaacggacggcgcaggaccagtacgcgaggtccacattgctgatgccgcgcaggatggttatgtcgcactgatttaccggcgctccggtaactcgccgtttaaatttatggccactcgccctcggttgccggatgttgtcgaccagtactttgaacgcgaactggaaagaagcggttacgcggtttatacgtttgcgccaaaatactcagttaataataccgctctggactatgacggcaatgctaaaacggataccacgtggcgaactgtttacgttccggttcagcagggagaccagctgacgctggtaacggcaaccggcaaggtggcagcagatgaaaccgcgcgcgacggcaaaatcccgtacatcattcagctggataagcgccgggcgaatccggtggtgaaagcggtggcggatgataagggtgcgctgaccgggcgccagactctgacagcagttgcttcggctgatggttatctggcgtgtcgtgtctacgcgctggactacaagtggccgtcagtgaggctgacccgccctgataacggtggtggctcagcgtctgctgatattccagtggtgtcgggtcaattcgaaagactgcctgttaacatgaacgcattgtgggattataactccagcccgtacagtcagaacaacatcatcgtttccggtaactatcagtacgtgattgtgattaatgccagccgcaatccggtcattatgcagcgcaataaatacggtggcccgtggacaatgttcgaccttagcaccatacccggcaacccgttaaatgctccgactgaactggacggacacaacatttattcgattgccgtcaccccatcagggaaaataaccatagcgggcaatatgcacggctccgcgtggcgcggtgttatgtctacaaacgcgcacgacatcacctcctgggcagcattcgactgggggaatgcgggtacggataacacctatccgggattcctgacgttcccggacgggacactgctgtgctatttccgccgcggtgtcagaacctatctgagcggtatcagtagcgctgacgtgttgaactcgttcaggtttgcggtaggtgctaaagccgatggcaccggcgggccatacaataacagatgggtggttgataaatctggcgtgctgcacgcctgctgggggtatcgtatggactccggctcagcaggtgccaatgaagggctgtattatgctaaatctgctgataaaggtgtgacgtggacgaacgcagccgggaccagttcctggtctctgtctggcggcagcctgaatgatgtacggtctgagaaaatatttaatgcagctcagggctcagggtacatcaaccagaacggtggctgcgtcgataacaacgggtactatcacacctgcctgactcagacggacgcgttcggttacacccagatagttcatatctggtgggatggttcctcgtggaaaaacgaggtggtgagccggttcacattcacgatggacctgtccctgaacctggtgatgaatgacctgtcccgcccggttatcggctgcactccgtcaggccgggtctatgttttctatcacaccacgaaaatgggacgacaggggcagatacgcgcgattgatgtgaccacggcaggcagtccggtagattcggtgattgcactgtttgatatcggcacgcaggctctggcatgtaataccgatataatgctaaaaaccggtgattttgttgcgctgctggcgaagggaacagcaaacagttcgtcggaaaactacggcgtttacagcaatcaaccggtaatgctggcaaccataccgatgccgtaa

SEQ ID NO: 265211 - DNA, 705 bp, Klebsiella pneumoniae
atgtgtgcgatggatcgtagtagccatgatggcttaagtcaatcggtaagggatgttatttcttgtgtcaagtcactttatcacaattctcctgtgtcagtttgtatacggaatgaacgacacgagcccatttatttcaatgattcatttcagcaactattttctttctttaaggccgagagtgaaaagagaatatttcaagctggttttgttgatctcgagtatgtgctttcacaattcgagtttgactgcattgcattaggtcagggatgtgttttatgtaaagattttaagtgcggtgattacaactttcaagttcgaatggaatcattgtttattcccggagagagttcttatgttctctggcagattaattttcttattaacctgccgttaacaggaaggctgagagtggttaaagatgagtccagcgaagatgacaactacgataatgtaatttccattattcctgacaaaaatctagagtctctatctttttttattttagggttttcatatagggaatcggcttattacatcggtttgccagcgtcaactgttagaaagagagttgaaagggcacgtgacgtaatcgttgagttctttgcctcatttgaacatttcaaagcttatttgtttaaaacaaaaaagatatttttctttcttgattactgttccaatattataggtgttaaaaaaatgtaa

SEQ ID NO: 265212 - DNA, 393 bp, Klebsiella pneumoniae
atggctaagatccaggtttatgttaatgacaatgttgctgaaaaaattaatgcgatagcagttcagcgtcgtgctgaaggtgcgaaagagaaagatataagctattcaagtattgcatctatgttgcttgagcttggtttacgtgtctacgaagcccagatggaacgtaaagaatccggatttaatcagatggcattcaatagagcactgcttgaaagcatggttaaaactcagtttactgtaaataaggtgctggggatcgagtgtctgagtcctcatgttaatggcaatccaaagtgggaatggtcagggttaatagagaacatacgggatgatgtaagtgcggtgatggaaaaattctttccgaatgaaagtgagattgaggatgaatag

SEQ ID NO: 265213 - DNA, 255 bp, Klebsiella pneumoniae
  misc_feature (223)..(230): n is a, c, g, or t
atggccgccctgaacgtagacatcggcagcagcggcagctgtcaggtggcgacatcgacgatccacgtcagtctgggcgcggttaaccgggcggaatttcatggcaaagggaccaccggcggccaggcgaagcgcttttcgatcccggtgttctgcccgtcgccgaccgatgtgcgcattggttttttcggcgtcacggtggagagcgataccctggcgctgnnnnnnnngtgtgaagctgacctacggcaataa

SEQ ID NO: 265214 - DNA, 222 bp, Klebsiella pneumoniae
gtgaagctgacctacggcaataacgccggcgcggcggtctctgatggcaccagcgtcaagatcaatgaggccagcaacttgccgatcctgaaaagggtgaccggtgccaacgccggtaccgccgaagcgatcaattttaacgcccagtatgtgcagactgacgccacggtggcggcgggcacggccaacagcatggtgactttcgccctggagtataactag

SEQ ID NO: 265215 - DNA, 678 bp, Klebsiella pneumoniae
atgtctgctggcgaaaaaatttctgtcaaagagaaaataggttatagcctgggggacgcagccagtcacatcgtatttgactcgtctgtggctattctggcttatttttataccgatatttatggcttgccgcccgccgtaatggggacgatgtttttgctggtgcgtctgctggatgcgattaccgatccgattatgggcgcgattgctgacgccacctcaacccgctggggccgctttcgcccctggctgttggcgatctgcgtgccctttgcggtgagctgcgtgctggtgtattccattccctccttttccgactccggaaaaattgcctacgccgtggcggcttatatatttatgacactgatgtatacggcgattaatattccgtactgctcgctgggcgcggcgctgacctccgatccgcgcgaaagcctctcgctgcagtcctggcgtttcgctatcaccccaatcggcggcgcgctcggtactgcgtttattttaccactggctgattttctctatcccggcgatcgcgcgaccggtattcaggtctcgatggccctgtttggcgttatcggctgcctgatgtttatcacctgtttcgccacgactaaagaacgcgtgcagccgattaaagaacagaacctgggtaatgctgccaacttactgatttag

SEQ ID NO: 265216 - DNA, 639 bp, Klebsiella pneumoniae
atgatgctggtcgccgtggtaattcgcggtggcgccgtcgtctattatgttaacagcgtcctgcataaaggcgccgacgtgattaccatattcatgctcggcggtatgtttgcctccatgctgggttcggtgctggccaagcccttcgggacgcgcttttgtaaggtccgattctctttctggattaatcttctcaccgccgcgctgggcgtggtctgctttatcgtcccggtacaatattggattgcggtgctcggcgtgcatattctgatttctatcattcagggcggcaacggcgcgttgcagtggtcgatgattaccgacgtgaataactatggcgaatggaaaacccagcggcgtattaccggtatgaatgtcgcagcaaatatctttgtcatcaagctgggtgtcgccgtcggcggggccatcctcggctggatattggcctatttccattacgccgctaacaccacggtgcagtcggcttcagcggtgcagggcgtggtgctgttgtttactctggtcccttccgtgttttatgtgcttaccgccgtctcgattaaattctacggcttaacggaaaacagaatgaacggcatcgttgatgatttaaaacacggcactttcgccgaatcctga

SEQ ID NO: 265217 - DNA, 276 bp, Klebsiella pneumoniae
atgattaacggcttcggttcggccaaagagcagtggttctcctcttttatgctgcaggtggaagcgaactgctcctggcaccgcctgttcgttgacccgctcagccgggcgatgtactcctccaaaggcccggattttgagtacatgcaagcgcgccggcaggagggggtcgatatccacgatgcggtatacggactggcgtgccgcaactttaaagacgaaatggcagagcttgaatcccgaataccggtgaatgacatcgaggataaacagtga

SEQ ID NO: 265218 - DNA, 144 bp, Klebsiella pneumoniae
atgttgttggcgcagggggaggaggcggcggtgcaagagcgaccagcgtggggtatctcgcgggtggtggtggtggcggcggcggcggttatgcatcagcatttatttctcttccatccacccaagaagtcatcgttggtttag

SEQ ID NO: 265219 - DNA, 792 bp, Klebsiella pneumoniae
atggggggattacctgaccacctgcttgtttgcaaaaaggatgtgccgcttttcaatcgttttgcctcgcgggaggttcatgctgcagagtctttacttgcaccggaagcaaaattcagcgacaggcttggacactctggggataagtttccactggcaaacgctcagcgcgatgccttaagccattttctggatgccaggcatggcgatatccttgccgttaacggccctccgggaaccgggaaaaccacgctggtgctttctattatcgccactcaatgggccagagcggctctcgaaaaagcggaacctccggttattatcgcgacttcaacgaataaccaggctgtaacgaacattatcgaggcgttcgggaaagacttttcccagggtactggtgcaatggccggacgatggttgccagagctgaaaagcttcggtgcttatttcccctcaagcactcgtaaagccgaggctgccaaaaaataccaaactgaagatttcttcaaccaggttgagtcaaaagagtatgtagaagatgcactgctgttttatctggagaaagctaaggcagcctttcctgaaaaagattgttcatcccctgaaaaggttattgaactcctgcacggtcagttggcagcaaaatccgagcaactggtaagactgaacgcaacatggcaaacgttaagccaggttcgggcagcgcgtaagcttattgctaacgacattgagcaatatctcgataatttaaataaattactctccgggcaagaacaaaaagtcactcggtaa

SEQ ID NO: 265220 - DNA, 762 bp, Klebsiella pneumoniae
gtgattccagtagaacgacatcagcgtattttagccctggtggagcagcgtggggcggtaagcattaacgagctgacggagatcctcggcgtgtcccatatgaccatccgtcgggacgtcagtaaactggaggagcaggggctgctggtcagcgtctcgggcggcgtacgcgccgtcagccggctggccgcggaacccagtcatctggtgaaaagcacgctgcagagtgaggagaaacaggcgatcggcgcgctggcggcgagtcatatcgctaaaaacagttgcatctatctggatgccgggactaccaccctggcgctggcgcgggcgatcctcgaccggaacgatctccaggtggtcaccaatgattttgagataacccagctgctgatcgatgccagccagtgcggcgtgatccacaccggcggcactctgtgccgggagaaccgctcctgcgtgggcgaatcggcggcgcgtacgttacgccacctggctatcgatacggcctttatctccgccagcggctgggacagtcgcgggatattcacccctgatgagaacaaggttaccgtcaaggagaccgtcagccaggtcagcgcgagaagcatcctgctgtgcgacagttcgaaatacaatcaggtggccacgtttatggcgttacctttgacccggttcaccaccatcattaccgaccggcatctttccgatgccgccgccagtcatatcgcccggcacgcctgcgaggtgctgcgggccggataa

SEQ ID NO: 265221 - DNA, 720 bp, Klebsiella pneumoniae; identical to SEQ ID NO: 139639

SEQ ID NO: 265222 - DNA, 720 bp, Klebsiella pneumoniae; identical to SEQ ID NO: 230858

SEQ ID NO: 265223 - DNA, 249 bp, Klebsiella pneumoniae
atggtagctcgtcacccgggtcacgcactctttcccgtcgcgccccaggcggccaattttcagatgaccagcggtgacctgcatatcaaagctgtcatcgacacactgatagttcagatcctgataggggtccagcttatacggtacgcggtacatttcgtgcgggtccgggtttatcagctcacgcatcagttcgaccagcccggacgcatcaaggatacgcgtcggaatataggcaccgcccagtga

SEQ ID NO: 265224 - DNA, 408 bp, Klebsiella pneumoniae
gtgcaggcgctagccgatgtggtgcatgacgcccgcgatatcgccgccagtatctcttccggttcgtttaaaaccgccgggatggtgattttaccctgctcaatgaagacgctctcgggcattgtccatagctatacggatggcctgctgacccgggcggcggatgtcgtgctgaaagagcgtcgtccgctggtgctctgcgtgcgggaaacgccgttccatttgggccatctgcgtctgctggttcaggctgcagagctgggggcggtgataatgccgccggtaccggctttttaccaccggccacagagcctggacgatgtcatcaaccagaccgtcaatcgggtactcgatcaatttgatattagtctggagcacgacttgtttacccgctggcagggggcctag

SEQ ID NO: 265225 - DNA, 183 bp, Klebsiella pneumoniae; identical to SEQ ID NO: 215591

SEQ ID NO: 265226 - DNA, 219 bp, Klebsiella pneumoniae
atgcctttaaaactcaccaggctggcgccgccgatcggcaccgcgcgctgctctttggccggcagcatcgccaccccaagctcaaagtctttgctgttctcgcgcataaagcccagcgcgccagtgctgagcatcgccatcccgagcttgccggagaagaacgcggcgctgatctgcttcgagttcaagaccccggacggcatcaccttgtccttgtag

SEQ ID NO: 265227 - DNA, 168 bp, Klebsiella pneumoniae
atgaatgacgtcaaaatgggttttggcatagcgatgggcgccgaaatcgggggcaaacaggcgagtctgctccgcctggcgccgacgcgcctccggcaggatcgccagcattttttcctgggcggactccagcgtctgcgacagcgcctcaccgccccaggtttttag

SEQ ID NO: 265228 - DNA, 198 bp, Klebsiella pneumoniae; identical to SEQ ID NO: 139683

SEQ ID NO: 265229 - DNA, 216 bp, Klebsiella pneumoniae
atgtcaaaaaaatctcttaaattcaaagttggcgacatcgtgtatctggttagtggcggcccgagcatgtctgttgctgaacaggtaagggaatatgattctctagtcgggtggattcatactggagaatacaagtgtcagtggttttctggtaaaaaacttgatcacggcgtctttccggaggagtcattgacatcaacaaacccaaagccttga

SEQ ID NO: 265230 - DNA, 501 bp, Klebsiella pneumoniae
atgtcttcaaactcaacttttactcatttattttctgtcgccctacccgttatctgcactcttttgggcgttcttgtcacgtcttggctgggatggtttaactcccaccaagcagctattttagcggacaagcaagcatgtatacttagggtcgatagccaagaaaaagaaattagacttaaggctggagattttctttcagcttacggtgaaattgcttcttatttaaccgtggctgataaactcacctcatcaggcatgcagaaagcaacttcaccgctttttaaggctggctttgagatgatagctttttctcctactgccctttccaattccacagcgttgctcctaaacgccctacgcgccacaattatcgataacattgaaggcactctatcaaaagaacgtgatgaaaatcttgaagttttgttcggcagatggtctgagaattacggagcatatcttgccagtctgagccagcagagagacgcgtgcagataa

SEQ ID NO: 265231 - DNA, 468 bp, Klebsiella pneumoniae
atgagccgcacaattgcagtttttggcgccgcaataattagcctgatccttatcctttggtggggtctgagtcactttcacgaggcgtatcaggcggaaaaaactcgcgctgacaaagcgactgagcaactcagtctggcgaaagacaccatcgctgacatgcagacccggcagagagacgtcgcagcgctcgatgccaaatacacgaaggaattagccgatgaaaaagctaaaaatgatgctctgcagcgtaagcttgataatggtggtcgggtgctcgtcaaaggcaagtgtccagtgtcagccccaacccaaaccaccggcgccgccagcatgggcgatgatgccaccgtcgaactctctacagttgctggacgaaacgttctcggtatccgatccggaatcctcagcgaccaaacagccatgagggcgctgcaggaatacatcaccacgcagtgtctgagataa

SEQ ID NO: 265232 - DNA, 279 bp, Klebsiella pneumoniae
atgagtatcttcagcgaagagagaacatcatgggaacgtgaaatgctgatccgcgaggcgatagaaaacgccgagcagggtttcactgtccacttgagaaatggtgcgcgtattacagtcagttctaacagcccgtcgattgatataattatttacggtctggagaaaacaattcgcggtaatcatgagcgcgcccgaatgacctttattgattatctgtatttttggcatgaaaggttattcaagctggctaaaagaaaaccgcgccccaaccactaa

SEQ ID NO: 265233 - DNA, 774 bp, Klebsiella pneumoniae
atggcaacgccgcagacgaagacgaacgaatactacaataaatttattgagattatgttttctgaaggaggtatcagcgaattcgaataccataaaattaagcgcgaatttccaagtaatgatgaaaattcaatttgtataactggaatggcagcggctctatctggcaaaaaacaagagtctttaacattattcgactctctcccttcagataaaacttacagagcccatatgtcttatggctccacaatgttctatctacatgagaatgtaagactactaaatcatggtttgtcatgcccggagcattttaatgatttattcctcacctggatgtctgcttataattattatataattggagatataaataaatcttcattaatgctcaggaaatatatacagatgatgaacgatgaagaaaaaataaaacaagcagaatatgcaatgtcgtttcacctcgaacaactctcaaaagcttatgacgtgggggctacaactcctgaacgttttaaagaatctatgtacctggctttcagcgttcttgatgagtttaatgtgggttatcgttatgtggatgtaagattatttcctgaccaaacagcaggttgttttatagaagtaaaatctacagaccctgaccttgtagcaaaaatggaattacacttaatcagaaaacaaatagcacaaaattattcaattgattatgaccttgaacctcaattcactattggtcgtaagattccttgggagtataatcatgcccgtaaatga

SEQ ID NO: 265234 - DNA, 1533 bp, Klebsiella pneumoniae
atgagtgagagaataattgttcggaaattaattcttgattatgttgcaatagatatagcaattgaacctttttcagaacaaggagaaaattattactcgataattacggggcgtaatggttctgggaaaagcagagttttggaggccatttcattatgcattctatttgtagagttattatctgttgagcagcgagaaaatataattggcaaaaatattcattttccacttggttttatttcaccacgaatcccctttgaatacattttactagagtaccatgttggctcgacattaaataagattgagattaaggataataccattacatccttctcaattatttataatgaaaatgctaatcctaaattgatatgtttgtcgaacagtttttttaatcgatttcttgaaggttatggttcttctcttacgtttccttcacataatcaagataaatataaaaatctttcaattaataagtatttggaaaaaacaaagtatttttcagattccgatttcgttagtgctgttttgtcgcgtaaaataataaaatcgtttttcatggggaaagatgtttatgctcgaacaatggcttttttacaaaactttggagtcgttggcgatatatttttaagtttaaaggtcgaatggaggatttgtggcgcaaatctatggggggttactgatatcgaaaagttaagacaaagtgttaaaagaatattgggttgtggacctcaaatagaaactgacgaacatctagtcagtagtttatctgaaaagttaggaaatcttttagagtatcttaacgctggaaatgaaccgccgtgtagtgagcttgaggatgatcatttttttgtgcaagggccatctattgctgattttatttttaatgatgatactactatacagactgaactatgtaaggatgttttatatttagctgagcatggaatattgcttttaaaagattttagattcaatagaaatggacttgaaatggatttacataaaatgagttccggggaaataaatgtttttttgatgcttataaaaattaactcagagatagagaataattcaataataatgattgatgagcctgaaataagtttgcatcctgcatggcagaataagattctgccctcaatagaaagttgcttctctcaatataatggttgtcatttcattatcgcaacccactcccctcaagtagttgcaagtatcccacgtaaaaattcatgcgttattatgttggataatactccaaatacaaccccaggggagctggtgcatggtaaatcatctgattttcagttattccatacattaaattacacaggcgattcgaatgagtatttaataaaaagtttattaacaataatagcaaaaatcgatgcatcaacaaaattaaccaatgaagatcttatctttattgaaaaggctaagaaaatgtctgatgatattgatgatactgatatcgcgaaatatttactccttcaggcgcttgcactacttaacgtcgtaaggggatga

SEQ ID NO: 265235 - DNA, 693 bp, Klebsiella pneumoniae
atgatctttttaactcctgttgtattttctgaagaatcagagaagtttataggaaaatatgatggtgtaagtaacgatatatggaaaggcaaagggaaggaaataacaaaaatacgagaggaacttagaaaacactatatacctcaacaggcaggttgttgttcatactgtagaatcgacaatcctcagagtcatggcttgacctgggatgtagaacacattattccgcaaggggattttccacaattcttatttgaaccacgcaatttatctttatcttgtaaagattgtaatggaccaaaaaatagcaagcctgtactcgatacatcaaaaatagatgtatcggtaaactacccaagtgatggcgtttttttttatataattcaccctcactttgataattatgaagagcatattaaaattgaaaagctaggtaagaggattatttatcacccatcggaagggaagggtatgtacacgtatgagatttgtaatctgtcaaggtttgcgacctacgaagctcacaacataactgatgctaatgtagcaagttcggttatgaaattgctcttggaattaaatgaaacgggaaaaataaatatacctaaaaaatatgtgcaaattgtcggagatcatattacatcgcactctatagccattgatgtgaataccgcatttaaaaaacaagagtga

SEQ ID NO: 265236 - DNA, 2034 bp, Klebsiella pneumoniae
atgaccagactgccagaatcctcattgtgggaagaagatattgagcttatttccagaagcgagcgcgtttctggagggctggacggcgtcgcaaaccgaccattaaaaagcctggctaaccgcacccggtatctcaaagaccgggccagcacaacagatgaattgatcgccgaaaaagtcagtgcggtaaagacctttgctgatggtgcgacgctgaaatctccgcgcgaagagattttgtatggcatttaccgccttgtatggacgggggagtttccaaaaattgtccctgcagcgtctaagccagaaaccactggcggggtaggtgctggatgctgggcgtacacttcagacgcagctattcgctcaaacctggcctctattgagggttttagcctgattggtcaggtatcgtcatttgccgaactgcgttccattactccccgaagtgttggacagagtattttaatgcgtgctcatcctgtcgggtgggcggctatgtcgcatggcccaattggtggtggagaatttattgcccgaaaaggtacagccgtagatgacggtggctatatttgtgtacctacaggccagaatgaatattactggcaacgcatcccaaaaaatcccggcaaagtctgcgcgacagagttcggtctttatgatggggctgttcttgacgatattttgtctaactctatcaattattgcattaagaactcacttggttatctttctgtcccagcgctggggccagctgggtatacgttagttggtgggctggagtttattaactccaccaatggactcattattgaagggccagggatggcaactaaaggtgctgctccaattattacgcataccggggctaatattggcttaactttcaagagaaaaactcaggcgcaaagcattttcaacactgtaattttgaagaatttcacagtcgccggtaatgccctggctactgcatttgtacgattttctgacttctatggtggttcagtacttgattctgtaatccgggattacactacgggcacggctattgacgtatataacggcgttgggtggactgaaactgttcgcgtagataacgtcatggtgcgtacatctaaaatcggtatttggtaccattctgaccccctatcaactgactggcagacggtatccttttttggtgcggttatccgtaactatggtttccagcatggaattggtggtgcttcatatggaatacgtgtaggggacggctcgcgtgctgacaatctttataattgcgtaattgatatgacaggatggtgggagcaaggggggaacagtactgctctgtatgttgatgataaggcgattgtcgatggagaggctactttccgttatgacggatttgctgccagccctatggcttccactacccagccaactcgtttaattcgtaaaaacggctatgcgggatatgtaaaattaaactgtaaaaactataagcatcaggccggtattgggctgactgcgggagtgacttctttggctatccggccatggcttgcgctggctgagtcgctggctaacattgccactccacacgcaacgctgccgggagaacacatcatcactacaccggggctgaaatgtaaactgacgggcaatataattcagggtcaggattcaatcgtgcaggttcgtagccttccggcatggcacagatacaaagtgacactgcgttctaatttatccagcaccgcgcagcaacaatacattgtgaatatccacagtgataataacgcaggcacagtaacccgcactgactcagtatctgctgcgactaccaatgctgtggcaggcaccagtaactacagcacgaccttatcaaataagaatttccctccgttctatttacgtaatgccggtgggcttcccgatggtacttacagcgagtcgtaccgccgcggatttgacctgatgctaaatggaaccagtgcgctggttacagagacacttgtacccatatctatagagatcgaggccatagattaa

SEQ ID NO: 265237 - DNA, 159 bp, Klebsiella pneumoniae
atggttatctggaagtggggcggttttttctacccatacgtaatattcagttggggaacagtaattcagcaggtttttaattctgacgcatgggccgtagttttaattgcttcaattattttaggtttcagattttatgacgggaaagatatggagtga

SEQ ID NO: 265238 - DNA, 1158 bp, Klebsiella pneumoniae
atgagcagaatttataaatcactcattacaagcgatggtagtgaaaaaatagccgctgcaatcgttaacggggacaaagtcgttttctctcaaatgtctgttggtgatggtaatggcaagccaacgacccctgatgatgaacaaacctcattagttaacgagctttttcggactcagctgaacagccttaaattatcagataccgagaatatcatcattgctgaaatgattattccgccagaggtgggcggttttaccatcagagaggccgcattgtttgatgacgccggtctttgcatggcggttgccaatgtcccggaaacgtataaacccacactggccgaaggttctggacgttttaccattctccgtatctggctggcagtcagcagcactgaggctgttgagctggttgttgatccgggcattgtactggctacagtagaggatgttatcaacgccaatagcgaggtcaaagactatacggacgagcagctagacgagcatgccaaatcaagagaccaccctgacgctactctgacgaaaagggggtttactcaactcagtaatagcatcaacagtgacgaccagacaaaagcggcaacaccacaggccgtaaagctggcgattgaatatgccattcgtgaggcatgggagctggataaccctgtcggcacagtgaagttttacgcgcagaaccttgaccccaatgagcgctatccgtggacggagtggaagcataccggggataaaaaaactatccgcgtgggcagcgccagcggcgctgatgtgggcacaaccggtggcagcgataccgtcagcatacagaaggcgaaccttccggcagtgcaaatcaacgtcagcggtgaaatcagtgaccatccggcgcagacgctgaccacaaaacctgccggtaggcacaaacatggcggcgtgcccagtcgggaaaatccctgggaaattggcggcgatatcagccagcgatttaaccccgcaaatctgggcgaaaccgacgaagtggacgatcacgaccatgaaatagacatcccggagcagcagcatgaattcaacggtaaaacggacaatctgggaagtggtacagccatcagcgtcgttgaatctcacattctgctgatgtgctgggcgcgggtagcgtga

SEQ ID NO: 265239 - DNA, 123 bp, Klebsiella pneumoniae; identical to SEQ ID NO: 8077

SEQ ID NO: 265240 - DNA, 1146 bp, Klebsiella pneumoniae; identical to SEQ ID NO: 19181

SEQ ID NO: 265241 - DNA, 534 bp, Klebsiella pneumoniae; identical to SEQ ID NO: 19180

SEQ ID NO: 265242 - DNA, 318 bp, Klebsiella pneumoniae; identical to SEQ ID NO: 19179

SEQ ID NO: 265243 - DNA, 432 bp, Klebsiella pneumoniae
atgtcaaaaatcatcgtcatacggaggtgtctggtcgtatccttcatacccgttcgcgggcggttgctgctcctgggcccggcgcagggcatcagtagcctgtccttgttgacctactttaccgcctgggcggaccgttctggcgctgagtacactgtccgcaataacctgataaccttgctgcataccaccatcctgaccagtccactgattgagctgcatattgcccgccacgctgacaaggtcgcctttatggtgtttggccagcgcgtcagcctgcttaccaaaggcaatcacgcccaaccagaaagtagcctctccgttatctgccgcattacagggcagagctaccgccaggcgggccattgtcatgttcgtaccttttcccgttgttctggtctgcgggtcggccaccagccggccatacgctga

SEQ ID NO: 265244 - DNA, 237 bp, Klebsiella pneumoniae; identical to SEQ ID NO: 121649

SEQ ID NO: 265245 - DNA, 225 bp, Klebsiella pneumoniae; identical to SEQ ID NO: 25145

SEQ ID NO: 265246 - DNA, 690 bp, Klebsiella pneumoniae; identical to SEQ ID NO: 28130

SEQ ID NO: 265247 - DNA, 678 bp, Klebsiella pneumoniae; identical to SEQ ID NO: 54015

SEQ ID NO: 265248 - DNA, 885 bp, Klebsiella pneumoniae; identical to SEQ ID NO: 54013

SEQ ID NO: 265249 - DNA, 153 bp, Klebsiella pneumoniae
atgaataaacccgctgtcatcgcgctggtgattacactgctggacgcgatgggaattggtctgatcatgccggtattaccgtcctgcgggaatatctcccggaagcggatgtggcaaaccattacggcattctgctggcgctgtatgcggtga

SEQ ID NO: 265250 - DNA, 1506 bp, Klebsiella pneumoniae
ttggcaacatcacgtgcaggctctcatgctggtcggggttttcgatatcaagatgctgctggcgtctggctggccattcgctgctgggctaacgaactcccctatggggctgtgattcccgaagggaaagatgattacgaactaagtagtactataggcactgctctcgtgcaggtgaagtcacggcgtgaccatcttggaccgtttcccgtggcggttgcagtcgggtttatacgagcgctctgggcgcgcgttgaaaatgccgccttccatacaaatctaattcttgttcttgagcatcctgttgccgaggggccagtggttgatcatttgttggctaagcatccagctctggtcagcacacttcaggatgacccgcagtgggcagtccttgccgcacgtactcaaatctggattgcaccaaatccttttgaggctgcagtggcaagtattcattgcaccatgccctgctcggatttggcggctcagattcattatggtgagttgttgaaacagattgccgcgctggcggacaaaaatggtctggtgagggatggtcgctttgaagggctgggtatatctgatgtggaaaccactcttcgtcgaatagaaccagcgctggacatggcgggaatggaatcagctttacgcgacggttactgtgatgttgtcgattttctgacaccattcaatgacccgtccttctaccagggtgtgaacacacggcctggccatctggctgcaggtcttgttgccgagcgtccgaatgcacgtcatgaggtactctccgcattagaatctgctggtgcggctttaattgttggtctgtcaggagctggtaagtctgctttgatgtgggaaaccgcgcgggcgagtcgacatactactcgatggtttgagatgagaagaggtgatgcggctgatgttcatcttctcattcagtttacccgtgcattaagggcttctcctgacgcgcctgtcgggtttgtgttcgatgacgttggtggacgttttagtcagctttggaatgcgctgcttaatgaagttaccgttggcagtggcatactactgttgggttcaatcagggaggaagacactcttatgttggcctcgcgttcccgggctcgcgaagtacgtccgctcatggaagaggctgtagcagaaaagatttggcgccaattagtggaacaaggtcagacaaattgggcgggatggcgcgagccatgggctaaaagtggcggacttcttctggaatatacgcatattttgacccgtggggaacgactgaagtctatcctcgctgaacagatagatcacggctccgcgagtccagggatgaagaactggcggttctcagtgttactgcccttgccggggcggcaggcgcggcggttgatgtcagccgattgccgaaggttcttggcattgaacaaggcgcacttacgcgagcgttacgtcgactcattgatgaacatctggtttccacaccagtggatggtcagctaa

SEQ ID NO: 265251 - DNA, 279 bp, Klebsiella pneumoniae
atgatcctgagagaccttaataatgaatttaaaaacacccatgagtacaataagttcgtacgggaaatgaaaaatgggttattatccagtatcgtcccggagacgaattttgaatggataaaggactatagctccgcttattttgcatggaatatactttcaaccatgggccctaaggaaatcaatccactagaggttgatttttaccgtgaacggcctccggttattcggcatggcgtattggctgttatccagaaacctaccagcatgcacttttag

SEQ ID NO: 265252 - DNA, 1956 bp, Klebsiella pneumoniae
atgaagacggttatttccgtactgactgcgcatttttttgtcctgagcgcctttatctggctggcatcccccgcctgtgctgacagtggaagcgactataaagctggttcggattttgcgaaacaggtgcagggcaatggtctgaactcactgaaaaatttcagtggtgagcaaaacctgccggggtataccgacagccctgatcaggcaaaatactatggcggcgtcactgccagcggagacagctccctgaaaagcgattcagccctggagttcagccagggagataccggcaaagcgattactgagtcgttcacgaaccggccaccggatcagatatctcaggatgcaccgtttattcaggccgcaaaggatacagaatcccgtgccgacagcattgtcggcgataccggacagtcctgtaccgcccaggttgtgaaccgcagtgagttcacaaaccatacctgcgaacgtgatctgcaggtggaaaatttttgcacacgggaagcgaccctgaaggataacgccaccacacagaaagttaaccgaacctatcagcaggtggtgacgctgaattatgcccggaatacccggcaatggagtggcaacctgacgatcccgaccaacggtcgtctgctgaatgcctcggtggatggtgagcctctggtgatcccctggattgaagaatgcgattccgaagggaaggtgcgggatagctgcaagagtgcagtgagtgaaagcctgaccctctttgaacgaacgttccccattgatgtgatcagctggccacgttcagaatcgatgtgttcaggcggtcagaacacgcattgtacgaaatatacctatgacgggaaggggaagattcatcagtcgtttggtgtggacaaagcggtcactgctgggcagaacttttcagtaagcaaaacatcacggaccgtatcatcggccagccagaaacccgtacaggtcacggtcaccctggtgatggaagaaaccgaaaccgtctatgcacctgaagtcgtctgggttgaaaactgtccgttcagtaaggatgaagggaaaaaaacgggcgaggaatgtatcagtccgggaggaacgcgaaccatcaccctcggaggcagggattactcgttcacggaggcctgctggaaatataaggatacctggctcacgcagccggcggacaacggctcctgtgaaagcctgatgaaaaatacggcctgtaccctgtcatcccgtcagtgcgccttctccagtgaggaaggtacgtgcctgcatgaatatgcaacgtattcctgcgaaaccaggacgagtggcaagcaaatgatctgcggcggtgatgtcttctgccttgatggtgaatgtgataaagccacgtccgggaagagcaacgactttgggcaggcggtgtctgagctggcggcactggctgctgcggggaaggacgtcgcggcactgaacggggtggatgtccgggccttcaccggaaaagcgaagttctgtaagaaatttgctgcaggcttcagtaactgctgcaaagacagcggctggggccaggatgtggggctggcacgctgcagcagtgaggaaaaggcgctggccaaagcgaaaaaagacaagctgacggtcagtatcggggaattctgctctaaaaaggttctgggtatttgcctggagaaaaaaaggagctattgccagttcgactcaaaactggcgcagatcgttcagcagcagggaagaaacggtcagctgcatatcggttttggcggcgccagcagtcctgactgtcggggcattaccgtcgcggaactccaggggattgattttaacaagctggatttcaccaactttatggacgacctgatgaaaaatcaaaaaataccggaaaacgatgtgctcaccaataagaccagagaacgaattaaggaattcatgagtcagcaatccgcgcaataa

SEQ ID NO: 265253 - DNA, 2121 bp, Klebsiella pneumoniae
atgaataacaaactctttgaaacgattattgcaaagttaaatttttcgctaattaagaaaacaccggtaattttacaatcagaatcagcggaatgtggtatcgccagcctggcaatgatctgcggacactatggattagatatagacttattcaatttccgccaacgcttcggcagtccatcgcaaggtgcttcactgctgcatttgagcaaaaccgccgagcgtgctggccttaaaaatcgcgcgctttcattagatttagatgaaataaaacagcttaagctcccttgtattatccactggggaatgaatcattatgtcgttctaacgaaagtacgaaaatctagctatgttgtgcatgatcctgctttgggtaaacgtataattggtttgcaggagatgtctaataatttcaccggcgtggctctggaactttggcccgatcagaactttcagcaagaaaaggcaaaagcacgcttacgtttattagacctgatgcgaaacattgtcggattaaagtctgcattaattaaaatcttcgcattctctgtcgtaatcgaagccattggccttttactccccattggtacccaactggtcacagaccatgtcatcatggcccatgaccagagtctgttatccgtcatttgtataggactggtctttttcactctcttccgtacctttgtcagtatgctaagggcatggacctcactgactctcaatactctgactaatattcaatggaaaacgacattgtttgatcacttgacaagcttgccgttatccttttttgaaaaacggcatcttggtgatatccagtcacgttttacttcattggatactatccgctcaacgttcactaatagtattgtcagtggcatcattgactcgatcatgacaattggtctgttaattatgttaaccctttacggcggctggctagtatgggtggtcgtaggatttacgctttgctacgccattatgcgcctggcgacataccgtttttaccgtcgggtagcagaagagcaagtcattaaaggagcccgctcgagctctcatttcatggagtcactttatggaatatcaacgattaaagctcttaatttaaaagagcgccgttcgcagcattggcttaatattaacattgatgcatgtaatgcaggaattaaacaaactcgctttgatatgatgttcagtggcataaacaccttcatatcatctatagatcaagttgctatcctatggttaggcgccattatggtgattgataacaacatgacgttaggtatgtttatggcgtttaactcttatcgtggccagttttctcaaagagcatctaatttgatcgatctctttatgcaactgcggatgttatcattacataacgagagactatctgagattgttttcagcgaacccgagaaagagctcccagcacgtcgagttttcgatgagaatagtggagtgaagctggagattaaaaatctcagttatcaatatgacccgttctcgcaacctattttttctaactttaacctgcaggttgagccaggagaatctattgcgcttgttggaccttcaggggtcggtaaaacgactttactgaaagtgatgtgtggtttgttatctccaacgtcaggtgaggtaattgccgataatcttgacatttataaaatagggcttaataactaccgactggggacagcatgtgtcctgcaagaagatcgtcttttttcagggtcaattagcgataatatcagcggatttgaagataatgcggatgaagaattaattgttgagtgtgctcgacgcagtaatattcatgatgaaattatgaaaatgccaatgggttatgaaacaatgataggtgagttagggctgggtatttcaggtgggcaaaaacaaagactcttaattgccagagcgctttaccgcaagccgagcattttgtttatggatgaagcaacaagtcatcttgatttgaagaatgagtctgccataaaccaatctattgccagtttaagtataactcgaatcattgtcgcgcatcgtccttcaacgatagcgtctgcagaccggataattgatctttctcaatatggaaagcaagcatcataa

SEQ ID NO: 265254 - DNA, 231 bp, Klebsiella pneumoniae; identical to SEQ ID NO: 136885

SEQ ID NO: 265255 - DNA, 216 bp, Klebsiella pneumoniae
atgcatgaacagaaggacaacaaacggcggttaggctttcttgttggtaaaggttctatacctgatagtgaacagctcgaagagatggatcaggaagtcctgaagctgttttatcctaaccaagagacacaagacacgatagaacgctcagaagcaggtacagacgttttcacagcttccggttctgatgacctgttcaaaaaactgaagctgtag

SEQ ID NO: 265256 - DNA, 1032 bp, Klebsiella pneumoniae
atgccgatcatagcaccaataccccgtggcgaacgacgcctgatgcagaaagctattcataaaacgcgcgataaaaatcatgcccgcagactcacggccatgctgatgcttcatcggggtgaacgggtcagcgatgttgccagaactctctgttgtgcccgttcatccgttggtcgctggattaactggtttacgcactcaggtattgaaggcctgaaatccttacccgcagggcgctcccgacgctggccttttgaacatatctgcaccctgttacgtgagctgataaagcattctcccggcgattttggttatcaacgttcacgctggagcaccgaattactggcaataaaaatcaatgagataaccggttgccagttacatgcaggaaccgttcgccgctggttgccatctgcggggcttgtatggcgcagggccgcgccaactctgcgtatccgtgacccacataaagatgaaaagatggcggtaatccacaaagcgctggatgaatgcagcgcagagcatccggtattttatgaagatgaagtggatatccaccttaatcctaaaatcggtgcggactggcagttgcgcggacagcagaaacgggtagtgactccggggcagaacgaaaaatactatctggccggcgcactgcacagtggcacgggtaaagtcagctacgtgggcggcaacagcaaaagttcagcgctgtttatcgctctgctgaagcacctgaaagccacttaccggcgggcgaaaacaatcacgctgatcgttgataactacattatccataaaagccgcgaaacacagcgctggttgaaagcaaatcccaagttcagggtaatttaccagccggtttactcgccgtgggtgaatcatgtggaacggctatggcaggcacttcatgacacgataacccgtaatcatcagtgccgctcaatgtggcagttactgaaaaaggtccgccattttatggaaaccgccagcccattccccggaggaaaacatagtcaggcaaaagtgtag

SEQ ID NO: 265257 - DNA, 342 bp, Klebsiella pneumoniae
atgtttcaggactgggaagggatcccgtctcagtttgcctctgaatcctctgttaagtgggcgtttatcgaggcattccggcaggcgcaggacgacgggcgcgcagccgcgtttgtggcctgggcggaatataccggcgagtgcgactatgacgcctttgatgatgcgtattgcggcgaggctgaaagcgaggaggattttgcttatggctttgtggaggatcacggcctgttaaacgaggtgcctgaatccctgcgcgtctatttcgattatgaggcttacgcgcgggatctgttcagcagcggctatgtcttccatgaaggctatgtattcagcaactga

SEQ ID NO: 265258 - DNA, 252 bp, Klebsiella pneumoniae
atggtttggccatctgggatgggctatggtacaggtaaactagttgaattgccgtttgataaagtccttaatccaatgaagccatggaatgactggatctggacagatgtcgggatgggaatatccaaaccgctgccgattaatccagtacctggtattgctggtaatgcctcgggtagtgcggtgacagagatcctcaatgatcaagcgggtaaaacaggtgtgaaattccaaaaagggaaccaaaaatga

SEQ ID NO: 265259 - DNA, 456 bp, Klebsiella pneumoniae
atgagcgatatcaccgaactggcgcagagcctgaaagcggcagcgatcgatgccaaagagctcgccattatcgcccggtattcgaaaggccgtgcggcggcggagaaattttacgctctggctaatcatgccaacatcatcgcgctggtagaggcgctggagaaggcgcagcagcggaacggcgagcttgagacctatagcaaaaccgcgatcgaatttagggaagcggcgagagatgaaaaccgacacctaaagttggaactggaaattgcagagaagcgcatcgccgagctggagtcccgcgccgtcaccgtgaagcttccacaacgacttcagccaggcgctgatggttgggatgactggtatgtgcacagcgacgatgaaggagaatatctcaagtttgatgatgtgctggcaatgctaaccgccgctggcatcaaggtggaggctgagtga

SEQ ID NO: 265260 - DNA, 864 bp, Klebsiella pneumoniae
atgaaatttgatgattcatttcctggcagggtagctatagccagatctgccattggcatgactcaagatgagttagcccaaaaagttggtgtggtaagacgtcagattgctgcttatgagggcggagaggctcggccaagagaaaaagcgcttcagaaccttgcagctgcattgggaacgacaactgagtggcttacgcaaggtaaaggatctggacctgatgtcagcagcgtcaaacgaactgtcactgtgcgtgaaattccagttcttacacacgtacaggcaaggttcgaatcgctggatgatctgctcaagacggcatccataaaagatttcatccccgcccctcaaggggcaaatgaatactgtttcgccgttgagattcagggcgattccatgtcttccggcgaagggataagcttcccgcctgggacaatagtaactttcgattcatcgcttgaggctgtttccggtgactttgtgatgtgcgttttgaacgatgattctgaagctgcattcaagcagctcatactggatcagcaccaaatctacctaaaacctctaaaccgcttatacccgatgtttcagcctgattttatcgagattgtgggtgttgctatacattctcagttccgcatcaatagagataaactcactcccccaatgagccatagtgaagtagagaaattggttgaagaagctcacgctgttagccatgatttctggtcaaactctaaatttgaccagaacactccttttgatgagcgcctgaaacgacttgatgagattgcagagcgccttgaaaagtatgcaaattacagcctttcgcagggtcgatataaaaattcgaatgacaaggattaa

SEQ ID NO: 265261 - DNA, 174 bp, Klebsiella pneumoniae
atggaacagaagaaaaaagatatcaagccaatctcttaccgcccaagcgctgaggtgcgtgaatttctggaaagcaatgctgtgaaaagctaccgctcaacacaagggatgatcgatttcttcatggcgaaggtgatggatatggagaagaaaggtgagattgttatcaactga

SEQ ID NO: 265262 - DNA, 126 bp, Klebsiella pneumoniae
atgtttgctgtcggcgatctggtacaaccccgagcgggcggaccaaaactgaaagtggtggaagtgcaaggggagcaactggtggtggtcaggccgcacaggagcagggagagcgctattcgctga

SEQ ID NO: 265263 - DNA, 240 bp, Klebsiella pneumoniae
atgaccgtattgcccaggcgctggccgggcgatgaccgtattgcccaggcgctggccgggctggcgccccgctataacgcctttttactggccaaccacggaccggtggttactggctcatcgctgcgcgaagccaccaacaataccgaggaactggaagagaccgcacggctgatatttaccctcggcaaccgcgagatccgctacctgaccgctgacgaagtgaaagaactgagataa

SEQ ID NO: 265264 - DNA, 1032 bp, Klebsiella pneumoniae
atgccgaaggactatattaatttcatgctgaccggtgccatggcgaccgattatagcgaagcgtcgtgctatttcctgatggacagcgaaacccgtagctggtcttcgcaagcctgcgaaacgtttggtctgcgggtcgatcagctcccggagcttaaactttccagcgacataatcggccaggtgacgcagcgcgcagccgacctgacgggcctgccggcgggtatcccggtggttgccgggacgtcggatatggcggcctctctgctgggctcgggtgtgtatgaaccggggatggcgtctgattcaaccggcacgtcgacgctgatgacggtggtgtcgccgcgtccgttacaccatccgctggttaataatctacatcttgccaacgcggcctggggcggatttacgatcctcgacgccggcggcgatgccgttcgctgggcgcggctggcacttgccgataaccagattacgcatccacagcttttacaggaagcggcggcggtgccggcgggggcagaagggctgctgtttcttccctatctgacgggagaacgtctggccgaacacacgaactcgcgggcacagttttttggcctgcagcgcaagcatcgccgcggtcatttattccgcgccgttcttgaaggggtggcctttgcgtcctggcgtaatcttcgccagctgcaaaagtgcgggcaatatccgcaacaaatgatcgcttccggtggcggcgcgcgcagcccgctgtggcttgaaatcaaagccgcggcgtacaatcttccgatattatctacgcgcaatcaggagaatggcgtcaccggatgcggtattatcgccggggttggcgcagggctgtacgccgattttgccagcggcgtgcggcaaacggtgcagttcgacaaagtgatctcaccggatccccgtctgcgggattattaccacgcctgcagcgagctttttgatacgctgtaccggcaatccgccgccttatacgacaggctggatgcgctcagcgtggggcgcgactga

SEQ ID NO: 265265 - DNA, 360 bp, Klebsiella pneumoniae
ttgaccgggcggttgctaaaccttcaggaagaggagcagcgatttggtctggcccacggtgaggctgcgcaaaatattaaccacggattgggcagtattgtgcgcgaggtgcttaactgtgcgtcgggtgaaattaaaggattgtatatgaccggtggtgacaccatggtcaatgtactaaaagagctgggcgccaccggaatagaaatgattgactatgtcatcccgcaaaccgatatggtgcggatcattggcggcgattatgccggcttaatttgcgtcgggaaaggagggctaaccggaccggaagatattattagcatcattgttgaccgcatttatcaggaagcacagcaataa

SEQ ID NO: 265266 - DNA, 573 bp, Klebsiella pneumoniae
atgtggttaggaataccttttctttatgtcaaagaaagattagcagatacagttactattgataagattccatcaataacagtggattcatcgttttcttgggaaacaataattgcggcttttataagtggcttagttccagctttaatttctctgtatgtcataaagaataataacgaatctataagatatcaacaaaaacaagaagataagaggcatttctctgcgcatatgcgagtagtaataagcgaatacgcatatcaattatcaaaagtaaaagagatacatgctgagtgcttacgttttagctcaatgttcagtagtgtcaaaacttctgagttggcagataaaatgtctgatgccttgttagagttagaaagatacaaagcaagtttattgatttctataccagaggatgatgctggtagaaaatttaaagaagaaataaatgaaatttcagagtccttatccgaacaaataaaatatgggttgaaaacaacaaaaatggaaaaagtttggaatgatgattatgatgcatttatatccaattctaatagatatttaaataagtaa

SEQ ID NO: 265267 - DNA, 159 bp, Klebsiella pneumoniae
atgagcgctgaaatctcgccgctgctggtccgcacgcccgccgccgcccgtccgctgtggctgcgcctgcgccgctcgtcgccctttacgctcacagtattaatgtgctgcatggcgctgctgtgggtcagcccgtttatctggatgctggcgacctag

SEQ ID NO: 265268 - DNA, 4914 bp, Klebsiella pneumoniae
atggcgctggtcggtattaataacgaaaacgaattttactccaaccactatctgggcgaagtctttaccagcgatatccgcgatgtactggaaccctggattgagcaggaaaatgccgctcgcgaagctgaacgcgctgcccgtgaacagggcaaagaggttgaggcaggctaccgcgcgccgtggaaccagcttaacagcctggcgacagagtttttccgcaaactcactgatcatgaaaaacagcgccagatcccgcagcgtcttgccgatcaacgcactcgctggcagccgctattaaaggcattgggttatgaactcaatccgcatattcagatgctggatgacgatacgcctttgccggtactggctcgttacaacagcaccgacggcagtccgtggctgtggattgtcgaagcacatgaccaggaagaaggaacgctggatccgctggcgttgtcactgctgaccgcgcagttcccggcagataccgataaacataagcgcgacagtctgcgtaaaaaagcgaacggcgaataccgcagctggcaggatctgctctccactgtggtctttacacaaaatgaaccgccgcgttttgtgctgctgctcggtaaccgccagctgttattgctggatcgtactaagtgggcgcaaaaccgtctgctgcgctttgactttgaagaaattttaagtcgtcgcgagatagataccctgaaagcgacgtcggtgttgttacacaaagactcgctgttacccggcagcggtgcgccatatctcgattcgctggatgacaattcgcacaaacatgcgtttggcgtgtcggaagatctgaaatatgccctgcgtgagagcattgagctgttgggtaatgaagcgatgcgttatctcatcgacaacgagctggcttattataccgggaaacgtgctattaacccggatgagttgagccgcgaatgcctgcggtatatgtatcgtctgttgttcctgttctatatcgaagcgcgcccggaactgggctatgcgccgatgaccgccaaaacctatctacagggctacagcctggaaacgctgcgcgatctggagatgatcccgctgaccagcgaagaagatcgcaatgggcgctacttccacgatagcctgaatatgctgttcaaactggtgcgtgacggctacagcggcggcgtgaaaatgcagagcgacctggagagcggcgatcggatcactattcacagccatcagttcagcgtgccgcgtctggaaagtcatctttttgaagcgaataacacccgtattcttaaccgtgtggtgttccgcaacgaaaccctgcaacaaattattcaggcgatgtcgttaagccgcccgggtaaaggacgttttaatcgtcgggggcgtatctcctatcgccaattgggtatcaaccagttaggtgcagtgtatgaagcgctgctctcttaccgagggttctttgccagtgatgacctctacgaggtcaaaaaagccggagaagagtttaacgagctggagacaggctacttcgtcagcaaagacgagatcggcaaataccacgacgacgagaaggtttacgaaaaagacggcagcctgcgtattcaccgtaaaggcagctttatctatcggatggccgggcgtgaccgcgaaaaatccgcttcttactacaccccggaagtgctgacccgctcgttagtcaaatatgccctgaaagagctgtttaaagagcaaattgatccgattaccgatccgcacgccaaagccgacgccatattaaacctcaccgtgtgcgaaccggcgatgggcagcgcagcattccttaacgaagccatcaaccagctggcggaagcttacctgttccacaaacagcaggcggaaggtcgccgtattcctcaggatcgctacacccaggagctgcaacgggtgaagatgtacattgccgacaacaacgtattcggcgtggacttaaacccggtggcggtggagctggcggaagtgtcgctgtggctgaacgccatcagcggcgatacatttgtaccgtggtttggctaccagctgtactgtggcaactcgttggtgggcgcacgccgtcaggtgttcaacaagagcgagctgacctacaaaaaagcgaaagatccgagctggcttaacagtgaaccggccgagctggcgatgaatacgccgcgcgaagagaagcagattttccacttcctgctgccggacagcggcatggccaattacagcgacaaaaccgttaagcagcgctatccggatgatttcaaagcgctggacagctggcgcaaagagtttaccaaaagctttgcactgcatgagattgccgatgtgcagcgcatcagcggcaaagtggaagcgctctggaacacgtttcgtcagcagctgaaagctgagcgccagaaaaccgccgacaattacccggtatggcctgcggaaaatacggctcatgtccgctcttctttaagcagtaaagatgaaaccttcagcggtcgcctcgaagataacagtacctatcagaaactacgttgggtgatggactactggtgtgcgctatggttttggccgatcgacaaagcggatgagttgccggatcgcggcacctggttgttcgagatggaaaccctgctcgacggtattgtcgtcacggaaagagtgatagaaagtacagaacaggctaccggcgatctgtttgccgacgagggcatggtgcgtgaagagtcttcgctgttttccggtgcaggccgcctgaaaactgaagtactgttccgtcatttgccgcgtctggcgattgttgatgcgctgaagaagcaacatcgtttcttccattgggatctggaattttgcgatctgttcgccgaacgcggcggctttgacctgatgctcggaaacccgccgtggttgaaagtggaatggcaggaagctggcgtgctgggcgactacgagccggagtttgtgttagggcgattgagtgcttcgaagttggcgacgttgcgtcatgaaaccttcaatcgaattccgcaactcgaaaatgcttggcgcagcgagtatgaaggttgtgaagggatgcaaaacttcctgaatgcgcagcagaactaccctgtactacgcggtgtgcagactaacctgtataaatgcttcctgccgcaggcatggcgcttaggggcgcagaaaggtgtggcaggtttcctgcacccggaagggatttatgacgacccgagaggcgggcaactgcgtgcggcgatatatccgaggttgagagcgcattttcaatttcagaatgaaagagctctgttcccgatcggtaaccgtaacaagtttagtattaacctgtatgcaactacatccgcgacaattgggtttagtaatatagcgaacctctttatgccacaaacgatcgatggctgttttatgccttcagataagatcgtaggtggcattaagaatgatcaggatgaatggaacctggaggggcatccggatcggttactgcacattgatgaacaattattagagctcttttcgcagctttatgatgaggaaggaacgccaggtttcgaagcccgcttgccagctttacatgcaaaacaattgattgacgttttgaggaagtttgtcaaccagcctaaacgtcttggtaatttgcaagggcaatatttgtctttggaaatgtggcatgaaacgaatcaacaaaaagacgacaccattgaacgcaatacgctgtttccaaaagatgcgtcacaatgggtattgtctggccctcacttttatgtgggaaatccgttatataatacgccgaaaatgatttgtgatactcataaagcatacgataacctcgatctgttaactctgcctgatgactatctgccgcgcactaactacattcctgcatgtgatgtacaagagtatgccaaacgtacgccacgcgttacgtggactgaaccaggtgaagatgagccgagaaaggtgacggattattatcgaattatacatcgtcgtatgctgagtcagtctggcgaacgcacattgatctcgtgtctgatgccgaaatttgcagcgaatattcatacatgcatttcgacttctttcattaaaaatgagttattaatcaaaacagcatatgttatgcagtcgttgccatttgatttttttgtaaagtcaactggtaaaggggattttactacaggatacatgaagtctattcctctaatagatagcgtacgccctgatattgagaagagaattaaagttttatttttgattctaaactgcgtttcacaaaattattcaactctctggaaagatgttttcgaagaagattttttaacattccgatggtctaaaaagacactgttgcttcagcccgatttcttcatcaacctgaccccggagtggcaacgcaattgtgcattacgctccgactacagccgccgtcaggcgctggtggaaatcgacgtgctggttgcgcaggcgctggggttaaccctcgaagaactgcttactatttaccgtgtccagttcccggtaatgcgccagtacgaagccgatacctggtatgatcaaaacggccgcgttatctttaccccaagtaaaggcctggtgggcgttggcctaccgcgtaccgcgcgtaaatccgacctgaaaaacggctttgtctttgatgtcgacagccctgaatggaccggcggcgactgcaccgatcaagctatcggctgggatgatgtcaagcatctgcaaaccggtaccgtcagcgtcacttttgatgattatacccgaagcgatgaaggcgagcgccgaaccgtcacctggcaggcaccttttatcaaacctgaccgtgaagacgactataaagtcgcctggtcattctttgcacaagataaggagagcgcctga

SEQ ID NO: 265269 - DNA, 192 bp, Klebsiella pneumoniae
atgggggtgctggctgttatattcagccagccagcgctctgtaatttcccgtacttcatgcagcgttctgaacagataaaaatccagtatttctgtccggtacgtccggttgaatcgttcgataaaggcccagcggaagcgaagctacaaaatgcgacatttgacgtctatcataacggcgggctctgttga

SEQ ID NO: 265270 - DNA, 741 bp, Klebsiella pneumoniae
atgatggaaggtgttctgcgtcactgtaccgacatggaaattaaccaccagtatgtggacagccacggacaaagtgaggtggcctttgcgttcagtgatgtgctggggttcgatctattgccgcgcctgaaagcgatcgcccgacagaaactgtatgtgtgtgaaaaggaagatacatcgttgtacccgcattttacgccgattttaacccgggggatcgactgggagcttattgcacaacagtatgacgagataatcaaatatacagcggcacttaaaaccggaacggcagaacccgaggccatattacgacgattcacccgcaataacattcagcatccaacctataaggcactcgcggagctgggcaaagcgattaagaccatcttcctctgccgttatttacacgatgagtcactgcgttgcgaaattaatgcgggtctcaacgtcgtggaaaactggaacagcgccaataattttattttttatggcgaacacggagaatttaccagcaaccggcctgcggatcaggaactgtcgatgctctctttgcacctgttgcaaatcagcctggtctatatcaataccctgttgattcaaaatgtgctgacagagccggcctggcagcagagaatgacagaagaagactggcgtggtctgaccccattgatataccaccatgttaatccgtatggacgtatcgagctgaacatggatcaacggctggcgctggcagcctga

SEQ ID NO: 265271 - DNA, 2451 bp, Klebsiella pneumoniae
atgagtattatatccaagctttttttaaaaattaggatcgccctcttcggagggcctgaccacgatattatttttgatacagatgatgagtacgatatcccgcacacgcctaacaaggatgtgcaaagctatcttgattatccaagcaagcctgcgggtataacactcttttcagagcgtgagattctatctgtacatgctaaccggttacaggaaattaatatgtatatcggtttgccaaattcagacctgagtgaggaggcctataccttcactaatctggtcattaagccattgatggaatatacacgctggatacatcttttacctgcgtctgaaaaccatcaccatgccggtacagggggcctgttaacgcacagtttagaaactgctttcctcgctttaaaatttgcgtacagcactgaattactccctattggtctgcaggatgaagaacagatccgaaaacgtcgttatctttatgcagcctttatttgtgggcttttacatgacgcagggaagatatttgatgtcgacgttatttcgtccacccctggcgtcaaaagcacatggcgtccactctcgtccagcctgatggactgggcaaagtccaaccgtattttttcctatgaagttatctggcggaaaaggcaggctaacgagcattccgtgcgggcacctgtattcctggaacgctgcttaaacgatacgtgccttaattatttgagcgacgtagtcaaagaacggttgtacgataaaatgctgtcgacattgggtaattatacaaccagtgatgattttatttctcgttgcatgagaacggccgactggcattccaccggaaccgataccagctaccggtatgataaacaatccggtattcgggcctctgatactgctgcacgagccatcgcgattctgaaagacaacatcagtactcttaatatcaatggtttcgactcatcgtcagtacgacatgacagaaactcaccgcctccggtacatattatgattatcggtggctctgtttacatcaacgaacatgcggcccttgatttcatcctgaatcagtttaaacatcttgggattaacttcccggatggcgatcttggccgcaaagcattaaccgaccttcttttaagtgggggctatatagagccatacggtgaacaacgggttgctcactttttccatcgcggtgactttacggaaaatgacatacaacgaatgtttgatgagggtatcaaaggcctgagctggttctctctcttaaaaataaaatggggtggttttctgtttaaatacgatattctgcccgaaagtacgccgggtattttcagtattaatgagactaatgactatgtttttgtcgaccgcaaggggaatgacacgctttatgtacgccctctttcgcatggtacaaaatcaatccgtcttggaataactcaaaccactgataacgcttcagtctcaacggctgacacacaacgtgcagcggaaagtaacagtacagtttcagatactgataatactgctgattctgaaaatgatgaggcgacttccggtgagaatcagcaggttcaggaaaacacaaataaaacatctcttagaacagatgcatctgaacctgagacacaagaacctgattctaaaaaacctgttaaaacccgccgtaaaaaaggtgaagtgagtcctgatgagtacatttccagactccagcatcagttcaaaaataatgccattaatgctcatgaactggctttaatcgatggggtcctgtatgtatcagaaacacatattcgctccatagcaccgcttgaagagccgcgcttaatggagaccggtctttttgttctttctttacggtctggaagcctcgatgaagaattcagcattccgtgcaatgacgggaaacggtatgttcagttaactgacgaagtatctcttgtccagttacgtcatcaacctgatattagagaggttgagatgctgccattgctttctccagatttatttggtggggttaagactgatgatgaaggggtgtctttcacttttccgccgccactgactaaggtgaaccctgagccactccctccggaacgttatgaagagcaaacgcctgaactgaatcgaactgaacatgaaccgactgacataccatcagcggactataccgatgcgcaggaagatgatgttgaacaattctgggcggattacgcttcatattcatacggtgatgactgtattaacagtgaaacaggcccgataagtcaaacctgcgagaacgctgatgttgatgttgatgtagcacaggaaaaaaagtcactttcagagcgtacaccggataatagtacctctgttcacggaaaacccccggcagaggtggaggatgattccgagctaacggaagaggaagcgcaagaggaagattctagactggccccctga

SEQ ID NO: 265272 - DNA, 504 bp, Klebsiella pneumoniae
atgaaactaggtgtatcttcggaccggatttacctcgataaagggctgaccggctcaaaccggcaacggcccggacttgatcaggcgctggccgctgtgcgcagcggtgatacgctggttgttcccaagcttgaccggctggcgcggtcagttcctgacgcacgagagatagcggatgcactacagtccagaggcgtgaagctggcgctgggagccagcctctacgatccggcagatcctatggggaaaatgttttttaacgtgctggccacgtttgccgaatttgaaggcgacctgatacgcctgcggactcgtgaaggcatggcgattgcacgagcgaaaggaaaattgaggggaaagcagcctaagctgtctgaaaagcagcaaaaagagctatgccgtatgcgggaaaccggccagtactcgattagcgagctggctgaattgtttgcggtatccagaccaacaatctaccgcactctttcacgccataaacaggactga

SEQ ID NO: 265273 - DNA, 2127 bp, Klebsiella pneumoniae
atgacaactttacgtgtttttcgcaaaacaacacctttggtttacgcaattcgcctgagcctgctgccgctggccgggttatcgttatccgccttcgcaacgcaggttgatatcgcaccgggttcgctcgacaaagaagatgtcctgaccgtggtgggcgactggctaggggatgcgcgcgaaaacgacgtcttcgaacatgctggcgcgcgtgacgttatccgccgtgaggattccgccaaaaccggcgcgacgaccatgcgcgatgtgctgaatcgcatccctggtgtcactgccccggaaaacaacggcaccggcagccacgatctggcgatgaactttggtattcgcggcctgactccgcgccttgccagccgttcaaccgtactgatggacggtattcccgtaccgtttgccccttacggccagccacagctttcactggcgcctgtttcactcgggaatatggacgccatcgacgtggtacgcggcggtggtgcggtgcgttacgggccgcagagcgtgggcggtgtggtgaactttgtcacccgcaccattccgcaagacttcggcatcgaagccggcgtggaaggccagctcagcccgacgtcctcacaaaataacccaaaagagacgcacaatctgatggtgggcggcacggcggataacggttttggtaccgccctgctttactccggcactcgcggcagcgactggcgcgagcacagcgcaacgcgcatcgacgacctgatgctgaaaagcaaatatgcgccgaacgaggtgcataccttcaacagcctgctgcaatactacgacggtgaagccgacatgcccggcggcctgtctcgcgcggattacaacgccgaccgctggctgtccacgcgccattacgatcgtttctgggggcgtcgcaagctggcaagcctcggctatcagttccagccggacagccagcataaattcaatattcagggcttctacaccgaaaccctgcgcagcggctacctagaacagggcaaatacatcaccctttcaccgcgtaactactgggtacgcggcattgaaccgcgctacagccagagctttatggtcggcccgagcgcacacgaggtgggcgtcggttaccggtatgtgaatgaatccacgcacgaaatgcgttactacaccgccaccagcagcgggcagctaccgtccagctcaagcccgtacaatcgcgacacccgttccggtaccgaagcgcatgcttggtatctggatgacaaaatcgacattggcaactggtcgatcaccctaggtatgcgctttgaacatatcgagtcataccagaacaacgccatcaaaggcacgcataaggaagtgagctacaacgccccacttccggcgttaaacgttctctatcacctcactgacagctggaatctttatgcaaacaccgaaggctcgttcggcaccgtacagtacagccaaattggcaaggctgtgcaaagcggcaatgtggaaccggaaaaagcacgaacttgggagctcggaacccgatatgacgatggcgcgctgacggcagaaatggggctgttcctgattaactttaataatcagtaccactccaaccagaccaacgacaccgtgaccgcacggggtaaaacgcgccataccgggctggaaaccctggtccgctatgacctcggcacgctgacgcccacgctcgataacgtctccgtctatgcaagctatgcgtacgtaaatgccgagatccgcgagaaaggcgacacctatggcaaccaagtaccgttctcgccgaaacacaaaggcacgctgggcgtggattacaagctaggcagttggacgttcaacctgaacagcgatttccagtccagccagtttgcggataacgccaacactgttaaagagagcgccgatggcagtaccggccgcatccccggattcatgctctggggcgcgagcgtggcgtatgactttggtccgcagatggcagacctgaaccttgcgttcggcgtgaaaaatatcttcgaccaggattatttcatccgctcttacgacgacaacaacaaaggcatctacgcaggtcagccgcgcacgctgtatatgcagggggcgttgaagttctaa

SEQ ID NO: 265274 - DNA, 711 bp, Klebsiella pneumoniae
atgctgttctggaaaaaaatgccttcattatggataggaaaccagatcgctgaattcagcgatctggatacagcaaaggctatagcagcattaaaaatttatttaactttttgcttattttgcaaagaatctgattcggggtgtagaacagtcaagctaacctttagcgatatttgtgagactgcgtctatgagccgttcgttagttaacgaagggcttaaaattctatatgcaaaaaaattaatcaaaaatgtttcgcagactgaacgtaaaaaaatttatacggtagacgtactcggcccgcatgaggatgggtggtgcaagcttccactgaaaggagtagtcggtgaagataataaaataagtgcatttcagtccatgcacaacagatacccttttgagttgctagccttacaaacttacatgtatcttctttacgctcgcgataatcgtaatgactacacattggctagaaaaaaaacaatttgtacaaagctgaagtgcaaattaactgacctaaataaagccattacatatctgattcatattggtttacttgatagagttgtaaaaaaagctatcgtagataagccattagatttatttcatgactcctattatttctatatgaaaacaggtagtgagagagctttaacctaccggaagatacctacctcactagttgttgctgaagaagatcttccgttttga

SEQ ID NO: 265275 - DNA, 1521 bp, Klebsiella pneumoniae
atggcgttcgattggggatactttttttcattgtttagcattggggcattctggcaggcgtgcgtgaccgtcatcgtaatcagcaccttgtcctgggggatcggcctggtggtcggttttctgttagcctgcgcgaagctctcggcgccgcgctgggtcaagatccccgtcgaactctatatctggttttttcgcagcgtgccgctgatggtgctgctggtgtttgtctacaacctgccgcagctgtttccggtgacccagccgctgctcggggtgccgtttatcgccgggctggtgtcgatgaccgtcaccgaggcggcctatatggcggagatccaccgcggcgggctgctgtcggtggccaaggggcagagcgaggcaggccatgcgctgagcttcagctttatcggcatccagcggctgatcgtgatccctcaggcgtttcgcatctcgctaccgacgctgatcaatgaatacatcaccatcattaagctgagctcgattctgtcggtggtctccttacccgagctgctgctcaccggccagcgcttgtatgcgcagaatttccttgtgatggagaccctgctggcggtagcggtgtactacgtgatggtggttaccgtcttcacctggctgttccgggcgctggaaaatcgtctcgatattcagcgtaagcgtccgcaaaccctcagcgaggcggaatgccaggcgctgcgccagagcctgccggcgctgagcgaagagagcaacaccccggccgtcaacggcgcgccgccggcgctcgatctgcggggcattcacaaatcctggggtcagcatgaggtgctgaaaggcatcgatctgcaggtggagaacggggaggtgatcagcatcatcggcccgtccggctccggcaaaaccaccctgatccgcaccatcaacgccctcgaaagccttgatggcggggagatcattctctacggcgaggactatcttaagggcggagccatcgtcgacaaacgccagatgcgcgccggggtacggcgcatcggcatggtcttccagagcttcaacctgttcccccaccgcacggtgctcgacaacgtgatgctggccccgcgctatcaccagctgctggaccagccggtcgcccgcgagcaggccctggcgctgctcgaccgcgtcggcctgctggcccatgcccacaagtaccccggacagctctccggcggccagcagcagcgcgtggcgatcgcccgggcgctggcgctgaagccggacattatgctgtttgacgaaccgacctcggcgctggatccggagctggtaggcgaagtgctgaaggtcattcagtcgctggcccgcgaaggcatgaccatgctgattgtcactcacgagatggacttcgccctgtcgatttccgaccgcgtggtgctgatggagaacggcgtggtgcaggccgatatcgccccgcaggtgatccgcagcccgctggaggcgccttctctgcaacgaatccgtgaatttatgggagtacgctaa

SEQ ID NO: 265276 - DNA, 954 bp, Klebsiella pneumoniae
ttgcagcatattaatctcagcattgagcgaggcgatatttttggcattattggctacagcggggcaggaaaaagcaccttattacggctgattaatcgtctggaaacacctggcgagggcgaggtactgttaaacggcgagccgctacaggactgcagcggccagcgcctgcaggccatcaaaaaagatatcggcatgatctttcagaattttaatctgctgaattcgaaaaccgtttttcataacatcgccatcccgcttattttacaggggcgcgacaaggcctttatccaggcgcgggtggcggaactgctggcgttcgtcgatctgagcgacaaaatccacagctaccctaatgagctgtcgggcggacaaaagcagcgggtcggtattgcccgggcgctggccaccaacccgtcggtccttctgtgcgatgaagccacctcggcgctcgacccccacactacggtgcagatcttactgcttttgcaggagattaatcgtcggtatggcatcaccatcgtactgatcacccatgagatgtcggtgatccagaaaatctgtcacaaggtggcggtgatgcaggcgggccgtatcgttgaacagggggcggtttttgatctctttgctcagccgcagcatccggtcactgccagtttcgtgcagtcggtggtgcacgaccgcctgccgcagcgggtggcgtcgttcctgcagcgcgataacggcgcccgggctttacgcctcgaatttgtcggtgcgacggcgcagcagccgattattaaccacctgatccgcgagtatgctgtcgaggtgaatatcctgtttgccagcatgtctgaagttcagggccggattctgggatttatgattgtgcagctcctcggcgagcctgacgaaaccgaacgcgccatcacccatctggtcgatgcaggagtgaaaatcacccatgtttga

SEQ ID NO: 265277 - DNA, 1164 bp, Klebsiella pneumoniae; identical to SEQ ID NO: 199886

SEQ ID NO: 265278 - DNA, 1500 bp, Klebsiella pneumoniae
atggcgatgtatgaagtcggtaccgtcacgggtgccgcgtcgcaggcacgggtgacaggtgcgacaacaaaatggtcacaggaggcgctggggatacagcccgggtcgattctggtggtctaccgcagcggtagtgctgacctgtatgcgatcaaatccgtggacagcgacacgcaactgacgctgacccggaatatcaccaccgcattttccggcgcctcttacggcattattaccgctgaaaccgccagcacctcgtcgtttgctaaccagctggccagcgcgtttgcattctggcgtagtgtggtggagggctggtcgatggccctgaccggcagcggcgatatcaccctgactgacccgatcacaggaaagcaggtgaccgtgccggcgatagccgggatggcgaaggcatcagatcttaacgcgctggcaaaactcaccggaggaaacaaactcgacggctcgcaggttataaccagcgataatgccggttttattctcggtaagaactcagatctggctctgctcaaaaaacaggggcaaggcgggacaattgccgttggctcgggaacaccgttcagggttcagcgttcaagagcgaccactgtatcaccggcagacacctttgatgacatcctcgttattgatgccaataaccaaacgacactgcctggcgcgctgtctgccggcggcaatatcgataacacgtcgaagggtaaagtgttgacgcaggcgattgagctctcatttagcacgccatacatcgactttcattttaactacagcaccgacgacttcaccgggcggattatggccactgccgccgatcaaattagtgtgcaaggtagtcattggcgagttgacagggatcttcgtgttggtggcatggcagatattggaggctggacgcaatgccgcgacgacctttcggccaacaaaacagactttggatcccctgctattggttcgttggtttcaggcggaaggattcgatctcgaatgctcgggcgcggcggtaacgttgacacctccggggcgtggggcggtttctatcttgaagagtacgtgggaaccgaacacaggattgtcatgtatatggacggcttcgggagaacggacgcatggtcattccgcgcaggggggacaatctctacacctaaaggcgacgtcctgaccactggttccgacgtgcgcctgaaaacagacttcacacaagcgtctgaaaacgcctcagagcgcattgagcgcttaggggtgtgtgagtaccggatgaagggggaaacgcgccggaggcgtggttttatcgctcagcaggctgaaaaagctgatgatctgtatactttcctcggcatcgagcaggagattgatggcgaaaaattcaaggtgatgaatgtggattacacggcaatcattgctgacctggttacggtggcgcagggtttactggttaaaaatcaggaactggaaaggcgtatatctgtactggaggggatctga

SEQ ID NO: 265279 - DNA, 612 bp, Klebsiella pneumoniae; identical to SEQ ID NO: 180566

SEQ ID NO: 265280 - DNA, 711 bp, Klebsiella pneumoniae
atgcgtcagaaaacgattaaggccatccaggaacatgcggccgcagaatatccgcgcgaggcctgcggcctcgtcgcccagaggggccgagcggagcgttatttcccctgccggaacctggccacagagtcgaaagataattttgtgctggcgccggaggattatgcggaggttgaggaatggggaacgatcaccggtattgttcacagccatcctgatgccaccacccagccgagcgaactggataaagcgcaatgcgacgcgacccttctcccctggcatattatcagctggccagaaggcgatctccgtaccatccacccgcgtggtgagttgccgctcctcgagcgaccattcgtgctgggccactacgattgctggggcctggtgatgagctattttcggcaaacccacggcatcgagctgcacgattaccgcgtcgattatccgtggtgggaaaaggagtatccggacaatttttatcaggactgctggtatgaatgcgggttccgtgagtttgatggtccaccgcaaccgggtgatatggtgatcatgcaggtgcaggcggataagtggaaccacgccgggattctgctggaagggaacctgctgctgcatcacttgtatggccatctcagcaagcgcgtgccgtatggtgggtactggatggaaaggacgatgaaggtcgttcggtataagtctctatgttaa

SEQ ID NO: 265281 - DNA, 1287 bp, Klebsiella pneumoniae; identical to SEQ ID NO: 180579

SEQ ID NO: 265282 - DNA, 498 bp, Klebsiella pneumoniae; identical to SEQ ID NO: 236291

SEQ ID NO: 265283 - DNA, 567 bp, Klebsiella pneumoniae
atgcaatcattcgttttaatgggattagaaagtgcaggaaaatctaccctgtttaatatcctgacggaaagtgctgccagtgatgagcgtaatttcaggggatcgaccgttgtatgtcgggaaggtctcattaatgatgcagggatctgcctggttgatacgccaggcatacgttttcagagcgacagtgaaaccacaaaactcgcccttgatgcgctaaatcagcatgatggcattctggtggttctgcgggccacgcacgctcagcaggagtggcaaacgctctgtcacctcataccgccacaggcaaaacacgttgttatactcctgacctttgctgataagatcagaaagggccttctggaagtgactgaatacctgagtgaaacatcaggtgcgccggtactggcagtcaatgcccgggaagctggcagcaatgttcgccagggaatagtgcagttgctgttgcaggataaacctgcaccctccgctgtctctttaccccgtcaaaagataccggtaattaatctgctggctgaatttcctcaacaaacgatatttgggtga

SEQ ID NO: 265284 - DNA, 768 bp, Klebsiella pneumoniae
atgctgggctcgtcaggatcaaactgcactatgaggcggcggttcataccgcgccaagggaacgcccgcctgggacgtcgcgcggatcgaccggacattcgcggagaccttcgtcctgagatccgagctcctagtcgcgagttgcagcgacggcatcgtcggctgttgcaccttgtcggccgaggatcccgagttctggcccgacgccctcaagggggaggccgcatatctgcacaagctcgcggtgcgacggacacatgcgggccggggtgtcagctccgcgctgatcgaggcttgccgccatgccgcgcgaacgcaggggtgcgccaagctgcggctcgactgccacccgaacctgcgtggcctatacgagcggctcggattcacccacgtcgacactttcaatcccggctgggatccaaccttcatcgcagaacgcctagaactcgaaatctaacgtccgttcgggcatcgaggtccatgtcggggtgggacgggcccgtggcttcaagatcacttgcagtccgaccgcgatgtcttggttgcgcgagaggttgtcgatatcctccacttccatcatcaaccctggataatgccgccgccgtcatcgccgccgacgcccgtgccgggcttttcgggcctgtcaggcttgctcggccttcagcctgcctgggcgagatctccggcggacggattaacggcggagcttcgccgcctttcgtgcgtgtgaaggccgaagatagttctctcaaaaacatccgtttatga

SEQ ID NO: 265285 - DNA, 165 bp, Klebsiella pneumoniae; identical to SEQ ID NO: 248560

SEQ ID NO: 265286 - DNA, 837 bp, Klebsiella pneumoniae
atggagattattttttaccatccgacctttgatacccaatactggatctgtgagctggaaaagcagttacccggcgcgcgggtgcgcgagtggaaagcaggcgataaccggtcggcggactatgccctggtctggcatccgccggtagagatgctgcagggccgggcgctgaaggccgtgttcgccctcggggcaggggtggactctattctcagcaagctgcgcgaccatccggatatgctgccgctgtcgattccgctgtttcgtctcgaagataccggtatgggacggcagatgcaggagtatgccgtgagccaggtgctccactggttccgccgctttgatgactatcaggcgctgaagctggtttcccgctggcagccgctgccagagtaccgtgccgacgaattcaccgtcgggattatgggcgccggcgtgctgggggcgaaggttgcggaaagtctgcaaccctgggggttcccgcttcgcgtctggagccgtagccgcaaatcctggccgcaggtgcagagcttcgccggccaggccgagctgggcgaattcctgcagggcactcgcgtactgatcaacctgctgccgaataccgccgaaaccgccggcattattaaccagacgctgctggcgcagttgcctgatgagagctatgtcctcaaccttgctcgcggcgtgcatgtcgttgaagaggatctgctggcggcgctgaacagcggtaagctcaaaggggcgatgctcgatgtcttcagtcgcgaaccgctgccgcaggagagcccgctatgggcgcatccgcgggtggccatgacccccatgtggcggcagtga

SEQ ID NO: 265287 - DNA, 150 bp, Klebsiella pneumoniae
atgctgaaacaccatgccgacgtgcgagcgcagtttagccaggttggtctttttatcgttaaccacggtgccatcgacaataatctgcccctgctgtaccggctcaaggccgttcacagtcttaatcagcgtggatttaccggagcctga

SEQ ID NO: 265288 - DNA, 1065 bp, Klebsiella pneumoniae
atgaaaaagatcgcactctctctgatgacgctgggtctgctgcagtcgacggcggcgctggccaccgccccgacgccggtgccggcggcgattgccgaacacaacggcccgatccgcattgccgtgatccgcaacctcgggtctgacgataacactacccagtttgtcgccggggcgctgcaggaaggcaaaaagctcggtttcaaaatcagcaccttcctgagcaacggcgatgacgccaaattccaggacttcgtcaaccaggccatcagccagaaatacgatggcattattctctcccaggggcgtgacccgtattccaccgccctggtgaagaaggcggtggacgccgggatcaaagtggcggtgttcgataccgcggtaagcggtgagatccccggggtgacggtcagccagcaggatgacgcctcactgaccgagctctcttttggccagctggtgaaagatttcaacggcaaggccaacatcgtcaagctgtgggtggcgggcttcccgccgatggagcgccgtcaggcggcttaccagacgctgctgaagcaaaatccggggattaaagagctggagtcgatcggcgccgtgtcatccgatgtgcagggcgacactgccaacaaggtgggggcgatcctagccaagtatccgaaagggaaaattgacgcgatctggggcacctgggatgcctttagccagggagcctataaagcgctgaaagagaacggccgcaccgagatcaaactctacagcattgatatttccaaccaggatttgcagctgatgcgcgaagccggcagcccgtggaaggtgagcgtggcggtggatccgaagcttatcggcgcgaccaacgtgcggctgatcgccaacaagatcgccggcgagccgacgccagccacctacgacttcaaggcggcagcgattccccaggcgctgctggcggcccagccgggagcggtaaacgtggcgtcgctggggaaaattatccctggctggggccagaccgaagactttatcgcgccgtggttcgcgacgctggaagcgaagaacaaataa

SEQ ID NO: 265289 - DNA, 2964 bp, Klebsiella pneumoniae; identical to SEQ ID NO: 202623

SEQ ID NO: 265290 - DNA, 1197 bp, Klebsiella pneumoniae
gtgacgctgaagcagaattcttcactggggattgtgtttatccttggcctgctggccatgctgatgccgctgtctattgatatgtatcttccggccctgccggtgattgccgcccagtataacgtcccggacggcagcgcgcagatgacgctcagcacctatatcctcggctttgcgctgggtcagctgctgtacggcccgatggcggacagccttggccgcaagccggtgatcctcggcgggacgctggtcttcgcggcggcggcggtagcctgcgccctgtcgcaaaccgtcgatatgctgattgtcatgcgtttcttccacggactggcagccgcggcggccagcgtggtgattaacgccctgatgcgcgacatctatccgaaagatgagttttcgcgcatgatgtcgtttgtcatgctggtcacgaccattgcgccgctggtggcgccgatggtcggcggggcggtgttggtctggttcagctggcatgccatcttttggatcctcgccctggtggccctgctggcctcgctgatgatcggcctgtttatccgcgaaacgctgccggctgaaaggcgtcagccgttccatctgcgcaccacgctgggtaactttgccactctgttccgccacaagcgggtactgagctatatgctggcgagcggctttagcttcgcgggcatgttctctttccttagcgccggtccctttgtctacatcaatataaaccacgtcgcgcctcagcactttggctactattttgcgctgaacatcgtttttctgtttctgatgaccatgttcaacagccggtttgtgcggcgggtaggggcgttgcgtatgttccgcgccgggctgtggatccagtttgccatggcggtgtggatggtggtctgcgcgctgctggatgtcggcttctggtcactggtgatcggcgtagcggcctttgtcggctgcgtatccatggtgtcgtctaacgccatggcggtgatcctcgatgagtttccgcatatggcaggcactgcttcgtcgctggcggggactttccgtttcggtatcggggcgattatcggcgcgctgctgtcgatggcgacgtttaccaacgcctggccgatgctgatctctattgccttctgcgcaacctgctctattttcttctcgctttacgcatcccggcggcgaaaaatcgcacgctag

SEQ ID NO: 265291 - DNA, 537 bp, Klebsiella pneumoniae
atggccaataatgatattacttacgtccgccctgaggtcagggcggcgatgcccgtgtggaaaaaaattcgtgacgtgtgcaaaggggctgatgctgtaaaggccgccgggaatgaatacctcccttttctggatccctccgataagtctgctcgcaataaaaagcgcaatgccgattacattcagcgcgccgttttctacgcgataacgggcaatacaaaagtgggtttgctggggctggcattccgaaaagaccctaccatgaccgcgccggataagctgaattatcttcgtgataacgccgatggtgctggtgccagtatctatcagcagtcccagcaggttacagaaaatattctggaagccgcgcgcgaggggctgtatacggattatgcagctgggactgatgaggcgattatccttcgctatcaggcggagaacatcattaactggcgtaccaaacgtatcaatggacgtgatcaactggtgctggtggttttacgcgaatgcatggaaaaggaagatggttttgcgtaa

SEQ ID NO: 265292 - DNA, 879 bp, Klebsiella pneumoniae
atgacccttgttctcagcgcttttgccatgagcgcttacgcggcgctggatctgcgcgccaatgagcagccattgccggtcacccgcgacccgcaggcgatagcgaaaattccgccgggctatcgcttcgtcgagccggggacgctaacggtggcgatctcggcgctcaattcgccgccgctggccctgctggccagcgacaaccgcacgcggatcggtagcgacccggatatagcccgcctgctggccggaagccttggcctgaagctcaggctggtgcccaccgcgtgggaggactggccgctgggcatcgcctccggccgctacgatgtggcgctgatcaatatcgcggtgaccgagaagcgcaaagagaagttcgattttgcgacttaccgggtggactccctggccttctcggtgaaatccaccagcgatatcgtcgcggtaaacggacccgccgatctcgcggggcgcaaagtgatcgtcgggtccggcaccaatcaggagcggatcctgctgggctggaacgaggacaaccgcgccgccggacggccgcaggcccagccggtctacctgaccgatgatgcctccggcaatctctatatccagtccgggcgggcggatatctttttcggcccgcagtcggtggcagcctataaagcggcgcttaacggccagacccgggtggtgggcctggggccgaaaaaagcgtgggtggcgacaaccaccaaaaaaggcaacggcctggtctttgccctgcaggcagccctcgacggggcgattgcccgcggtgaatatcagcaggtgctggcgcgttggggggagcagggcgaagcggtggcgcagtcggtggtcaacccgccggggataacctactaa

SEQ ID NO: 265293 - DNA, 396 bp, Klebsiella pneumoniae
atgaggacccggcatctgatggcgctgtttacaggagtgctgatactggccatcatcctgcccatttcactcagcatctggcaggcggcgcggcaggccaaaatgcagttctatcgtgaactggatgactattccaaccgtatcgtcgttcggacgctgcaggttgccgaccaggcccgggaagcgttacgagaggctgacgcacacaccgccgcctcctgtagccctgaacatctgcttacgctccgccgcatcgcctatacccatcgctacattcaggaagtgctctggctgcgtgattccgtgccgcaatgctcctccctggaagaccatagcgtcgcggtcaccttccccccgccggaccacattgccccgacggctatcgcacctggctga

SEQ ID NO: 265294 - DNA, 765 bp, Klebsiella pneumoniae
atggcgcttgtcgatctcatcaaaccaccagcggaaggtatcgttcttggtcccttcggccagatgcagcatgattttcacctgctcgccctggcgcaggttctccttcaggccagcgatagccgcgttcagcaggccagccagccggtcgaactctccgccgccctgcccccagcttttcccttccggccacaggatgccgccgttgatttcgttgccgatctgcaccatatccggcagcacgcccgcctgcttaaagcgggcgatggtatcgcgggtatagtcatgaatcgccgttttcagctgcgggtaatccagcttttcccaggctttcggcttgaactgcttgccgggatcggtccagaaatcgctgtagtgaaaatcaagcagcagcttcatcccctgggctttcgcccgtttcgccagcgccagggtggtggccagatcattgttacctccgccatagtcctcgctgctcgccgattgcggatccacccacagacggaggcggacatagttgacgccgttctctttcagaatagcgatcggatccttgcgctgattattctgatcgtagaacgtcgccccgtgcttttcggcgtccagcagcgtggagatatccgctcctttgataaagtccgccggcatgccctgaaacgcgcgggttgcaagcgcgtccgcggccagagaagaggtggagaaactgcatgccagacaaaccgcaagccatgcgggtgtgaatcttttcatgtgcttatcctttag

SEQ ID NO: 265295 - DNA, 192 bp, Klebsiella pneumoniae; identical to SEQ ID NO: 121260

SEQ ID NO: 265296 - DNA, 642 bp, Klebsiella pneumoniae; identical to SEQ ID NO: 182567

SEQ ID NO: 265297 - DNA, 426 bp, Klebsiella pneumoniae
atgaataagacctggcttttcaccaccctcaccctggcgctggtcgccgccgcgccggcccacgccattagcgcgaaataccgggaacagcttgaacgttccggctgcacgcagttgaccgacgggatcacctgcgatattcataaaaccaaagccgagaatgccgccgccgcgcagcaggccgacagcggcttcggcccctgggtgggcacctggtatgtttatacggagtatggcgataaaattgatgagattaccgtcaccgctaaaacggtgaaaacccgcggccatctggtcgaggaggcgaaagccagccagggtaaactgaccttccgggtgaaaagctcagcctttacgctgaacgacgcctttaacggcgtatgggcaaacggcagccagcgcggcacgttgcaaaaagtcctgtaa

SEQ ID NO: 265298 - DNA, 963 bp, Klebsiella pneumoniae
atgacccatttaacgcgcgtcagcgcaatcaactggaaccgcattgatgacgataaagatcttgaggtctggaaccgtctcaccagcaacttctggctgccggagaaagtgccgctgtcgaacgacattcccgcctggcaaaccctcagcgcggcggagcagcagttgaccattcgcgtctttaccggattgaccctgcttgacaccattcagaacaccgtcggcgccccggcgctaatggcggacgccttaaccccgcatgaggaggcggtgctgtcgaacatcagctttatggaggcggttcatgcccgctcttacagctccatcttttccacgctgtgccacagcaaggaagtggatgccgccttcgcctggagcgaaagctgtgctcccctgcagcgcaaggcgcagctgatgctgggttactatcaggccgacgagccgctgaagaaaaaaatcgccagcgtgttcctcgaatcctttctcttctactccggcttctggctgccgatgtacttctccagccggggaaagctgaccaacactgcggatctgatccgcctgatcattcgcgatgaagcggtgcatggctattacatcggctacaagtaccagaaaggactggagatcgtcagccccggcaagcgcgaagaattgaaaaatttcgccctcgatctgctgatggatctttacgacaacgaactggcctacagccgggagctgtacggcgagagcggctggttcgacgacgtcagcgctttcctgtgctacaacgccaacaaagcgctgatgaacctcggctacgaggcgctgttcccggcggagatggcggcggtcaatccggcaatcctcgcagcgctgtcgcccaacgccgacgaaaaccatgactttttctccggttccggctcctcctacgtgataggaaaaatggaagagaccgccgacgacgattgggacttttaa

SEQ ID NO: 265299 - DNA, 1023 bp, Klebsiella pneumoniae; identical to SEQ ID NO: 212089

SEQ ID NO: 265300 - DNA, 1296 bp, Klebsiella pneumoniae
atgcattcaacaacctcacagatgagtacccgtgaccggatcggcgccattctgcgcgtcacgtccggtaactttctcgaacagttcgacttttttctgttcgggttttatgccacctacatcgcccataccttttttccggcgagcagtgaattcgcctcgctgatgatgaccttcgcagtctttggcgccggctttttgatgcgccccatcggcgctatcgtacttggcgcctatatcgacaaggtggggcggcgcaaggggctgatcgtcaccctgtcgatcatggccaccggcaccttcctgatcgtgctgatcccctcttatcagaccattggcctgtgggcgccgctgctggtgctgatcggccgtctgctgcagggcttttccgcaggcgccgagctgggcggggtgtcggtctatctggccgagatcgccacctcgggccgcaaaggcttttacaccagctggcagtcgggcagtcagcaggttgccatcatggtggcagccgcgatgggctttgccctcaacgcggtactggagccgagcgctatcagcgactggggctggcgtattccgttccttttcggctgcctgattgttccgttcatttttatcctgcgccgtaagctggaggagacccaggagtttactgcccgccgccatcatctggcgatgcgccaggtattcgccaccctgctggcgaactggcaggtggttatcgccgggatgatgatggtggcgatgaccaccaccgcgttctacctgatcaccgtctatgccccgacctttggtaaaaaggtgctgatgctcagcgcctctgacagcctgctggtcacgctgctggtggcgatttccaacttcttctggctgccggtgggcggggcgctgtccgaccgctttggccgccggtcggtgctgatcgccatgaccctgctggcgctggctaccgcctggcctgcgctgaccatgctggcgaacgccccgagctttttgatgatgctgagcgtgctgctgtggctgtcgtttatctacggcatgtacaacggggcgatgatcccggcgctgaccgaaattatgcccgccgaagtgcgcgtggcaggtttctcgctggcctacagcctggcgaccgcggtgtttggcggcttcacgccggtgatttccacagcgctgattgagtataccggtgataaagcgtctcccggctactggatgagctttgccgccatctgcggcctgctggccacttgctacctctatcgccgtagcgccgttgcgctgcagacgtcacgttaa

SEQ ID NO: 265301 - DNA, 807 bp, Klebsiella pneumoniae
atgcgtaaaacgacaggaaccctgctcgccacgctgctgctggccgccaccggcggcagcgcgttgtccgctgaggtcaccgtgatgatctccggcggcttcaaagcggcgctggaaaagctggccccggcgtgggaaaaacaaaccggcaaccacctcgtggtgatccctggcccgtcgatgggaaaaacgccgcaggcgatccctaaccgtctggcgcgcggcgaacacgcggacgtggtgatcatggtcggggacgcgctgaccagcctcgagaaagcgggccgtacgcaaccggattcgcgccgggagctggccgactcgccgatcggcgtggtggtgaaggcgggggcgccgctgccggctatccacaacgcagaccagctgcgtgcgacgctgctggcggcgccatcggtcgcgtactccgacagcgccagcggacgctatgtcagctcgacgctgttccacaccctgggcattgatgacgcgatgcagagtaaagcgcagatggtggagcgcattccggtggcctcggaagtggccaagggacggtatgcgatcggttttcagcaggtgagcgaactgctgccggtgcccggcgtaaccttcgtcggcgaactgccggataacctgcagtacatcacccgctttgccggggcggtgaccatcagcgccgaccacccgcaggaaggcaaggcgctgctgacgtatctggcgtcaccggcggcgcaggagaccatccacgccaccggtatgcgaagcgtagccgccgccgcgccggtcagccagaaggatactgttcaataa

SEQ ID NO: 265302 - DNA, 201 bp, Klebsiella pneumoniae
atggacccacttaccctgtttacgatccagcagcaatccgctctcacggagcatcgccagatggcgggagatcttgggctgggactgggcgagcgccgtacagagatcgcacacgcacagctctccacgcgccttgagcagcaatacgatccccagccgagtttcatcggcgaggtttttgaacagttgcaggggcaataa

SEQ ID NO: 265303 - DNA, 339 bp, Klebsiella pneumoniae
atgaaatataaaatggttacaggtatggcgctggcaatggtgctctttacatcaccaacagtgcatgctgcgcttaaccagcaggatcaactgtcagcgctggaaactgctgagaagatctatgatgccatactgggtaatggtgcagcagcggatgcccgctgggagacacctaaacagttaaaagatatcagtgacccggttatacccggtaataaactccatgtactcgaatataccgtgatggaccctgctaacggggcttatcagcgtattcatgttttagttaatgtcgatggtggtgtagctggcgctgaaattatctatgctggtcgctag

SEQ ID NO: 265304 - DNA, 546 bp, Klebsiella pneumoniae
atgaataaatgcttttcaaaaaagagaacactgcttgctggcgtactcagtcttgcagctttcaatgtctctgcagcctggacagtaaacggtacgttctgccaggcgaatagtgatgacgggcgtgtgattgtcagggttaaaccctcgactgtcggcttgattgaaatgaagccccaatgcaatgggcgcggtgcttttggactgaccggcagtaattttggtgttaacgatacagtgtacccctccagcgtgatgtgcaatgcccagacgcagttctacacagtgcaaacgacaatggcgaccaaagatatccggtcgatcattaaatcattcagtaaatctgactcggtttctgtgaatacctttggcggcgctttttctgtaaatacagtagatttttctaaagtctgtgctgccattatcgaacaacaggttgcagaaaatgacccgcaggagacattaaagcgggatatgaagcggatgggatatgagcaggggcctgatggtcaatggcataaacgcagcctgacggcaacacagtag

SEQ ID NO: 265305 - DNA, 690 bp, Klebsiella pneumoniae
atggaatcgccaacatcagactcgcgtcatgatcggatggcagtcagactttcagtcattatcagtcggttgttgagtggtgaggcgctggtactgaaatctttatcagaggagtttggtgtctctgagcgcactcttcgcagggatctacatcagcgcctgatacatcttgatatacgcaatgatgatggtatttaccggctaagtgagagcaggatgcgcgatcgttctcccggtgcgctttcatttatccgggcatcaggtatcgcccggatactacccatccaggataagcagttggtaaacatgctgattgacgagagcagggtatctccttgccttatctggcatgctcctttgaaacctcatgtcacgtttcccgagtttttcatccgtctggttcaggcaatttgtcaaagccagcaaattacagtgcttgctgatggacatcggtatctctcgctggagccttatcgactcatttactacggagaagaatggtatctggttgcatgtcagtccagtgagatccgtgtgtttgctctgactactatcggtgcagtcacagtggcttcagaaaagttcatccaaagggatgatatcagcagcctgatttccggtgagggctttatcaccgcactaccgcatttcccgtttattaacgatgtcatcaacacctttcggcagtaa

SEQ ID NO: 265306 - DNA, 891 bp, Klebsiella pneumoniae
atgtccaatatcctcaaacctcagcatgatccatgcaatattctgcgcaacagtcttagactgctgcctccgcaagcaactgaaagaatcctgttccaccttagtaaaaccatccactacgaacctgtgatcggcattatgggtaagactggctcaggcaagagttctctctgtaatgcgctgtttcagcagcctgtttgcctgactcatgatttaaccgcctgtactcgtgaaccgcagcgccttgaactaacagtgggtgaacgaggtattacgctggttgatttacctggtgtaggtgaaacacctgaatacgatgaagaatatcagtccctctatcgcagtttactgaacgagcttgatctgattatctgggtgctacgtgccgacgatcgtgccagaacgacagatatcgatacatatcgtgtattgattgaatatggggctgagccatctcgttttctgtttgttttgacgcaagccgatcgtgtcactccgctacccaccaccagcatgttattgccttcaccagagcaggtgatatcgctggcgatacttagctcgcagacggcagggcaattcccctcttcatttccaataatggctgtttcatcgcacaccggctacaacctgccagcacttgttgagctgatggtgcatgccttgccgggacaggccagtagtgctgtttatcgtcagttaaagtcagaacataagacagaagaggctgaagccgctgtccgtaaggcttttggtgatgtcgctgggactgcattcgatacggtatttaaccccgatgcgtattcttctggctgggctgttttactcaggcggcttcgtcggaaattagtccgtctcgctgagcggctttgggacaggatctttggttga

SEQ ID NO: 265307 - DNA, 1410 bp, Klebsiella pneumoniae
atgaacggcgtacatcatgatgcccacgtcaggctcgctctgagcgaaaaacatcacaagatacttcgtaaacatctgtttcccggcgatggccttgaagccgcagctattatactgtgttcacaaagttcagcctctcgatatgtggtcaaagatatattgccggtggattattccgcgtgtcgcagtcgaaccaaagacttcattagctggcctggcgccagtattgaaaatgcaatcgatatggctgaagcagacaatctgtcaatcgtgttagtgcactcacacccaggagggatgctggcattttcggatatggatgacgacagtgaccgtaatgtcatacccgccttatttgaagccattgaatcctcagatgttcttcacggctctgccattatgacgcctgacggagcgattcgtgcacgattgtatagccgccagctggatatgatccccgttaattcagtgcattgtgcaggtgatgagctgatgttatggcaactaacagattcagatagcgtacggccacatcccatggccttttcagcgcaaatggggatagatctgaagtctctcacagcctgtgtggtcggtgtgtcaggcacaggctctatcgtcgttgagcaattggctcgccttggagtcgggcggctcatcctgatcgactttgatgaaattgaatataaaaatctcaatcgtattattaattccacgatggaagacgcgcgcagtcatactgcaaaagtcatcagtattgctaatgcactgaacacatatcgcgacgaccttgaagtggttaccgttaaagctagtctggcaacgcgtgaagggattatttcagccggtatggctgatgtcatgttctgctgtgtggacagttttgaaggtcgacatatgtgcgatcgcgtcgccgcggcattccttcagccgttgtttgatgttgccgttaccattcccactcgacagactgaaagtggcgtgacaattggagatgtatgcggccgtgtagattatgtgaagccaggtggaagtacacttgccgacagaggggtctatacaccggaaacattgcgcagagaataccttcagaaggtcgctccagatatacttgatgagcaagttgccgagggttatatcaaaggtatcgctgatgaggcgccatcagtcataacgctgaacatgcgtgctgctagcgactgtgttatggagtttattgcccgtaagtatccattccgtcatgacccaaatagcaaacgagcgcgatcggttttctcgcttgcggccagcgatgaagatttcatgagtgaatcagactttgcgtgtgcgccgaatcctcatcttggacgcggactcattgagcctctgatgggcatgccatgttttaacaacaaggagatgggaaaatga

SEQ ID NO: 265308 - DNA, 1164 bp, Klebsiella pneumoniae
atgaacgatgtaaattctccagagcaggcgctcgttgagcgtgaagatattgcactctctcgccgcaaaggacgcccgttacgcccggctaaacattatctgatcgaagttcttgacgttatcggtcacggttctgtcatcgaaattactgatcctgtcccgacagggcgtcagattttgactgccgcaggtaaaaacccggcagaacaatttatgcttctcatggtggatgagaaaggtgttcttaaggaagtaaaccttgatgaacaagttgatgtgtacaatcagggtgttgagcaatttattgccttcgagagcgatcgccttttctatgtttcgcttaatggtcagcgttttccctgggggctcagttatattcaggaaaatgttctgcgtaaaatcgggaaagtacctgccaattactcgatctggctggaacgccagagccgaccggatgagtgtcttgaagatggacaaagtgtgaaccttgacgaaccgggcctagagaaactgtatacccgggttaagagctggcagcttaacgttcaaggcgtcatggtcaactcagaacagccaacaattatcgccagagatgcactcgaggcagcaggctttaatcctgctaagggctggattttagttctcaaggtacgaggagaaccaaaacaggtcatcaatatggatgatgttatcgatctgagaaccccgggtattgaaaaactgcgcctcactccggcagaaattaataatggtgaacaacccgcagcgcgctaccaggaattcgcattacttgaaaaagatactgcttatctgtgccagcagaactatgagtgggaaactcgcgttgccggcgcccgtcgctggcttatcatccatggctacccccttccaggggggtataaccacaatcaaatcgatttggctgtcgacattccgggaacttatccggacgcgcagttagacatgttctacgtcttcccggcgcttacattagccaatgggaaaggtatcagccagacccagtgtcaggaaaatattctcggcaaaagctatcagcgttggagccgtcatctgaatggttccacgcgctgggatcccctgaaggatagtgtgacgacccatcttgctgtagtggaagaatcaattctgcgggaggtggaataa

SEQ ID NO: 265309 - DNA, 1533 bp, Klebsiella pneumoniae
atgcatttggaattcgtgctcggaatacaaaagcgccttaaggaagttgattgtccgcctcaaaactgggcgtcgttgataaacgaagacgacatgcttgatgaagaatcggctaaatcattcacgcacctttcacggattatcggtgagtttcagccccataccgccccttgggcagtactgacaagtctggttattgatcatctgggatgggcaaggcaaatttaccaggccggtgatatacaaagccaaatgaaaggtatcgcgatatggcaactccttaattttgcccgcgtgtacataagaggtagcggtctcccggttgatcggatgttatcacggatccgacgtgtcattttgttgtctgaagaccgtgaaatgaggcaattaccccagtcagcgttcggcataagtggtgtgagattaatgaccatacatgccagtaagggactggagttccggatagttcatcttccggggatgattgctggtgcattacccggtcctaacaaaccgtctcgatgcattccacccgatggtttgattaacggttctcagggactaaccggtcttgaggcgataaagatgggtcatgatgaagaggaagaatgtaaattctttgtcgcgacctcacgtgcacaagaaggtttgttgctatacgcgtcgtctgttcaggcgaacggtaaaaatcgaaatcgttcagtgtttattgaccgtatagcatcttccattattaccagggaggcatctccccgggtccctctccctgacaccgtgcctgagcgcctggcgctcagtaaaggcgcgttttttctgactgataagcaaattagtttgtacgacaggtgtccacggcgttttctctacacccacatgctgggtttatcagggaaacgtaatgaaagtggctttatgaagatgcacagtgccatttatgagattttagactggcttaaagataattatagtattgctacaccagatacgaaggtgctcgaagctcagtttgcagaatcctggcttaggaaagggccggtggatcatagctataaggatgagtatttacgtatagcgcagcgttttgttcagtttcttctggagacacgtcaggggcgtaagcttgtgaagccagaggaattactcctgccctttccggggagaacgatcaccgtactgcctgatgaggttacgctggacgaggatgggacctattgcattcgccatattaaaacaggcaaaaagcggggtgatgaatttgatctcatcgaatatacgatcctctccgaggcagctaaacgccattacggcaaagggacccgggtggaagctgtgcatctagccggtgagactcaggaaacggtcacagtgagcgcggctaagcaaaaaacacgtctggataaagtaagaacttttatcaacgctatcaccttcgggtccttcccatcaacttctgatagccgcacatgcccacaatgcccgaacttttttgtctgtggcaaaatcccggcaggaaattcaggtaaaaaaaattaa

SEQ ID NO: 265310 - DNA, 1956 bp, Klebsiella pneumoniae
atgaagacggttatttccgtgctgactgcgcatttttttgtcctgagcgcctttatctggctggcatcccccgcctgtgctgacagtggaagcgactataaagctggttcggattttgcgaaacaggtgcagggcaatggtctgaactcactgaaaaatttcagtggtgagcaaaacctgccggggtataccgacagccctgatcaggcaaaatactatggcggcgtcactgccagcggagacagctccctgaaaagcgattcagccctggagttcagccagggagataccggcaaagcgattactgagtcgttcacgaaccggccaccggatcagatatctcaggatgcaccgtttattcaggccgcaaaggatacagaatcccgtgccgacagcattgtcggcgataccggacagtcctgtaccgcccaggttgtgaaccgcagtgagttcacaaaccatacctgcgaacgtgatctgcaggtggaaaatttttgcacacgggaagcgaccctgaaggataacgccaccacacagaaagttaaccgaacctatcagcaggtggtgacgctgaattatgcccggaatacccggcaatggagtggcaacctgacgatcccgaccaacggtcgtctgctgaatgcctcggtggatggtgagcctctggtgatcccctggattgaagaatgcgattccgaagggaaggtgcgggatagctgcaagagtgcagtgagtgaaagcctgaccctctttgaacgaacgttccccattgatgtgatcagctggccacgttcagaatcgatgtgttcaggcggtcagaacacgcattgtacgaaatatacctatgacgggaaggggaagattcatcagtcgtttggtgtggacaaagcggtcactgctgggcagaacttttcagtaagcaaaacatcacggaccgtatcatcggccagccagaaacccgtacaggtcacggtcaccctggtgatggaagaaaccgaaaccgtctatgcacctgaagtcgtctgggttgaaaactgtccgttcagtaaggatgaagggaaaaaaacgggcgaggaatgtatcagtccgggaggaacgcgaaccatcaccctcggaggcagggattactcgttcacggaggcctgctggaaatataaggatacctggctcacgcagccggcggacaacggctcctgtgaaagcctgatgaaaaatacggcctgtaccctgtcatcccgtcagtgcgccttctccagtgaggaaggtacgtgcctgcatgaatatgcaacgtattcctgcgaaaccaggacgagtggcaagcaaatgatctgcggcggtgatgtcttctgccttgatggtgaatgtgataaagccacgtccgggaagagcaacgactttgggcaggcggtgtctgagctggcggcactggctgctgcggggaaggacgtcgcggcactgaacggggtggatgtccgggccttcaccggaaaagcgaagttctgtaagaaatttgctgcaggcttcagtaactgctgcaaagacagcggctggggccaggatgtggggctggcacgctgcagcagtgaggaaaaggcgctggccaaagcgaaaaaagacaagctgacggtcagtatcggggaattctgctctaaaaaggttctgggtatttgcctggagaaaaaaaggagctattgccagttcgactcaaaactggcgcagatcgttcagcagcagggaagaaacggtcagctgcatatcggttttggcggcgccagcagtcctgactgtcgggggattacggttgaagagctccagaggatcgactttaacatgcttgatttcaccaactttatggacgacctgatgaaaaatcaaaaaataccggaaaacgatgtgctcaccaataaaaccagagaacgaattaaggaaatcatgagtcagcaatccgcgcaataa

SEQ ID NO: 265311 - DNA, 582 bp, Klebsiella pneumoniae
atgaacatctcagataaatatactcccaactatacttcagactggttcctgacatcacttctcagaaatcatacctgtgaaatgataaatcggtacgcctgcctacgggctttacgtgttgatttattttacaagtgtaattccttccgttttcagaaatctgattgtcgacaactggaatatgacgtacgggttctgatgcaggaaatgatgaaaaaaaaaggcgttgttgggtatttctgggtaattgaatggacaatggatcatggctggcatgcgcatgtagcattctggttagatggccacataacacaaaccacctggccaacggcagaaaaagcgtcagtcatttggaaatcgataaccgaacaggaaggtggctttcactggtgtaaattcaaagaaaactaccaggccgatatcaatatcccggtttgctataacgatccatacagtattgagaacatccatcgggtcctcggctatctggctaaagaagagcagaaagacggattttacctccatggctgcaatgatgttcctcctcgccctacatcaggacgtccgcgaaaacctcaataa

SEQ ID NO: 265312 - DNA, 1095 bp, Klebsiella pneumoniae
atggaatatcaaagaaggtccgtggctatgtcccttacacacgaagaattgcagtcttttttaaagacacagcagtcggtttcatcactgctcaggacctgtgaggccctaaaaccgctacagcaaacactcaggaacctggaaatggtttctgggtcagcattttcagcacaaattcagaaactctccgtcaacgaaaccgttaaggctattacccgtcttaaccgtcaggccagcagcatcctgccgacaacgttgaataggtcactgatgactgagcagatgaaaatagccaacacattccgttcatttgctctagaaaatggcttcgtcaggcaaacggctatgatgagaagtactaaggcctccacttcatggtgtgcacttaatactcaagtagaactggttcgttcgcttcaacaccatacttttgctgagctgctgaactcccgttcttccgcagtcgaaaagattctgcaacaacggtatttcgggctaaatacccacgagagtattggggagctactcgcaagacgctacggattgagcattgatgcggacgcggacgttgatacttcagccgataatgcaacgttacctgaactgcctcaggaactgctacaactaccaatagaccaagcgcttgaaaaaaccaacgttcagatatggcttagcaagctatccggttatgccagaaaggccataaatgcgatcctgattcggtggcttcttatagcgatcgttggcggaatagccaatgacatagtaaaggacattgttaaatgtcaccttcctgaatcaattgttggcgaatgcagttcaaggcagacgcgtaaagagatccagaacattgtcagtggagaaaatcgctgggagaatctgaaaaacttcaggctggtaaccagagacaacgtacatttacgcacagggccatcagagagtacagcgatactggaaatgctcccgatgaatacgcttcttctaattacggataaatcaaatcgtcagtggctggccgttgaagttgaatataacggtgagacaatccagggctgggtgtcccgccgttataccttacctttacatcagcattag

SEQ ID NO: 265313 - DNA, 789 bp, Klebsiella pneumoniae
atggttattccgctaaaaaaaagtacaaaggatggagagccctactaccgtcgcgatgagatagaagcacttctgaaagaactgaatcccctcgcagcggatgacctagttgcacggctcacatgtccagagaaccccgctccctttgaagtattaatgtattacttacgtcacagtgacatcggcctgacagaaaaatacttaaagcccatctttattgcttttcataaccgactcgaatctgcactgtgcaaacaaattccagattcgcgatatacccaggcagattctattcgcaatgagataaccgatcagttatacgaaatgatcgcacaggataggaattctcagaatgacagaatgtactactgggaagtgaactttaaccatgccctagaacgctttcgacaagacgtactcaggcgtgtcggtcctgcccgtgcaacggatcctctcatcaactatgaccccttgatgagaggagatgaagaagaaatcagtaccgaagttgagtctgctgctgaaaatttcttcaattcaaacacttcattattagataatgaatctttccggttatgcctgatggatgcgattaacaggttaccagaagatgaaagacgtgtagttgggttattcttacagggtatgcagacagactctctggacccgaaggtaatgacgattgcaaaagcgttagcttgctcagacagaaccgttcgtaacagactgaagcgagcttatgaacgactgcgaacccagctgcagacggagggctattatgaaagctaa

SEQ ID NO: 265314 - DNA, 606 bp, Klebsiella pneumoniae
atgaaagctaaaagcaaagcgtccagagaagccgttttacatgcgttctcaaaggaagcaaatcgcaatgaagacacattagcgaactacctggaatgctatcctgaataccgggaatcgattatcgacttgtcagtagagctactgacaacacccgcttttgaaaatttatcagatgaagcgcacgctgatgaaagggccaagaaggcatggttaacatttcaatccatgctgaacccggaggatccggcttctgcagcgactcaaagtaccataaatcctttagccagaattgatgctggcaaattcaaagcgctggcggtgcatttaaatgtctcacgccgtttcttatcacgtttgcgtgacaacgcgattcaggtagaaaccatacctaagcaatttcttgagttacttgcgcagcaactaagagtctctgttgaagttttacgaacaactttaactgcgccctcagcgattgcggcgggacaacgttttaaggcttcgggaaaacccgtcgcgggtcaaaaagttacttttgaggacgcgttagcaacatctgggctgactgagtcacagcagaatatattaaggacgatgaaggattaa

SEQ ID NO: 265315 - DNA, 288 bp, Klebsiella pneumoniae
atgagcctcagaagcccggtcatattcaatatagtttgtaaaattgtcctcagtcgggccttcaagtaccaggtggccgatttcatgagcaatcaagaatgctttttcgaagacactccctgtgtcctcgtagaggatcatttctgcctgactgtcaaagagtgcccgtcccccattaagctgaggatcgttatcgggcactgcataaacttcaatatctcgccgtcctgcctcatacagaacgtaactcagcagatcgccggtatcgcatccgctattcatcgctga

SEQ ID NO: 265316 - DNA, 2397 bp, Klebsiella pneumoniae
gtgcagatctttattatcagcaacggcgtggacaccaagtactacgccaacaaccgcgccaaccacttcgagcagaccttcttctggaccgatgaaaagaataacccgctcaaagcgctggagaaattcaccgacgcatttctgaaagtctgtcacatcgccaaaatgatcacccactacacggtgctgaatgaaacccgtaagtgcctgatggtgatgcgcccttaccagttttatgcctgtgaggcgatgatccgccatgtgaaggataatctccacaagcagggacgtccggagaacggctatatctggcacaccactggctccggtaaaacgctgacctcgttcaaagccagccaggtgatcatggaaatgccggaagtggatcgggtcatttttgtggttgatcgccgggatctggattatcagacggcgaaagagttcaacggctttgctaaagacagcgtggacactaccaacaacaccagtacgctcataaaacatctcaaacaaagcagctccaaactgaccctgacaactattcagaagctgaataacgccatcacccatgaaggttacaaagcgcagctcgctcacctgcgcaaagagcgcatcgtctttatcttcgatgaatgccaccgcagccagttcggtgatacgcataaagcgatcgtgaacttcttcgagaacgcgcagctgtttggttttaccgggacgccaatctttgccgataacgtcaatatcaccaatggtgtcaagcagaccaccgaactgttgttcgataaatgcctgcataaatacgtgattgtcgacgccatccgggatgaaaacgttctgcgctttgccgtggaatatgtcggtacttacaagcgcaaagaaagcaacaatgagatcgatatcgatgtggaggatatcgacaccaaagaggtgatggaaagcgacattcggttgggcaaagtgaccgactacatccttgcccaccataacgccaagactcgcaatcgcgagttcaccgcgatgttctgcgtcggatcagtcgatatgctgatcacctactacaaactctttaaagaaaaacaggccgcactgcaggcggcggatgccaactacaagccgttaaagattgccaccatcttcacctacgctgccaatgaagcggacaaaagtgataaagagacggtaaacggtctattggatgaagaggatatcagcctgccgcagggggcgaaagttgacacctcgagtcgcgatcatctggatagttttatcgaggattataacgagctgtatggcaccagctactcggccaatgattctaagagcttctacaattactacaaaaatattgcccagcgcaccaaagagaaaggcatcgatattcttctggtagtgaatatgttcctcaccggtttcgacagcccggcgctgaacacgctgtatgttgataaaaatctgcgttttcacggcctggtacaggcgttttcccgcactaaccgcatccttaacgaaaagaaaacccacgggaatattgtctgcttccgtaatctgaagaaagccaccgacgatgctattgctttgttctcgaataaagatgcctcttctaccgtcctggtcaaaccctttgacgagtacttcggggattatcaggacgctgtcgatcgcttgttaacgctgacgccaacggtggaaagcgtggacgatttaccggatgaagaagcacaactggcgtttgtaacggcgttccgtgatgtgatgcgtttgaaaaacatcctcgaaagttttgccgactttgatgatgcggcgaaaccgctgtcggaccagacgctggcagatttcaccagtaagtacctcgatattcacgacaaggtgaaaaagcactccagcaaagagaaagtctcgattcttgaagacgtggattttgaagtctcgctgattcatcgcgacgaaattaacgttggttacattctgcgcctgctagcgggcatacaggcgatgccgccaaaagagcagcaggagcagaagaaaaagatcatggatattgtcgatagcgacgtcacgttgcgcagtaaacgtgagcttatcgataactttattgaaaaaaacttgctgcatgcctcgcatgacgaagatatcactcaggtgtttgaagcctatgtcgaacaggaaaaaggtaaggcgctggcagccttgtgtagcgaagagcgactcgattccatcaaactgaccggcttactggataattacctctttaccgacgtgatgccgcgagaggatgaagtggcagaaacgctaacctggacgccgaagattctggaacgcaagaacgtgcgggcacgtgtctacgaccgtgtgcgcgatgtgattgaaacgtttatcaatgggatgcgcgggttttaa

SEQ ID NO: 265317 - DNA, 516 bp, Klebsiella pneumoniae
atggcaacgcaaagcgaatacgagttagaaacgcagctggtggaacagctggtgggcatgcactacgaacgggtgaatgtcaccgacgaaaccagtatgaaagccaatctgcgaaagcagattgaaatccataaccgactggaatctgcgccactcaccgacggcgaatttaaccgtattttcttgcacctgacaaaaggtaatgaagtcatcgatcgcgctaagatcctgcgcgatcgctatcagttattgcgtgatgacggctccgagaagtggctcaactttatcaataaagaggagtggtgccagaacgagtttcaggtgacgagccaggtgaagcaattcaatgccgagcaaaacacacgcaaaacccgcttcgacgtcacgctgctgattaacggcttgccgctggtgcagatcgaacttaagcgtcgcggcctggggctgaaagaggcctttaaccagatcgatcgttaccatcgggatgccttctgggtaggcagcggcctgttctag

SEQ ID NO: 265318 - DNA, 381 bp, Klebsiella pneumoniae
atggacggcgtccaccagggcgatcacgccgtccagcagatagcgctcgcagagcacctgatgggagaaaaaggtctggataatcggccccgggtcggccatgccggtgcattcaatcaccagccggtcaaactcgatttcgccgcgatcgcgactgtcgaggagatcgagcagggcgtcttccagttcgttggagcgtgtacagcagatacagccgttggtcagggttttaatctgcgtggcgcggtcgccgatgagctgatcgtcaacggagacttcgccgaattcgttttcaattacggcgattttgaaaccgtgctgctcattgaggatatggcgcaggagggtggtttttcctgcgccgagaaaaccggtgagtag

SEQ ID NO: 265319 - DNA, 2379 bp, Klebsiella pneumoniae
atgtccaacaatggctcgtcaccgctggtgctttggtataaccaactcggcatgaatgatgtagacagagttgggggcaaaaatgcctcccttggtgaaatgattacgaatctgtccggtatgggtgtttccgtacctaacgggtttgccaccaccgctgatgctttcaatcagttcctggaccaaagcggtgttaaccagcgcatctatgcgctgctggatgaaaccgacattgacgacgtttccgcattagcgaaagcgggcgcgcagatccgacagtggatcatcgatacccccttccagagcgaactggaaaacgcgattcgcgatgcttatgacctgctgtccgccgatgacgccgaggcctcattcgccgtgcgctcttccgccaccgcggaagatatgccggacgcctccttcgccgggcagcaagagacattcctcaacgtgcagggctttgacgccgtgctcgttgccgtgaagcacgtgtttgcttcgctgtttaacgatcgcgcaatctcctatcgcgtgcatcagggttacgatcaccgcggcgtggcgctctccgccggggtgcagaggatggtccgctccgatctggcctcctccggcgtcatgttctccatcgataccgaatccggctttgaccaggtggtgtttatcacctcggcgtggggtttgggcgagatggtggtgcagggcgcggtgaacccggacgaattctacgtccacaaaccgacgctggccgctggccgtccggcgatcgtgcgccgcaccatggggtcgaaaaagatccgtatggtttacgcgccgacccaggagcacggtaaacaggtgcgtatcgaagatgtgccgcaggcgcagcgcgatattttctcgttaagcaacgaggaggtgcaggagctggcgaagcaggcggtgcagatcgagaagcactacggccgtccgatggatatcgagtgggcgaaagatggccacaccggtaagctgtttatcgtccaggcgcgtcctgaaaccgtgcggtcccgcggccaggtgatggagcgttataccctccacgctcaggggcagatcatcgccgaagggcgcgccatcggccaccgcattggcgccggtccggtcaaggtgatccacgatatcagcgagatgaatcgcattgagccaggcgacgtactggttaccgacatgaccgacccggactgggaaccgatcatgaaaaaagcctcggcgattgtcaccaaccgcggcgggcgtacctgtcacgcggcgattatcgcccgtgagctggggatcccggcggtggtcggctgcggtgatgctaccgatcgcattcaggaaaatcagaatgtcaccgtctcctgcgccgaaggcgacaccggctatgtctacgccgagctgctcgacttcagcgtcaagagctccagcgtcggcgacatgccggatctgccgctgaaggtgatgatgaacgtcggcaacccggatcgcgcgttcgacttcgcctgcctgccgaacgaaggcgtcggtctggcgcggctggaatttatcatcaaccgcatgattggcgttcatccgcgcgcgctgctggagtttgacgaccaggagccgggcctgcagaacgaaatccgcgagctgatgaaaggctacgattcgccgagagagttctacgttggccgcctgaccgaagggatcgccaccctcggcgccgctttctatccgaaacgggtgatcgtgcgtctgtcggacttcaaatcgaacgaatacgccaacctggtgggcggcgagcgctatgagccggaagaagagaacccgatgctcggcttccgcggcgccggacgctacgtttccgaaagcttccgcgactgtttcgcccttgaatgcgaagcgatgaagcgcgtgcgtaacgatatgggactgaccaacgttgaagtgatggtcccgttcgtccgtaccgtcgcccaggcgaaagcggtggtcgaagagctggagcgtcaggggctgaagcgcggcgagaacgggctgaagatcattatgatgtgcgagatcccatcgaacgccttgctggcggagcagttcctcgagtacttcgacggcttctccatcggttcgaacgacatgacccagctggcgctcggtctggatcgcgattccggtgtggtttctgagctgtttgatgaacgcaacgacgcggtgaaagccctgctgtcgatggccatccgcgcggcgaagaaacagggtaaatacgtcggcatctgcggccaggggccgtctgaccatgaggatttcgccgcctggctgatggaagaggggattgatagcttgtccctgaacccggataccgtggtacaaacctggttaggtctggcggaactgaaaaaataa

SEQ ID NO: 265320 - DNA, 1224 bp, Klebsiella pneumoniae
atgaccctgctctccactggcaccgattatgacgcgctggcggccgccttccgcccgatattcactcgtatcgcccagggcgctgcggagcgcgaacagcagcgcattctgcccgatgagccgatccgctggctgaaagaagcgggcttcggcacgctgcgtatcccgcgcgagaagggcggctggggcgcttcgctgccgcagctcagcgcgctgctgatcgagctggcgcaagcggactctaacctgccgcaggccctgcgcgcgcactttgcctttgtggaagatcagctgaatcagccggattccgccgggcgcgaccgctggtttcgtcgcttcctcgacggtgagctggtgggcagcggctggacggagatcggcgcggttaagctgggagaggtgaacaccagagtgacgccggcagagggcggctggcgactcgacggcgagaagttttacagcaccggcgcgctgtacgccgactggatcgatgtgtttgcccggcgcagtgataccgccagcgatgtgatagccctggtcagcacccagcagaccggcgtggtgcgggaagatgactgggatggctttggccagcggttgaccggcagcgggaccacccgctttaccggcgctcgggtggaaaccgaacatgtctatgattttgcccagcgctttcgctatcagaccgccttctaccagcatgtgctgctggcgaccctcgcgggcattggcctggcggttgagcgggatgccgcgcagggcgtcaaacatcgttcccggatgtacagccacggcaacgccgccgtgccgcgcgatgacgcccaggttctgcaggtcgttgggcagatcagcagctgggcatgggcgacccgggccgcggtcctgcaggccgcggaatcgctgcagcaggcctatgtggcgcacgtcagcgacgacgaagcattgattgcccggcgtaaccagctggcggaagtggaagcggcgcaggcgcaggtgatcgccagcgactggatcccgcgggcggcgacggagctgtttaatgccctcggggcgtcggatacgcgaactcgccttgcgctggatcgccactggcgcaatgcgcggacggttgcctcgcataatccggtgatttataaggcacgtaatatcggtaactggctggtgaacggtgaagcgcccacctttatctggcagataggcaatggtgagaaaacggcggggtaa

SEQ ID NO: 265321 - DNA, 126 bp, Klebsiella pneumoniae; identical to SEQ ID NO: 200938

SEQ ID NO: 265322 - DNA, 2586 bp, Klebsiella pneumoniae
atggcgggagatgaccgcgagcctatcggacgtaagggaagaccctcacgtccgactaaacagaaagtcacccgtcgccgggtccgggaagaggactacgacgacgagtatgatgacgatgattatgaggatgagaaaccggtgccgagaaaagccaaaggcaaaggtggcaagcctcgtcggaagcgcagctggctgtggctgctggtcaagctggggattgtcttcgcggtgctgattgccgcctatggcgtctacctcgaccagaaaatccgcagccgcattgacggtaaagtctgggagctgccggccgcggtctatggccggatggtcaaccttgagccggacatgcagatcagcaaaaacgagatggtgcgtctgctcaacgccacgcagtatcgccaggtcagcgcgatgacgcgccccggcgaatataccgtgcaggctaacagcatcgagatgatccgtcgtccgttcgatttcccggacagtaaggaagggcaggtgcgcgcgcgtcttaccttcgacggcgaccatcttgagaccatcgagaatatggataataaccgccagttcggtttcttccgcctcgatccgcgtcttatcaccatgctgcagtcgccgaacggcgagcagcgcctgttcgtgaagcgcagcggcttccccgatctgctggtggataccctgctggcgaccgaagaccgccacttctatgagcacgatgggatcagtctctactccatcggccgcgcggtgctggcgaacctgacggcaggccgaacggtgcagggggcgagtaccctgacccaacagctggtgaaaaacctgttcctctccagcgaacgctcctactggcgtaaagccaacgaagcgtatatggcgctgatcgtcgacgcccgctacagcaaggatcgcatccttgagctgtatatgaacgaggtgtacctcggccagagcggcgataacgaaattcgcggcttcccgctggccagcctgtattacttcggccgtccggtggaagagctgagcctcgaccagcaggcgctgctggtggggatggtgaaaggggcgtcggtctataacccgtggcgtaacccgaaactggcccttgaacgacgcaatctggtgctgcgtctgctgcagcagcagcaggttatcgaccaggagctgtacgacatgctcagcgcccgtccgctgggcgtgcagccgcgcggcggggtgatttcaccgcagccggcgtttatgcagatggttcgtcaggaactgcaggcgaagctgggcgataaagtgaaagatctctccggcgtgaagatcttcaccactttcgactcggtggcgcaggatgcggcggaaaaagcggcctccgaagggatcccggttctgaagaaacagcgtaagctggcggacctggaaaccgccatggtggtggttgaccgcttcaccggcgaagtgcgggcgatggtcggcggcgcggagccgcagttcgccggttataaccgcgcgatgcaggcccgccgatcgattggttctctggccaagccggcgacctatctgaccgcgctgagccagccgaatcagtatcgcctgaatacctggatcgccgatgcgccggtgacgattcgcctgtccaacggtcagacgtggtccccgcagaacgacgatcgtcgtttcagcggtcaggtgatgctggtggatgccctgactcgctcgatgaacgtcccgacggttaacctcgggatggcgctgggcttgccggcggtagtcgatacctggactaaactgggggcgccgaagaatcagctcaacgcggtgccgtcgatgctgcttggcgcgctgaacctgacgccgattgaagtggcccaggccttccagaccatcgccagcggtgggaaccgtgcgccgctttcagctctgcggtcagtgattgccgaagatggcactgtgctctaccagagctatccgcaggcggagcgcgcggtgcctgcccaggcggcctacatgacgctgtggactatgcagcaggtggtgcagcgcggtacggggcgtcagctgggggcgaagtatccgggcctgcatctggcggggaaaaccgggaccaccaacaataacgtcgatacctggttcgccggcatcgacggtagtcaggtgaccatcacctgggtgggacgcgacaataaccagccgaccaaactgtacggcgccagcggcgcgatgtcgatttaccagcgctatctggcgaaccagacgccaacgccgctggtgctgacggtgccggaagacgtggttgatatgggcgtggacagcaacggcaacttcgtctgcagcggcggtatgcgttcgctgccggtctggaccacgcagccggatgcgctgtgccgtcagggcgaaatgatgcaacagcagcagttgcagcaacaggaagcgaaaaatccgtttaatcagtccgggcagcaaccgccgccgcagcagcaacagcagcaacagccgccgaagcagcaggaaaagagcgacggcgtcgcgggctggatcaaggatatgttcggcctgtctcttatacacatctccgagcccacgagaccgtactag

SEQ ID NO: 265323 - DNA, 1161 bp, Klebsiella pneumoniae
atgtcgagtacacctctcactgataatgcgctttcccggcccgccgggctggtggtgtccctgcgtttgctggcggcgatcgtgatttttgccgctattgcgccgggtattctgatgaccgcgccggcggtggcggcgcagctggccagcgaatggcagctaaaacccgggcagatcggctggctgttctcagcggagctgggggcgatgagcctggcgacgctcccggcgtggtggtggatgagccgcctcgactggcggtgggttgccctgacggccgggatggtgtttctggccgccaacctcgcctcggcggtggtcacccagtatgagacgctgctggcggcgcgctttatcgcctcgctggcgggcggcacgttgatgattttgtgcatcagctgcgcggccggaacgccgaacccgtcgcgggtctacgccttctgggtgctcgggcaactgctgttagggatgcttggcctgctggcgctgcccggcctgttcgcgacctttggcctgaaggtggtgtatctgatcctcgccgccatcatgctctgctgtttgccgctggtatccgctttccctccgcgctttcaaccgctttcagtctcccgccagcagccgtcgacggcgctgtggcgtcaggcgctggcggtgctggcggtgctcactttctatatcagccttagcgccgtgtggacctttatcggcaccatcggcagcgcggcggggctgagcccgacgcaggtcggtctggtgctggcggcggcgacggtttgcggcattatcggcgccggcggcgcggccctgcgcggcacccggcgggccgatcgtttaccggtgtggctgggctacggcctgttgatcgtcagcgttgggctgctgatcggccagccgctgctggtgcgttacgccatcgcggcgctgctgtttaagttcacctggaccttcgtgctgccctttattctcgcccgcgtggccgggctcgataacagcggtcggctaatgaacagcatcaatctggtgatcggcggcggcatggcggctggcccggcgcttgcgggggccttactgcaacacttcgccagcgccgacccgctgctggcggcggcaggcgtctgcgcgctgctgtcactgattttaattgtggcggggctttgttga

SEQ ID NO: 265324 - DNA, 393 bp, Klebsiella pneumoniae
atgttgccgaataacgtgcgcgacatgaccgagatctttatccgccgcgagcggcggatcgtcgccggtatctcgctgatgcgcgacgtgcctttctccagcgaagagcgccagcgggcccaggcggtgctgccgctggtagagctggccattcgcgactgcctgcaggaagaagatgatctgcccgccatcctgacggcgaaagagcgggaaatcgtcggcatggtgcgcgaaggcgccagcaataagctgattgcccgccagctggatatctcgctctcgacggtaaaaacgcacctgcgcaatattttcgccaagaccgaagtggtcaatcgtaccgaactggtttcccgaacctggatgccggccgctcagcgtacgctgcatctgtga

SEQ ID NO: 265325 - DNA, 2439 bp, Klebsiella pneumoniae
atgaaaattaaagcccctgatgctttactggctgctgaggtaagccgccgcggtctgatgaaaaccacggcaataggcggcctggcgctggccagcaacgcactaacgttaccctttacccgactgtcgcatgctgccgatacgccggcgcccgccagtgagaaggtggtctggagcgcctgcaccgtcaactgcggtagccgttgcccgctgcgcatgcacgtggtggatggcgcgattaaatacgtcgaaaccgataataccggtgacgataactatgacggtttgcatcaggtccgcgcctgcctgcgtgggcgttcaatgcgccgccgagtctataatccggaccgtctgaagtacccgatgaagcgcgttggtaaacgcggtgagggcaagttcgagcaaatcagctgggaagaggcgttggataccatcgccagcaatatgcagcggctgattaaagagtacggcaatgaatccatctatctgaactacggcaccggcacgctcggcgggacgctgacccgctcctggccgccggggaaaacgctgattgcccgtctgatgaactgctgcggtggctatctcaaccattatggcgactattcatcagcgcaaattgctgccggtctgaattacacctacggcggctgggcggacggcaacagcccatcggatattgaaaacagtcagctggtggtgctgttcggcaataaccccggcgaaacgcggatgagcggcggcggggtgacgtactaccttgaacaggcgcggcagaaatccaatgcccggatgataatcatcgatccgcgctataccgacaccggcgccgggcgtgaagatgaatggatcccgattcgtcctgggaccgatgcggcactggtttcgggcctcgcgtgggtgatgatcaccgagaatctggtcgatcagccgttcctcgataaatactgcgtgggatacgacgagaaaacgctgcccgccggtgcgccagccaatggtcattacaaagcttacattcttggccagggcactgacggtatcgccaaaacgccggagtgggcctcgacgattaccggtattccgcgcgaacgcattgttaaactggcgcgcgaaattgccaccgccaaaccggcctatattagccagggctggggtccgcagcgtcacgccaacggtgagatcgccacccgcgccatctcaatgctcgccattctgacgggtaacgtcgggatcaacggtggcaatagcggggcacgcgagggctcgtatagtctgccttttgagcgtatgccgacgctggagaatccggttgagaccagtatctcgatgtttatgtggaccgatgcgattgagcgcggcccggaaatgaccgctctgcgcgacggcgtacgcggtaaagataagctcgacgtgccgatcaaaatgatctggaactatgcgggcaactgtctgattaaccagcattctgagatcaaccggacccacgaaatcctgcaggacgacaagaaatgcgagatgattgtggtcattgactgccatatgacctcctcggcgaaatacgctgatattctgctgccggactgtaccgcctccgagcagatggatttcgcgctggatgcctcctgcggcaacatgtcctacgttatctttgccgatcaggccatcaagccgcgctttgaatgcaaaaccatctatgagatgaccagcgaactggcaaagcgtctgggcgtcgaagagcagtttaccgagggccgtacccaggaaggctggatgcgctatctttatgagcagtcgcgcaaagcgattcccgacctgccggatttcgacaccttccgtcagcagggcatctataagcagcgcgatccgcaaggtcatcatgtggcctacaaagccttccgtgaggatccgcaggctaatccgctgaccacgccttcgggcaagatcgaaatttactcgcaggatctggcgaaaatcgcggctacctgggagctgccggaaggggatgttatcgatccgctgccgatctacaccccgggtttcgaaaactacaacgatccgctgacagagaaatacccgctacagctcaccggcttccactataaatctcgcgtccactcgacctacggcaacgtcgatgtgctgaaggccgcctgtcggcaggagatgtggattaacccgatcgatgcccgcaagcgcggcattgccaacggcgatcgtattcgcatcttcaacgatcggggtgaagtgcatatcgaagcgaaggtgacgccgcgcatgatgccgggcgtcgtcgcgctgggggaaggggcctggtacaacccggacgcctcgcgtgtggatcaggcgggcagtatcaacgtgctgaccacccagcgtccgtcgccgctggcgaagggaaacccgtcgcataccaacctcgttcaggttgagaagctgtaa

SEQ ID NO: 265326 - DNA, 1275 bp, Klebsiella pneumoniae; identical to SEQ ID NO: 137868

SEQ ID NO: 265327 - DNA, 1074 bp, Klebsiella pneumoniae
atgttgatgcagcatatcggtgtcggctattttgggtattaccgagcaactgcttatgcgatgaaacactctcttatgcccgagattgcgaagttaagaatgaaggctctgaacttctgggataagcacgggatccgtgccgcagctgatgcttttgacgtatcaacgcgaacactctactggtggcgccggttactgcgcaccggtggtccagaagcactaattccaagaagcaaagcccctctggttcgccgttcaaggcactggcatcctgatgtactcaaggagatcaggcgtctgagaactgagttacccaatctcggcaaagagcagatttttgtcaggctgaaaccatggtgtgaagcgcggcattttacctgtcccagcacgtcaaccattggaaggatcattgccggagctcatgataaaatgcggatgatccccgtacgcctcagtgccaggggcaaagcccggttgataaaaaaacgctcagtgaagcccagaagaccaaaacaataccgcccggtaaaaacaggcgaactcatagggatggacgcgattgaactcaggatgggggacctacgccgctatatcattaccatgatcgacgagcacagcgactatgcgctggccctggcggtcccttcactcaacagcgatattactagccatttcttcagcaaggccacaaagctctttcctgtcgctatcagacaagttgtcactgacaacggtaaggagttcctcggtaactttgataaaacgctacaggaagcctcgattaaacacatctggacctatccgtacacaccgaaaatgaatgcgacctgtgagcgatttaaccggacacttagagaacaatttattgaattcaatgaattgttgctttttgaggatctgaatttgtttaatcaaagaatggctgaatatctggtgctgtataacagcaaaaggccacataaatcactcgaactgatgacgccagtggactatattttacgtgagagtaaaaattgcaatatgtggtggacccatacatctccttgcctcgcggcatctaagaggctatcctga

SEQ ID NO: 265328 - DNA, 696 bp, Klebsiella pneumoniae
atgttaaaacgctctctggttctcgccgccctctgcggtatgtcttttgcagcaaccgcggtaacgatagatttacgtcatgaatttattgatggcggaaagagtgataaaagtaatgctgaccgcgtctccgtttctcaccgctttgccaacggcttaggctttaccgtcgaggccaaatggcgctcaggcggcgacaacggttcgcaaccctattcggacgtggtgggcaatggtcatgaagacaccatcagctggcgctggaaagcaacgtcgaacctgttcctcacccccggatttaccattgagagcaacgacagccgctccatctacaagccgcacctgcacgcgcagtacagtttcgacaacggcttctatgtcgccgctcgctatcgctatgaatacacccgctatccgaacaacgccggcaaagatgatgacaaagttaaccgcggcgacgcgtgggccggatttgtcctcggcgactggcgtacagagctgaactatgtctatgcccgcagctcggaaggggtcagccgcaacgacaataaaccctactcgcaggaatataacgtgaaggtggcctataagctggataataactggtcgccgtatggcgaaattggcaacgtcggggtcaatgaccgcagcgatcgccagacccgcttccgcgttggggtggcttactcgttctga

SEQ ID NO: 265329 - DNA, 1176 bp, Klebsiella pneumoniae
atggctaaaggcatgcgggtcaaactgaattatcacgtcagccacgatccggataccggggcggaagtcacccgcttaacccccccggaggtcacctgtcatcgcaactacttctatcagaagtgcttttttaacgatggcagccatttactgttcgccggcgagtttgacggccactggaactactatttgctgaatatcgccagcgccgaggccgtccagctaaccgaaggcgccggggataacaccttcggcggcttcctctccccggacgataagtcgctttattacgtgaaaaatgaccgtatcctgctggaagtcaacctgaccaccctcgccgagcgcgaagtttatcgcgttagcgatgactgggtagggtatggcacctgggtggcaaacagcgattgcagcaaactggtgggcattgagattgccaaaagcgactggacgccactcaacgactggcagattttccatgatttcttccataaaggaccgcactgccgcctgctgcgcgtcgacctgcgcagcggtgagagccaggtgatccatgaggaaaaaatctggctgggacacccgatctatcgtcccttcgacgaccataccgtcgccttctgccatgaagggccgcacgatctggtggacgcccgcatgtggctggtcaacgaggatggcagccatgttcgcaaagtcaaagcgcatgctccaggcgaaagctgtactcatgaattttgggtgccggacggttcggcgctgatctacgtctcctatctgaaaggccagcaggggcggacgatctatcgctttgatcccgaaagcggcgtcaacgaggccctgatgacgatgccggcctgctcgcatctgatgagcaatttcgatggcacgctgctggtaggcgatggctcaggtacaccggtggatgtcaaggataccggcggctactccattgataacgatccctggctgtatgtctttaacgtggcggaaaagcgctacttccgcgtcgcgcgccatgatacctcatgggcgacggtggccaacagccgccaggtaacgcacccgcacccctcatttaccccggacgatagcgccattctgttcagctccgataaagacggtaaaccggccatctatatcgcgaaattacccgcgcacccgtcaatgctgagcgcctga

SEQ ID NO: 265330 - DNA, 651 bp, Klebsiella pneumoniae
atggcaagaaaaacaaaagaagaggcgcagcgcacgcggcagctcctgattgagtccgcaatccagcagttcgccctgcgcggagtaaccaacaccaccctgacggatatcgccgatgcggcgggagtgactcgcggcgcggtgtactggcattttgccagtaagacggagctgtttaatgaaatgtggcagcagcagccgccgcttagagatttgattcagcccagtcaggccatagagtacgaacatgagccgctaaatgctttacgcgagcggtttattgcaggcctgcgctatattgctgcgaatcctcgacagcgtgctctgatgcaaattctttatcagcgctgtgagttttccagtgatatgctttcggaatacgaaattcgccaacgtattggttttaattattcactcattggcggcatcctgcagtgctgcgtgcgtaacaatatattgccagccgaaacaaacattgagatgatattaattgttttacacagtgctttttccgggctgattaaaaactggctgctcgatccgcaacgcttcgatctttatcagcaggcgcctgcgctggtggataatataatggcggtggtctgtgctgcgcatttatcgggagggcctgcgctacggctggtgaattag

SEQ ID NO: 265331 - DNA, 1611 bp, Klebsiella pneumoniae
atgccatcacaggaatatgtcgaatctgtcgatgaatatgtgacaaccagactatttagcgaggtgcttcccggcattcccttccttctacaggatgaggaaagcggtgtcattatgttcggcgaggatagtggagcaactcacgttccagggttatcactgaaatacggttccgatctggcttattccgtcacacaaatacccggcgtagcgcatgttgaactggatgaaaatggaaacgttttgcgttgggttgacgattccggtgagactcatgacgcctcaccgggtagtggtgcagaacctacacccgttgcggtatcttccccggttatttctccccaggtctatgaaaatgccctggtgagtgagattggctataaccagtggatcaataacgtcgctgtgaagttcgggcgggattattttttcagtggcgttcggctggggacgaccgggcctgagcgaatcctgggaaacctggctatctgccgccgacagggtgagcgtggaaaatttgggtgctatgaatttggccctcgcgctgctgttctgggcgatacggcatcaacggacgaccatgatgcaccgtcgattttgctcgatacgcgcgccggtgctgaagttcccatacagatttttcagtctgatcactccggggcgaatgtctggcttcggaagtggtcatcgcagacgttagatcctgcgaatatttccgggccagaggttgtatctgacacgtcaaatatgacctatgcccagtcctacagaaacccatttaatcagaatgagattctggtatttgcccgtcggggatctacgaattcggcgcgctgggtcgcacatcactcaacagacaacggcaggacttggcaatccaatgcatttatcggcggttccgatttgtatatgaccacttgccagagtgtggacgggaacgccattcatctcgcgatccaacagcatccacgttcgaccgacacgcgcgtgttatatatgaaaatcaaatggagtgataaatccctcatcaattatagtggaatcacagcgctgcctgatattatgacttatggatatattgatcccttcttaaatggcatccctgatgtagtctttgaagcctctttaccaaccaacacaaaacggttgtttgaagtcaaggatgatggagtatcgatattatttcttatcgctgaattcaatgcatccaactattcttatcgacgaatgaaaatgtcacaattttcgggagggacacctgtaatacatgatataggcgactgcggttctccaatgaataatgatgatgcgacgttttatgtgccaggcggcactatcatttctgcaactgatgttctcgtttgtaactgggtgaaaattcccgcccttggtcagttaacccgatatgtctatgacggttctgcctggaatgggaccctgctggacgaggttaaagatggccggaaaatctgtaggccgctggttttccgagaatactatcaggacaatggcatcctgaaataccatgacacaaatactgtcgtctacttgcgagggacatataacgcctatcgtgatttcgatttagatgctgtattaataaatatctga

SEQ ID NO: 265332 - DNA, 927 bp, Klebsiella pneumoniae
atgattaatacaacacgtcccatactcaacctcgatctcgatctgctgcgtacctttgtcgcggtcgctgatttgaacacttttgccgccgccgccgccgcagtgtgtcgtactcagtccgcggtcagtcagcaaatgcaacgcctggaacagctggtgggcaaagagcttttcgcccgccacggccgcaataagctgctgaccgagcaggggatccagctgctgggctatgcccgcaaaattctccgttttaacgatgaagcctgtatgtcgctgatgtatggcagcctgcagggggctctgagcatcggtgcgtcagaagaaacggctgacaccatcctgccgtttttgttaaaccgcatcggctgtttctatcccagaatgacgttggagatcaaagttcacccccatgccgccatcatggagatgttggccgaggggctggtcgatctggcgttgaccacccatcagcctcccggctttacctcttttaccctgagaacatcacctactctctggtattgtgcagcggaatatgtgctggcgaagggggaatctatccccctgatcctgctcgaagagccaagcccattccgccaggatattatcgccgcgctggaaactgctcgcgtcagttggcatctggcccacggagcttcctcgctatcgggcgtgaaagcggcggtgaaggccgggctgggcgtgacggcgcgcccggtcgaaatgatgagcccggatctacgcgtggctggcatcagtgaggggttaccggcgttgccggacacccggtacgtcgtcagctgcaatccgcggacggtgagcgaactgccgcaggcgatttttcagtctctgagccaggagatccatccctgggaaacgggcacagcacttactccggaagagggagggaataccttagttttgtaa

SEQ ID NO: 265333 - DNA, 1011 bp, Klebsiella pneumoniae
atggtgacaattaaacaatgggccgatatcaaggccaattacgatgatactttacttttggggaatggtgcaagtatcgctgttaatagcgattttgcctatcgtagcttatgtcagaagttgaccgagctcagttcagatgggcagctgacagccttgttcgaactatttgatacgcaagattttgagttgattctgcatcgtctgtggattgcaactcaagtaaaccaacagctcgatgtgcctgagaatgcaacgactgaggggtataagttacttagaaatctgttgattcaatgtgtgagccaaaatcatcctgagcatcatgagatatcggatgtgctagttaaaattcgttcttttataggcaaattcaagacggttttatccctgaattacgatcttattgtgtactgggcatctttgcttgaggatacaactactggaaaattaaaggattgcttcatcaaccgtttgtttaatgaacagtttgattggagtgaatttagagacttacattggaaggatcgcgataaaggttacaagacgacaagcttagtcttctacccacatggttctttgattttggcccaagacttcagtggtcaagagtccaaattacatactaaccctcgtggtgacggaaattatctccaacaaatttctcagcaatggagttctgcaacagtttcgccagtttttgtttctgaagggacaagtaagcaaaaactaagtgcgatagctcgtagccgttatcttgacactgtctaccgtgaagtactaccagagaaaaaggaaagtattgtgatctatggatggagtatgggggaaaatgacagccatatactcgatgcacttaaaaaaagtcgtccatcaagggtggcggtttcagtgtacggcactgatacctctggctgtgatgcaattgaagggaaattaaaagcggtgtttggtgaagatttgcttgtcgagtttttcgacagtgaaagcgccaactgctggtgccattaa

SEQ ID NO: 265334 - DNA, 318 bp, Klebsiella pneumoniae
gtgcgtatgtctctgatgtttgctgccgtgacgcttttaaccggtattaacctgttttttattccatttcagcctgttccggctctgtggggggctatcctggccgttgcttttgttctgattaatgtcgtggcggataagctgcgcctctggagtggtattgcgtggattatcgttgccggcatcatcataacgctgatgctgaaggggaaagagccgggtgacgaatttcgtgtcctgatcaccgttttcgctttcctggcttcaatctggtatagcgttgcgcagttcaggaaggaaaataagctccgttcctga

SEQ ID NO: 265335 - DNA, 606 bp, Klebsiella pneumoniae
atgacgaataacgccgacataaaaaaaaggaacttcctgactcagaatgaaattgagtctttacttaaagcggccgataccggtccttatgctgcacgtaattattgcctgacgttactgtgcttcatccatggtctgcgcgccagcgagatctgtcgtctacgaatatcggatatcgaccttgctgcccgatgtgtttacatccatcggcttaaaaaagggttttcgactacccacccgttgctggataaagagatctacgccctaaagcgctggctggccattcgcagcagctggccgcaggccgccagcgaatggctgtttctctcccgcaaaggtaatcccctttcccgccaacagttttatcagattatcgcgtcctcagggggactggcggggctgccactggagatccacccgcacatgctgcggcactcctgtggctttgcgttggcgaatatggggatcgatacccgcttgattcaggattatctcgggcatcgcaatatccgccacaccgtctggtataccgccagcaatgcgggacgcttctatggcatctgggacaatccccgtgacaaacagcgatcgtcgctgatccaatag

SEQ ID NO: 265336 - DNA, 231 bp, Klebsiella pneumoniae
atgaatgcgacctgtgagcgatttaaccggacacttagagaacaatttattgaattcaatgaattgttgctttttgacgacctgaatttgtttaatcaaagaatggctgaatatctggtgctgtataacagcaaaaggccacataaatcactcgaactgatgacgccagtggactatattttacgtgagagtaaaaattgcaatatgtggtggacccatacagagcattga

SEQ ID NO: 265337 - DNA, 312 bp, Klebsiella pneumoniae; identical to SEQ ID NO: 217060

SEQ ID NO: 265338 - DNA, 732 bp, Klebsiella pneumoniae
atgaagcttaataaattcatggctgtgatggtcgtcagctctgctctggtgttgtctggatgtagtgcaatgggaaccgctattaaaaagagaaatctggaagtaaaaacccagatgagcgaaacaatctggctggaaccttcaaataataagacggtttatctgcaaatcaaaaatacctccgataaggatatgagtggcctgcaggcaaaaattgccagcgctgtcacttcaaagggatatcaggtcgtcagtaaccccgatacggcgggctactggatccaggcgaatgtgctcaaggccgataaaatggaccttcgtgagtctcagggctggttaagccggggttatgagggcgctgtgactggcgccgctcttggggcggggattaccgcttacaactccagttccgcgggagcaaccctgggagtagggcttgcagccggtctggtcggaatggcggctgacgcgatggtggaagatgtgaactacaccatgatcaccgatgttcagatcgcggaaagaaccaaaacacaggttcagactgataacgtggccgtattacgtcagggaacatccggagcaaaagtgcagacaagtactgaaacgggtaatcagcataaataccagactcgcgtcgtctctaacgcgaataaagttaacctcaagttccctgaagcccagcctgttcttgaagaccagctggcaaaatcgatcgctaatatcctgtaa

SEQ ID NO: 265339 - DNA, 951 bp, Klebsiella pneumoniae
atggctaagcaggatgaacaacggctattggttaagattgccacgctttactatctggaaggacgaaagcagtctgatatcgcccaacttctctcgctatctcagtcatttgtctcccgcgccattacccgctgccagaaagaaggcgtcgtcaagatcagcgtcgttcagccgtccaacatctttctgaagctcgaaaaagggcttgaggatcgctacggccttaagcaggcggtggtggtggataccgaggaagaggccagcgatcataccatcaagcgggcgattggctccgccgccgcccactatctggaaacccggctgcggccaaaagatctgattggcgtctcctcgtggagctcaaccattcgcgcgatggtcgatgaagttcatgcgcaaaacctgaaagccagcggcgtgatccaactgctcggcggcgtcgggccaaacggtaacgtgcaggcgacgattcttacccagaccctcgcccagcgcctgaattgcgacgcctggctgctgccgtcacagagcatcgaaggatccatggaggagcgcaaccggctgctggccagcaaagacgtcgctgacgtggtgtcgcgctttgatgaagtggatatcgccatcgtcggcatcggcattctcgaaccctctcaactgctgaaaacctccggtaactactatcacgaagatatgctgcaggtgctggcggcgcgcggcgcggtgggtgatatctgcctgcactactacgacaaaaacggccatccggtgttacgcgatgatgaagatccggtgatcggtatggcactggagaaggtcaaaaaatgcccgaacgtggtcgcgctggccggcggtaccgataaagtcgcggccatcaaaggcgccctcaccggcggctacattgatgttttaatcaccgattaccctaccgctcgcatgctggttagcgactaa

SEQ ID NO: 265340 - DNA, 1041 bp, Klebsiella pneumoniae
ttgaaaaaaatcgccactaaaatcacccttgccgacattgcgcgtgaagcgcgcgtcggcgtagccaccgtcgaccgggtgctcaataagcgcgcggcggtgaaagagtccacggcgcggcgcgtgctggaggccgcccgccggctgggttttaccctcgagcagccccactatcgcctggctgccggcaaagcgccggtcacgatcagaatgggctttatcctgctgcaggagagccactccttctacctgccgttggcccgggcgctgacgcgcgaggctgccccatggctaccggcgggccaggcgccggtgatactgcattttgccatcgatgcggtggaagcgatggctcaggccattcaccgactcagcgatgaagtggaggtgctcggcctggtggcgctggatcacccgctgattcgccacgcggtggcccgggccgccgcccgcggcgtgcgcgtgctcaccctgctttccgatctatcggtcccccagcgcagcgggtatatcggcctcgataatcataaagccgggcgcaccgccgcctggtttatcgagcgcttatgccgggggaatggtgaaattggcattatcattggcgataatcgttttacctgccaggaaagctgtgagatcagctttcgctcctgcctgcgagaacagggcaaggggcaacagatccttgagccggttcgcagtcatgaacgggcggatatcgccaggaccgtgacggaacagatgctgactcagtacccggccctgcaggcgatctacgccccctgcggcggcgtcgaagggatcgtcgacgcgctgcgcgacagcggccgtcagcaggagatcgctctggtctgccacggtccgctcagcgacagtgaactggccctgatcgatggcaccatcgacatcatgcttaaccaccggctggatgagtttgccgccgttacgctgcgcgccatggcggacgccgcttcacgcccccatagcgaggtgatttcactccctcagcctttcgatatcatcaccaaagaaaatatgtaa

SEQ ID NO: 265341 - DNA, 975 bp, Klebsiella pneumoniae; identical to SEQ ID NO: 250130

SEQ ID NO: 265342 - DNA, 1014 bp, Klebsiella pneumoniae
atggcaacgatgctggaggtcgcaaagcgcgcgggggtatcgaaggcgaccgtttcgcgggtgctgtcgggcaacggctatgtcagccaggagaccaaagaccgggtgtttaaggcggtggcggagagcggctaccggcctaatctgctggcgcgcaacctggcgaccaaaaccacgcaaaccctcggcctggtggtgaccaataccctgtaccacggcgtctattttagcgaactgctgtatcacgtggcgcggatgacggaggataaagggcggcagctgatcctggccgacggcaagcacagcgcgcaagaggagcgggaggcgatccagtacctgctggatctacgctgcgatgcgatcatcatctacccgcgctttctcaccgttgatgagatggacgagatcgttgagaaccactcgcagccgatcatggtgcttaatcgccgcctgcgccgccacgccagccactgcgtctggtccgatcaaaaagcctcggcgatgcgggtagtggagcggctgattgcgcttggccaccgcgatatcgcctttattaccggctcccttgactcgcccaccggcgtcgaacgcctcgccggctacaaagacgcgctggctggccacggcatcgtcctgaacgaggcgcttatcgccgaagggcgctggacgccggaaaccggggcggcgggggtggagagcctgcgtcagcgcggggttacctacagcgcgctggtggcgagcaatgacgatatggccatcggggcgatgaagcagcttcaccagctgggcgttaaggtgccggaacaggtctcggtggtggggtttgacgatattgctcttgcgccgtatatggtgccgtcgctcgccagcgtccgggtgccggtgacggagatgattaaagagagcatcaatcggctgatctttatgctggatggcggggaattcaactttcagcaaagctttcccggagcgctgattgaacgcgagtcgctggtggcgggcccctgtgcctga

SEQ ID NO: 265343 - DNA, 810 bp, Klebsiella pneumoniae
atgaatggttctttacgcgcgcaatgtatcgccgagtttttaggcaccgggctgtttctgttttttggtatctgctgcctgagcgccctgaaactgaccggcgccagcctggggctgtgggagatctgtattatctggggactgggtatttctctggcggtgtacctgacggccggcatttcggggggacatctgaaccccgcggtcaccgtcgccctgtggctgtttgcctgcttcccgggcagaaaagtggtgccctatatcctggctcaggtcgccggcgcgtttggcggcgccgtgctggcctggatactttacagcaccctgtttacgcaatttgaaacggtgcatcatatggtgcgcggcagcctggaaagcctgcagctggccagtatattcagcacctacccggcgcctgagctcagcatctggcatgcggcgctggtggaggtggtgatcacctcgatgctgatggggatgatcatggcgctcaccgatgatggcaacggcgtacccaagggcccactggcgccgctgttgattggcattctggtggcggtgatcggcgcctcgaccgggccgcttaccggcttcgcgatgaatccagcacgcgattttggcccgaaattgttcacctggttcgccgggtggggcaatatcgccatgaccgggggaagagatattccctattttatcgtgcccattatcgcaccgttgttaggggcctgcctcggcgccgcaatttatcgttttcttatcgccaataatctgccctgtcatacctgcgtggaggaagaaaatacgcgttag

SEQ ID NO: 265344 - DNA, 993 bp, Klebsiella pneumoniae
atgccaggctggggcgaaatacttaacgaaatccaagcgttacttccaactcgtggcgatgcttgtgatgttatacgtagaaagtatcttgtgcagttacatcaaaaaacaggcagagcgataatttcttattcctccagatgggtgcagccctcccctggtatagacccacttcttatttccttgaatatttcagatattcaagggttaatggaggttatgaaaggcatcacagcagatagcgttgatctaattttacatagtcctggcggggcgttggatgcaaccgaaccatttgttacttatttgagatcaaaatttaagcatgtaagggtgattgtccctcatgctgcgatgtctgctgcggccatgatctcatgtgctgcagatgagatagtcatgggtaagcattccttccttggcccgatagacccgcaattagttcttcagacggctgtaggggcaaggatggttcctgcgcaagcgattcttgaacaatttaagtttgcgcaggatgaaatcactaaaaaccaagctaagttatcttcttggataacaatgcttaaccaatatggtcctgaccttttaatttcatgtaaaaatgcttctgaactttctaaagaccttgtacaagattggctagagaagtatatgtttcaaaacgataaattgtcggcgcagagaattgcggcttggctatcgactcactctaattttaaaacacacagtcgctatttgagtcgtgatgttttagaaagccaaggtttaaaaattacaaaacttgaagatgatcaagttctgcaagatcttgttttgtcagtgcatcatgcaaactctctcaccttcacgtctactgcatctgcaaagattattgaaaaccatcttgggaaagcgtttataagccatgcgaacatgccaggagcaccgatgatgaatgttcctgctatggtttttcaaggaataatgccacccccaatggtagataatcaataa

SEQ ID NO: 265345 - DNA, 708 bp, Klebsiella pneumoniae
atgaaatccgatcagcacaacactatcctcatcgtcggcgcctcgcgcggccttggccatgctatggcggcgacgttcctgcagcacggctgggaggtcatcggcaccgtgcgcgatttatcatcccacacgccgctccacgacctggccaagacgcatcccctgcggctacgcctggcgacgctcgacattcgcgatgaagcccagctggccgcgctgcaggcgacgcttcccccggcaagcctcgatatgctgtttgtcaacgccggtaccaccaatcgtgacccatcgcagaccattggcgacgtctccaccgaggagttttaccaggtgatgctcaccaatgccctggcgccgatgcgggttatcgagcgcctgcagcaggccgttaaaccgcaggggctgctcggcgtgatgtcctctggccaggggagcctgaccaataaccttaccggccagcgggaactctaccgcgggagtaaagctgcgctgaatatgtttatgcgcagctttgccgctcgcccctcctcggcctcccatccgctggtggtgatggccccgggatggatccgcaccgagctcggcggggcagatgccccgctgaccatcgaagagacgatcccacgcctggtgaacgtcctgctcgacaaacggcaacgtccgggactggagtatctggattaccagggccgtaccgtgccctggtaa

SEQ ID NO: 265346 - DNA, 888 bp, Klebsiella pneumoniae
atgcccggtccatccagaaaagcggcggcatggttgccgatactggtgattttagtcgccatgacctcgattcaaagcggcgcatcgcttgctaaatcgctgttcccggtggtcggcgccccgggcgtcaccgccctgcgtctggcgctgggaacgcttattctggtggtggtgttcaagccatggcggctacgtttctcccctgcgcagcgcgtgccgctgctactgtacggcctggcgctcggggcgatgaactatctcttttatttatccctgcagcgcattccgctcggcgtggcggtggccctggagtttaccggcccgctggcggtggcgctgtttggttcgcgccgcccgctggattttgtctgggtggcgctggcgatcctcggactatggtatcttctgccgctggggcagaacgtggcgcaggtcgatttaaccggcgcgctgttcgccctcggcgccggggcgtgctgggcggtctatattctgaccggacagcgtgccggtgaagagcatggtccagccacggtagcgatggggtcgctcatcgcctcgctggtgtttgtgccgttaggcatggcgcaggccaccgatacgctgtggcagtggtcgctgctgccgctgggtttggggatcgcgattctctctaccgcgctgccctactccctcgagatgatggccctgacgcgcttgccgacgcgcaccttcggcacgctgatgagccttgagccagcgttagctgccctctccggtatgatcttcctcggtgaaacgctgaagctctcccagaccctggcgctcggcgcgatcattatcgcctcgatgggcgccacgctgacgatgcaacggcagagtaaagtcgagcaggtcgatatcaattaa

SEQ ID NO: 265347 - DNA, 837 bp, Klebsiella pneumoniae
atgtatatttccaaactgaccctggtgaattacaaaaacttcaagaacacgtctctgcggtttcacaagggagtgaacaccattatcggggaaaacggctcagggaaatctaacatcctgcgagctattcgcctcctgcttgacgacaatatggtgcgttctgcttatcgtctggaagagggcgatttcagccgatcactcgaccaatggcaggggcactggatcatcatcagcatggagtttgacgagatcaccactgatgaatccgttcaggcactctttctccacggtacggctcccttggacgatgggccaatacataaggccacatataatctcattttccgacccaaaaaagacatcaggttgaagctggcagccttagaattgtttgattttaaagaactctcggagattcgtgacgcaatcaccatcgatgattacgaaacgcttttcactggacggagcagtgctgatttcggaaatccagcggtataccgaagtatcgttggagattttgatatatgtgatttctcatcagagacggagtttccagaaattggggcaaaggtgccgggcttcctttcagttacgaaagaggtctcgctgactttcatccaggccttgcgcgatgttgtttctgagtttcacaacaatcgcactaaccctttactcactttgctgaagagcaagagtggagatatcaatccactaacgatggaaccaatctccgagatggtccgcggacttaatgcctcaatcgaaggacttgaggatgttcagtcagttcgcaatcatattcgtgagaccattaaggacgccgcagggctttgttga

SEQ ID NO: 265348 - DNA, 1053 bp, Klebsiella pneumoniae
atgcctggtaagcacgaattctccgatgttctccccacagcctaccattcgatcattgatgtattaagcaagccagaacagaaagttgaacatgaacagctttcgctgttgttcagcctgacgatttatcatgatctgagaaaacaaggtaaggtcgatgacgaaataaatatcgaaaatgtgttaaaaattatcgaaaaaagatacggtgaccaacagatcattgaggaaattaatggaaaggcaacagatatcctgccgttaatgacctcgatcatctcttcctgtccgatcgatgccgaccggatggattacttgctcagagatggctatttctccggcgtcaagtgtggcatctacgattacaatcgcttgtttatgtcaattgtcccggtcgaggaacagggaaaattgtaccttgcttacaaagagagtgggattgattcgatcgctgagtttattggggcgcgctccagccttttctcgcaggtgtattaccataaaacaaaccgcgcctttgcgacgatgttgagcacattatgtgagattatgcaaagcaaggatccacaaaatgtcattatcgctgacgttaccgaccgtatcgttgaccatagcgatgaaagcttcatcgacgcgctgaaggagttttatttggcgtgcagtgatgattattttttgaatgacaaggttggtgaatggatagatatcagcgataccgaggcggttaataaaaaaatacttgctgacattattaaccgacacccatggtcgaaggtctatgaggccaaacactctgtgtataaagctaacatcgctgacaaggaaaataaggcgtggaagagtcaactcaccgggttattgacttctgtattacagcctcatttcaaaccacatgaatttgccgttgatattgtctccgactgcgcctttaaagacctggataaaaccgaagttaagcttttggtgaaagatcttaagaaccgctacgaaataaaaccgttaattgaatgtggtgataagttaaatcagtatcaaatcggctttgttgaataa

SEQ ID NO: 265349 - DNA, 825 bp, Klebsiella pneumoniae
atggcgtttaactcttatcgtggccagttttctcaaagagcatctaatttgatcgatctctttatgcaactgcggatgttatcattacataacgagagactatctgagattgttttcagcgaacccgagaaagagctcccagcacgtcgagttttcgatgagaatagtggagtgaagctggagattaaaaatctcagttatcaatatgacccgttctcgcaacctattttttctaactttaacctgcaggttgagccaggagaatctattgcgcttgttggaccttcaggggtcggtaaaacgactttactgaaagtgatgtgtggtttgttatctccaacgtcaggtgaggtaattgccgataatcttgacatttataaaatagggcttaataactaccgactggggacagcatgtgtcctgcaagaagatcgtcttttttcagggtcaattagcgataatatcagcggatttgaagataatgcggatgaagaattaattgttgagtgtgctcgacgcagtaatattcatgatgaaattatgaaaatgccaatgggttatgaaacaatgataggtgagttagggctgggtatttcaggtgggcaaaaacaaagactcttaattgccagagcgctttaccgcaagccgagcattttgtttatggatgaagcaacaagtcatcttgatttgaagaatgagtctgccataaaccaatctattgccagtttaagtataactcgaatcattgtcgcgcatcgtccttcaacgatagcgtctgcagaccggataattgatctttctcaatatggaaagcaagcatcataa

SEQ ID NO: 265350 - DNA, 912 bp, Klebsiella pneumoniae
atgatttctgcgagtaccctaaactcagaactcatcaataaaatcgcacaggattttgcgcaagccaccagtctggcggttgtggtcgtcaatattcacggtgatgagatttctgaattgtttaatttcacgccgttttgccagctgatgcgtcagcacccggagcacagcggacgctgtcgcatgagcgaccgctgcggcgggctggaagcctcgaaaaaagaccagctgtgtatctaccgctgtcatgcggggttaaccgatttttccatcccgctggtgatcgccggccacctggtcggcttcgtgctgtgcgggcaggtgcgtctgagcaatgatgttgaactggttgatatcttgaacgtcgatgaccgctggcaggacgatccggcgctggtccaggcgtttcgcgatgtgccggagatggactattcgcgggttatcgcttcggcggatctgctgaagctgatcgtcgagaattgcctgaaaaaacagctcaactttgtggttatcaaagataacccgtcgcagaacgatccggcgcaggccagccgggcgccctcgccgcacgatggcaaaatgaagaaggcgctgcgctatatcgacgcgcatctctccgatgagctgcgtctggaggatgtggcggcgcatgtctatctcagcccgtactacttcagcaaactgtttaaaaagtatcaggggatcggttttaacgcctgggtcaatcagcagcggatggcgagcgcaaaagagctgctatgccacagcgactggagcatcgccagcatcgcgcggaatttaggtttttcgcaaaccagctatttttgcaaagtgtttcgccagacctatcaggtaacgccgcaggcatttcgtcagcaaattaatgccggatcacaaactgagtctttttaa

SEQ ID NO: 265351 - DNA, 648 bp, Klebsiella pneumoniae
gtgactcaatcactgttcgatttttctgcatatttcaagtttttcatcggcttatttgccctggttaacccggttggcattattccggtattcatcagtatgactagctatcagccggctgcggtgcgtaataagaccaacctcaccgccaacctgtcggtggcgatcatcctcctgacgtcgctgttcctcggcgatggcattctgcagattttcggtatctccattgactccttccgtatcgccggcggcatcctggtggtgaccatcgcgatgtcgatgatcagcggtaagctcggcgaagataagcagaacaagcaggagaagtcggagacggcggtccgggagagcatcggcgtcgttcctctcgcgctaccattaatggccgggccaggggcaatcagttcaactatcgtctgggggacccggtaccactcctgggtgcatctggtcgggttctcactggcgatagcggtatttgccctctgctgctgggggattttccgtatggcgccgtggctggtccgtttgctggggcagacgggaatcaacgtcatcacccgtattatgggcctgttgctgatggccctcggcattgagtttattgtgaccgggattaaagcgcttttcccagggctgctgagttag

SEQ ID NO: 265352 - DNA, 639 bp, Klebsiella pneumoniae; identical to SEQ ID NO: 137319

SEQ ID NO: 265353 - DNA, 504 bp, Klebsiella pneumoniae
gtgaccaccgcccgcgcggcgggtacactgaatttcaccggtaaaattattaacgagtcctgccagatcgccaataacggtggcgatgttaatgtcgattttggcaacgtcgatatgtcggcgctgaaatcccatgaagcgaaaaccgcagaaacgccgttcactatcaacctcaccggttgcccactggcgcagaacatcagtatcagcctggaaggtactccggacaccaacgctaacggcaccagcgccgccgtgctggcgctctccgacgccgcggataccgccaaaggggtgggcattgaagtcttctcttcccctgacggctcaacggaaggcactcagctgacctttgacaagcagagcaaaacggcggtttcgcaagccgacgaaaacggtgatattgcatttaactttattgccgatctgaagagcgattcctcacaggatgtcactgccggcaatattaatgccacggccaatattgatattgtgtacgaatag

SEQ ID NO: 265354 - DNA, 435 bp, Klebsiella pneumoniae; identical to SEQ ID NO: 234532

SEQ ID NO: 265355 - DNA, 408 bp, Klebsiella pneumoniae
atgtgcctgcaccggaaagagatgcagacgagccggggttcccgccagtcgccgggcgctggcgagcaacaacgcagcccggccatacgtcagcggctgacaaagcagttctgtaagcgtgaggatttccacgccactgagagagccgcaggcggcgagccagccgggtacggtttcgggtgcgacgggcgccatatcaacagcgtcgggccagccagcctggcgcagcatccggtcgccgtgacgcagaataagcgcgttaagggtttcatttttcatcattatagtctctgtccggggtatatcgtcccgccgcgtggcggggcgatctgctgtcagcttttcagtaatgcgcgcactttcgctgtatccgccaggcggcgcattacgctttccggcaccggttga

SEQ ID NO: 265356 - DNA, 261 bp, Klebsiella pneumoniae
atggtggaagatgtgaactacaccatgatcaccgatgttcagatcgcggaaagaaccaaaacacaggttcagactgataacgtggccgtattacgtcagggaacatctggcgcaaaagtgcagacaagtactgaaacgggtaatcagcacaaataccagactcgcgtcgtctctaacgcgaataaagttaacctcaagttccctgaagcccagcctgttcttgaagaccagctggcaaaatcgatcgcaaatattctgtag

SEQ ID NO: 265357 - DNA, 222 bp, Klebsiella pneumoniae; identical to SEQ ID NO: 138132

SEQ ID NO: 265358 - DNA, 147 bp, Klebsiella pneumoniae
atgaagaacttattttcactcgaggttgagcattacagcaaatatacactgcgttggtttaccgctgcgataaacgcaattggcctggttacatttggagtaattacttatggcatctgcatattgatcgagtggtggacggcatga

SEQ ID NO: 265359 - DNA, 150 bp, Klebsiella pneumoniae
atgtccgccggttctatggtgtggagggcaaagcgggagtgtttttttatggtcggcgcgctgggcgataccctgccctttgcggatatggtgaacttctgcaagcgtagcgccgtagccaagatttctgcatacaacgcaacccagtga

SEQ ID NO: 265360 - DNA, 300 bp, Klebsiella pneumoniae
atgaaaattgaagaaaaggtttgtttcgatatcttaaaatatttgcaagagttttatccccacccattaatgactgatggatataccaaattattaaggacttatggcgaagataaacttgatggtcacattctctatatgtatcaaaaaggactgatatcctcagaggttcaatacgtatatattgatgaggatggttcgcagatagacaaccctaaacgcggcgaaggtcaatggcttatcgataccagacaaacctttataacagccactggcctcgatttgcttgataagcaataa

SEQ ID NO: 265361 - DNA, 522 bp, Klebsiella pneumoniae
atgaaaaaactcatcccattattgctaatttttccctttattgcctctgcctccacagatttaattgaggattcaggatatatcgtcccaatatcaggcccaggaatacaaattactaacccgtacgctgactataaggtcattagcggtatcgataacggtaaaaaaattgtactaaatgtgtcagtattaaacctacgttcctacaaggagaatgcagacctaagcgaatctaataaaaattatgcggaaggaagtaaaactgtattcagttacggcgataacgtttacacaaaggattttataaaattctcctcggaagcagctataaattcgacaaaagaagacctaaaaaaattatattgtacgcctgatggtatttaccctatgtcctcacaggagagactattctacgaagtacggaaagaacataagacaataatgctcaattactacagtgattcaggaaaaaccctcatatttgggtttggggtttctccagaatcatgtaaatcgaaatag

SEQ ID NO: 265362 - DNA, 750 bp, Klebsiella pneumoniae
atgggccttgttattgctaataatcttgacctttcagggcaggcgatggggtatatattgcctgtatctgctaatgctgaatattttaactactttaataatgctaatgcactggctcgaaatctggttagcgggaaacctgcagctgtaaaaaatggttcgccagtatttaacggccagagcatatccgtaaccgggaatgctaactttataaatacgttagttacccagactgacgaaatgaccatcatcaccgtcggtgaacccacagccgtgagtggtaactttgtccactggtcaacgtatggagaggccataactaacggcggctccggcatgacgtcgcaaggttatgtacggcagtcgaccgcgaccaataaccccacgttgtctctcagttactccgctgatgcctgggcgacgcgttctcaactggcatacggcgtggcatctggggcaaatactgtgaagttgcgtgctatcgcctctgtgttcagtcagtcagcgctgagttctcgtttgcgtgatttgactaatgcgcaggcacaaccccagccattccccgcgggtagcatcattggtaagtcagggccgatatttctcggttcgcacgcagttgctggggtagaaaattcagcgggtaatttgtacgccgcggcgatttatagcagagcgttgaccgatacggaaatcaatactgtctacgcgtcaatgaaggcgtattttgccagtaagggcatcacagtataa

SEQ ID NO: 265363 - DNA, 1038 bp, Klebsiella pneumoniae
atgcctgtaagaaaattatccaatggccaatgggttgctgatttttacaccgtagaccgaagcgacggtaaagacggtaagcgggtacgcaaaaaattcgccaccaaaggcgaagcgcttgcctttgaaaactacacccttcaaaaagtcgaggacactccctggcttggacaaggaaaggataaacgccgcctttcagatttgatacatctctggtttgagcgccacggaataaccctgcgcgatggtgaaaagcgtaagagcgccatgttatgggctgacgagtgcatgggttcaccgatggctactgagttcaccgcgcagctgttcaccgcttatagggctaaaagacttgatggccatttggcccgtactaagcgcgttgctcaggtttcgccgcgaaccatgaacctggagcacgcttatttcctcgctgtatttaatgaattaaagcggctcggtgaatgggatgcaccgaacccattagaaaacgttcgtcagttcagaacagaagaaagtgaaatggcctacctgactggtgaacagattgacaagcttttagaggcatgccgcctcagttctgcgaaagatctgggaatggtagtgaaagtttgcctgtctactggcgcccgatggggggaggctgaaaaactgaaacgcagtcagataacagcgggaaaggtcacattcataaagaccaaagggaagcgtaaccgcaccatcccacttgactcagaaatcatagccgaacttccaaaaaagaatggggcactttttagcccatgttattacgcctttagatcagctctggaaagagcggggattgaattaccggcagggcaattgacgcacgttctcagacacacctttgcatcccattttatgatgaacggcgggaatatactggtgcttcaaaaaatactcgggcataccgatatcaaaatgacgatgcgttacgcccacttcgcgccaaaccatctagaggaagcgttaaaacttaaccctctaaaatgtcgcaaaagtgtcgcagaaacttaa

SEQ ID NO: 265364 - DNA, 567 bp, Klebsiella pneumoniae
atgattgactacaaaacagcatcaaaagatcagctgaaagcagagatgaaacgcctggctagcgttgtatctgataccccctttggtacaaaaaaagaatttttccatctccctgagattttgaactccggcgaacaaccattggcaattgccagtgggatgatggatgggaacacatggctcataaccctgaccaacaaacgagtaatcttccttgataaaggcatgatttttggggttaagcaggttgacattaatcttaataatattgttagcgttggcggtaaaacagggcttatgtttggggagattatgatttctaccagcggtcaaaattacacaattaaaaatgtaatgaagggttcagtaattccatttacaaacctagtgaatgaaacaagaaactctttgaactccgccgcccaaccaaaacaagaaccaactaaagccacccaatcttttgacgaacaaatgtcaaaaattgaacgcctagccgaaatgaaagaagaaggaatactgactgaagaggaatttcaacaacagaaacaacgtattcttaatggttaa

SEQ ID NO: 265365 - DNA, 582 bp, Klebsiella pneumoniae
atgagcaaattttccttcgagcagatcggacacagtagcgacgtcttggatcgagtcgtagacgcctacggcttcacatcaaaactccaacttgcagaccattttgatatggcttccagtagcctatctgcgcgtttcaaaagggggatatttccggctgatatggttgttaggtgtgtagctgaaactggtgcctctctggaatggctcgctactggtcaaggcaggaagtttgacgatgaagaactagatattttgaaaatgcctaggcgcaaaatcgtggacggacttctatacgaagcaggcatgtacatgctagataaagtctcatttttacccggagttcctctaccatcagcaccgctatgcgttctggatggtaatacccagtttatcgttgatacaaccttcaacgaagtctatgacgatcagtggttagttgaaattgaaagtaaatccagcattcgaaccctcacccgcattcctatcaaaaaggtaagagttagcggcgttggaatggccttcgactgttcaattgaagatataaaaatacttggcagagttgtattaacaataaaataa

SEQ ID NO: 265366 - DNA, 222 bp, Klebsiella pneumoniae; identical to SEQ ID NO: 188490

SEQ ID NO: 265367 - DNA, 234 bp, Klebsiella pneumoniae
atgcagatgattcgccagaatttatccgccacaaaatccggtactgacctgctggagcttcttgccagagcgacgcaggaaggcaaagccgctgccgctgatctgtgcgctacccgcctggataagctggcagcccatgccgccaacgaggggctgagcgccgccgagattgtagagctgatgcgtgaagaggctgcggtaatttgcagcaaaggcggtgccgcatggaactga

SEQ ID NO: 265368 - DNA, 612 bp, Klebsiella pneumoniae
ttgcagcaaaggcggtgccgcatggaactgaaaaacaaaaagttacagtctgttattcgcgctgcacagtggcttgaagaagaccgcttgtttattgataccgaaacaacgggccttggtgatgatgatgaaatagttgaaatatgcatcattgacaggtctggtcatattctgcttaacacacttgttaagcccacaaagtctattcctgatgaggctgtggctattcatgggatcaccaatgaaatggttgcctttgcccctgcatggactgatatatgcggggccgttgaagagctgtttaggcgttttggctttgttatctataacgctgaatatgacattcggctgattcgtcagacttatgaactgaccggaagagcttccgatgcagggccgtggatgcttgcagaccatgctgtttgtgcgatgaaactttatgctgagtatcgtggtgagccagggaaatatagcgcctataagtggcacaagttagttgatgccgctgcgcatgaaggtgttgtggttgaggggcaggcacatcgtgctttagctgattgccaaatgacattaggtgtcattaaagcattagcacagggcggtgccgtatga

SEQ ID NO: 265369 - DNA, 858 bp, Klebsiella pneumoniae
atgaccattagatctccgcttaagtgggtgggcagtaaagcccgcctcatgccgcagctgctcccgcacttgccggaaggcaaacgcctggttgagccgttcgcgggttcatgcgccgtcatgatgaatactgattatgacgaatacctgatcgctgacctgaacccggatttagtcaatctgtgtaaggcgatggcctaccataccgacgcgtttcttttggaacttgaatccctgttttctgccggggctttaggcgaacaggagagctgcgcagttttttactatgccgtgcgggatgcgtttaatttgtcaggaaaggggcttggatctgaaagcgttgaagtcgctgcccgtttcatgtacctgaaccgccacggctttaacgggctttgccgttacaaccgccgtggccagttcaatgtcccgtttgggaagtacaagaaaaactatttcccgcagaaagaagttagggcatttgctgataaggcgaaacgcgagacgttcatcactgcgcattactccgaaacgctggcactggttcgtgccggggatgtggtctattgcgatccaccatatctgacggaatcaggaaatttcacctcatacactgaaagcggcttttcacatcttgatcaggggcggctggccagaaaactgcgccgtcttgctgaaaagggcgtgagtgttgttgcttcaaacagcgatctggaaatggtgcattacctttacgccgggtttgaggcggtaaaggttaacgcgcccagaagtgttggtgccgcagctgcaagccagaaatcagccgcagagctgatcctgaaaaccccagcgggttctattgcaatggcttgcgcatga

SEQ ID NO: 265370 - DNA, 2022 bp, Klebsiella pneumoniae
atgacgcacgttgcttatggccaacatcacgccgtcgatgcctggcggcgtgatacttttgcgccaggaacgccagcgaatgcgacgctcacagagcgccgtttgtgggcagttaacccacaggattatgaatggcgctcacaatttcttcacgagatacccgactggttagccgggtattttggcaaccgttacgaaaagctgtttgctggccgtgacggccgccgccgtgccaatacattcctgcgcaagaccatcggcgggaatgtattgccacgtctgcggaaagtggccgctcgttaccagctggccgctgatgtgagcgctctctctttcggtaagtcgtttcagcgcttgccgtcacttgaccgcaccgatctcaaaaagctgtctggccaggtctctggctggatggctcagatgttttatgacttcaccgacacgctgagaggcaaacccaaagacgagcgggaactgcgccagcgcacactgggtgcataccgcaatctgtgctcgctttccctcatgctgaacaatcagccaccgtactgggcagagcacgaatccaatgaaggcgatctggaaacccgaaaagcggagtccgggattttgcgtctcatggcaccggaatggtggtatcagcgcctgaaacgtgcccgtgatctgcaacgtgaacatctcgccatcgccgttggccaggtgcagaaatctgccagcgcctacgtatcacgtaaaaccctgggcgaatggatagaccagaagaaacgtaatctggaattctttaaaaagtttgatctgatggacgaagagggcaaccgcattgcgctggacagcatggtacaccgcagcgttgctaacccggccattcgtcgctgtgaactgatggtgcgcatgcgtgggtttgaagatatcgccaatgaacaggggctggctggcgagttttacacaatcactgcgccttcacgatatcacgctgtacacagcaagggcggctttgtgtctcagtggaacggattaagcccacgggacacgcagcgttatttatgcaacgtctgggcaaaagcacgcgcggcgatctcccgtgccggtattcatatttttggttttcgcgtggtggaaccacaccacgatgggacaccacactggcatatgctgctgttcatgcggccgcatgacgttgaggcggtgcgcgatatcctttgctatcaagccaggattgccgattcagaagaacttcaaacacccaacgcgcttaaagcgcgttttcacgttgagcctatcgatcccgctaaaggatcggcaacggggtatatcgctaaatacatctcaaaaaatatcgacggctttgcgcttgatggcgaacaggatgaagaaaccggggaaaacctgcgtgacatggcaaaatccgtatcagcctgggcatcccgctggcgtattcgccagtttcagcaaattggtggtgcgcctgtgactgtctggcgggagctgcgccgcttgggcgatcagcgcctgactgatagccgcatggatgctgtgctggcagcggctgatgttggagactgggcagcctatacccagttgcaggggggcgctctggttgcgcgtcgtgatcttgttgttcgcctggcctatgaaataacagagcagggtaacgagtacgccgaagatgttcagcgtgtgcagggtatctattcacctttgatccctgattctgaagtttgcacccgtctggttaagtggcagaaggttgcgaagttggccgccgcgccagcggaggcggggttttctggcggcagcgccgccccttggagttctgtcaataactgtacggagggcgaagcccccaggcggttaaaaagtgatttaaaccagagaggatttgtcggttccgacgaagaaatagccatactgatgcgcggcagcgggctgatgtatggccggggaacgttgatttacaggaatggtcggttacaggagaaacagcatgatgcgagcagccagcgctggccgggttggtcgtga

SEQ ID NO: 265371 - DNA, 1680 bp, Klebsiella pneumoniae
gtgaagccaattcaacgagtttatttatcaacgcagcaggttcactgcccggatatcgatctggttctggagctgaacagctgcggccgtggatttatcaccgcgcagacggatcaggactacaccgggaagctggtgcgggtcgatgtgggttataccgatctgctgttgcgctggtttaccggatacgttgagcgctcccagccagcggagaacggcttccagcgtctctttgtgcgcgagctggcaggcgtgtttgataaacagtggtcgtgctccatgcaacacccgacgctgaagcagattggcagctggctggcagagcagagcggcatcacggttcaggtgccggaagccggatacgcgacaacaccgatcccccatttcacccacagcggcaccggctttcagttgctgaatgtcctggggcaggcattcagtgtcgcggactatatctggcatccactgccggacggtgggttatatctgggtggcgctgaaggagccatgttcgccggtcgggaagtggaaatcccgtcagaatttgcccaaagcacggcgggaggcaacagtatgacgctgccggtggtacagagtctgcgccccggggtggagatgaacggccagcggatcacccgcgttcatctgcataatgcggatatgaccgtgacctggacgccccgcaataaacagaccggccagtcactacagaaaacgccgcttcagcgccagattgaggcgcactacccggagctggccagcggactgcataccccgaaaatggggcgggtcgtggcgcataccgaaccggtcagcagtggtaattttgccgatccgtttcgcccgcgctacgccgtggatgtgcagctgctggacgcgaacggcaacccggacggcagcacgccggtgtattcagccgtaccgctgccggtgccgatggcggggaatgattccgggctgtttcagttcccggcactggggacgctggtcgaaatggcgttcaccggaggccgtccggataagccttttattcgtggcagtcacccggacggcacaagtctgcctgacctgaagccgggagagcagctgcaacagcaacgcgaagaggtatcgcagcgcgtcacccagtccggagactgggaacgaaaaaccgatcagagtatccgtgaagactccatgtccagggaagtgaccgccgatacggaaaaacgcgagctgatcacgcgggaaacgatggtgaaagccactgacaaaaccacggtgatcggcacggcacaactgacggccggggccgtacagcatattgcggccggggattatgctgtggccgcaggtcgaaaccgcctggcaacaatcggcggcgatgatgaaacggatgttgctggccagcagaccacaaccaccggcaaaggcctgacagagaaaattggcgcgatacgccgcagcgtcgccgcggtgcagcagcagattgttgcgcccgtggtctggatcggctcagaacaaatcaatgtgacacaactgatgctggacacgctcgacgtggtgaaagaactggccacactcactgccagccatacccacccggacaccggcctgccaaccaatgccggagagattgaaggcgtggcggcgaagaccgatatactcaacgagaaatactcccccgtcatcgctaagtaa

SEQ ID NO: 265372 - DNA, 1164 bp, Klebsiella pneumoniae; identical to SEQ ID NO: 226549

SEQ ID NO: 265373 - DNA, 423 bp, Klebsiella pneumoniae; identical to SEQ ID NO: 209397

SEQ ID NO: 265374 - DNA, 12705 bp, Klebsiella pneumoniae
atggcaaataacataattaaagggcgcaagggtggcggctcaaagcagcgtacaccgacggaacagccggatgatttacagtccgttgcgaaagccaaaattctgctcgcattaggtgagggtgaatttgcaggtggtttaaccgggaaagatatttatcttgatggcaccccgcttgaaaatgctgatggttcgcaaaacttcagtggcgtgtcctgggaatttcgccccggcacgcaggctcagacttatattcagggtattcccggtactgaaaatgaaatcagtgtaggaacggaagtttccagcaagacagcctggacccatacctttactaatacccagctttctgccgttcgtgtccgcctgaaatggccgtccctgatgaaacaggaagatgacggcgacgtggtgggcaataccgtcaagtatgcgattgacctgcagaccgacggcggcgcctggcagacggtgctggaaaccgctgtcacgggtaaaaccacctccggttatgagcggagccatcgtattgatctgccccaggccggcagtacctggacgctacgcctgcgtaaaatctctccggatgcaaacagtgtcaaagttggcgacgtgatgacgctgcagagctataccgaagtgattgacgcgaagctgcgttatcccaacaccgcgctgctttatatcgagttcgactccagccagtttaatggctccattccgcaaatttcctgtgagccgcgtgggcgcgtgattcgtgtgccggataactacaatccggaaacccgcgaatataccggcgtctggaccggcgggtttaaatgggcctggacggataacccggcctggatctattacgacattgttacagctgaccgttttggtctcggtaatcgtctgagcagcgccaatatttcgaaatggacgctgtaccagattgcacagtactgcgatcagctggttcctgacgggcgcggtggtgacggcatggagccgcgctatacctgtaacgtctacgtccaggaacgcaacgatgcttacaccgtactgcgagactttgccgccattttccggggcatgacttgctggaacggtgagcagattgttgtgcaggctgatatgccgcgtgatgtcgattttacctatacgcgcgccaatattgtcggcaaaccccgttattcgagcagcagcagccaggttcggtacaccaacgccctggtttcctggtctgatccggataatgcttatgctgatgcaatggagccggcgtttatcccggaactggtttcccgctacagttttaaccagctcgaaatgaccgcgattggctgtacgcgccagagcgaagcccaccgtaaggggctgtggggcatactgaccaacaacaaagaccgggtcgttgagtttgatgtggggctggacggtcgcattcctcaacccggttatatcattgccctggcggatgagttgctggccggacgggtcaacggcgggcggatcagcgcggtgaatggccgggtgattacgctggatcgtgatgtggatgccaaacctggcgaccgcctccagctaaacctgccatccgggatctcacagagccggaccatccaggccgttaacggacgccggcagattacggtcacaacggcgtacagtgagacgccagaacgggaatgcgtctgggccgtagaatctaatgacctctttctgcagcagtaccgggtcacaggggtaaaagagaacggcgatgccaccctcacgatcaccggcgtgtcacatgacccggataaattcgcccgcatcgataccggcgcgattatcgatcagcgcccggttagcgtattgccggcgggcaaccagtcacctcctgacgatattgtcatcacatcccgctcggtcgtgaatcaggggatcagcgtcgaaacgatgcaggttaactggtcagcggtcagcggcgctattgcctacgaggcgcagtggcgccgtaacgacgggaactggattaatgtgccgcgcagctcgaccacctcgtttgaggtcagcggcatttatgccggtcgttacctggttcgcgtccgtgcgatcaatgcggcggagatctcgagcggctgggcgtattccgaagagaaaaccctgaccggcaaggtcggcgagccgctggcaccgctggcgctggcaacccgttcgctggttcatggggtccaggttagctgggagttcccgaccggctccggggatacgctgcgcacggaactgcagtacagcaaaaaccaggacggcagtgcgccaatgccgttatcagacgtggcctatccggggaaaagctatcagcagatgggcctcagtatgggcgccgaattctggtaccgggcgcgccttgtggatcgtcttggcaatgaaagcccgtggaccggctgggtccaggggatggccagcgataactttgatgactactacgaaaacctgaccgacgcgatcaaggatacggctgcctgggaggaaacgcagcgcaccattagcgaaacgcaggaaggtatccgcaatacgcagcaggaactggagcagaccgctgaagctctgcgtaaggaagccgaagaccaggcgaagcaggtcagccaggatattgacgcatcggcgaaaagcatcactgctgatgttgacgggaagatctccgccgtgaataaaaccatcacggatgagataacctcggtcaatgaggctctcgattctggtctggctcaggcaaacaaaggcgttcaggaggcaaaatccgccgtcgcagatgcgaacaagcagatcgcaactgtgaacaagtcgctgaccgacagcatcacccaggtaagacagtcagtcaccgatacggctgcggaaatcaacgccaccatcgacctggagattgccagggtcagcaaaacgctggccgacggcgatgccgcattgaatgcgcagataaagactgctgaaaatggcctgaagcagtcgctgtctcaggtcaacaccacgctgaccaatgcggtgaagcaggagaccgcggatcgtattgccgatgttaacgcgaaggcgtcacaggccgctgatgaactgctggcggcaacgcaggggattgaggcgagtatcgagagcctgactcaggtgatgaagaccgccgatgaaaatctggcgcgggaaatgtccagcctcgctgccggcgctaatatccagttcgattcgcaggttatctggcatttcaacaatcagacgaccgagggctggaccggcagcgccggcgtaccgggtgtgtcacaggatggctggttacgcccggcggacagcgccaccgatccgtacattacctctcctggcgggctggctgtcgatggtgcggcgtaccgtttcatcatgctgcgctttcgtaaaaccggcaaaccagtctgggcgggtgagatccgctgggtgtctgccggcgaaaacttcactaacacgaagcgatacattgttgctgagccggagtatgccgatggggtggcaaccctgacggtgcgtgatattccgtggacagggaacattgatcgtattcgcctggacctgacgaaccagcaggatgccagcaactttatcgaattcgactggatcgccgttggccggccagcacccggcgccagtacggcggctctgcaggatgtgcgcagcacgctgagtaacgcgctgaccgccgaagcgcaggcacgcagcacgctggcggcgcagatgcgtggctcctatgatgggaacgatctggagaaagtcacctccgggctgctgtaccaggaaaaaaccgcgcgcgttaccgccatctcggcggaagttaaggccagagagtccctgcagacgcagtttaacgacaacaaagctgctgtttctggtgaactgagttctctgacgacagagcagagcgcgcaggcgagccgtatcggtggcctggaaaccagcctcgggaaaaaagccgatgcagccgcgctgacgtccctgacgcagaaagttgagcaacagggcgccacgctgacatcgcagggcgccgcgttaacatcgctcactaaccgggttggccagacggaaacgggcctggctggtacgaatgaggcactgagcgggctgcagtctgttgttacccagcagggcgacaggataaccagccagggtcagtccatcacgaaactgacgagcgatttgggcacgacaaattccgcgctggcgaagaaagctgaagcggctgcggtcactgccttaacgcagcaggtagagcaaaacgggcgggatattcgcagcaatactgacagcatcaccagcctgtcgaatcaactggtcaatggccagccgaatcgctggtcccgtcggatctatccggtgcagctggctaacgccgggacagtcccgtcattcagcgatgttcgcgctgtggcaccaacggtagtggatgaggtggccgacgcggccaaactggactttacgtccgccggcagctatctgatcgcgctgtattcctgccaggtgaaagtggccgcagataccaccatcacactggcgcccggcgccagggtttttgatgataccggcgccatatttgtgaatggggttcaggtcgcctggggtaacgccagcaggaataccgtcagttttgaactgaaagtcggctggaacaccgttgagtttctggtgaatcagtggaccggccaggcgtatatcaacctgggcctgaagctgtcagacaaggttgctgagatgtactccggtctcggggtttccgcgctggcaaacgcagccggcgtgctcagctcgaatgtcagccagattggcaacgaggtggtcagcaattcgcagagcatcacccaactccggaatgcgctgacgcagacagacgcgaacgtggccagcaaagcggatcagacggcgatgaactcgctaaccggacgagtggagaagacggaatccgggctgacggctgctaacgccaacattacctcgctgaaatccgctgtacgggccggaaacgcatcaggcggagatttaattcccaacccgacatttgacccggcttacgaccagatggggtttagcgtcgtatccacgacggctgaggaggtccctcctggctgcccgtatggttatgcggccagaattgccagtcgggatcaccatcctaactttgccgcgttcccggccacgcttaacgatgtgattgagatcagcgcactggttgcctgcggcgctggcacggcgaattttaatctgcatgttggcaccgccgttcggccagatacgagcaccggtgcgccactcatggcggggggcggaaaatcaccttctgcgacctggcagagaaccacctggcgcttcaaggtcacgcaggcgatggtagacaggggttatatccgcccgttcctgcagatctcgcagaacagcccgtatggcaccgtatggttcgttacggactggcatatgcgaaatgtgacagcggcgcaaaaggttcaggatactgcggatgccacggcggcggcggttgactcgctgaccaccaccgtgacgcaacagggtaatctgctgacctcgaccggcaaccggacaacccagctggaaaacgggctggccaccaccaatgccgcagtggccaaaaaggctgatgcgacagcggtgcaggatttgaccaataccgtcacacagctgggcaacgatctgactgctgcgaacagcgccatcacgaaactgaccggaaatctggcgaataccgataaagcgctggcgcagaaagccgatgcgactgcgctggccacgctcgacacgaaagtgacgcagcagggtaaaacgctggagagccagagcaattcgctgacgaatctgtcgaacagtctctcgcaagttgcggcagatatcgatgccagcggtcagataccgggtaacctggtcgtgaatccctcatttgaacgcgggctggatggttataccgggcggtcaaccgcgaccagtgtggtggaggtttccgctcctcacagcgggacgcgggcgctgaaggttgatccggggagcgtgtctccggggcaatacatcccgtttgttcaggggcgaacctatgaaatcggggtgtgggtcaaggaacccggagcgacgacggataatggcgcggggaacaacaagttgcggatcggtaactctgccggccagccggtctttgagcgtccgtacaacagcggcacggtggggacaaactggaccctggtttccggtcgctggaaagcgacggagacagccagcctgccggtgacgctgagcaactatctgattagcggcagccgctacttcgatgatttttacgtcactgacgttaccgaccgggtggacatcgatgccaccgccggcgccgttaccggactgacgagccgggtcagcacagcggaaggggccatcacctcacaaagccagcagctgacgaacctgcagaacagcctgaacacgaccaacagcaatgtgtcgaagaaggccgatgccacggcactgacttcggtcgataaccgggtgacagaggcggaagggaaactgaccacacagagccagcagctgacaaatctggcgaatgtgctgacggccacccgcaacgccggcgacaacctgatcccgaactttgattttctgcagggcagcactgcctgggatattcagtatccagccggtgtgacctttggcgatttcggggacgggaaagcgggggtccggctgaaccggacgaccactatcagcccaggaattttctccaacaacaacaagccggtgccgctgaatggccagcgcaagtaccgggtggtggtgaaggccaaaggtgtttccggagcgatgagtctgctgatccgtcgccagaacaaaattggccagacggatagcacgtatgaggataaaacggtcacgctgaccactgactggcaaaccatcacctgggaaaccggattgacggctgccggcgcggacgggcagaacttcaaactttattctcatccgacaaacggtgaaatctggctcgattccgtccgggtttttgatatcaccgatgaaaccaacatcaaggcgaccagcgatgctgtttcgtctctgaccgggacggtgacgaaccaggggaacaccctgacatcacaggggcaatccatcacggcgctgaataacgcgctggaaggggtcaaaggcgatgtggcgaagaaggctgatgcgtcggcggtcagttcactgaccaaccgggttacccagactgaaaaggatatccgtagccaggccgacagcctgaccagcctgaatacatcgctgaagcagcaggcgacacggggagccaacgtactgccggacggcagttttgaatcctatgccgtcggcgatgttctcagtaatgcccgcgccgttatcaccagtgaagctgctcacagcgggaccaaaagcctgcgtgttacgcgcagtacggagtacaacccgaacgcgacggataataacgatacccatatcttttcaggcatgcaggttcgcgataacgcggtctattacgtggaggcgtgggttaagttgccggctggctcgaccgccgatccgaccgtttatatggtactcggattttccttccaggattcagccaatggctggtcgtggcctggcctgaacgtgaaagtctccgagttgtcggtggacaactggacaaaagtcagtggctatctgaccaacaaccgaaccgcactgaaacaggcaatggtgaggatctccatcccgaatacaccaaaagttcgcctgggtgacgccttcctgattgatgatctgatcatcactgacgtgaccgatgcgaaagcggcgctcgatgccgccgatgcgaatgcgcaggcgctttccagtctgtccgcgtcagtcacgcagaacgggaagaatattacgtctcagggcagcgcgatcacgaagctgcagtcggatgtgacgcaacttggtaaggatatcagcggcaaggccgatgccagcgcgctgacgaatctgacgacccgcgtgacggctaccgaaggcagcctgaaatcgcagggagacagcctgaccagcctgcagaacagcctgaacacgactaacagcaatgtggcgaagaaggctgatgcaacggcgctgcagagcctgcagaacaccgttgaacagcatggcagggatctgaccgcgcaaagcagcgcgctgacgaacctggaaaacaacttttcctccctggccgttggcgggaccaaccttatccgcaatgcggacacactggagggatggagcagccgccacgccacagagacgtatctgggcgaccgcgtggcctacacccggctggcgaaaggtgcatccggttatatccagctggatgaacagacgctggatgttaccgggcgtacggaatttgtattcagcttctatgcgaaaggggcttatgacgggcaggagatggcgagttatttctataacccgtcgaacaccaccaccacggaaaccagccagggcgttaaaggcggggccggtgacggcaaggcggtcacgaaactgaccaccgcatgggcgcgttactgggtgaaatgggttattcctgccaccagtggcaccaaacggctgattgccgcgcgtctggaaagcgcgacgtctgccgacaaagaagtctggctctgccgccctcagctggaaaccgggaccgtgatgaccgactggtcaccgagtccggatgatgcagccagcggtattaccgcgaacacctcggccattaacagcctcaccagtcgggtgacgaatgccgaggggcagctgaccgcgcagtctcagagcatcacgaatctgcagaacagcctgaacaccaccaacaacaacgtggcacaaaaggccagcgcgcagtcggtgagtgatctcaccagccgggtcaccagtgcggaaggcaaaatcacctcccaggggcaggctatcacgaagctgcagggcgatttgagcagcaccaccgataaggtcaacaccaaagcggatcagacggcgcttaacgcgctgactggccgggttgagaaaaccgaggcaggcctcacggcagccaacagcaacatcgtcagcctgacggcggcggtgaatgccgggaatgctgccggggatgattacattccaaacccgtcatttgatccggcgtatgaccgcatgggttatgacgtggtggagaccaccgccgatggtgtgccggctgactgcccgttcaggtatgccgtccggctggccgggcgagaccatgtgccaaaaatcaacaatatcgccgtgacgccgggcgacgtttacgaaatgtctgctctggtagcgtgtggtaccggcagcgctgactttaatttctacatcggtcgggccaccactgctactggtggcatcggggcgagagcgtccgggggaaacaccaggaccaccaccgcgtggaaacgagccacctggcgctttactgtgccggcagacacgaacttcctgcgaccgttcctgcaggttaatcagagcagcccgtttggcactgtctggtacgctgccgactggcatatgcgtaacgtgacggcggcgaacagcgcgcagaaaaccgcagatgcgaccgcaaaagcggtggattcactgaccaccacggttagccagcagggcgatacgctcagcagcatcggcacgcgtaccacctcgctggagaacagcctccgatcgacaaacgatacggtgagtaaaaaggctgacacgacagcggtgacgcagctgcagggcacggtgacgcagcaggggaatgacatcgcggcagccaacagcgcgctgacaaaactcagcagcgatctggccacgacgaatgcgaacgtgaacaaaaaagcggacgcaagcgcgatgaacaccctgcaaaaccaggtcacggagcagggcaaaacactcagtgcgcaaggggattctttgacgcaactgagtaacagcctgagccagacggcagcagatattgacgccagcgggaaaatgccgggcaacctcattgtcaacggcagttttgagcgcggcgcggcgggctttaccggctggagcagtaccgcaacggtggccgatttacaggttccgcactcgggtaacaaggcactgaaaatgtctgccggccagtctaacctggtcggacaggaaatcagtattacccaaggccgtacctaccgcatgggggtatgggcgaagcaggatccggggaccacgattaaagatgcggataacacgaagtttcgtgtggccgacagcactggcctgctggccggctcaaactacggaccgtttagttctggctggcaactggtaacgtttgactggaaagccacgaagaccacaatggccagtttccagctgacgaccttcctcagcgcgggggcaatgtattttgatgatttccatgttctcgatgttacggatgaaaaggatatcgcggctaacgccggggccatctctcagatgaatacccgcgtcaccgctgcggaaggggctatcaccacccaggcgcagcagctgacgaaactcagcggcgatctggccgtcacgaatgcggcggtcagtaagaaggctgagcaaagcgctgtcaccgggttgaccacccggatgacgtctgctgagggtaaactggattcgcagtcgcagcagctcaccagtctgcagaacagcctgaccacgatgaatacggagctggggaaaaaggctgacacgtccgcggtgagttcactgaccggtcgcgtcagccaggtggaaaacaccatcaccagccagtcgcagagcatcacgtcgctgaccagcaccatcaataccatccgcactcagggagctaatccgtgggttgacggtacatttgaaagctacagcgatggccaggtgctgggcgggagcggtaccgccgttgtggtagcgtctcagaaattcaccggcgataagagcctgaagttgagacgggatgagaacaacggcggcaacagcgataaacagcttggcacctggcagtcagtccgtgaggacgcgaagttccggtttgagttctgggccatgatgccggcggatcaggcgccctcctccgggtggacgacgctggtcggtatccagtcgcagaatgctgccgggcaaaatgcctggcaggcggcggtcactatcagcgaagcctctctgggcgcgcgcgataaatgggtgaaatttacgggtatcgccagtaacaacggggcgggcagaacacgcgcggtggtctggatctccacccgtggcgccaccggcaacggtacccctggctattcactgtatatcgacgatctggtcatcacggatgttaccgatgcgaaagcggcacaggatgcctctgacgcgacggcgagcgccgtgagcggcctgacggcgcgcgtaacggatgccgaagggaaaatcactgcccaggcgcagcagcagacagcactggcctcgaaagtggataacgccaactcccgcgtcgataacatggcgaagacgctgagcgacagccagagcacacaggccagcctgaatacctcgcttcagtcgcagattgacgcgcaggcggccgccaacatcaaaaaccagacgacgctcgacaacgcgattaaatcggtggccagtatcaccagtacccagcatacgcatgcaacggcactggaggcgctggcaacgcagcagacgaccctgacatccagtgtcggggatctcagcgcttccgttcaaaacaccgctaaaaccgtggcggatgtgaatggtacggtgagttcgctgtggtcgatgaaggttgagacggttaacgggaagaatgttggcgcggggattacgctgggcagcaatggtgaaacgagcgacatgatcctctacgccgaccgcttctcgctgtttaaccgtaacaatgcgacggcagtgccggtgatgattgccgaaggcaatgaactgtatatcgatacggcacgtatcaaaaacagttccctgacctcaaccaaaatcgcggacggttccatcacgaacgcgaagatcggcaacgagatccgctcgaatgactttgttgacgggtcacgcggctggcgtatcgctaaggatggctcttcgcagttcaacaacgtgatcgttcgcggtgcggtttatgcgactgacggctggttccaggggacggtatatgcgaaccacatcgagggcgacatcgggtcatttgcgatcaacatcgctcagcaccgcacgcgcaaggtgccgaaggctacatggcagtggtttgagctggcccggttccggcggcagaatttcgaccaggtgatcaatattcgcggtggactcctccagacggatagcatcactatcgacggcggcgcgaaactcagagcggggatgtcctacgcgccaggggatgacggcggactgaatcctggctatctgtcgtatgcaatgcttcttcgtggcacaggcgctacgtctggtggcggcagtatggagctaggcattgagcttatgtatgaaacaggtggagcaacacgcctgttaacggcgcaagagtcaatgaacgtagacaacatgtcatttgtcgtccctgccggtactggcgacgctgttctgcgatatggctgttacctggaccgtaacggacagatggtattaaccatcctctcaagattcgacgccttcgccgcgcgcaataacaacgtaattcgcggttcatcaacctga

SEQ ID NO: 265375 - DNA, 351 bp, Klebsiella pneumoniae; identical to SEQ ID NO: 180567

SEQ ID NO: 265376 - DNA, 711 bp, Klebsiella pneumoniae; identical to SEQ ID NO: 265280

SEQ ID NO: 265377 - DNA, 756 bp, Klebsiella pneumoniae
atgagccttaacgcgaattatcagaagttagagccaggcgatgaggttcgtctcctggagatcgatggccaggcgtttggcctggacgaggttttgtatttccacggctataacgtcccccatactgcagccgaaatcctcgccgctgacggcgacctggataagctgcctgcgaaaagcatctggtggcaggggcgggagtataaagcctggccatgtgtaatcgaagggatcgagtcatccaccactggcagcgacgcgcagccaacgctgcgggtagggaacatcgacgggaaaatatccgcgctctgtcttcattacgacgatctggctctggcgcgggttgtcatccacgacacgcaaaaacagtatctcgatgcgaagaactttccggacgggaatgcctcagctgatccgacgcaggagaaacggcgccttttcttcattgacgtaaagcattatgaagacgatgagaaggtggaatttactctctccagcccgtttgccctgcaggggatgatgatccccactcgccagctgcatgcgatttgcacctggtgtatccgcaatcagtaccgcagcggtaacgggtgcgactatgccggcacccggtattttgacaggaacaatcagccagttgatgtcccgtcgcaggatgtctgcaacggaacgctcacggcctgcaaattacgtcatggtgagaatagcgaactgccgtttggcgggttccccggcacctcattaatcaggagctga

SEQ ID NO: 265378 - DNA, 396 bp, Klebsiella pneumoniae; identical to SEQ ID NO: 180578

SEQ ID NO: 265379 - DNA, 498 bp, Klebsiella pneumoniae; identical to SEQ ID NO: 236291

SEQ ID NO: 265380 - DNA, 261 bp, Klebsiella pneumoniae
atgctcacgccgcaacgggtagatgatttcacgctgacggtgccgtacaacgacgacctgcatcccgacgactggattatggacgacccagatattgacctgccgaagttattgttctgcgacagtgaaaagggtgcgcggcatgggatagtccaggaggttgccccatcgggtgacagcaactgtcagattactgcacctgaatataaagaaattttctaccagtacgacgacgctacataccccggcgacgtcgcgtaa

SEQ ID NO: 265381 - DNA, 366 bp, Klebsiella pneumoniae
atgaacgcggcgctgacggtgtgcgtgcgtggcattaattacagcattaaggattacatcggcagtcttcccgacggcaatctgcactgcctgagcatccgctatcaggagtcggctgatggcacgcagcaaaaggggctggtttatctggatggggttcttgcttatgaggggatctggacggggaaaatcgcgtatccgccggcggctgttaacctgaatggcatcggatcaaacctggcggacaccacaccctttgcaggtcggttttaccgggcgcggattgacgatctgactctggtcagcaaaacagcgctgcaggttattgcggaagaaattgcatctgtaacaggaaggtttagttaa

SEQ ID NO: 265382 - DNA, 165 bp, Klebsiella pneumoniae; identical to SEQ ID NO: 248560

SEQ ID NO: 265383 - DNA, 351 bp, Klebsiella pneumoniae; identical to SEQ ID NO: 180567

SEQ ID NO: 265384 - DNA, 3381 bp, Klebsiella pneumoniae; identical to SEQ ID NO: 200126

SEQ ID NO: 265385 - DNA, 366 bp, Klebsiella pneumoniae; identical to SEQ ID NO: 200125

SEQ ID NO: 265386 - DNA, 339 bp, Klebsiella pneumoniae; identical to SEQ ID NO: 249272

SEQ ID NO: 265387 - DNA, 261 bp, Klebsiella pneumoniae; identical to SEQ ID NO: 265380

SEQ ID NO: 265388 - DNA, 948 bp, Klebsiella pneumoniae
gtgcggattatagataacgcaataactgaacctgatcccgtaaaacccaaaaaagtgttggtggttgcaattggcattattttgggcctgtttgtttcgatcagtctagtactggtaaaggttttcttacgtcgtggtattgaatcccctgaacaactggaagagatcggtgtcaacgtttatgctagcgttccagtttcggagtggttggcaaaaaataaccgtaaatctaagcaattacgtaagaatgaatctgatgctctgctcgcagtagagaatccggctgatttggcggttgaggccattcgtagtttacgcactagtctacattttgcgatgatggaagccaaaaataacgtgcttatgatttccggtgctagtcctaatgcaggtaaaacatttatcagcagtaacctagcggcaactatcgcattaaccgggaaaaaagtgctgttcatagatgctgacttacgtaaaggctatgtacacaaaatgtttggccgtaagcaggataaaggattgtcagagatcttagctggacaagtggctgcagaaacagtgatcgaaaaagttactggcggtgagtttgattatatcggtcgtgggcaaattcctccgaatcctgcagaattgctcatgcatccacgttttgaaaaattattaaaatgggcaactcaagtttatgatttaatcatcatcgatactccaccaattttggctgttaccgatgctgcaatcattggtcgttatgctggtacatctttattggttgcacgctttgaagaaaatactgcgaaagaaattgaagttagtatgaagcgatttgaacaaagtggtgtaattgtaaaaggctgtattctaaatggtgtcgtgaaaaaggctagcagctattatggctatggctataaccattatggttattcttattctgataaaaaacacgattaa

SEQ ID NO: 265389 - DNA, 165 bp, Klebsiella pneumoniae; identical to SEQ ID NO: 248560

SEQ ID NO: 265390 - DNA, 234 bp, Klebsiella pneumoniae
atgaaagttaagttaagcattgattatactaaaaaaatctctaaaggctcagttcaggtgatggaacaacaattactgagtgggttccagaatcaattcggcgagtacagtctggttttaggccgtacaggcactgaagagtttactgtttacggtggtaaaaaagaggttaagaacacgattgaggaaatcctcttgcagacttgggaaagtgcagacgactggtttatttga

SEQ ID NO: 265391 - DNA, 861 bp, Klebsiella pneumoniae
atgcggtttaatacgccattacgttatccaggcggtaagggtaaattgttcaattttatggataaaatcataggaatgaataagttacaggatctgcattacgcagagccatacgcgggtggtgcaggtttggcgttgaagttactttttaaagaaagtgcttcacaaatatatcttaatgatttgaatcttgctgtatattctttttgggatagtgtgctcaatcgaactgatgaattatgccacatgattcggagaactgatgttacaatggatgagtggcattttcagaagtcaataattacgaatcctgaaaatcaggatcttcttcaacttgcatttgctacattctttcttaatagaacaaatcgctctggtatacttaaggggggagtgatcggaggaaagaatcaatcaggaaaatggaaattggatgccagatacaataaggaggatttgatacggcggattaaactaatagccgaaaaaaagaatcaaattcatgtttttaatctcgatgctaatgattttattacaaaagtaataatggcattgccagagaactctttgacatattttgaccctccatattatgttaaggggaaagggttatatgaaaatcattatgtacatgaggaccacgttctaatttctactagaatacagtctgagattaaaacaccttggatagtttcatatgataatgttttgccaattcgtacgatgtacagttctgctaaaactttatcttatggaatcaattatagtgctcaagagcgttataccggagatgaagtaatgtattttagcaatggtctaaagtacccggaatgtgctgacccagcaaaatttaaagtgtaa

SEQ ID NO: 265392 - DNA, 1743 bp, Klebsiella pneumoniae
gtggctaaacctttaactaaactccgtagtatgcatgtggaagcttttcgcggattaaaaaatgtaaatatctccttcggagagcgtattactgttatttgcggcaaaaatggcacgtcaaaatctacaatacttggtattattgcacaaatttttagtttctctcatgattattcaaaggaaccagcggagtcattaggttcctttcggacccttacagggaatcgctttaagtcacaatttagtgaacattttagattttcaagtaaatttgatgcacccggcgggatggaagtgcaaataactctatatgatggtgctttccaaaaagaattgaataatttaagacttggtcttgttaattcaaaatatcatcagaaggcaaggccagtccttagaaataatgatgttttagggaataaaaataccagccgcaatgttacacatcctgtaatatatcttagtcttcagaggcttctacctataacattgaggcctgagtatagcgagagggatgagcaatatattattgataataaaaatgaaatattagcaatgaacagaaggctactcattaaggaaaatgggacctccattactgcgactacaggaactattgactcaatggttgtacatggagactactatgaccacgaatctgtttctgtcggcgaggataatgtaggacaaattatacaagctatattttcttttaaaagattgaaagaagagcttaaagattaccatggcggtattctactgattgatgaggcggatgcaggacttttccctgctgctcaaattgaactaattaacgttcttaagagaatggctagtaagcttgacttacaaatcgtaatgacttctcactcgccaatacttatagaggaagtatttaaacttagccagcttgctgataaagattatagaacggtgtatctcacagatacatatggtcctatttcggctaagacaaatctatcatggccagagattaatgctgatttactggttgatactataaaagttgatgctgaagaggcatttcctaaaataaatgtatattttgaggattttgaggggtatttgttttttaaacaactaataacagagcgacatataaataaaattctcacgccattgaaggatgtaaatattagctgcaatactttgcttgatttgatggcacgtaaaattcctgagtttatcaataaaagtatcatagtattagatggtgacgtagtaaatgataacggtccgaatgctaaaaaagcaaaagctgaaaaaagcctatgcttgttgccgacaattcttccacctgaccagcttttatttgagttcatgtataatttggataaggaagactcatattggcaaaaaaataatggcttcacaaaggtagtgtttcttaaaattagcgctgatataatagagaagctgaatatagtcgaggaaaaaatatctctatcagatgttatcaagaattacagaaaaggtaaaagtgcggaaagtgttaaaggagagttaagatctttattcaagtcttttgctcaaaatgataaagttcgggagcttttaactggtccggtaaataaaaatccctttagatattggctaaaacataacccagaatataaagttgaatttaagaataaatttgaatctagcttgattaatgcgctcatcaatggttttggcattgagtctggcaaagtgtatggctatcttcaaattgataagtga

SEQ ID NO: 265393 - DNA, 1161 bp, Klebsiella pneumoniae
atggaaggaaattctaaatattaccaatttataagtcaaaaatgctcaaatcatggtagaagattccaatccctaagaaatgacgatataatcaatatcaacatcttttatgtttcgatgggagttttcaactcctattgcaaaaatacaaagcgagctggcagaatgaacgaagatctttatcgtttaattattgactttcaaagtaatgttcagagtgccttaaaaagcatgtaccgttcaggtattcagatgccgtccagttgttatgaatggctcaagtatcatatacctatttcaggtgagttagaagacgggcgaaaatattataaacatggctatggatgccgggtttatctaaattcaaagggcgtagactttgacttcggggaacagggtgaagtaggtggctttaattcgtgggggttaactgaatttgctggaagtaatttgtcatcttatggcttcagaaattatgaggaagttaatgaacacctgaaaagtgcgttagacaatggacagatagcccccttgaacaataacctttactattttacagatattccttttatgtatgcatcagatacagacggccggaatcctgatgatatgctaccttgtcgcgatcgagaccgcgtactaacactccagattcattattttgaaacagctgacctcatgtttaaaaagtacgacaagcttaatgaaagaatgaaaaagaaagggcttttgaaccgtcaagataaatttgagtggagaacttaccttgtaacatggttaggttttttaggtgttgtatgcgaaggttttcgagggctaaacatccggcttttactgaataatgaacgccctaatacttttcaagaattattacctatttctgatgccatagggacgttaatgaaagctcattcagattcactaagaaaatttagaaataatgtttttcatatgagagagaatagtgattttctatcccattttttcgataaagatgttgagcgtctgtcatgggctcgcgaattgcatacagcattatcgatttttttttcggagtatagagttttatgtgaagtacactatataagaaatgggcgcaaaggagaaagcgatctgttcgcactaaatcaacctcgtgtaaaaaataaaaatatacgctag

SEQ ID NO: 265394 - DNA, 495 bp, Klebsiella pneumoniae
atggatgttgaatacatgcgtgattttttggggctttctcaggacatccctgcgtcggtgttgcatgaatttcaaaagcttagccttgcgtattcgtatactgaagcacgttttctaggtggaaatgcaacttttagaaaggccggcatttatgccgaagcttttgttcgtgatacaaatatcgatgttgagcaatacttttctttcttcaaagttcgttatcttatggcagtgggtgctgaaagaagactagaggttctatctaatttcaataaaggcataattacaaaaatacgtaacaagttagaattggaaaacccaactaagaaagataaagtagaggctatattcatggtggttatgaggttaaggaataatgcattacatggtaataaagctaaatatctttttgataaagaacaggctctacttttcgcgcaagcaaataattttttgtcggagtatttacgttattcatcaatgaaacaagactag

SEQ ID NO: 265395 - DNA, 861 bp, Klebsiella pneumoniae
atggcaaacagaatgatcctcaatgaaacggcatggtttggccggggggcgataaacgcattaaccgatgaagcggcgcggcgcggctatcgtaaagcattgatcgtcaccgacagcactctcgcccgctgcggcgtggcggcgaaagtcaccgacaaactggatgccgccgggctggcatgggatatattcagcgacgtgatccctaacccgaccatcgccgtggtccagcaggggctgcaggcctttcaacgcagcggggcggattacctgatcgccatcggcggcggttcgccgcaggatacctgtaaggcgatcggtattattcagcgtaacccggaattcgccgatgtccgtagcctcgaggggctgtcgcccacccgtcagcccagcgtgccgatcttcgcggtgccgaccaccgcgggtaccgcggcggaggtgacgattaactatgtcatcactgatgaagaacagcggcgcaaattcgtctgtgtcgacccgcacgatattccgcaggtggcctttatcgatgccgatatgatggacgctatgccgccggcgctgaaggcggctaccggcgtggacgccctgacgcatgctatcgaagggtacctcactcgcggcgcctgggctttgaccgatgctctgcacctcaaggccatcgagatcatgccggcgcgctgcgcggctcggttgccggagacgccggcgcgggggaagctatggcgctcggccagtatgtggcggggatgggattttccaacgtcgggctcgggctggtgcacggcatggcgcatccgctcggcgctttttacaacacgccgcacggcgtggcgaatgccatcctgctgccgcacgtga

SEQ ID NO: 265396 - DNA, 147 bp, Klebsiella pneumoniae
atgactctctacagcgactataaattgagtgtgcttatcaacagttgtcaaccaggttttatcaacacttattacctggacactatcaatagtattattgaaaccattattattgtcatctacatcaacaaagccaacaacatttaa

SEQ ID NO: 265397 - DNA, 1359 bp, Klebsiella pneumoniae
atgttggtgactatgacagacaaagaactttaccggcttggcatcattcagcgagtatttgaccgggctttgcttcagcgcgacgcagcagacatacttaagctcagtgttcgtcaggtgcagcgtcttgtgcgtctgtaccggacagatggcgcaaccgcatttgcatcttcccgccgtggacgtcctgcaaacaaccggatcgacgaagaaacacgctgtaaagccctggatttgatccggtgccactattcagattttggcccaacgctcgcaaccgaaaaactggctgaacgccatcatatttatctctccgttgaaaccatccgtaactggatgacagccgacggtctctggcgtcctcattcccgccggcgactccgggtttaccagccgcgatatcgtcgcgactgtctcggcgaactggttcagatcgatggctctcaccatgactggttcgaaggcagagccccaaaatgctgtcttctggtcttcatggatgacgccacaggtcgcctgatgcacctgcgattctgtgattcagaaaacgcctttgactacatgatggctacccggcaatacattgataaacatggtaaacctgtcgcattttacagcgacaagcatgcggtgttcagggtcagcggacccgaaagccgacgtaccggcacaacccagttcggacgggctctccgggaactggcgatcgaattgatttgtgccaacagcagccaggcaaaaggacgcgtggaacgggtcaataaaaccctgcaggatcgcctgattaaagagatgcgactgcagaacatcagctcggttgctgaagccaatcagtggattgaacatttcatgtctgattttaaccgtcgtttctcccggccggcaaaataccctaaagatctgcaccgtgcggtcacacagagtccactggagctgaatgatatcttcgcctggcaggagctgcggaccttatcgaaagcactgacttttcagtatgataaagtgatgtatatcattgaacccaccgaacaaaatacgcgcatagcaggtgaaaaaattaccgtttatgattaccctgacggaagcattactttccggcatcagcaccggccactgggttataagattttcgataaactgacctgcgttgatctgggggcggttgttgataacaaacgactgggtgccgttctgaggctggcacagcagaaacaggaagagctggaggctgaaggaaagcgaatgcgcagtacaaaaatgccccgcaggtgcgctcaggagcgtgcactggaagagctcagggcgatcaacccggtgctggccagtccgcaggattttatccccagcctgaagcgatga

SEQ ID NO: 265398 - DNA, 2358 bp, Klebsiella pneumoniae
atggcagagtatgaacatttacgacttgttaaaattcctcagcaattagaaagaagaaaaaaaccgggatatggttcagctccaaaacgtaactctcaggaaagaacaatacatggaacatctttaattcatcaaattgatagtacagttgcatatgttcgaagtaaacgtattcctggaaacattgatccatcattgatcatgaaggttaaatatgatgggtctgctgccgatgaagactggttaaggcttgggttacaggttctatctcacgacgatgataaaactttagtattattttcttctaacgattcactggccgatttaaaagacagaattaatgcctactcagggcctatacccgcaaaacaaaagaacccatcctacaataatttcgtaggtaatttaatttcaattgaaaccattacaagtacagacagaataggaatccgttttaaagaatctggttttaatgccatagatgatttcgatgaaatggaaaattacattgtcgatattgaattatgggattttggaggaagaatagaaagagaagcgaaaattgaaaccattaaaaaccttattgttaataatggtggagattttctagattcctatattggcccctcaatttccttattgagggcacggtgtaatatatccgcattaaaattagtattagaaataccagaaatctataccattgacttaccccccatgccagatatggagaccaaaaaatactttaaatttgaattagatgacacaccacaacccattaatgcatatgaagatttgccagttataggtataattgacagtggattaaacaatcatccttttttagataacgtaattgtcggaaccgtgtcttacctaaatgatgctggtcaagactcttggggacatggcacttcggttgcgggagttgcagtttttggagacttacgacatcaactggctcagaaccaactgattcgttacgctagaatatgctcggctaaagttgtagatgataaaggacgttttccagacgatgtagtaattcccaaattaatgtcgcaagcaattagacagctccatcatgactttaattgtaggatattcaatatttcactcggtgatcctaaagctcctttcaagggtgatcgaaatgggcaatgggcttcaattctcgatgacttagctagagatcttgatatattgattatagtttccgctggaaatggttcttcttggggggcagaaccagaggatgcaatttctgaatatccaaactatttaatagaaaagagaaatagatttcttgaacccgcaggtgcagtgaatgtattaacggtaggttccttatctcatggagatggattacctcctgatctagcagaatatgttggagtcatccctaccgcaagaatggatgagccttcgatttttaccagatctgggccggggattttaggaatgtgtaaacccgacttagtagattacggcggaactgcgctttacgacacagccatacataatataaggcctggtggagatattcctgaatccggcatattaagtttaaacaataaatttttaaatagtctttttacagcttcctctggtacatcagttgcggcgcctatggtagctaataaggctgcattattgttgaaacaaataccaaatagtacggctaacttactgagagccttgttagtaaacgcctcttctcatcctttagagaatcaacagcgcattaatttacttgatggaaaatccaaaaataacatctatggaaaaggattggtaagagtaaaaaatttaatctcatccgaagataatcgagtagtattatactctcaagatgttttacagcctgattatttcgctgtatatgaaataccaattccagataacttcaagaacaccaaaggtaaaaaaaacatcagtattacacttgcctttgacccaccggttagacatacaagaaaagattatcttggctgtgaaatgaacttcaggttaataagaggtaaaactgccgacgatgtattcaactttttcaaagtaaaagaggaaggtgatgctatctctgaaatgcctaataaatataattgtgatctaaagccaggcgcaaattctagagattttgcaacaatacaatcggcttcggtcagttatgataatgccatagagaattatggaaatacgtaccatcttgttgtacgttgccaagccggttgggctgattttattcagcaacaacgttatgcgattgtagtcgagctcacacatactgagaatgtaaatatttaccagaccatccagcaaagagttcagccaagagtacaaaacagaaatcgaatttaa

SEQ ID NO: 265399 - DNA, 987 bp, Klebsiella pneumoniae
atggccagaggcgaattaatgaagaaacttttggctagctacggtaatgatgatgaatttcgttctgttgctgaacgaatcataaatgaagaagaaaaaaagaataataaagttttggctaatagcctaagaaggacgcttgaaaatagccgagctgtaggttcgaattactcattaaaaggattggaacgattctctcccatgaacgaggccactaatgattttgtggaacgagttgaaccaagccatttccataaagatttagttttatctttcgataacgttagaatccttaaagggttaatagaggagtatcgttttgctgaagctattcggaagaatggtctatcattacgcacgaaacttcttttttgcgggcctcccggctgtggtaagactctaacagcagaagtgtttgcatccacgttaggcttgcctatgtttatcgtaaaattagataaattgatgtcatcatatttaggcgaaactgcgaccaatatacgctcaatttttgagttcgccaacaataagccttgcgttctttttttggatgagtttgatgctattgctcgctctagagaagatagcaatgaacacaatgaacttaaacgagttgtgaacagcttgctattatttattgaaaggttatcacctaaaggttttatgattgcagccaccaacttagataaaagcattgatccagctgtatggagacgttttgatgaagtcatatggtttaaaaaccctgataaaggaatgattaggagatttttaaaaagcagattaaaaaatattaaatatgattttaatccagataattatgtttataagttagaaaaaatgagtttttcaagtctagagagagtgcttaatcaagcaataaaatcaatgattattggaaaacataaagttttgaatgagcgttattttgtcgatgcgataaatgatgaacatcgaagaaatagtggtgttgaacaaatgcgataa

SEQ ID NO: 265400 - DNA, 753 bp, Klebsiella pneumoniae
atgactatcccagaacaaaataataaccaaactcctgacatatctatccctgcagcgacgttaaaggcgcttgagaaagtgaatgccaccaaatctgcatggcttgaagcacgtcgtcagcagaaagcggcagcggataatattgcgacaatccgccagcgccgcgccgaaatggaagccacgacaaacgccctgaatgaggagtggcgcacgctgtttcgtgaaagtcagggtgtagtctcaaaggaaatgaaaaaactgcgtacggaaattgcgctggggcgtgaaacgcttgaggattttgatgaactgctggtagctcaggaaagcgaaaatgccttattaccgcaggaagccgggaaattagccggacagtacatcagcgcgcacaacacccttgtggaaattcgcgcaaagcaaatctgggaagacttcatgcagtcgcatggtaaagtgttaatccagacactgagcttgctcaaaaccacaatggggcgggaagccagtgccgttgtgggtgtggtgaattcagttaatgactcggacacagtactgaaagactttattcacaaacatatcaccagaccggctcttactaacgctgcgatgccggaacaggaccctgtgtttaaactggcgggcgttgcaccggattatgcggcccgtctggatttcagtaatcaaccctctccggcagctattcataaaatgaaggttcgtcaggaacgggctgagaaggagaaatcagtatga

SEQ ID NO: 265401 - DNA, 558 bp, Klebsiella pneumoniae
atgatgatacctgaatacattaaatcccttttttctggcttgcttactgccgtcatttccaggtatagtttttctgctgtcgcaaaatcggcagccggaattggcgttccgtgtaacttattggcgacaactgacgcgccttgcgtctttttttacgtcgtagctcaggcacacccattttccgggctgtggtgtttgtgtgtacaccgtggttcattcaagataatggcagtccgggcggggcagccttcgggctggccggtttccaataaggccggttacgccaaccccgttcgggctgccaccagtgaaattggcgtttccggtggtagcaataaccgctacttattggaggctgccatcatggctacaatcctcaccccgtcatacccgcaatatgtctttgtgtttgccgcaatccgccgtactgacactcaaccccgcatttgtatgcttcgcactgtagcctgcgatgagcgttccgcgcgtctttcgctggtgcgtgattatgtgctctccctctctgcacgcctgcctgccggggaggtgatgctatga

SEQ ID NO: 265402 - DNA, 141 bp, Klebsiella pneumoniae; identical to SEQ ID NO: 218064

SEQ ID NO: 265403 - DNA, 342 bp, Klebsiella pneumoniae
atgaaacctcaacctgcaacaacttcgcgggcggtgaagccctgcctgtcacccgtgacagtctggcaaatgctgctgacccgattgttcgaaaaacactatggcctgacgctaaacgataccccgttcagtgatgaaaccgtaattcaggaacacattgatgccgggatctcgctggctgatgccgtgaattttttggtggaaaaatatgaactggtgcgtatcgatcgcaaggggtttcgctggcaggaacaatcgccttatcttcgggctgtagatattctgcgagcgcgacaggcaactggcttgttgcgacaaagccgtaacaatgcagtacggtaa

SEQ ID NO: 265404 - DNA, 510 bp, Klebsiella pneumoniae
atgacaaataacgaagttctcacattacttgtttcgggggctgcactattagtttccggctactcagcaatacaatataggctggccaatgaaaatgccaaaaaagctctcattaaagctgatgaggctcattcgactcaaaaggctgctttaagcttacaagaagcagcactggaaagtcagatcactagcagtattgcaactgctgcgggaatggtacaacaagccgcattggcattatccaatatagctgaaagcgcccataattatggcatttttaaaaaaaactatactacggcacaagaagtctggctaaatgctcatgatcaggcatgtatgagttaccgtgaagataaattaaataaaggcaccttcaaaaaaacatatcaagttccgattaggtctattgtagaaagtgaagatttagagcacttctttaatcccgcagatagttcgaaataccaatcaatccttaatgtttaccgcgagtgggaaacgtcacaacgatga

SEQ ID NO: 265405 - DNA, 621 bp, Klebsiella pneumoniae
atggaactatatcaaggtactcatggcgatcacatacttgcctatcgggatagaattgctcagacagttagtaatactatcaatcagttccctcgcacaatggcattaagattggatcttcattacccacctattttggataatggtgatacggtatgctgttttcctaaccttgagccaagtgcaatatcacgcttcctagattcgtttaaagcgattctgaaagcacatgaatatcgcagaaagtttgcagggatcagagttaacaaaaatgttgtacgtaatgtctgggcaagagaatattcgaagagtggtaaatgccatttccatatttgcttattcttcaacaaggatgcttactaccatttaggacatcttaagcataatggtacacttcgcaatctgatagttagagcttggtacagtgctctcagattagaaattgaggattgtcgtgagcttgttcattttccggaaaattgtcggtatgtacttaacgtgaatgcacctgattttgacatcatatataatgatcttcttttccggctggattatctaactaaacttgatacaaagatatttggtgagggtgatcgtaatttcggttgtagtagaaattaa

SEQ ID NO: 265406 - DNA, 1410 bp, Klebsiella pneumoniae
atgtcgggagatcgggagttccccatacacgtgttccccgcaagagtggggcatgcaatctatgaggtagtgcaacatactcaggcaccactgcccatggttgcagcagagatacttggtgtcatttctcttgcttgccagaacagaattgatgtttgtaggttgaataatctacgtggtccgacatcactttttattgtgacaattgcggaatcaggagaaaggaaaagtacggtaagtaagttgttaatgaagcctatttaccaactagaggaacagttatttgaactatataaacaggaaataactaagtggcagtataacgtaaggattttcaaggcggaagagaaagccttgatgtcaaagctgaagtcagagatccgaggtggaaaagatccaaccataacacggcgaagtctgagtatgttgcaagatagttatcctgtggaacctgtcagatacaagttgacgtttaatgataccacaacagcggcgataaaagagtatctctgtggtgactggcgatcaattggcattttatcagatgaggctgggaccatatttaatggttatgcattaaatgaattaccgtttgtgaacaaaatgtgggatggcgctacgtattcggtcgaaaggaaaaacgcacctgagaggttaataaaaaatgccagattgacattatccctgcaggttcagcctgtagttatcaatagatatattgaaagaaaaggggatgtagcaaaagggataggtttttttgctcgtacgcttattagtcgtccattctcaacacaaggatatagacaaataactaaccctgttgtttcaagtgaacatttacctctgttccatgaacggctaatggagatcgttaacgagagtattgcaaataaagatgaacgcaattgcttgcatttctcgccagatgcaggacagaagtggattgcattttataatgaagttgaaacagaaatgcagctaattggttttctgtcagactttaaagattacgcatctaaagtcgctgaaaacatggcaagaatttctgcattgttacactatttcaatggtgatgaaggtgatatatctcttactgctgtagacgctgctatagagataagtagttggtacgtcaatgagtatataaagttattttccaaaccgcaggaggtaaatatggttaataccgatgcagatgagctttattggtggataaaagagtattgcaatcgaaatttcataccctatatgaggaaaaataccatattgcaaaatggtccagatcggtttaggaaatgtagtaaagcaaacgaattattaagtatcctttactctcagggtaagataaatgcttataaaaaaggtaaaactctttttatccaaccaacaagtactttggatgttatttag

SEQ ID NO: 265407 - DNA, 1056 bp, Klebsiella pneumoniae
atgacaagtaattctgatttttttgatgcttctgagctgtttaatattcctgagcaattcgatatccctgaggctttttatcgcgtcgacgatttttcgaaaaaatttaatgtaagactggaagatattatatctacatggctgagtaataaaatcagtctctatgtcaatctgcgttcagaatactgtcgaataattcgttatgcgaataaaaaagaacatcgttatgatacatttgatatcagatcaggaggggatttttatcaacatgagagcagctctcagtttgcagtaagaacatttataccttgtgaacagtctgaaataaatgagtatccagtttttagcggtagttcattttttaaatatgcctacgatgggtatgccagtggcttttggaaaatcaaacctaccaaaatgacccacttggtaagagataattataaccttaggaatgcgaatgatgtttgggggagtattcctggtgaggttatagtgtatggacgtgatgacaatgatcatctaatttttaataaggatgttttaatttctcacgctgatttacagattgatagcgccagctataaaaaacttcttaaattaactgcacctcaaagtaatgagtttgttgcaatggagaaaagttacattcaaaatgttattgtcattcttctaattaataagtattgtaaatccaataatgacaagcttttgtttttaaccgcaacggatatattgaatttttacagggaaaagcattgtaaagaaattaaaaaaataagccgctcaagcatttctcgatggtttaatgagtttacaaatgatgatggcactttatctgttcaaatgaaaaatggacggtggtcttctgaaaaagacgaaattatttatctgattgctaaggaacactgttgggatgaaaatcctgatgtgattctggaattgctaatcagctcattgttagatgaagttgaaaaattaaattttcctagggaaattactgggccacaattaaaacactatctaaaagatatcaagttactttgtgctcaataa

SEQ ID NO: 265408 - DNA, 669 bp, Klebsiella pneumoniae
atgaagcgtgaaaacattaacactatcatagccatgctcgggctaattcttgctgtatatggcaattacaaacaattcaaaccagaaacagacaaacttgaattgactgttaatactggtgaaataggcagttccgaattagagttaaacaaggacttttctgtacccaaagcactatatggtgatgataccagacttgctggccctgtatcggtcatccttgaaatatcaaataacatgaaccggcctgtaacaataaaaaaaattgatgtcgagttaattaaagatggcactgccattaattattccagcatgttcaacccattagataaaaaaacattggataatttatactctcctactactatcgcagaacacaacgttaaaaaaatagagttacgaataaacatacccattcattataacgataaactttcctcctgcttcaggagcataaaaaccaataaactcaaaactgatcagtatagtaatgtaagattttgctattataaaaacggcatcgatttgttaggaaataaggtacaacttaagcaatttgaaggcggtgaatatatggtggaaacatcaaagggaattagcttaaattatagggtgacagccataacaggtgacaactccaaaatagttagtttagccactttttactga

SEQ ID NO: 265409 - DNA, 453 bp, Klebsiella pneumoniae; identical to SEQ ID NO: 113269

SEQ ID NO: 265410 - DNA, 813 bp, Klebsiella pneumoniae
atgaaccttgaatccatcgctaaatactttgcgcctaaatcaccaatgttcagcgactccccgcgcgcgaccgcatctgactcactaacaggaacggatgtgatggccgcccttgggctggttaaagctaaatgtggctttggtttcgatctttacctggcaaagattggcatcagcagcccggatcccgccattgaggctctttttaaaacttccatcgaaatgtccagagggtttaaagcagtcactcaactcaatgaggatactcgccgccgggtactcgaaatcatgtgtgcttttgcataccaggattatgccagaagcgcggccagcgtgcggcagtgtacctgctgtaatggtgctggtttcattgatgctgaggtcttcactaccaaggttcattacccggacggaaagcccccaaaatgggcggccattaccaaaggtgttttcccttcctactgggaggagtggaaatcagtacgtgaaggggtgcgtgtgctgtgctcggtctgcaacggaaagggcgttatcagtaacgcatgccgatgtcatggaaaggggaaagtggttgatcagaaagaaagccaactgcagggcgtacctgttatgaaggagtgcgggaaatgttctggccgtggctatgcgcgcatcccgtcagaaaacgtgcgcaaggcgctgtgttccgatgtgatggaaataagccagccgacatggtcacgcaattttaaaccgctctatgagttgctggtgactcgctgtcatgccgaggaatcgcaagcagatgcagaattaaaaaacgtaacacgataa

SEQ ID NO: 265411 - DNA, 141 bp, Klebsiella pneumoniae
atgagcccgtacgtagttgaaatcatccgcgaacgctggcaaaagctccgccttttccggtgccgcggaacagtaatgaccgattatcgaattttgaaaaactttgtccgcatttatcagtctctgggagaaatagcatga

SEQ ID NO: 265412 - DNA, 363 bp, Klebsiella pneumoniae
gtgaacgaataccgtatctcattaccctggacaccgagcaataaccgttactaccggcacaatagggggagaactcacatcagcgcagaagggcaggcatatcgcgatatcgtagccagcatcatcaaagagcagatgcttgatatcggaatatctgcagcagtgaggattcgaattgaatgccacatgccggaccgccgccgccgtgatctggacaacctgcaaaaagcggctttcgatgcactcactaaatccggtttctggctcgacgatcaacaagttgattattacagcgtgaaaagaatgccggttgtgaaaggtggacggcttgaactgaccatcactgagctggaggaagcatga

SEQ ID NO: 265413 - DNA, 261 bp, Klebsiella pneumoniae
atggttcaggtcttgcttataggtggtgatcacgacgggaagatagaagagcatgaatacaaaagggatggggtaattattcattacaatcctatagttttaagctcgcactcaccggaaacagagatgcgcagcccatacagatatacaatggacgcgatgattattgatggtcaatattatgcttatgcaagttgtaaaagcattgatgtctcggagattgaaccgttaataaaaacatcttaccttaaaccgatgtaa

SEQ ID NO: 265414 - DNA, 597 bp, Klebsiella pneumoniae
atgaaaaaaagaacaggtttaaagtatgcattatatatattgtcactatggctactatttgtatcactttttataatgtcatatgacaagtgtctttttgtaagtatatcaacatatctggacaacaaagatacagggatattaatttcaagtatctcgccaaaaaatatagtttttatttccagctttgcaatgatagttgcaggcgttttaatttttctatatttattattttcctttaactctggttggtcagtagcgtgcactgtttctgatgttagaaatgaaagtcatgagcatcttgaatttttaactacctatgttatgcctttggtatttacagatgtgaacagcaagaggaccatgctgaatcttttgatcatgataatagctataggaatgatttatgtaaaaacaaatcgcttttattctaacccatcgttagcattgcttggatttagaatcttcaaagctaatataaatgatagaggaaccaaagaatttgtaatcatttgccatggtgaaattgatgaaaacagcaaaataaaatatatcaaactagataacaatacatgtcttgctaaaattactcaataa

SEQ ID NO: 265415 - DNA, 978 bp, Klebsiella pneumoniae
atgttcacagcaatagataatatattaaactcaacccaactctccggcgaggcttattttgtcgcagaacaccaagggcaactagatattttcagagtagctctagaaccaggtgcggaacagaaattaacacagtctttcagtcgatcacttaagcgtgatgttgttgacccaaacactggacaaaacgccttgccgttagtttcttctctgctaagtagagataagcaggtgcatgagtatgatcaccaagtaataaaccatcttccacccgctctagcaaagatgtcggacgtgcttagctttggagttaataatacacccactgactttgactttgcccagcaaaatctatcaaacgttaaaggaatagtttattatctttgtgatggtcaaggtaacggagttgttgtttaccaacacaaatatccaatcgcactacataaaaaaacaaaattgtcatatttctctgcgaatggtagaacccttgatgaggtcacccatgacagcattgacataaatgggaatgtggatttcttttactttaacaacaagtattatgcactaaacatcaacttacttgaaagagcatatggccttgaacaagtcataaacaatttagcggcaaatgcaacccctcatataatagcactgaacatcctggacgtatcaaatcatccgaaccctgcagacatttttaatgacatgcatcgaaatagaaacttcatgcgcagacttgctaccacagcaaacagtccactaataaagaatggaactattaacatagccaacattcagacattaattcaaaacttcccgattcttggaaggaatataataattaaccaagctggattgatagaattatcatctcaaaagcagaaactatatttcattcgtctgctaaataatgaggcatctttcacagcattaaatcaagagccttttcttgcggttggaaaagactctgcggcataa

SEQ ID NO: 265416 - DNA, 1287 bp, Klebsiella pneumoniae
atggctaccaatcctgacggatacctctcttatttgaaaccaggcagtactgactggaaagcattagattataaatcatatatatattggcgtgatcgcaggcagaaccaaatattagaagatgcaggcacaccaattccgcaaccattacctctatccgaaggagaaaataaaaaattaaaagacaaccaagcatatattaatgaatttttattaaaatcattacaattcccgaacctctcattcttcgctggtagcggcacgtcacttggtgatgttggtggaccaagcatgtgggatctttggaagtttgcaatgtgggaaaaccctttattgctagaaaatgggcaattgaagccagatgcaataactgtttgtgataaagtaagatattcagaacgagactacccaaacattgaacactttctttcaaattgtgaagcatacttagctttccatgatgatgaaaatgtattgaattttttaaaccaagttaaattgattattttagacaaatgtcgttcatttattgatgatggaaattgcgatcttacagcctacgtgaatttacttcaaaaaatggcaagaagaagagtaagagaccctaggcttaaagtttttaccactaactatgatttaacttttgaaacagctgcttcagaattaggaatgatggtagtagatggtctttcctatacaggccttcgtaggttcgatggtaagtactttaactatgatgtcgtgaaaagagatgaaaacgagcacgaatttatagaaggtgtattccaattattcaaacttcacggctcagttagttggataagaaaagatgggcaaatctatgaatctaacaaacctgaagccacaaacgcttgtctaatttatcctgccaaaggtaaataccaacaagcttttatccaacctcacttggagttactttcaagacttcttgatttcttaagaaaaaagaataattgtctagtgatatctgggtttggttttaatgatgatcacctttctgagccaatttattcagcaattaaatcgaatccgagcatgcgattaattgttgtggattataaatgtgcaacccatatacaaaacaatggagaaaacggctcaagcaaatattggccattgctaatggaacttgcattatcaggatatgatatacattttataaactcctcatttattgattttgtcaaactagttcctaatctcaaagcattaacaccagccgaacaattagctaaaatcataaaacaagttggagctaacgattaa

SEQ ID NO: 265417 - DNA, 1722 bp, Klebsiella pneumoniae
atgaaaaacataacacttcaacttggaattctaagaaatgatctaaaggtgggagttatttcatcaattttcgctcaaaccgtcagagttaacctaaattatgccggtgaaattagcggcacatatttagatggctctagatatggtaaaggcgaagttggggaaatattattaattgaaggtcaacaatccatagtattagggcgattaatagaagttaaactacccgaacgtgatagaggagagatatctggtgagttacataagaactataaagttgatgccgtaggggtaattcaattacttggtacaatagatccatcgaatttccgtattgattcaggaataaaatcctaccctcgattaggtgatagagtttactctgctcctttggactttatatctttaatcccagaactaattaataaaggtctcgtaagtgatgaggaagaacgggtcggaattgttttaggaaatatttcaggaggttctacaagtatagtcacagttgagccagataaactttttggaagacattgcgccattcttggtgctactggaggaggaaaaagctggacaacagctaaactgatagaagaatgctctaattatgaaaattccaagacaataatcattgatgcaacaagcgaatatagatcatttcaatcagaacactgcttacattaccatttaagctcaccaataaataaaaacattaactccttagagtttagaataccacctactgatttcattgaatcagattttgttgctatgtttgatccctctggtaaggttcagggacctaaacttaaagaggccataaaaagccttagattagtatcattagacccaaccattgcaactgatggtattttgaaaaaaataaaccaacctaaaacagattatcgccgcgcgatgaatacaggagataactcaaaacttgttgataatccatcccaaccttttgatataactaaactcataaagcaaatcgttcaggaatgttgttacgacaatggtgacaattcttggggaaacgctgcaactcaagacttaagctattgctcttctcttttaacaagaattcaagctgtcacttatgcgagctcattaaaatctgtttttaatagtggcgaggaaattgaaacattaggaacaatattagaatcctttttattgtctaataaacgggtgctcaggttatgccttagtgatgtaagctatgaattctatgcaagagaaattcttgcaaatgttattggaagaaagcttttaacactagctcgtctagaaaaattcagacttaatccattattagtcatagtagacgaagcccataactttcttggtaagcgagtgggatcagaagatcatgcggttaaacttgatgctttcgagatgatcgcaaaagaaggtcgaaagtatggcctaaatatttgcctaacaacacaaaggcctagagatattacagaaggtgtacttagtcaaattggaaccttgttagtccatcgtttaacgaatgatagagatagagatgttgttgagcgagcttgtggtgaaattgataaatctgcagcatcatttttaccaagcctcaagcaaggagaagttgctctggttggtgttgatttcccaatccccatgactatacaaatagacaagcctatatatcctcctgaatctgattctccaggatacagtaaaatatggaaaaaatga

SEQ ID NO: 265418 - DNA, 249 bp, Klebsiella pneumoniae
atgaaacgagctattggaaaaaaagagttaatgcaaatagttccgctgtctatgagtacgatcgacagactggaacacaaaggacaatttccaagacgcttttatattaccgacggacgctgtgcctgggatggagatgagatcgaacagtggcttgacgaaagaaaggccgcgaacaccggtaattttggtggaaaaaagccacctgttaacaaaagagattctcgcccggtaagtaaagcaacgtga

SEQ ID NO: 265419 - DNA, 312 bp, Klebsiella pneumoniae
atgaaaaaatttgctctatttgccctgctttcgttgccattttcagcatcagcaattgttatggggggaagtaaccttggattcagtggctatcctgagttctcagaaattgctccgacgccaccctattctgatgatcagtacgcctgggacagttaccggcgtgaagtggctgagtatgcagagaaggcaaaacagtaccttgaggactcaaactctgacatgaaaaggattcaagaggcgcagcaggatgctatccaaaaagctaacgatgttgtagaagaattcaacaggaaggctaaagggtactga

SEQ ID NO: 265420 - DNA, 780 bp, Klebsiella pneumoniae; identical to SEQ ID NO: 56175

SEQ ID NO: 265421 - DNA, 288 bp, Klebsiella pneumoniae; identical to SEQ ID NO: 182627

SEQ ID NO: 265422 - DNA, 1179 bp, Klebsiella pneumoniae
atgtcagcggagcagctgaaagagacgcagacgtacaaagatgaacaggcgaaatacggcacgggcagcgatatccagcggggtatccaggcagccacggcagcgctgcagggactggcgggcggtgatatcgccggggcgctggcaggggcatcggcgccggagctggcgaatcttatcggtcacggttcagggctgagtgacggtgccgcggtggtggcgcacgctatcctgggcggtgcggtggcggcgctgcagggcaacagtgcggcggcgggcgcagcgggcgcggcagcaggtgaactggccgcgaaggcgattgctggtatgctgtatccgggcgtgacggacttgtccacgctgacggaagcacagaagcagacggtgagcacgctggccactatttcagcgggaatggcaggcggtctggccgggaacagtacggcgttagccgtggcgggcgcgcaggccgggaagaacgcggcggagaataatgcgctaagcgatattgcagagcaacttgcttcggggcaatcaccggcggataaactcgacaagctgaataaggcagaagaagagcgattcaggcgggaagaatgcgccggattaagttcagacgcctgtggtgccaaaatgtacgaccagcgccgggaagccctgaaggatatggcttcgcttggtgtggacttcttgcccattgttggggatatcaagggctttgcggaagcggaatctgcaatagattatttggccgctgtaatagggatatttccggggttaggtgacggagcaggtaaagcgattaaagcagcagagacggcgctgaagaaaggggatgttgctgaagcgtctaagctgatcaataaggccagtgatgaagtatctgcaacactccctatgggaagtagatacaatcagatgaatcagcctaaaaacccgtcgtatcaacctgtcaggaaccaacccgctacgattagtaacagagaatattctggtcatgcattggacagaatgcaggacagaggaataactccatccgttattgaaaatgtgattaaaaatggaaaatcaactcccagccggaatggcacaacagtacattttgatcctaagaataaagtatctgtggttacaaattcatctggaagggtggtaacagttaaatatggcgataagtaa

SEQ ID NO: 265423 - DNA, 141 bp, Klebsiella pneumoniae; identical to SEQ ID NO: 102393

SEQ ID NO: 265424 - DNA, 735 bp, Klebsiella pneumoniae
atggaatttaagattcgttcaataaatgattttaatgatttctttatgcatgaagcattaattttcaacgggcactcctgtttgttaactggaaaaaacggatgtggtaaaacaaggttattaaaaagtatttctaattatacatccgaaactactataaacggaaataaggtttccggtaatgatgtatcaatgataaacatactgagctccaatcttggggtgtttacaatggaaggaaatggtaagcttgttgaaacacttgcagagcaacttttggtattaattcatacaaaacaagattcacttgaagaacaaaatacaaatgttaatttaaaccctcgctccagttacaacagctcacatattgcaaatataaaagatatattaaatggagcaaccactttattcgccaaaaaagccgaagaactctccagtgaagaactacaattatctattcatgttaatagagatctctacaataatattcatgatgaggtagggggtaatccttttattaacttaagccaatttaacattggtcaccatcaaacgataaggctaaatgagatattagcctttaataacacaaaaaacgatgaaataaaaccacttaacgatgattacctattcaaaaacatgcatctacaaagccctcatgaaatttttaatgatataataaaaaatctctccagaaacaaattctatctttcaccaccaccagaaagaaattaa

SEQ ID NO: 265425 - DNA, 237 bp, Klebsiella pneumoniae
atgtccttatcgttataccgctcaacaagaaccgtacaggctttaaagatagcatctgtcgctatagctgaagattactcggctgttatgaaagatgatttaggtaatgagcttatcgtaagcgccgattatgttgtgcgggaaaaaccaaaggcgggtgggtattatatgaaaaataatgatggctttgaggcatttctcgataaagaagtttttgaaagggatttctcggaatga

SEQ ID NO: 265426 - DNA, 513 bp, Klebsiella pneumoniae
gtgactccgattcggacagcgactctgactccgacagcgacagtgattcggactctgacagcgattcggactctgacagcgattcggactccgacagtgactccgattccgacagcgattcggattccgacagcgattcggactctgacagcgattcggattctgacagcgattcggactctgacagtgactcggattcggacagtgattccgatgctgacagcgattcggactccgacagtgattcggattctgacagcgattccgattcggacagcgactctgacagcgactccgactccgacagcgattcggactctgacagcgattcggactccgacagtgactctgactccgacagcgactcggactctgacagcgattcggactctgacagtgactccgattcggacagcgactcggattctgacagcgactctgactccgattccgattcggataccgaaccgcaggcaaataatgatacccatacggcggctatcgataccgtag

SEQ ID NO: 265427 - DNA, 918 bp, Klebsiella pneumoniae; identical to SEQ ID NO: 220841

SEQ ID NO: 265428 - DNA, 498 bp, Klebsiella pneumoniae
atgatgaattcctcagataattttgacagtaaaatattgtcattaatattgcgagaaatgaaacagaaggagcaaaaaataaacgaatcgacagagtttattttcctggatgattccttttctggtgacggtattattatgtctgtatacaacgcgcctttaagtaatgagtatgaaaaactaaaagaccttgcaaatgaattgaataagaaattcaaaaagacaaatgtaagttatataataaagccatcaattggttttgtttttatcattactatatctttcatctcatatggcgctcttaatagtaattatgacatgttgttttatgccgacgatgagataggtgaagacaaagaattaaacgcaaaaatagaaggtgagagaaaacaaaagagtgatattgaagggcttatggatactattttaattgatatgaagttagctttgctggagacatcaatatatatagatgaaagagtctccgaatgggagtga

SEQ ID NO: 265429 - DNA, 360 bp, Klebsiella pneumoniae
atgacaaatcatgaatcaataaagctaattcttggattctcactcacggtaattactggattcgttttttttaaatgcaaagaattgattgtgtctaactttggtgtggaaaacttttacttaatattagcgtactcagctgttactccgcccttcttgttaaataaactatatgatttaacaataaaaaaagcacaaaatagagctcaaaaaaaattagctctaagtatagatgaaaatgatgaggtgatggagagtgaaggtgttgatattaaacagttaataaaaaacaaaaaaaatgaaacaaaagaaaaactagataaatttaaggaaatagagctaagtaagaagaccttgtag

SEQ ID NO: 265430 - DNA, 861 bp, Klebsiella pneumoniae
atgggtgaagaatattcgttgagtataaagcgtttcaggcaaacaatgattaaggaactaccgaaggttcctaatactccagttgccatcgaagaactcgaaagaatgccgaccagaatgattatttcaaagtatatcacttggaagatcagaactattcccataaggaaaagaactatagctttttaccccatgggtatagatttaaagattttattaaaaatgtatcctgacataaaggtgtttctcgataaagtcattaaaggaaatgatctaaatccgtatttatctgagcgagttaggacgcatggtgtcattttacccggcgcatccttaaaaaacaaagggaaagatatagacactcttgtgcttagggaaggattataccactttcattttgcccctaaagataacaaaaaccctaaaggaagaagcaactatcttatctttgctgatgtgtcaaaagacacattcactatagtcgctatcgcccctcacagggttttcgagcatgatactgaggatgctcatcgattctttgacatccgccgccgatatcttgaacgagatatcccggcaggccaaccctatatgctcaatcctgtaatgtctacaggtcatacattggaaatatttgcctatgcgatacattgcgaagatacaatcaattttcttgacccgaaattaaatgatgccgattttatatctcaattatatacagatggtgcattacaacatccatctcttgaacggccaaaaaagccggagctaatatggtttttttacgatttaaacctagggattcttgagaagaagaaaggccatttttttggtctaaaatattttcgtgatagattgtga

SEQ ID NO: 265431 - DNA, 1425 bp, Klebsiella pneumoniae
atggtttcgtcaaacgttaaaatcacagcttttccagccaaaagattttttgtggaaatgctaactcgagacattgagttgtctgactctatattggatttattagataactgtttggacggggtattacggaagaacaatttcacacccgaacagacctttggtaaatcagacgtatacaatggttaccatgcgcacattgagtttgacgaaaactgcttcaagatagttgataactgtggtggcattccaggagagcttgcggagaactatgcatttagattaggcagaccttcggaaagggaagctgaagatcttcctaccattggtgtatatggtattggtatgaaacgtgccatatttaagatgggaacatcagctcaaattaaaagcaagacagatacggaacaattctctgttaatatatcacctgagtggatgactgatgacaataattggtcattagatcttgagagaagtgatgtagatttaagtgaaacaggtgtcagtattgccataaatgatctaagaaatgacatcaaggcatcattatcaaaagaccgcgattttgaaagcgatttaataaacattattgctaatcactacagcttaataatcaagaaaggttttgaggttaagattaatgggaaggttgtaaagccaaatagcacaactcttatttttgacgagagttctattaaggacaatacggatggcatagccccatatatatataaaaacgaatctaatggcgtttcaataaaggtagctgttggtttttatcgtaatttgccaagtgatgaggaagaagaacaattattatcaggtcgttcaactacagaaaaagcagggtggactatcatctgtaatgaccgtgtcgttcttcatgccgataaatcaaaattgactggatggggtgaggctggtgttcctcaatatcacacccaatttattggtatttcaggtgttgtgatatttacatcctcaaaagctgaactattacctataacgacaactaaacgtggtgttgatggtaattcagaactatatctttccacaaaagacttcatgagagagggactcaaattctttactgattttacctataaatggaaagctaataacgaagaaagaaagcagcttataagcactgcttcgaatatggtatctacgactgaaactgatttcgcaaaatcaattccacaggaaaaatggtcgacagtacggcgttctatcggtggtcaagtttttaaaccaaaacttccgatgccacgggaaaccgatcctttacgtcagataaagtttagccgtcgacttagtgaaataaaattagtttcagaattcatctttgatgatgcgactcaaccaccaactgaagttggtcaatattgttttgatgaatatttaaaaaaggctaaacaatga

SEQ ID NO: 265432 - DNA, 993 bp, Klebsiella pneumoniae
atgagcaccggtggaagtatcccatatcatttaaggcaaaataaggccattgaaaggaacctgtttatagagtccttgagaagattgaataattacaccaatatatccgagtatgaatatattggtttcggaggaccattccttgaagattttaaacaggttcataatcttttaaaagtgaataagatgatatctattgaaggtgatgaaaatgtatttcgccgtcaacagtttaataaaccactatcatgcatagatctaggggaagaacctgaaatgagtggtgatttcatcaatcgctataattttgatgaaaaaaccataatttggctagattatgcaatgccttccgaactcaatgctcagttgaatgaaattgttaatttaattactaagttaaaaccaaaagatatttttaaagtcacattgaacgcacatcctgaaacattaggcaaagatccgggtgagcgagacccaagaccctatagatatagaaagataaatgaaattttaactgaaagctttatgccagttgacactaccgaagaagatgtcggatttaaaaaataccctacattactgattaatgcattgaagcgggctgtcgggaatggtttaaaagggcgtaacgatataagaattcaccctttgacatctttcgtatataaagatggacaacaaatggtcactttaacggcaatcgttttagataatacagacgaagaggaagctaaatttattgattcctcgagaataagaaattggccattttatgctggggaatggcgaaaaccaaaagatattaacgttcctgcaatgtccttaaaagaaaggattcatattgaatcgttattgcctgaagctacagttgagaatattcatgaagaattaggcttctatattggatccagtacagctggagccaatatagaccttagtaactttatcgaatactacaaggtagtaccatggtattcgaaagttcttttttaa

SEQ ID NO: 265433 - DNA, 1110 bp, Klebsiella pneumoniae
ttgggggcaacgcgtgcgggctttaatttagctggggccgttgaaatagataagcatgctattttttctcacaaattaaatttccctgagtctgcgcatctccataaggatgttagtaaacttactgctcaagatattttatctggatgtaatgtcaaagaaatcgattgcgttgtgggcggcccaccatgtcaagggtttagttctataggtaaaggtaatgctgatgatacaagaaatgagttgtatgtacatttctttcgactagtgagtgaattgtctccaatttgttttttggctgaaaatgttccgggaattatgaatgagaaatataattctgtaagagaaaaagcattttcattagttagtgatcgctacactttattgcatccgattaaagttaacgcttcaaattatggtgcgccgacaactaggactcgtatattctttattggttttagaaaggattattcaagccagttaaaggagtctgatttcttcccaaaaaatattattgagcaaacttttattaaagacgccttatacggcttgccgcgaataattaaaaaagaatggcaagaagaatcacaaggttggcgaaaagtgaaaatggatagaaaaggatatttctatgataggctttgggggcatatccctgacagagttggagatgccgaatctttaaaaaaactagaggatggtctggtatcaggattcttgggcacagtccactcagacgaaataataaagagatatggcagtctttcttttggtgaaacagataaaatttcaagatctcagcgacttgatcctaatggtttttgccctacattgagggccggaacaggtagtgacaaaggaagttatcaagctgtcaggccaattcacccgacgcaagcacgtgtcattgcaccccgggaagctgctaggttgcaaggttttcccgattggttccgattccatcctactaaatggcatagttttagacaaataggtaatagcgttagtccattagtttctgaggctatgctattacctatctataattattgcttaagtgttaaaaaagaactttcgaataccatggtactaccttgtagtattcgataa

SEQ ID NO: 265434 - DNA, 342 bp, Klebsiella pneumoniae
gtgaataaaattaatttacaggtgtggtcaacattcagactttacggcaaaatttgcgaaaattgctccggcgcaatggcactgtgtttgttgcaagcgctggcaatgttgggttgtctcagcaaccgtggtgtgggtggggcatattactggctattaacgtttatagctgttttagccaccgttggtttcctggggtctctcattagtattggtaacaccatctatttctataccagagaccggaaaattgagtgttatatcatttatgctgttttttatcctgtggtgattggcgtgttgatcactgcagctgccaccttgaagtcaattagcggttag

SEQ ID NO: 265435 - DNA, 393 bp, Klebsiella pneumoniae
atgaaaaaaagagtgatgccggtgatgttgcttgcggtgcttagcggctgcgcaccgctgcacccgtccgattgccataaaacctcggccctcggcagctgtagctccggacgttttagcgacgaggatgaatatgggcagcaggctagggcgattaaaaacgcgctggaggcccagcttgccgatcgatatgcgtggcacgggaaaaagtgccgtctgcatcttgagtttgcccgcgatggtaaactgaaaaaaatcgacgccgtcgagggaaataaagcatactgcgccgcgctacgcgaagcggcagcgcgggcgaccttcccggcatttaccagtcagcaagtctatgatgcttttgcccggtcacgttttaatatgcagggagactag

SEQ ID NO: 265436 - DNA, 600 bp, Klebsiella pneumoniae
atgaatatacactttacaatctttcccaaaagaacacaaaaagagccctatttccttcgcgattccacggtaaaactgaaccgaattggcaataaccgggtaaaatcgcaattcattttcaaacgttctttcaaccatatagccctgattctgggcctcgaacaaagtgaaatagatcgagttagaaaaattaaacaacgacttcctgatcataaactgatagggattgcccgttggagcattgcatcacttgaaagcagccaatcggctttatgttatcttttcgtctgtgaagacaatgtcgcgtacctgtctgcacctgagatggtttttactaatgacaccatatccatagactcatcaacgaggcgttcggtctatgaaacagcttacaccttaactaagccggatacgaaatatggatacattaaccttcgttttcattcggaatacaaattggttacgaaaagacgtggtccatccaaaactaaaaaaatgtccaaagacgaactgtactctgcctatacatctttgttggctgagtatgaagctttaggcaaggaagtagtgcggttaaaaaatcaatataaagcagaataa

SEQ ID NO: 265437 - DNA, 1302 bp, Klebsiella pneumoniae
atgaggttaaaatcacttccgtacaccttcagaaggtacggtaactactacatccagattcgcttatctgatgggcggtcatacaaaaaatcactgtccactgacagctatcgtgaagcatctgctttgatgatcagcatcattccacatatcccttttctaaaatcattaactactccgctccctgtgttcgaagctttcttatcaaatctgattgcgtcagaacgcaaagctgcgagaaacccacttttactccaccagccgataattgttcctgctgaaataatggaatctcaaccggcagccgaaccggaaaaagtgctaaccctctcggatgcgtgggtgatgtacaaagacgaaaaggggcgcaactggacgaaatcgatttcaatggcgaatgatcgttacatggaagtattgcttacggtcttgggagtgggaactgatgtaacggtgatcaccaagcaggacatcaagcaggtgatggaagttattgaaaaccttcctaagcgtgttgttcagccttatcgctcaatgtcgattcggcaactgattgagtgcgatgatgttccaccggatcaactggtaggcgttgaggctatccataagcatctcaagctgtataaatcactcttcaaaaccttcctcacagaaagcaaagacattttatctaagtcgccaactgatggcgtagtggctgcaccatcgaaagcgagatttggtgcatacagcactgcggagatgaaaaaaattgtagggtgggcgcttaagcagcctgacaactggcaaaaatggatcactttgttattggcatatacgggagcgagaagaagcgagataggaaagctggagaagtcacagattaaattcgatgaagatagcaagcgttactatttcctgattgctgaaggcgggcaggggaaaacagagaacgctacaaggcaggtagttatccaccctaagttaatcgaatggggtttcatggaatacgttgatcgccaatggaaagagcggattttctcagaagtggcaggtacaaacatgactaagatcggtaaagtctttgctgatgttcgagatcagttgggtattccttatctggacgattatggacagcggcggttgctgcattctattcgtcactcggtctgctctgctgcgatggctggctgggtcactaacattcttcatcttcagcagattgttggtcatgagaagagcgctgggattactaagcgttatttgcatacatttccattatccacagtcagttatgttgttgatggcatacattgggaataa

SEQ ID NO: 265438 - DNA, 624 bp, Klebsiella pneumoniae
atgttaaaaatttttactttagtcgttgtgcttttttcctcgtttgcttatggggaatcgattacacaagctgtgaaaaagcctggagatacaagtaaagagctgccagcgaaaggttatcaagacgtaaaccggattgaaaaccaacaactgagtttggctgagagcgaaaaacaggaactctattcactgatcaataaaaacagtcaggcaatcgaactccttgtagcaaaccaagaaaaactaatcaatgaggttaacggagttaaaggagatgcgaaagttgattattcaggatggacgagtattttacttgcatgtgtcggtataattattacagttatgagcgttatattagcattgatatctattattggttatagaaacttcagaaaaagtatagaactcagtgtgaaaaaaacatcaactgaagttgctaaacaagaaaccgttattcagatagatgcagttgcgaaaaaagaattggttcgtctaatcgatgagggggctttagcgaagcatcttgaaagtgcagttgatatgattttccttcgaagaaaacccgaattaaaagacagtggatttgataaatatcctgagttggataaagaggaaggtgaataa

SEQ ID NO: 265439 - DNA, 498 bp, Klebsiella pneumoniae
atgaatcattcacaagaatgggaacgattgccaattgaaaagaaggaagtgataattaagtatcactctcagtatccagttaaattgggtgcacttgcaaaggagcttggtctggttgttaagttagccactttgcctgctaatatttcaggagaaattaaggactgtgatggagtagtcaccattcgagtgaatcagcatgatatgcaggcaagacggcgttatactttggcccatgaaatagcgcattttctgctgcataggcatctcctccgtgatggtattacagatgatgtattgtaccgctcatcgcagtcaagtcagattgaggcagaggccaatcgtcttgccgcagatataatcatgcctatgcatcaggtggatgaatgctacgcacgtcatttcaagggtaagaaagatgcagtattatatgaagcaattgctaaagatctcgacgtatcaacaatagcgctgaaatatagactgggtgtgaattga

SEQ ID NO: 265440 - DNA, 1110 bp, Klebsiella pneumoniae
atgttgataagtaactactcttatataccgattctctcgttgaaaccagcggaaatggctgcgttggaagaattgccagctaaagacaaacgtttaatgcttccgttaatttcgttgaaaaaatgggcgaattcaaagtcattcataaaatctacagaacgtattgacaaagcgataggaaaaaattattggatagccgatatcgataaagagcatcttttgatggctaagcaaagactcgcagagggggatgatggcgtttctgcggaaattgtcagcctcgcggagtcgaataacggatatgagaattgggttaattttatttcaacgaacgagaacataatcccaactctccagctcaatgacttatctgcattagatttgcaattgtctaactttttaaatattaataaaacaatagttgtaagattcgagttgtcaggcgatcattccattgagcttggagacttttctttcgttgttaagaaactatctgaaagaaaatttccgcaaggaatattgatcgtattagattacggtgatgttaatagattcaatttgattgagtattataaaaactcaaatttagttaagcaattaaatgctttgatgccagaggcctatttctgcgtatctggaacctcttttccttattcttttgcaggttcctatcgtggagaaattccaatttttgagcgccaaatttataataaagttgttgcagattgtcagggtgtaaagtttatttactcagaccgtggtagtacccgagcgtcaggcaatgaaggcggaagcgggacaccaccacctcgtattgattacccattaaaaaatgaatggcgattcattcgtaaagaattggatgataccattgaaaaagaggttctttatcaagaggcggctatcgaagtaatgaactcagaatactgggacgcagagctgagattatggggtactcagatgatcgaaaagacaagtttgggtgatcaatatggaatcacttctgctaatagggctactgccgtccgtataaatttacatctttaccaacagctacattatttcgacgtgttaaaatcattggatacggaagaagattgggttgattaa

SEQ ID NO: 265441 - DNA, 693 bp, Klebsiella pneumoniae
atgaacagtaaagaaaaaatgcttgagtcagctataaaagcattagttattaaaaatatttttctaaaagaaaataacgcaacagccatttctaataattttgtaatcgatgagttcagtgtcgctaatttcagcagacgagtagatttaattcattcaagaaacgataaaattttcgcatacgaaataaaaagtgaattcgactcactcagccgactaaaagggcaagttgatgaataccttacacattttgataaagtaacggttgtcgctgctccacgtcatatcgataaagctcttttattaacaccgaaaaacgttgctgtttgggaagtagctggtagtaagctaaaaattgttaggagagggaaaatattaccaataaccgataaaatgaaattcatccgaatgatgacactcattgaattattgagtttagcaaagaaatcaaatattgagattaaagataaaaaaagaaaaatagtagaattatccctactttccattccgacaaaatacttaagagaagaagcaattaacaatttaaaaataaggtacagtaaaagagaattaaattattatgatgcaaataattataataattatggtcaaagcggtaaggcagaacctcgaaaaaaaatattacaaacaagaaatatagactcgcttatacacgcaatagaaaaattataa

SEQ ID NO: 265442 - DNA, 948 bp, Klebsiella pneumoniae
atgacctttactgattggctaatactgaaccagcatacaggcgaaattgcccgggctattgagtcactaagaccaaccactgattacgtaaaagattacgtatttcctgttacaatggcctttgcctctgcttttcttggtggtctttcggcggtctacatcaacaagaaacttgagttgcaaaagattgccagagataaccttattacatccattcaggccgtagctcttgctcaagactgcctaagcaatctggtatcaatcaaaacaaactatctcaccatagatagtgaagaacctctcatcagggcttcacagtttacaacgattatcaccaagtttgacgatgtaacattcaacaccaatagcttatattttattcggcagataccgacagcaaataaaaagttttttgaatctctttcatggaaaataaaacatcgcattttccgtataaaaataaaaacaccctcaactgaagagttgcgcgggacatggagaaatagtgtcagagtcggtgctatgtttgggaactacaatcaagttatgggattgctacgatacagaaacgaattgaatgaacaagttaaagacaagattgcgattttcggtgacgctctaccacttgagcatgttcagtcaacgcttggtaaaaaactatgtggcgggtttgtcgatattaccgaatcctccatctccctggtagaccatgtaatggtagagcttcgtcattttctggaagagtttcctgccatcgcagagagtaatattgagttaagcagagtaagggaatggggaggcgtaccaacctatgtgaatacgcaagaggcatttttgaagtgtatggaaccgattatgaaaccagactttaaaaagttccttgcttacacagggatgtctgagcaggaagcgcgggacaaatatacgttcaaatcatggtttgactga

SEQ ID NO: 265443 - DNA, 1101 bp, Klebsiella pneumoniae
atgaaacgccttgtcagaaatcctggtaagttcgaagcactcgaagcatacacagcattcagtcgtgaacatggctataaacttgaatcaccagaagacactgaaagattccttgctcagtttggtgaatcgctcaaggcctcacaggataaccagacacttcttcatggtaaacgcatggaggcttgctttggtcaggttgcagcgggtttgggtggctgtaggatggttaaaactgaagatactggtgatgtcatttctgatgacactgatatgttactgcccgattacagactggtattgaaggatggcagacaattattcgttgaagtcaagaacagcagtctgcccaaggcatcatcaaaatacatgttgagaaaggattacgttgcgaaactgcaacgttacagcgagataaacggcgtccctttgtattttgcaatctattaccgctgcttgagaatatggacactgttacctataagttcatttattgaacgggagcgaaaatacgaaacaacacccgttcactctctggcaaacagtgaaatggagatccttggtgacttgatggttggaactaaacccccactcatattcgagctggtagctgatagaactaaagatgcttccgtgcaaaataatcaggcaagattcatctgtggcgatgtgaaaatctactgtggtgaggcagagattgaagaccgtgatgagaaggatattgcattctacttactgaggttcggcaggtgggattgcgatgagccagagggggttatggatgaaaacggggaactacatagtgttcgctatacgttcacccctgaatctcaggatgaggatgtcaaaagaaatggctttgcaatattcggcaacttgagttcgatgataaccgaagcatacaacgaacacacggtgtacgagcagcaggtaacagctatcacacccaaagctgaccctgctgtgttctcagtccagattccaagagattacaggggtaaagtacttgtattgcatcgttttagtatgcaagcgaaccctgacttcaatgaagaatatgctgatgggactatgtacaaactgacggcagataaatcatga

SEQ ID NO: 265444 - DNA, 207 bp, Klebsiella pneumoniae
atgaagaaagcaatattggtgatatcgggactactgttttcaccgttggcggcagcagggcagatcacaatgaccgatccccagcaggaaacgacggagagtgggaagacgctttgcacataccagaacagcatttatctgttcacctacgtaacaaagggcaagtgcccgtatgcgaagacatttgatactgcggattcagagtga

SEQ ID NO: 265445 - DNA, 150 bp, Klebsiella pneumoniae
atgctgcggcggcaggacttcacgcaaaaactgatggcccttttcggtcagttgcagatgcaaacagcgacgatcgttatcgctctcgcggcgctcaatccagccgcgtttttccagttcatcagcgatacgggtggcgttggtacgtga

SEQ ID NO: 265446 - DNA, 273 bp, Klebsiella pneumoniae
atggatagttcgtttactcccattgagcaaatgctcaagttccgcgccagccgccatgaagatttcccgtttcaggagatcctgttaactcgtctttgcatgcatatgcaaggtaagctgctggaaaatcgcaataaaatgctcaaagcgcagggaattaacgagacattatttatggcgctgattacgctggagtcacaggaaaaccacagcatccagccgtccgagctgtgcgctgggctcgtcacgtaccaacgccacccgtatcgctga

SEQ ID NO: 265447 - DNA, 375 bp, Klebsiella pneumoniae
atgaaaaaaatcatcatcacaacattagtatctctggctctggtcggttgttcttccgttggtaatcagtcattgaaaaatgaaacacaagaaagcgtgaagtcgaagattgtgaaaggtaaaaccacaaaggaagatgtattggcttccttcggtgagcctgacagccggtccctcattgacggtgaagagcagtggtcttacacaatgtataacagccaatcaaaggcaacatcttttatccctgtaattggattgttagctggcggcgctgacacacaatcaagctctctcaccatcatgtttaaaggagagaaagtagattcctacgtttttaatgccgggaaaagcaatgtcaaaacaggtattttttaa

SEQ ID NO: 265448 - DNA, 729 bp, Klebsiella pneumoniae
atgagtattttcactatgaggcggttttggcttgcggtatcccttcctgcacttatcgcgttattcacagggaaaagtggattgattcttaccggagtcgcctggatgcctgtcagtgccttgctacttatctgggcatttttaacatacagacgtgataataaagaaaaatccgaactggcaaaaaacagttaccttagcgctcagaaaaaagaaatcactacgcctaaatttgagttccagagtaaaacctatactttcaaagaaactttttcaggcaccgttatcgatgtttgtgatggtcatatctgggtcaaaaatgcagatggagttgaaaaacgctttaagatccgcgatgtacatttcagaaaaggtcatcacatcagaaggtacgcacttgttcagtacattaagaatagtgcatatcgaacaattaataacgcgcttatcattaatgacagtaccaacaatagagaaattactgatttttcggaggatgtgttcacaccatcttattttacacctgttaacattattctttacattaccttatttgtttctttttgcgtatgggcgttcacactaaattacggatacgtcattctttctgcattagctctaatttatttcttaagaaaaagaacaaaaagaaatcgtcaaaaatttagagctgaagtccatcagattgcaaacagacttgacaataaagaactaacaactattgaatag

SEQ ID NO: 265449 - DNA, 1317 bp, Klebsiella pneumoniae
atgaagggaatgcaaaaaatcagcaggggtaaaaacttctctggtgtcgttctctacgcattaaagccaagctctcaccataaatgcacaccttatgtcattggtgggaatatggatggaagtgatgctggagatctgatagctgaatttgatgctacaaaaacgcttcgaccggatgttgctaaacccgtctggcataattcgcttcgcttgccgaaaaacgaagcgatgacagatgctcagtggtcagggattgctgatgattacatgtcccgaatgggcttctctgaaacgcacctcagatgctatgtccttcatgatgatgcggccggccagcacatccacattattgccagtcgtatagatctatccaatagaagcctttacttgggcaaaaatgaaaacctcatcagcacccgtatcatccaacagttagaaatagatcaccatctgaccaaaaccaaagggccagaattggtagcatcaccatccccagcttcgctatccagaaaatccccgccccaaaaaccgataatcgcaataccgaagcctaaaaagctatcgcgtaacgaagcgatgatggagaagtataaaggagagctatcacccaaatcggttatccaggaagccctggaagcattactgatagataaaccatccaccactgattttgtgatgcagcttgccgccaacaatatcaaagcgcttccgaatattgcctcaacagggaaaatgaatgggttttcattcgaatatcaggggattgctttcaaagcttcgcagttaggtaaaggttattcctggtctgacttacaaaacgggctagattaccagccggaacgcgacaatgctttcctgtttgcattgaaaatgccctcagtcagtaaggcatcggttagcgaagcgcctgatagtgccattgtaagcacaccccatgaaatcacaacagaagacgttaacagtcctgtcgaatcgcttatcctagataaccatgctggtcaggacgaatacactaacgcctctgtaaagcagcttcacttagaagttggtgctggtgctaaggaatcgatagcactcgaagagttaaaagaggctcccaagcgaagctatacagtctcatcgtttagatggcttgaaaccataccctatctccaaatcatcattggtatgttgaaaaacctaaaaatcccaacgttgcaacgtcctaaaaaacacaaaactatcagtagcgtgagagtggtagaaattacgccctcaactacagcaaccgacattgaaatgccctcaattcatcgtagaccatcgccaacaatgtaa

SEQ ID NO: 265450 - DNA, 441 bp, Klebsiella pneumoniae
atggtcgcaagtaatacttttaataagatcgttgtgagtaagcattctcataatggaagcgttaacgaagcgaagtactcgcacaacaagattcgttctcattgcgtcagtgtcagattaaatgatgaagagctaacgcttctcaatgaaagacgtggccgtcatcgtaaaggtgaatggcttcgtatggcgtttctgcataacctcccctcagttattccatcaattaatctcgaatcatggaaaacccttggtgagatttcacataagttaaacaggcttgtcgctcatctggatagtaagagcaatgatagttctctctcacaaactgaactctttgcagtgaagcgtcagatctcagagcttcgtttgaacctgatcacagccgacctatggagatcaccttctgatgaagggaatgcaaaaaatcagcaggggtaa

SEQ ID NO: 265451 - DNA, 756 bp, Klebsiella pneumoniae
atgtacagagcatacagcttaagagtagatgatgatacttttagtggatatttatcagatggtgaagccgtaaaaagagcaaataattatgctgctcaaggtggacttgatgcattttttgatggtgatggaaatctaatcgcaacaaaaataattgaagactggtttccaaaaatgaaagcagatgtctttatatcccactcacataaagatgaagcgcttgcaatacaactagcaggatggctcaaggataaactaggtgtttcatcgttcattgactcttgtgtctggggttattccccagaactcttgaaaaagctggataaaaatttctgccttaaagagagtggttactatgactatgatagaagaaacatcactaatggccatgtgaatatgatgttggctacttcacttacaaagatgattgatcaatgtgagtgcatcattttcttgaatactcctaactcaatttcatgcaaaggatgtatagagagtgatggaactaaatcaccttggatttatgcggaaatagaagcgactagattgcttagaaaaaatacgccagaaagaagaaggacgctggttaaagcttctacagaagggggagttatcgttatggatgaagctatatcagtaaagtatgacttagatttaaaacatcttctccttttagataagagccagattcttaagttgcataatagtggcaagacaggaacagatgctttagacttcctgtatgacagcatttga

SEQ ID NO: 265452 - DNA, 411 bp, Klebsiella pneumoniae
atggatgagaaaattgcgcaccttagtttcatccagggtgtaatcaacagaatgggtagcaacagttttatgatcaagggttggtgtattgccttggttgctgcaatctttgcattgtctgctgataaagcaaattcaagctttgcatatcttgctctctttcctctagttattttttggggattagattcattttttcttcgtcaagaaaagatgtatagaaaattgtacgaagacgtcgcaaatgaaaatgtgaaaagtgacaaattcacaatgaatgcttcagcttatagtaaagatattggttgctatttagaagtggcattttctaaaacactgctcccattttatggggccatgattgtaatgatattaattttcatgtggaaagttttagaattatttaattag

SEQ ID NO: 265453 - DNA, 948 bp, Klebsiella pneumoniae
atgttacacaagtttaatgttaaaattgatgaagatagtctccgtaggcatctacaaaacagcgacctgaatgctttagagtcgctcatttacaacaacaaaaaagacgacattgtaaataaaataaaatcgatagctgttgttgatgatgaaaagaaggaagttaaaataaaacatgaagatatattaaatgattggtttcctgagtcaggatgccatatttttctatcacacagccatcaagataaaaatatcgctataaaaatagcaaaccatttataccaaaattacaaaatcaaaactttcatagattctgatttctggcagtttgttgatgatgccattaatgagataaataatgagtattcaaagtgcccctcaccacaagaccatcttctaagatatgatagctgcttgatggtagggactaatttttatcttacgttatcaaatgctttaatggatgcaattgataaaagtgactgctgcctattccttaacacagaaaaatccattaaaaaaatagggacagaggtagaggccacatattccccttggatttatactgaactcaatattctggaaaaaatacgaataaatccacataaggatagaaatttagttttttctgcggggatggaagatatgggaatagaattggaaaaggctcttgcatccaattctaaagtaactacagaaagttataaatttagcgttgagtatgtagtagacccaagttttaaattatcaactatagactcagatacttttggtttaattctgtcatcaccatgtgttgttgtgccaaattatgaaagtaaaaacaatgtaatcacatcaacacacatgagcaccgatcttcagatcataacagaaaaaattatggcaataaattacttggataggttgtacgattttattttcagcaagcttccaaaagtaatttga

SEQ ID NO: 265454 - DNA, 1197 bp, Klebsiella pneumoniae
gtgttcttccaaaaatggtgtgatttaggatatgaaggaataagtcatgaggctttggagataataaatggatgggttttacccaaagttgttaatggtgatgtcgtaaagagaagagatcccgaacagggaccattaactgatttagagcttcaaagttttaatgatgcagcaataagagcatttgaaaaggaaacaatttcactttttatgttagctatggcccttctgattagtcatacaggacgcagacctcttcaaatacttcatatgaagacaaaagatattatgaaagtgaaagataatacaggtgaggattactatcttattaacatccccagggttaaacagagagagggttttagatcaagttttagatcctttcgcatcaccaaagaactttatgatctgatctgccttcaggctaaaaattcaatgacgattttatcatccttcatcggcagggaactcactatagaagaaactaaagatactcctgtttttatatgtgaacacagccttattacaaatgatattagtgttggtttagatagaatattaaaaactgacatattacatccataccttggtactttaacaaaaacaataaaagaaattgtagataaagagaaggtaatatctgcaagaacaggaaagatcttacacgttaactcaaggcgatttcgctatacgattggaacaagggcagcaaaagaaggttatggtgaggttatcattgcagagcttcttgaccattcaacaacgactaatgtcggtgtttatgttcagaataatgcggataacgcttacaaaatcgatctggcgatgggcgaagccctggcagatatttcggatgcctttaaaggacaggttaaaagaaaagaagaaatagaatatgaaatcacaccatctgtaaaaataaaaagtcatgatggtgaggatacaggaagttgtcagcactgttcttcgtgttcagcgggagttcctattccttgttatacttgcatgaattttaccccttggctgacaggaccacatgaaaaagtctatcaacacttgattagtgaaagggaaagaatatacagcataacaaaggacaggaatgtaacgcagtcacttgacagaacaacacttgctgtcaatcaggtaattaaacaatgtgcggatattagaaaaatagaacaggggatgaaataa

SEQ ID NO: 265455 - DNA, 1272 bp, Klebsiella pneumoniae
atggggattggatgctcagcctttgctcaaatcttaggtatggggtcttctggagaacgtaccgttagagggtgggagtctggcgaacatgagcctacactcaattactggaatcagattattaaactggaagatgtcatgaacacaaacactgaaaactctccatttaaacaagaatctattgaaaatagtaaatttactttcatagatttatttgctggtattggcggtatacgtttacctttccagcagttgggaggtcattgtgtttttacatctgaatgggataaattcgctcaaaaaacctattttgctaattatggcgaaatgcctgatggtgatatcacacaaatcaaaaattcagatatcccaaatcacgatgttctcttgggtggtttcccttgccaagctttttctcaggcagggctgaaacaaggatttagcgatacccgtggaacaatgttttttgaaatacaaagaatacttgcaggtaagagaccaaaagcattccttttagaaaatgtaaaacaattacaggggcacaataaaggtgatactttaaagacaattatcaatatcttacaaggtaaaaatgcgcaagatataccctctgatatacctatgagcaatgatgcacgaagcgccttatcacaacgtttaaactactgggttgattatagagttttgcgcgctgctgattttggtgtacctcaaaatagagaacgaattttcatcgtaggatttgatagagattattttaaaaatgttgattttgataaactattttcttggcctgaagctcctaaagaaaaaacgcgcttaggtgatatccttctttcaagaaaagaattaaatgagcttgaaaaagttcatggaaaagatttttacactatttccgataaattatggactggtcataaaaaaagaaaagaagagcacaaaagtaaagggaatggcttcgggtattcactcttcaatgagaacagttcttacgtaaataccatcagtgctcgttattataaagatggctctgagattttaatagatcaagcatctcttgggaaaaaccctaggaaattgactccaagagagtgtgcaaggcttcaagggttccctgaagaatttattgtagatgcagtttctcatgggcaaatttataagcaattcggtaattctgtttgcgtaaaagtcatagaagctgtagctgaaaatatgattaccgctctgaatagagcaacagatcttattgaagaaaaaaataaagttgcttaa

SEQ ID NO: 265456 - DNA, 576 bp, Klebsiella pneumoniae
atgcaaggaagattaagattccaaggaaatacaaatgatgtattccttatatttaataggcaagagaatgatgtacctattataggtttcttatcaccgttacaatgggagcaactgttaaggcaggcagagagaaattttatactatatgagcaagatcatgatgacgacgtttatcttaagaatatagtacttcaacaagcaggtcaggcagttccatttagtagctatagattccaacgcaactattccttagcactacaagcattagaaaatgcaaattttaaatgtgaatataatccagaacacattactttcatttcaccgattacacagaaaagctttatggaagcacatcatttaattcctcttgcattccaaaaaaatcatatacattctttggataatattggcaacatttactcactttgccctatctgccatagagctattcactacggtgatagtcaaacgaaaagaataattttggaaaaactttattactcacgaaatatgttttttgaaaatcagttaggaactgatttcggtaagttatgcttttattatggaatataa

SEQ ID NO: 265457 - DNA, 399 bp, Klebsiella pneumoniae
atggcaagacatctgaataaaaacgatatagcgataataataaatgtgattgtgcagtgggatgaagataaaatcacctgggatgggatatgtgcggctgtcgaatcattgattggtaagaagccgacaagacagtctctaaatatgaataaggacatcgttgcggcataccagatcaggaagaaaggcatcagagctacagacaatgccatcaggcgtccggcgaatttgaagatagcagccgccagaatttctagtttagaaaaacagctttaccatctggaagagataaataagaacttaaaagagcagttcatccgatggcaatataattcatacaaatatggtttgaaagaacatcagctaaatgaagatatgccgactatcgacagactttga

SEQ ID NO: 265458 - DNA, 750 bp, Klebsiella pneumoniae
atgggggatgtttttccttcagaacatgcaaatcgtagttttgaaaatattttttcccgacatggctatgtcggtactgatggaatacctctacatttgaaaacccatcaacctcgccatttgcttaacaccatcgctcaacgaaacgggatgtctaacctggatatagccaaatggtctggccgcgcgaaggtttcccagaacaaagtttataaccatgtatctgaagacgaaatgcttcgtaaagccgaagaactggatatcagttccatcggttcacaagccttcatgatcgattcagtggaaccgaacctccctgtaacgccgggaatgcttaatctatgggaacacggtgccattcatgtcactgaatatgggtattgcgtccatgactacatgatgagtccctgtgaaaagttcagggattgtatcaactgcaacgaacaggtctgcgaaaagggggaagaggataagctccagaggctcaaagagaggttaaatatgactgaaaggcttctatccaaagcaaaagagtcgatgacggaagaagagcttggtgctgaccgctgggttaagcatcatgaatcgacgctatcacgattgagagaacttatctcaattctttccgacgatgcgatccccgatggttcacgaataaaactgggaggtgaaagttttactcaattggggcgagtactaaataaatttgaaaatatcgaaaacaaagggaatactaattatataaattaa

SEQ ID NO: 265459 - DNA, 813 bp, Klebsiella pneumoniae
atgctctattcagactttgtaggaagtctaagaccaagaacaatcgaagatagcgaaggaaataaaaaagtagtttatgaatatagagcaggcccttttttaagagctttaatacttgcgttaaattcaaaagaagaaaatgtatatttagtaattgaggaaataaatagagcttctgcctccgctgtatttggtgaattattccagctattagatcgtaatgagtatggtgaaagcaaatatgaaattgatataattgatcctgacatgttggattacatcaatgaaagagtggacgacaatctatcaagcttaagaattcctcgcaacctctcaatcttagcgaccatgaatagtagcgatcaagcagtaatgcctatggacacagcatttaaacgccgttggcaatttgagtatcttctcatcgattatagtaatgctactaaaggtgaaataccaataaacatatataatgacgaagctaatatagaaacaataaatattacttggggtgattttgctaaagtaattaacgatgaattaaaagctttaaaagtgcctgaagatagattgcttggacatcgttttctagataagaatgagctaataacaaaagaaaaagccattgaaacacttgcaggaaagcttttagtttatctttgggacgatgttttacgacatggaaagaaaagccttatatttcggactgatgaatatagaacatttggtgaattgcataatgcctttatagctggcaaacctatatttaataactctgtcgaagagaaaatgaaaattcacaacaacatgtag

SEQ ID NO: 265460 - DNA, 171 bp, Klebsiella pneumoniae
atgattagttgttccagcctttataagaataacgtgaattttattatttttgtcaaacccaataactatattatcaccctcttcagcctgctgcataactgcattatcattaaaatacaggcgaaattcagaacgtgtctcatgtgcttctcttgcatcgtaccatgttaa

SEQ ID NO: 265461 - DNA, 309 bp, Klebsiella pneumoniae
atgaaaattaatgactttacaaaatttgaaaactatggaggtatcatcagtgatggtatctttgaggatattttttatgttgactatgttgaagagattgaactaacagaagagaatgagaagtatattgaatggttaagctacttctttgttgccgaaatgcaaggtgtgttggatgaaattagcgagctggacatgcttgaacagatttctgtttttgatttttggtttaagatcattcagtcaagagatgaagtagaagcactggcaagaactattatctattataagtcaggaatgcctgtttga

SEQ ID NO: 265462 - DNA, 300 bp, Klebsiella pneumoniae
atggcaaatcagaatgatgaagttgtgtatacccgtgtactacttgaaaaaataaaagaacataaggacatgttcggcgttcctgatgggaaacatgatctgcaaatcatgccgctgagcgaatacaaaaccatggttaaccgtgaggcattcttctttgttgatcataacggctttctgcgtagccagttttccggcgagattcttgcggccagtaaagagcatgtcgatcttctggttgagcaactgcaagtcctgaaaaataccctggatgacgccatggactgcgccaaagaatag

SEQ ID NO: 265463 - DNA, 363 bp, Klebsiella pneumoniae
atgacaaacatttttgaagtgctggggccgctgttccgcaaactaaccgaatcctgcattgctcaccaggtggcaaccaccggttcggcttccctgctggtggagagcgataagctgatggctcgctatcgttttaccctggaggtgccaacaactgagaacctgctgattacgtatatggtctttggttgccttgatgagtttggacccgaagaaggtctcgcttatttgagcggaattttgaagagttgcttcaccgatggcgagatcaacgaaatgggtatcgaggtggttaagagctgccaccttgagtatctgcatgaaggcctgggcgagggtatgcccagtaaggtaaggcactga

SEQ ID NO: 265464 - DNA, 1218 bp, Klebsiella pneumoniae
atgagcgagttgagttatctggaaaaattgctggatggggttgaagttgagtggaggaaccttggtgatacttcactcttcgaaatagcgaataatggaagaaagccagtaaaagcctctttgcgcattgcaggcgagacgccctattatggtgctaacaacattcaagactatgtggatggatatacccacgatggtgagtatgtcttaattgcagaagatggctcggctagtttagaaaattattcaattcaatatgcaactggtaaattctgggcaaacaaccatgttcatgtcgtacgaggaaaagaaagagttcattctagatttctatatcattatttatgtatcgttaatttcctccccttccttaccgggggaggaagggcaaaattaactaaaggacaattaattgagatacctgtaccaatcccctgcccgaacaacccggaaaagtccctcgctatccagtctgaaatcgtccggattctggataaatttactgcacttaccgctgagcttaccgctgagcttaccatgcgtaaaaaacagtacaactactatcgcgaccagttgctgagttttgatgagggtgaggttgagtggaagacattgggggcgataggtaaatttacttatggatatgctgccaaagcgcagatttctggtgatgctcgcttcgttagaattacagatataaatacaaatgggaaactatctccttttgaaccgatgttcgttgacatatcagctgaaaatgaaaagtacacattaaaaaagaatgatttacttatggccaggactggcgctacgtttggcaagacaatgattttcgaggaagattatccagcaatctatgctggcttcttaatcaagttaagcctggatagagacatcattgaccccaaatactattggcattttgctcaaagtgattatttttgggagcaagctaataagttagtttcaggtggcgggcaacctcagttcaatgcaaatgcacttaaacaaatcaaagtacctattccttacccaaatgaagcgggaaaatccctttcggagcaggcacgcattgtttctgtcctggataagtttgatattttagccagttcaatcaccgaaggcctgccccgcgaaatcgagctgcgccagaaacagtacgaatactatcgtgatttgctgttcagcttcccgaagcctgaaattgccagtcactga

SEQ ID NO: 265465 - DNA, 489 bp, Klebsiella pneumoniae
atgatgatggtttacgggatgtttgtttttacgctgcgcactatcccttatcagcagctccagcagtcacaggaatggcggcacgtcaaaaatgagcgggttaatcagtctgccggatggcagtacatcgggccgggtgacgatacaatcaccctctctggggtgctctaccctgagattaccggcgggaatttatcgctggcggccctgcgaactattggctttaccggtcgcccttggccgctgatcgagggtgatggacgcatctacgggatgtacgtgctgacgcgcctggaggaagggagaacggagtttgaccagtacggcggggcaaagaaaattgagtttacgctcaccctgagccgcgcggattcagacttccgcgagaaactgcaatcatcgtctgtcagtgatgtgctgtcagacctgcgcaccagtgcaacgaaggcggtcaattccgtttcaagctcgctgaacagcctgttttaa

SEQ ID NO: 265466 - DNA, 2934 bp, Klebsiella pneumoniae
atggatcttagtattcgcgttgcgttcagtgcgatcgataaacttacccgcccggtaaacgcggccagcaaaacagttggtcgcctctccgactccctcaaaaaaacacaatcttcagtcaaggatttggaaaaaggcgctgcgtcgttcgacaagttgcgcacgaaggccaacgaaaccgcgcagaacctgaaaaacacccaacgcgcgcttgacggcctcaatcagaaacagcgggaaggcggccagctcactgaggcgcaggcggcgcgccttgagtcgttgcgcagtaagctctcacgcctgacggacacctacaacaaacaggccacacaattgcgaacggcggcgcaggcggtgcgccagcatggcgttaacctgtcctctggtagcggggctattcaaagcgccatccggcgaaccgagcaatataaccaggcgcttgagcgtgaacggcaccagcttgccgcagtaacgcgcgcgcaggcgggctatgagcgcgccaaagagaccgctggcaagctgcgcagtgcgggcatgggtatgacgctaggtgcagcggcggcgggttacgctggcggttcattcctcgcgcctgcggttgggtttgatgaagaaatgtcgcgcgtgcaggcgctgaccaggctcaataagggcgattctcagttggcggccctacgcgcgcaggctaaaaaactcggtgctgaaactgcttttaccacccgcgacgcagccagcggacaagcgtttctcgcaatggctggcttcacgccggaggctatccgggcggcgctgcctggcgttctgaacatggcgctagccggcggcatggatctgggtgaaagcgccgatatcagctctaacatcctgtctcagttccgcctcgatccgaaagaaatggatcgcgtcagcgacgtgttaaccgcggcatttacccgtactaacaccgatttgacgaatatcggtgaggcgatgaaatacgccggtaccgggatggccggtctgggtgttgatgtggagcgaacaacagccatgatcggcgtgatggctaacgtaggtttgcgtggcagtatcgcgggtacaggtctgcaaacgaccttctcgcgccttgctgcccccacaaccaaagcgcaggccgcattaaaacagctcggtgttaccgtggctgacgctaccggcaaaatgcggccggcggaaacggtcctctccgacatttataaatccattaaaaaatatggagccacggatcagctttcgttcttcaaagatatcgccggtgaagaagcggcaaaatcctttcaggctttggttcgggcggctggaagcggtgagctgcaaaaacttctcgccgatcttcgtggctctcagggtgaggcgctgaaggccgcaaaggtgatggccgacaacctcggcggcgatctgaagaacctcgacagtgcgtgggagggattccgcatccagatcgaggaaaccaccgacggtccgcttcgcaagttaacccaaaacctgagcgacgtaattactgcggccagcgaatgggttaaagctaatccacgccttgcacaaagccttctgctcattgttggcggcactctcgcgctcaccgtcgctgtcggcggcctttcccttgctgctgggattctaattggtccactggcaaaactgcgactcggtttcgtgctgcttacgggcgggagggggattgcagggacaatcaccgcaatacgcacgcttggcacggctgctggccccgcaatggcaactatgcgcggttggagtggcgtgctggcaggtgtggcctctggattcgggagtatatcggcggtactgcctgctatccgcgccggattaatgggggcatttctggcccctggtgcggcgctagcgtctcttggtaaaaaccttgccatgctggtactgcggttgactggcctccctgctttatggggaatgattaccggcgcggtatcggtgcttggcggggcgctgtctttcctccttagcccaatcgggctgattggggcggcgtttgtcgcggccggccttctgatctggcgttattgggagcctatcaaagcatttttcggcgttttttttgctggcgtctggcaggcactggcgccacttcgaaacgcattatcgccactggtgccgatcttctctgctatcggtaacgggattaaatcggcctgggagtggtttaaaaacctgctcagcccgatggaagccagcaaagaaacactggataaatgcgcctcagccggggagacattcggacgggttctggggacggcgcttagcgtgcttctgtggccgcttcagcagttaatgaatggcgtcagctggctgcttgaaaaattggatcttattcctgaagggatcgacagggccaggcagcaggctgacaaagcacagcgagatcttgaggcgtcggcggtggcgctggccgggcatcaactccctctgggccaagctaccgtatccggtactggcggtggagggaagccacctgttatcaccggtgataacggcacgctgcggcgcctgaataatatcgcaaacaacacgaaggcgaccgccgacaatacgaaggcggccaaaaggatcgggcctggcgacattgtctttaaaaacctgccgcgtgcgctagctctgcgcggggcttatcgggaggcgagagtgattccgcagtcggtaccgcgcgtatcagctgcggcggccggcggcgttctttcggtgccagcggccacgcaagcgcctggttcggcgcccgtttccgcgcctggcggcgctgcgccggtgttcaatctgaacttttacgaggtcggccagcattcgccccgggaactggaaaaaatggtgcgcaacgccgttcgcgatgcaatggccagcaccaacagaaataaccgcggctcgttccgcgacagagaatag

SEQ ID NO: 265467 - DNA, 300 bp, Klebsiella pneumoniae
atgtctgtcacccttagccagccgattaaacgcggcgaccaggaaatcaaaactatcgccatcagtgacaccatcaaacaggccggatcgctgcgcggtctgcggctcgttgatgtgctcaacctcgactatgacgccgtatctacgcttctcacgcgcgttaccagtccgcagcttaccgcttctgatatcgccactatgactactggcgattttacggcgctgtgcgaagagatagcaccttttttgacgaaaccggcgccgtccgtaccgagcgaggcggcgacggcgagcaaataa

SEQ ID NO: 265468 - DNA, 384 bp, Klebsiella pneumoniae
atgcaggagtttgaaggcgcaccattgcatacggcgatgtttggggggatcaatttcttttgccccgcagacttaattccttccatcgagcaacactttggttctgatggtttaaatattgctcgactcacttgcctgtcatccgacgcgccaagtaaactaaacctcgtcttcgagcttgccactcaagttaagagcgtagcggggtcactaatgggtttgcttaatcgaaacgacattgaaatagaattgcatcttggtactcgtgatgaggaacctaagtcggctatcgtcaaactccgtaatgttaaggatgttgaggcctgtgagcggctcattgataagcttggtgcggtagtaatccgccacaaaaaagacgaataa

SEQ ID NO: 265469 - DNA, 651 bp, Klebsiella pneumoniae
atgtcttcgagtcagtcgccaatcactatagaaatgatagaaaaaaacgcgccagagctcttagaatattacgctaacaaatgtcctagcaatgctcaggatttttacaaaaatctctataaagcattaaaaaagatatctaagaaagcgtatcagcagcgcaattataaggttaatcattcagaggaggaactagctagctttttctccacagagcttcaaacaatgctttttgattcagaaagagaatgtgaccgttcaggacatgtagatattgtcgttagagctagtctttctgaagaagacatcgaatggtatggtgagtgtaaaatccttgcccctacaggaagcaattgggatattcaccaaggatatttacaactaacaactagatatgcatttggtaactatgatgaacatggagttatagtttttaataagaaaaacaatgccatagaaaggcttaaagattggtgggaatatctttctgataaggaaaaaatagatttcaaaatagattgtaacatatctgacatggcgtttttcactaaatgcaaagatgaatctactggtcggttaaagaatataaggcacctattcgttcctctattttaccaacctaaagataaaagtgcagtcaactctaaataa

SEQ ID NO: 265470 - DNA, 1101 bp, Klebsiella pneumoniae
atggaaagaacgaaaaaaagcataaagttattaatcaaccatttaagcagaagagctccagcaagagttgcgcaaagaataataaaaaactccggtataaagactggacggagcattgaggataccctcgattacgttgacgctatcaaaccagaatctataaataaaattcataatagactgaaagcaaatattgaggattttcatcttttcggtcctaaagtggtaaggattcttaatgttacagaggatggacaagatgaggtcagaaatttctttgaatcgcttaatattgatgacacctcaatcgagtcaacttcttttcctaagccactaggtccgaagcaacttgaagcagttaagctctcaagccctaatttaattagaaaatatcaatctccaacaggtacattgtatctatttagctataaatctgttgtaagtctaagagaaatctatacaggcaaagaagtcgactattttggagacaaagcatcaagttttgataagatcattgctataaaagaaaaaaacattcaattttttaactcaatatttgtcaccgccgattataaaagaatagaattaagaattgatcttgcagaacaaatgggtatcacgattttgcgagaagtaatggatacattcgaaggtaaattaaattcgagattttttgatatttataaaaaaccgataccctatgcaagaattaacttattcccgataatacagaagatctatgacgaaagtgaggatggatatattttcgatctttccttccaatgccctacgggtgcaaatagaaacgagaatttaagtggctacaaaaaagaattaaatatcaaagatttaagaaaggaggagtatcatgttgctggaacgcaaaaaataggcaatgttttcattccatataaagttggagtatattgggatcctgaaaacacagatggtgaagttagcggagaaccggagctaattctttcagggacattgcttatggctaaatcaaatgcatcaatcttggattgtgctataataagcaatactgttaacgaaaaagattttaactacgttgtgacggcgatgaatgattatgtctaa

SEQ ID NO: 265471 - DNA, 282 bp, Klebsiella pneumoniae
atggaactgataaaccgcgcctggaactggacggtatacctctggtcgctgttcctcggtggcgtcggcatgatgacgcaaaaagactggctgaccgtcatcgccgcactgacgggcgtcgtggtagccgtactcggcgagctgcatcgccgccgtatgtcgcggatccacgaaaccaataacgtgctgcttaacgagctgatcgacgccatccgcgacgacaccgagaatcgccaggaagtgaaggaactgatccgcactatcagggaggcgccgcgatga

SEQ ID NO: 265472 - DNA, 201 bp, Klebsiella pneumoniae
atgaaagtcaaagcgttgcagggcgacacagtggatctgttgtgccagcgctactacggcaccacgcagggcgtgaccgaaaccgtactggcggcgaataaggggattgccgatcagctattcctgaccgcgggccaggtggtggaactgccggagattaacactgcagcgacgaaggagaccgtacagctatggaactga

SEQ ID NO: 265473 - DNA, 498 bp, Klebsiella pneumoniae
atgagccttgtagcccctcgcacagtaaccccctctgcggaggatgtgccggacgttgacgacggcggggaaaaagtcaccactggcgcgttctggcccgaaatcgtgctgggtgacgttcgcaaaaagatgcgcatcaccggcacggtgaccacctcacgactgaaagaagcggttatcgaaggcgtggcgcacgttgtcgaccagctgaccgactggcaggcggcgcagatggccgccggttacagccagcttgccgacgtaccggccattgcgatcgacggcgaaagcgtgaaggtgcatcgcttccgccgcgcggtgtccagtattgcccgcgcgcatatcctcggcacgtttcgtgatgtggacaccaccggagacgccggggaaaagcgtgcggctgcgctgctctcgcagtcggatgacatgtggcgcgatgcccgctgggcgatatccgacattcgcggcgccgtgcgcaattctgcggaggcgttctga

SEQ ID NO: 265474 - DNA, 864 bp, Klebsiella pneumoniae
atgctgacaccggcacaaaaacattttcaacgtgtcatggctgaacgtcatggcaaggcggcggatttgtccgatacggcgcgaacggcgcatgagcagatcctgcaccgcatgcgtatggacatggccgcgttgaaaaagattcagggcgaacaggcgaaagccgcgctcaagcgccagctgctacccaattacgaggggtggatcgagggcacgcttgaaggcaacagcggccgccaggatgaggtgatcacccgcctgatgatttgggcgattgatattcgcgattacccgctggcggcgcgcatcgggcggtacgtcatcgcccataacctggcgatgcctgaccggttcaaccgcaccgctgcaaccgcgctggtcgatgagctttgcgacccgattctgatccaggtcaaggcggacgacagcaccgacgtcacgccatatctggcggtgctcgatgaagtggcggagtttaccgccggcagcgatatgccggacatggtacgcgccaagctccacaaggcccgcgcctttgcgctgcgcaacggcacgcctgccgagcaggaaaccgcgttagagctgctgcgcactgcgctgatcatggaccctggcgccggggtgaaaaagctgatcgacaagctctccggccagttgaagaaggccgccgcagcgaatgccggcactgagcagaatgatgcaggcggcgcagagggtgacgagcagagcgaagcacctgcagcaccgccggaagtgacggtgtcagatgagaaagcagcgccaaaacccgcccgcaaaagcacaacccggaagccggcagcgcgcaaaacaaccgcgaaaaaaacgcctgccgtcaaaaaataa

SEQ ID NO: 265475 - DNA, 834 bp, Klebsiella pneumoniae
atggctaatcaggcaaccacccgtaagaaattcaaggtcatgacgtccggaacaacggtcgatggccgcaacgtcacccgcgcccaacttcatgcgatggcggcagcgtacaacccggcagtttatggtgcccgcgtcaatattgagcactatctttccccgttccctgacagtgtattcagcgcgatgggggatgttgtctctctgtccgccgaggatatcaacgaggggccgctagccggtgaagcgcatcttttcgcagagatcgaacccgcccagcgcatgaaggacatgattgctgacggcaaaaagatctattccagcattgaaatgcaccccaatttccccctgacgaaaggcccgtatctcattgggctggcgatgaccgacaccccggcaagcctgggtaccgacaagctgaaattcaccgctgaaaaacgcgccgagatcatgcgctttagttcgcaagatgctgaggtcaccttgttcaccacctcttttgaggccgagatgatcgagctggccgcccagcgtagcgacgagggcaccaaatggtatgcccgcgtgatggacattctcggaaaggggcagagaaccgacgatcagcgcttcagccaggtacatcaggccgtcgaggccgtggcgcaagcacagtcagaccagctcgaccgcttcagcaccatcgagcaggagcgccagcaggataaagccgccatccagaaactgaccagtgacctcgacgcactgcgccagcagctcggcaacactgacgccaactttagccagcggcccccggctaacggcggcgcgaacgcgcagctggccgactactga

SEQ ID NO: 265476 - DNA, 246 bp, Klebsiella pneumoniae
atgagcctgattattgtcagcaatgatttatcggaagaagtacacctggtgacggtggcgaatggtgcggccacggcaacggagcgactgagcggggccagcgtatcagcggaggaaatggaaaccctgtttcccggattcgccagtgcagttgcaacggccggagatactgccgaactgctggggacgctggggtcactgaatgagcgttttatctgggcgcaggtgtctggctccttacagtaa

SEQ ID NO: 265477 - DNA, 1122 bp, Klebsiella pneumoniae
atgacgacgattttaattaaagatgcgctacgccagtcggtcgaggccgccagcggcggattgcagacggtgatttatacggcaaaaggccagccgtcatttatgaatattattgagaaattcgacctgtcggctattgacccgaccctgagcgggacacatccggcatttattatcaatggcgtcgaagtgagccggattttggtcggcacctacacggcgtcgttaatcaacggcgaactgctttctctgcctaaccgtcagtcgtcaactcctgcactggcggcagcagtgacggcggcgcgtgcgggtggtgatggttttcacgtcatgaccaatgcggagtggtctgcggttcagatgcagtgttacgcgctggggttcaatccaaaaggtaataactattacggacgggatgcgacagacagcacgcaatacggccgccgggtggacggcgtcagcgcgacaggcggcgtaacgaacggtacgccggtgatttacaccggctcgggcccggtgtcgttccggcacaataacgcatataacggcatcagcgatgtgaacggaaactacaacatgctgacgcccgacgtgcgcctgtgcggggccaccggtgagctgcatatttttgcaaacaataacgctgctgcgggggtggctgacctgtccgtctcttctgcgggctggaaggcaatcaatgccacaaccggtgagttaatggacctttcatacaccggtaccccgggcgtggattttgtttcgaatctggcgaacagcgtgaaggtactcaatgcatcagcggtgggtaataactacacgctcaccgccactgacggcgctgcgttttcatccatggccaacgctggcgcgatcccggtttcggcaacggcgctggcggtactgaaaaagtacggcctttatccgctggtagccaatgccgccacgctgggcggcgacaaaattgtgatttccgctacccccgcaacggctgcgaccgaacgcatgttgcgtcgccagggatcctatacggatggtgcgtctgccggtgtctggatggctggttttaacggtgttcgtgctgcgagcggagtatcggcgtttcgtgtggcgtattacgcataa

SEQ ID NO: 265478 - DNA, 330 bp, Klebsiella pneumoniae
ttgcattacaacggcactcagattagttatgccgccgattcagcaccgaaaaccgacagcggtactttctggaaaaaaatactggtcacgtatgctgacgagctggccgcccgttatgccgaactccgcgataaagatattttcagcgtgaattgcctctatgacatttccgcaggactgtccgcgaaatatacccacgagctggataaagcggaaatcaataaatggccgtcgaaaccgtcgttaaccgtcacgagccgtgatcagattttcagctggtttaacgaccgtctggcgtatctcgacgataaatttaactacacccgataa

SEQ ID NO: 265479 - DNA, 201 bp, Klebsiella pneumoniae
atgcagggcggcgtgtccggcattaacgcggccgcgctgctgctggataaattcgagcgtgactggtctcttgatccgattgcgcagccgcatttgtgcgatttccggcagttgacgacgccattgactaccgcatacgagggcttcgagcacgtagtgaatcagttcgcgctgattctgcttgatagaaaaatcggatag

SEQ ID NO: 265480 - DNA, 3267 bp, Klebsiella pneumoniae
atggcctttaatccgccgctgggatcgaccaatgccgatgtttttatgggcaacgttcaacgtcttgatgaactggtgaacggccccgccgccgatgttcccgaccgtgcaggtgaccctctgtattcgtggcgccagatgatggcgaagaatgaagaaacacggcagaacctgatccccctaagtcgccagtacatgacgctggccgatgctcaggcagatattgcaaatattcctgaaggaagcacgacgtattaccgcagcccggacgatagcgcactggctatcgaagtcatcaacaacggcggtacgctgagcaagaccggcagaagcatgcaatcaagcgcgtatacggatagtattttcgatccgctcagcgaggctgttaatgctaattttaactccctggtagctgtcctgacggaaaatatggcgctcaaagaaactgtaacggctaccgggcaattaaattctgataaaaactcagttctgttgtttaaatctggatcgctggttttcggcggcaatgctcctgcattgatatctgccgtctcagatgataaccagacgatattttctcgcaaaatatatccaggtgaatcattcgcaaacggggtgtggagaacgccataccgggattatacgttcaaagcatccccggatgaaattagctcggtgaccatcggtgctaccgccgctattattgtcatgttgtccgctttgacgcctgatgcctggttcgacggagcatccaacacagtattcagtgacggatttactacaatgtcgcagggggcgcaggctggcgcatcagtaaactctgtggctggtggtgatggtggtaccgttcggtttgggctgcttaattccgatattacaggggcgggttacccattaactaccgatggcgttactggttacttcgccaatacgttcaataatatagccgtccattaccgggctgttgccccgtcgttgtatattgataccaaaatttccggcgtatttaacggcctggcgactgtaactatcgagtctccagccacagcagagatcgagcagtacacctatcctgaggcagaggtcatggcaccggcaacgctagtcggtacctataacgcggatataaaaaatatcactgctgtggatatggctggcgttccgtcggaaatcgcaattcagtttccacctggtgaggtttcaactcatgcagcgttgcgcctgacggacgaaaacgggatcgagtatccgtgtcaatttgcgggcgatatggacgctaatttgaggcgtgattcagatatttcgcggtacgtcgataactcattcaataccggggagattgtattttttgcagagctgccagctaacgcaacccgtcgattccgccttgaaacctacggcaccagaggtaaaacctctgccgaatggggataccctaaactgcgtaaaaatgtggccctggaccgctgggagatcactgtaggtgaattcacctggcagtttcggacggataccggggcggtggccgccgtgctgaaaggtgacgcgtccatcggagtacaaacgctgcgcaggatcatcgcagtgactgacggtgttgaggtggaaaatgcaaacatcgccagcgcctcattacggctcattaactcggggccggtttttgctgaagtggagcagacggtttatcacgctgcgcaagggggcgtgcatgccggggatatcaggagcgtttcccgatatcgcctgtttaacacgggtgcgctgtatctctataacgtattccgggctgaaagggagatccccgcgaacaatctctttggggttcggctggacttccagctgagtgctggcgctgacgcaacatacaatctgcactctggggcatctatcctcaccaacgtaccgtttaccggccacaatacctggaatctggttaatgaatttgttatcgccgatacggtgcgcgacccaatatcaaatgagaataagtggggatgtgtgaggccctacacggctgaaatgctgcgccagggtaatgcgatcaggagccgcactggctggctatttactgcgttagacaaccgtaatctgctggaatatgttaccccggcaggctggacatggccggcaggacattggctgttcccgtatgccgtgggaacagcagagaacaatattagcaaccgcgtactaaatcgaccctgcggcgtgttttatcgcggtacgccgacccacgttttgcgccagcgcatttatcagcagatggaacgcctgatggatggggtatttgagctatatacagactctgaccgcgggcaggtttcagctacggactacagcgggtatcgttacccgcaggtttacggtctgtacgatgccctgcgcaatggagaggattttgatacccgctatgggtatttcaaaacgtttattactgacaaaatcggctcgtacagcaacgccggtaacgcgtatttaaccggggcgtggacgctgcaattttccgggcgcatgtgctttgccgcggtggaggtgtattaccgctacgcgcagaaaataaataacacaacggtgatggatgacctgaaaatatttattgcgagtgcgtgcgatggccttgcgcagaaaattgagacaagtggtgcggctccgctgggagggaacgagaataacaaaggcggtggcaactcaaacatggacgcataccgtatgctggcgatcgggatttatgccggggttgatacagccggtcgttatcaggctgcgataaacaccatcgtcaacatgatgaaaactaactcgtatgcgacccacgcatacccaacattaatggatacgttcgactcatacccgttcctcaaccgttggctgtcgtatgaggcccagggctattacacgtacctgagggcgtgccggctgctgaatactacccctgagttcgacaacagcaactacctgatgcggggtatgcaggggaacgggacagtcgattacctcagattcattcgcgcagaggaccggcgcgggttctgcgaaacacctggcgctgcggctatcggcctgctgatgcatggcggtgtgtctggcataaacgcagccgcactactgcttgataaattcgaacgggattggtctcttgatccgattgcacagccacatctgtgtgatttcaggcaactgacaacgccgcttacagtggcctacgaggggttcgagcacgtggtaaatcagtttgcattgatcctgctagacagaaaaatcggataa

SEQ ID NO: 265481 - DNA, 207 bp, Klebsiella pneumoniae
atggactccatttcccagaatccaaaagggtactcatgcctgcatacttgcgacttcatccgcgaactgcgaagccgcggtattcatttgtcaggagaagaggctaatcggtggatagagagaaatcagatctacttcgtggacaagtcaacgtctgagggggaaaaccgcctctggctgatgcgtaacatggggagggtaatctga

SEQ ID NO: 265482 - DNA, 468 bp, Klebsiella pneumoniae
atgctgaagataaacacactccgcgccgccatagagaaagcaaatacctggtgccgggcgaacccggaagcctggacggtgtttgttgaagagggtggcattgaaaccaccggtgaaacgccgtctttcatgtatcgatattctctggtgctgttcgtcatgaactacgccgggagcattgacgacttcacgctgccgctgatggcctggctctggtttaatcagcccgatctgctgctgaacccggataaaaaccagaagattaaattcaccacgctgattaacaacgatgacaccgccgatctgatgtttgagctgccggtgagtcagcgggttctggttcagttggatgaaaacggcgtgccgtatgccgagcatttgccggagccgcgcccgcgcgtgctggcaccccacgccgcaggctgggggctggtatttgaaggcatgcttcaggagggcggagcgtga

SEQ ID NO: 265483 - DNA, 1122 bp, Klebsiella pneumoniae
ttggtagggcgaaatggtagtgggaaaagtacattattgcatgaacttgcagagagtgttcatgatgatggatatagtactgttgcagtatccaacactttgtttgataaatttaaagttcatccgcaaagtttgaattacaactacttaggcagtaagctaggtaggaattttcctgctcaggcaataaaaaagactctatcaactaaaaatcaaaataaggtgagtaggatcttttcggttctaaatcacattggttatgagcaaaaaattggtgtgaaaataaaatttagaaggaaatttatagaggcgattagatattctactaattcattaggcaatgtttattcaatttattttgatgaaagcaagtataatatccccgaagaattgataatggcaattgataaagcggttcatgtaagaggccgaggttatagtagtcttgaatggttaacagataatgataacgtttttcaagaaggtagctttgactcttatttgcatctgttaaggcatgagcttcttttgaagaaagcaaaaataatctctggtattgaagtctttttaagcaaggatggggaatcattcccaatctcttttgcaagttctggcgagctttcttttatcgctttacttgttcatattgctttttgtgtaaatgatagttcctttatattcatcgatgagccagaaaatagtctgcaccccaaatggcaacgagagtatttcgaattattgagaggtgcgattggttataataaatgtactgttgttgtagctacacattcacctctcataatagcttcaatttcacaaagtgatatggctgttatctacaaacgtgatcataatgggttcaataaaataaaacattatgatgacagtgcagaagagttatatattgactactttgatacaataacaccaaaaaatagagctttatcaaataggtgtgttgaaattattgatgattttacggtgggcaatatatcatttaaaattgctaaggaacgcttgtcaaaatttaaattaatggctgctgatcctatacaggagaaatttctatctggagttggtttgttgcttgagaaaatttccgttcaaaagaggaatggttaa

SEQ ID NO: 265484 - DNA, 627 bp, Klebsiella pneumoniae
atgagtcataacctgtttagcttagaagaacggcgtttgatagctttggctattgagcaaggccatacattttggggcgatagctcacttgaagctcttaaaaggaaaattaagaatcatttacgtcaaaagcagcaggagtgttgttgctattgctcaagaaatatagatgatgagtttaacatggttctcgatattgaacatgttatcccgaagtcagaaattgtttctgaaatgtttgagctttctaatctcgcagtatcctgtaaaagatgtaacatgaggattaaaggcgatgatgtgtcattcattgaaggcagttttgaacaatttaaagctagcgggaatttttataattcggtttcttataagttcattcatccaaatcttgataggtgggatggaaatttgaattatattgttgcacaagtgaatagaagaaagattgtttattatcaagttgtaggtgatagttctaagggacagtttacaaaagattattttgaattggataaaattcaagttaatacatttgatgaggcgcaagaagcaacaggcaggaaggagcctatagatcctgctattgctgaggaatatctcaagttagcagcttcgatgttgggttaa

SEQ ID NO: 265485 - DNA, 336 bp, Klebsiella pneumoniae
atgacgtttaactccgcccccaatatgagcaataataatctcctccatttacatataaattgcgagacatcttccaaattcaccaactcaatattgtgcaactcccccatcgccttatttaatacccccccacaaacaaacacacctaaccaaaaaatgatcaaacaatcagacagcgaactggccgcctttattatcgatatcgcattaagcgacagctgcgtaaaagaaatactcttatcccgtctgcgctcgacgttattagtcgagacagccagtgatgaaaccagagaatacctcgagctgatgctacaaagagtgtcagtgtgccattaa

SEQ ID NO: 265486 - DNA, 258 bp, Klebsiella pneumoniae
atggttttgcatgcgttcctccgtcccgtcactcccttcgcaaccctgtcccggcgcggcctgagcctgcccatgcacctgcatgaaaaccgacccatgaagcgtgcaggcgaggcggggaaagcactgcgcgccagcggtaaagtatttattaaatcatatttaatttcgcagcctgagcgcgtcgctgcgctgcgcgggttcgcgggagtgtcagtgggtagcgcagtgctgttcgggagtatgacgagcctctga

SEQ ID NO: 265487 - DNA, 414 bp, Klebsiella pneumoniae
atgactgacgcagaattagcacatacaaaagagctggcattttggatgacagagcgcgtcttcatgaatcctattagcgccaagttgctcaatgaagactggcgaaaagcatttcctgatgaggtggctatagctgagcgtatgaaagcgctggtagaggcgctggagaaggcgcaggccaaagcagatgtatacgacatgcttagggatgactacggtttgcgcgaaaaaggtgttgggcttgcagacttcgttgactggcaagctaagcgcatcgccgagctggagtcccgcaccgtgaagctgccagagccattcaagttggctaaatcatcgagcggattaacgtactactacgccgacgaggtcgattctgcgatcaccgccgctggcatcaaggtggaggctgagtga

SEQ ID NO: 265488 - DNA, 792 bp, Klebsiella pneumoniae
ttgctcttgggaagaaggtgttcggataaaatgagaatatcagatttcgaagattttaaggtgctgttggaaaagacaaaaaatgaaagcctaggattccttgatagcataaaatctattaatgattttatggcgaggtcaggagatagagaaaaggaggatatgtttagaataatatcggttccaatgatttattcttcttgggagggtttttttacggaaacaatgtccgtttgcttaaatacattgaaactttcagacagagaggcatttagatactctgccgaaattcgggcactttggttgcaacgtgaaccattttatagcagatatgtagatatgataaaaaatatttatgatgctgactcacaccgtagcattgtccataatggtgctcaaataaaaaagaaagttacgaaaggtgcgtttaaactgactagcgatgtaattcaacacattgacacgtttaataaatcaacattatcagattgcgatgtttctgagttagttatgacattttctaatgtgaatgaaatagtcgttaagataaatttcgatgctatagggttggattattcatcacttgatttatcgcaactaggtgaggttgttggtcttagaaattctttggggcatggggagtttaaaagtagcgttaaccctagaaaattcaattcaataattgcgtatgttgaaagtttgattaacgatttgaatcagtgtgctatagagtggttggataaattagaggacgaaataacaaaacctgaagaaaacgaggctattcagtga

SEQ ID NO: 265489 - DNA, 1113 bp, Klebsiella pneumoniae
atgaatgatatgactaaattgctatctcagatagatgaaaaaagagatgaggtagtaactgattcttatactatctcatggcgtgaagtaattaatctatataaagaaaatgagattactatttctcctgactaccaaagactttatcgttgggataactcaagacaaagccagtttatcgagtcattattgttaaatattcctacgccaacactttttttctacatcgataataatggtaagcaggaggttatcgatggattacaacgtgtgagtactataattagatttttttcagaggatatttttagtaaggaagaaataggcaatgcaaagaaacaaaactctgtaaatgatgtccgaaatccaacggttcttgatgatgtacctatcattacagaattgaatggatggactgcaaaaggattaccggacaaagttagccgaactataaaaaatgcacgagtcaatgttgttattttggagcaagaaacaaaacctgaaactaaatataatgtttttaaacgattgaatagatctggggttcgtttgagtgaccaggaaatacgtaattgcatggccagattagctgggaatgaattcgcagatcgcttacgcaagatagctgaaattgatggtattgtgcaagcgcttggaataaatgaagaaggtcaaaaatcccaaggtgttgaagaggctttgctacgagttatggcatctttgacttatgcggataagtttagccatagtgtgactgactttttagatgaatttatgttctttgcagcagaaaataatgttattgacattagtttcgaattaaaaataaaaagaacatttgatttaataaatctttccggtttatcaggcaaagcatttaaatttagaaagaatggtgcctcaagtggtccatttagtactaatttattagatgttgttgctgttgggatttttagtaatgtagataatttaacaccaactgaggtgacaaaaagatttaactatttaatggatgagcaggtagatgaattaagggcttgcactggttctggttctaatactaaagccaagttagagaaaagaattgctcttgggaagaaggtgttcggataa

SEQ ID NO: 265490 - DNA, 1266 bp, Klebsiella pneumoniae
atgagtctcaattgtaaattttgggtaagtggtttaaagatgattgcaggcgcgaaaagagggagaaacgaacgcaaggggcttcactcttggcatccatactatgcgggctattcagaatcatttgtagcttctgttttgcaggctgaaggagttaagtcgtccgctattgttcttgatccctggatgggaagtggtaccacaggtatagtttgtcaaaagcagactataaagtgcattggagcagatattaatcctgtaatgagttatttcgctgctgcgaaaagcagggggaatatttcatcactggatgataccggagaacggatcctggaaaggatactactttgctttagaaaaaaaacaaaaaatatagctgaatcatcgaagggttacccccttgttgaacagttacagcagttttataaatgtatctgtgatcaatttattgacaatagacatattgacattgtaaaccctttaaaagcgttttattgcagtgttttattttatactgttcgcaatgtccttgatgttaaatcaacttcaaaccctacatggatttctaaaaaagtagattttaacaataactttgatatttgttttgagtacagtaaaaattttaaaattatgcgcgagcagttaagtgaatattatggtggcgctaagagtgaatcatattactctattttaaatgcagatagtaaaaaattaaatattaaaagcaatacagttgatcttgttattacatcgccgccgtatttaactcgaatagactatgccgtttcaacgcgccttgaattggaaataattttagggagtgagggttataagtctttgagaaaagaaataatgggcacgacgacagtgcctaaagttgcggataatattaatgaaaaatggggttccttgtgtatggatgttttgtcggcggtgacattgcatacttcaagagcatcaggcagttattatcttaaaaataaaattagatatttttctgatgcttatgattcattaaaggaaatatttagggttttaaagagtggttgctcaggttattttgtgatacaaaactcatattataaagagatagaaattccgctctatgatatttattgtgaaatggcactctctattggatttacagaagcaaaatgcgtgagggaagatcaggttaaagcaatatttgggcagataaataccaagtcgaaaaattacattaaagataagttttactttgaaaaaatcataaggataacaaaatga

SEQ ID NO: 265491 - DNA, 861 bp, Klebsiella pneumoniae; identical to SEQ ID NO: 260025

SEQ ID NO: 265492 - DNA, 249 bp, Klebsiella pneumoniae; identical to SEQ ID NO: 161833

SEQ ID NO: 265493 - DNA, 267 bp, Klebsiella pneumoniae
atgcacaccgctttttcttccccgtcttctgcccctgctgcgccgctgatgccggtctctgatgctgttcacgagcgctttatccgcctgcccgaagtgatgcgcctgtgcggcctgtcccgctccacgatttacgacctcatcagccgggaggctttcccgaaacaaatctcgcttggcggaaaaaacgtggcgtgggcgcagtcggaaatcaccgggtggatggctgaccgtatcgccgaacgcaaccggggctatgacgcatga

SEQ ID NO: 265494 - DNA, 738 bp, Klebsiella pneumoniae
atgaccgacaccacctttatccctgattacctgaaaccggcgctggagcgactggccgcagcccgagaagcccatcttgaacaggcccgccggatggaggacaccctgacggccattacccgcgcggaggagcagaaagcagagctggagcaggacaacggcagcgatacccgcacctggcgcgccgctttccgtgccgggggcgccatgctgacggatgagctgaaaagcggccatatcgaacgcgtggcccgccgggaactggcgcaggaatgtgacaatctgaccgaagtactggcctttgaacgtgacctgctgaaagccacctgcaacagcaccgcacgggcattccgccaggcgcatcatgctgtgctgagtaaatacgctgaggaagagcttaaccgcgcgctgaatgacaccctcgggccactggtccgggcgatggtgctgaaagcggatgtgatggcaaaccctctggccaacaccaccggccatcaggggtatatcgagccggagaaagaggtcatgcatcaggtggtgaccttcctgaccaggaaagtgagcgacttctccgtcacgccagccgatgagccggtgctctccctgaccggcttcccggtcgtcacgcttccgcatatggaccacgatgccgccagcacgcccggcgagcgtaaggtctggcaggagaaaatgcgtcagagagaggctgacctgaaagcgcgggggcttctgccatga

SEQ ID NO: 265495 - DNA, 849 bp, Klebsiella pneumoniae
atgcacgctaagggccgttgcataaccctccgctatccacaggcgttttcccgcctgtttctgcccgtcgataagatgacatgcccctttgacctgcccgcctttcagggtgcgtttaagaccgtcagcattaataagctggaggttaaccagcgcgccggtcccgtcatacagcggcaccaccacatcaccggcgcggtaggccacgccgccggttttgtgcgatgtggacagcgtcagacactcgagagcgggaaaacccttgcgggtcaggtaggcgttgccggtagccgggtgtgttttctccagcagtctgacggccagcgcggccgctgctttgcggtcggcttcagtctcagcctctgcggccgccatcacctccggggacaccgggggcagattcccggtgacggcgttcaccttcccggcggcctcggaggccgacacgccgaacaccttctcaaccagtttcaggccgtcaccggcgccgcactggttacagaaccatgtgccgcgcccctctttatcgtcaaagcggaaccggtcagcgccgccgcacatcgggcaggcctgatggcggttttttatcaccttcattcccagcgccgggagaatgcgcggccagtggccgcacgcctgttttacggtgtccgttacgttcattttcatggttttctccctcagtgcagtacaggcgatgtcagatggcgggcgcagagttcatccatcacggcgagcccgaggaaggacagcgacggggcggctttcagtggcccggcctccatcaaatcttccagcagcgcacaggcaatcagacggcctttttcctcgccatgctggcgcaggtag

SEQ ID NO: 265496 - DNA, 228 bp, Klebsiella pneumoniae
atgaaacataccaccctcagcattaaagaactcgaatgccttgagcacctgcgcaacgtcggccactttgtcagcgcgatgatgcaggagcaggactgtacttccctgcgtcgtgacccgacccagcagttacagctcacttccgtgatttacctcatgaccgcccagctcgacggcgtggtcgaacgctgcaaccagcgctggctgaccggggagggcaacgtatga

SEQ ID NO: 265497 - DNA, 240 bp, Klebsiella pneumoniae
atgaaattatgggagtatatttcctgtggattaagtgttctgtatggggtcgttgaggtagaagataagtataaaaaaatcaatgccctcgtcaagtataaatgcatagatgacctgccgcaaaagtatcttattgccaaagaaagttaccacgtaaaagaaaatataaatttaaaagagcatagttggacttttaaagtaaatcaaataaaagagttattaattacgaaacaatgctaa

SEQ ID NO: 265498 - DNA, 543 bp, Klebsiella pneumoniae
atgaaaactgagtataaagcaaaaataaacgcattacttgaagcttataacttctacaaagaaatgatgtgcagccataagtttcacacggacaagatgattatttgtggcctgtcatatatctattttcaggcagtgtgcgaaaagcaccagcgcgatgctttcgaaatcggtgcattattgtctcaggctattgaaggcaaaatgccaacaccgtttgatctgtcggacacccataaccaagacgctagtcatgaagtggttttcaagaaggccgaaggagatttggtaccggactcgttaaatccaacatcaatacataaccacgccccaacggatgagcagatacccgcaggaattttgtcatcaagcgagaggcttattttggcgaatgcgatatttgatacgatgcgaacagtagccaagcagatgggaagacgggggttttatcaagaggacctccaccaggtagtgaaggcccttgacgctctagatctcacttgggagcagttcaagctgaaacagcatgctaaaactctctag

SEQ ID NO: 265499 - DNA, 336 bp, Klebsiella pneumoniae
atgttcgaagatgagaaagcatttactgagcgggaacggattattcattcagaagtgagctacctgctcaccgagcaacacttctcttttgagcgagaaatgttgattcgcgatgcattggcaagcgcaaatgaaggtttcacggttcatttaaaaaatggcgctcgcgtagttgttaatgcggacagcccctcaatagatttaattatctttggccttgaaaagataattcgcggtaatcatgagcgtgcgagaatgacctttattgattttatgtattactggcacgaaaggttattcaagcaggttaaaagaaagccgcgacctaaccactaa

SEQ ID NO: 265500 - DNA, 597 bp, Klebsiella pneumoniae
atgagtaactctcttctgccgccgtcctccggaaactggctccggcataccgaggcgggcacagccaggctttcagccatcaccgtcgcgctgcgtacgctgtggacgccaacggattgcccggtagatttactgccctatctggcctgggcgctgtcagttgaccgctgggacaagaattggccggcagagcgaaaaattgccgccatccagaaatcgtactggctgcaccggcgtaagggcacgcgagcggcggtacggcgggtcgttgaggatatgggtttttcagcgacatttgccgagtggtttgaggctggagacgcgccgggaacctttcggcttgaagtggacatcaacgaggtcgggctgacgccaaaaacactgagcgaactgaaccgcctgatcgacgatgcaaaacccgtcagtcgccatatttcccagatgaatattacctccgtaacgctggggcccgtttatgtcggaacatctttgggatgtggggaaataatcagtgtttatccagaggaatatcagccggaggataacctcctctataacggtgtgatttttcacgatggaaattttaattacaggtaa

SEQ ID NO: 265501 - DNA, 2619 bp, Klebsiella pneumoniae
atgactaatatttttgaatcaccatcgtgggaagatgatattcagctgattgggcgaactgagcgcgtgtccggcggtcaggatggcgtcgctaaccgtccacttaaacaactggcaaaccgcaccctttacctgaaagaaaaatatgacgacattgacctgtcgggaaaaatcgaggcggttaaaaccttcctggaaggggggacactcacatccccgagagaagagatcctctacggaaactaccggatggtctggacgggcgattttccgaaaaccgtgccgcccggctccagtccggcgacgaccggcggcacgggggcggggggatgggcttacacatcagatgcagctctgcgccaggggatggcctcatccgacggcacccgattgatgcatatgcccgttgccggtaatgtgggcgacgttcttgactggtattcccttgactctttcgggctggaggatggtaccgatgtcactgccgcgttactggaaattgttgcgcttcagaaaaaatatggtttcactctgaaacagcgccagaaaagaacattcatactgagcggtgatcaggatattgttttttacgggacctgcaatttttcaggcgtgaagtgggtgcctgagaatttccggggaagtctgtcgttcacccagacaaaatctgctgtcgtatatgatgcctcgactcagggtggtgcactgttattgtcaaaaattaacggcactgactggcgaagccgcgatgcgcaaagttctaaactgagcgggctggtcagtgataccacgctggataatcactttgttatttttaaatcatcctccgtagtcctgtattcaggaagggggaaaaataaaacatggattgccatgagccgggtttccaaaaaaggaaaactagaccgggcgcttaagtatcccatgcccgcatcggtggattcggtttatgctttgccggtcagtgatggtgagttgtttatttcgccgggctgttttgatatgaagaatcagccgcacacaattaatatatttttttatgatatcagccgggcgacgattgaaaatccgactgttatcaatcgcccactgaccgataatggtagtgcagtcgatttgtctattgatggtggatataaaattaagttccggaatgtctattccccctggcctaatgactcttataattcgtccggctccagtatttacagttataccctgaattataataacgtttccgggctgcatatcagtgactcggtttcgcagggagagggatggggggcgactgccggggaaaactgccaggacgtgacatttgataatgtggattttaaccgcatcgattttcataacccattctggggctcctgtcatattttccgcagtcatctcggtaattttgccctgagtatttgcggtgtgggtgatgtgctttctatcagggactctacgattactcttgaatcaggtcaggaggatgctggcgttattaaaggacgtgacgatcaggggggctttaatgactgtcatcttgaaattgacgggctggtcatcaatggcgacccgggcaatcgctccgctcttatccgtgcaaactctgacggtaccggtggcgtccctgatggttcgccggtcacgccgtggatgttcaaaacggttaccctccggaatattcgctggggtaaacgcctggaagggtcacgatttgacagtatcttttccagcaatacagatggtctggtttatttcccgcgtaaggttcttattgagaactgtgattatctgtgcggtgataccagcgacaacatcggcttcgccatcgattttaaaaattttcgtcaggattatgaccgcatcagcagcgatgccgcaccgacgctgtcggcagggtacacctcgcaaattgagtttcacaatatcgatgtagccaggatggcgtttaaaggcgcgggggtggcacataacccacgcgtggtcgtgttcaatgccatgaactcccgaaagggtgagaatgcccccccgctgaatctcacccagcggggtacctatgaattttatggctgcgattttcagtacattgactacagctaccagggccaggcggcgaacggaaccatacagatgaagatgcacggcggcacggtccggtgtccgtctggtctgccggttcgtaacagcgatgacaaccacacgacggatttacatggcgtcagcatcatggcggatttcgatggtgccgctaatgccggatatgacatagcaaaaaatctggcgcgttatgccctcatgaccggttgccagttttatcgcgcatcgggagagcgtatcaactatctgacgctctggacgggggccattaataccaccgaaacgagctttgataacttttacgtcagggccggtaattgtctggaggtgcagtgtcttttcgacagtcgcaccatgactgacacattaaaaatcagtaacaccgccggttacaccggacgaatgatgtattccggttcggttactgccgggtatcgtttatccgtgagtgcggcaggcaacaaggcaaaaataaacagtggctatgcgtcagcctcggtacggcaaatctcactcagggcggaataa

SEQ ID NO: 265502 - DNA, 294 bp, Klebsiella pneumoniae
atgacattcagaatgaaaaaaacaatcacggtcagccaggtaaccgaatcaggctgtagccttggcgtggaaacccgcgaaatggatttatttttccgggtcgagggcgtcagcgttatggattcggggtgctgggcgcgcctccatgccggaattagcgattctgccatgcagttttatggggaatacccggtgacaattaatacgagcactgatgaggaggtattaagtcaggcgcgttcgcaaatcatggctctgcctgattttaccggtgcaggagatgttgatggctaa

SEQ ID NO: 265503 - DNA, 1173 bp, Klebsiella pneumoniae
atggctaaaaaatacactgcatattttacagaggcagggctggagaagctggcggccgccgcaatcagtggcgaaaaagtcggcttttccgagatggctgtaggggatggcaacggcatattgcccatggcagacaagacccggagcacgctgataaatgagttatttcggtctcagctaaacagcctgaaagtgcaggatgcagaaaaaaatgttatctccgccgagatgattattcccccggaggcgggagggtttaccatccgtgaagccgctctttttgatgatgagggggaatgcctggcaatggccagcgtcccggaaacgtacaagccgctactggctgaaggctcagggcgattcaccgtggtgcgtatctggctggccgtaagcagcaccgaagatattgagctggttgttgattcaggcattgtacttgccacaactgaggacattattaccgtcagtaatgaagtcaaagattacaccgatagtcagttaagcgggcatgctaaatccagggatcacccggacgcaacgctggaggaaaagggatttgtgaggctgagtagcgccacagatagcgacagtgacagtatggcagcaaccccggcggcgataaaagctgcgatcacaattgctgtggatgcagcggtaagaaacgcgtgggaagaagataatcccgtcgggaccacgcgattatttaactcgaacctgaaccctaacgagcgttggccctggtcgcaatgggtctacaccggagaaaacaaaacgatccgcattggtaaggctgacggttcaaacgtcgggcagaccggcggcagtgataccgtcacgctccagcagaataacctgcctgccgtgcagatcagcatcactggcgagaccagcgaacagcccgagcaaacgttgaccacaaaacccggcggcagacacaaacacggcggcgtacccagccgggataatccgtgggaaattggcggcgatatcagccagcgctttaacccggcaaatctgggcgatactgacgaggcctcggaccatgagcatgatattgatattcctccgcatcaccatgacgtcacaggcaaaaccgacaacctcggcgaaggtcaatcgttcagcgtggttgaggcccacaccctgctgatgtgctgggcgagggtcgcgtga

SEQ ID NO: 265504 - DNA, 1596 bp, Klebsiella pneumoniae
atggcagaagcagcgaaaaaaacaccgcaaaaccgggatgaaaaaaaagactccacgtcagcatcatcaatggaatttctgagttcacgacaatcaaaagatatatatcttggattgtgtggatatgttggatgcggcatgagaacgataaacgaaatagccgaagaaatatccaaagagtggggttacaacgttgcacatattcgaataagtgcacttatggaagatccactttattttgagccagcagcactaacggcatccaaaagcactcaagttaatagacatctaaaacttcaagatactgccaataaacttcggaaacattacaacagaaatgaattactggcagaagcggcgattgctgcaatcgccctagagaagaaaaatattgattatactaatgatgactataaaggcacagtcttcatcatcgatcaattcaaaagaccagaagaagttgagttgttcagggtcatataccagcacaacttctacttattaggaattttgcgcgatttagattaccgaataacgaatctcattgctgacgaatcgacaaaggacgatctccatttaattatcaatattgataataaatcttctgatccacatggacaaaaaaccggagaaactattcttgattcagattttttcattaaaaataacttcagtcaaaaaagtgaactaaagaaaaaggttgaccgtttttttggccttattcacggtaaaaacggtttgacaccaacatttaacgaaaaaggcatgtatgctgctttttcaacatcattacaatcagcttgcctgtcgcgtcaggtaggggctgcgctgtttgacgatgaaggtaatctgctcgcagtaggcaagaacgacgtacctaaagctggtggcggattgtatagcagcgatgactttgataacgatcatcggtgcgttcacaaaagtggtaaatgttataatgatacgaacaagcttaaaattaaagaacgcataaaaaacatactatccaatgaagtaagtgctgtgttaggtatttccgctggacaagctgttgcagatattaatctgacccgacttttaaacagcttagataaaattgcgcaaagtatttacaaagatagtaaaatttcaagcgtgatggagtactccagatcaattcatgctgaaatggacgtaattacttcaatggccagaaaacagaatggcgatactaaagataaaattctttatacaactacctatccctgccataactgtgcaagacatattgtcgctgcaggaataaaaaaagtagtatatatagagccatttgataaaagtcttgcccttgacctgcataatgatgcaataacaaagaatgaagaatcatctaaagtgatattttgtgactttgaaggtgtatcaccacgtcgctacaataaatttttcagaccaacagatgaacgcaaagatgataaaacagggactgcgaataaatttaatgtccgctacaaaaatcatatagatgttcaatatcttgatgattacagaaaatatgagtcagcggttgctaagaaatttataaaggaagttgccaaaccggaaccacaacaataa

SEQ ID NO: 265505 - DNA, 186 bp, Klebsiella pneumoniae
atgaatgtaataacatttaatgaaatagaatctaccgtggttgccaatgatcaggttgactctgtttgcattgaattcacaacatttaattatgataatgtcatttcttttgaagacaaaaagaaaaacaaagaagttctggatgcatttattgaaatcatgaatactgatataaattttgattag

SEQ ID NO: 265506 - DNA, 183 bp, Klebsiella pneumoniae
atgcagaaagtcaaaaagcacttggttcatttcactgtaatcgtgcgcccggagcgcttcaggcgtgtcaacgaaacgatattctgctgcacggctcaggtctttctcagaatgagcgatcagccgttctacaacgtccaatgtgagctccatgtggcactggaaaccaaagactcggtctga

SEQ ID NO: 265507 - DNA, 4473 bp, Klebsiella pneumoniae
atggatccaatatcagttacaacagtatcaatttatgtcgcaacaaaatttattgatcagttcattgcagaagaaggttacggatggttaaaaaagaaattattccccaaaaacaactatgttaaccagctctatagaataattgaagaaacggctattgaattcgaaaaaaaattccccatcgatagtataaaaattccattttaccaatctcaactattgtttgaaacattgaatgagcatattttattcaaagaattaccagataaagattatttgttgcaaaaattcagtgaatatccaaatgtcatcccaccaactcaagaacaacttgaaactttctataaaatttttttactaaaaataaacaactgtaaagaattaaaaaaactccacattgaggagacttataaagataagatattcgatgtaagcaatgagatcattcagataaaacttttgctgcaatcatttgatgaaaaatttacttttcacttaaacgataattggttaaataataaaaatagagaagctatagctgatttaggaggacgttacacacccgaactaaatttaaaattagagatcgcagatatcttcgaagggcttgggaaaactaacaaattttccaaaatattttacgaacatatcgataatttcttgatcaaaggaaacaatcttcgaaactgcgatgaaatacgtgagcagttagctttgatttctaaagccttaacagacacctcaattctgtttctaaaaattgattttcacgaatccaaaagcattccaatcaataaatttaatgaatatatctcaaattgtcaaaaatacatttctgaggcggagtcgacactatggaaaatcgaggaaaaggaaaatccggataagacaacaagttttagcgataagtattcatcaattttgagagacttaagagaattttattatgagtgtgacactttatatatatttctcaattctataacggtaaaattatcgaataacccatttctgctccttgaaggagaagctgggattggtaagtctcatttgcttgctgatatcatcgaatcaagaattcaaacaggatatccatctctatttttattagggcagcaacttacaactgatgaatccccttgggtgcaaattttaaaaaggctacagctaaacactgtatcctcagaatttcttgaaaagctaaatctctatggtgaaaaacaagggaaaagattcctgatatttattgatgcaataaacgaagggaatggtaacattttttgggaagataacatcaatagcttcgttgatgaaataagaagttttaaatggcttggccttataatatcagtcagatcaacatataaagatattactatctcaaacgaacggatctctcgtaataattttgaaatttatgaacacttgggttttaagaataaagagatggaagctgttaacttattttatgataattataatatagaaagaccatcatcacctaatttaaatccagagtttaaaaaccctttatttcttaagttactatgcgaggggataaagaaaagtggtctgacaaaagtccctgtaggatttcatgggatttctaagatcttaagtttttttgttgaaggcgcaaataagtcactatcctctcacaaaagatataatttcgatcctagtttcccattagttagtgatgctctcaataaattaattaaagttaaactagctaatggcagaaatagtattgctcttaaggatgctcatacagctgtccagtctgttgttaaagactatgtgaacgataaaacatttctcagctctatgatagatgaaggaatactgaccaaaggtatcgttcgcaatgaagacaactctgttgaagaggtcgtttatatatcctttgaaagatttgatgatcatttaacagttaactatttattaaatggtgttgataacattgaagatgaatttaaaacaggaggttctcttcaaaaatacttcaatgatgaatacagtttttatcgcaatcaaggaatcattgaggctttatctattcaatcaccagaaaaatatggaaaagaaatttatgaattactgcctaattacagtgacaattataatttagtgactgcttttatcgatagcttagtttggagggattccgcagcaattgattttgaaaaaattaagccttttgtaaacaagcaagtactcggtttcgataatagttttagtcattttcttgagacgctaatatctatttctggattagaagaacatcctttcaatgctaatttcttacataactggctattacagcattctttaccaaatcgagatgccttttggactactgcgttaaaatatagatatagtgaagactcagcatttaaaaatttgattgactgggcatggagtgggactgataaaagctatatatcagatgattcgatagagttagttgcaaccactctatgctggtttttaacttcaactaatagagagctaagggattgtacaactaaagcattggttaatttgttagaggaacgtatctccgttttaattaggataatcaataaattcgatgggataaatgatccatatgtttgggagagagtgtttgctgtagccctaggttgcacattgcgaacaaagaatcataataagctaagtcaattggcagagacagtttttgccaaagtgtttcaacctaaatatgtgtatccacatattctattacgagactatgcgagagagattatagagtatgtttcacatcttcaattgataccggaaggactcgacctatccaaaactaagccgccatacaaaagtaaatggcctgaaaatataccaaccaaagaagaacttcaatcactttataaaaaggatgggtattggtcactttggggatccataatgggtggaggagatttttctagatatactattggaacaaatcataatcactcaaattggtctggttgtaaatttggtgaaactcctattaatcgcaaaaaaatttttaacgattttctaggtcaattgtcagacgaacaaaaagcgctctacgactctacagaccctattatttacgataaaaattataaaagcatttcattcggtaatacacttattaaatatggtgtagcaataggtagaaagagtgaggaggaagttctttcccataaatccgcgttcaagaaatcattgccagaggacttattagctacatttgaaagagacatagaaaaatatttagatcacaataataatctgctcgaaaccgataaatattttgatctaagaattgctgaacgcatgatttttaatcgtgttattaaccttggttgggatccaaaacttcatggtgattttgataagcaggtaggctctgggcgcggacgaagagaatcgttacaagagcgaattgggaaaaaatatcaatggatttcttactatgaatatatggcaatgctttctgataattttattcgttttgatgggtatggagatgaacgcaaagaaaatccttatcaaggaccttgggatccatatgtaagagatatagatccaaccattttaatcaaaaatacaggaacaaaagagttaacccaacaagaaatgtggtgggatactaaagaagtatttgattgggattgtacttttcaagaatgggttagcaatccttccacgataagtaatccatatggactgattgaagtcaatgacaacaatggtactgaatggttgatattagaaagctatccctcatggaaagaacctaaaactatcggtaatgaagagtgggggcatcctcgaaaggaagtttggtgtcaaatcagaggatatttagttagaacaacagaattaaatgcttttaaaaattgggcagaaaaccaacactacatgggcaggtggatgccagaaggaagcaataggtatcaattatttaatagagagtattattggtctgaagcattccattattttaaatcagattattatggcagtttagattggagttctgtaacagatcaagattctggagctaaaattgctgatgtaagcgtcacatcgatcaattatttatgggaagaagagttcgataaatcaaaaacagatactttaagtttcctcaaaccaaccagcttaattttcgacaagatgggcctcaaagatggtaaatatgaaggtagttatgaggataaatatggaagtatagtttgtttcgccactgaagctttaaataactcaaaagcacatttgttaattaagaaagagccgttcttaaaaatgttgaatgaaaataatctagaaatagtgtggacgcttcttggtgaaaaaggtgttatcggtgggtccttaagttcaactcaccagtatggtcgtatagaattcagtggttttttttcttacgacgatggaaaactgactggagcaaacaaaatatattcatcttga

SEQ ID NO: 265508 - DNA, 177 bp, Klebsiella pneumoniae
gtgcatctccagcgagcgccagacatctttggcgtgatcttcgctaagatcgctagtccgttttttctctttgagccactgttccgcaactttttccagcgtgcattcattctggagtcgttgctcctctgcaacctgctccagatgggcctgcgggtcgatgccctgcacaagtaa

SEQ ID NO: 265509 - DNA, 402 bp, Klebsiella pneumoniae
atgactgatatcaccgaactggcgcagaggttaaaacttgaagtacatctcgcggaaagcaatttcaaccctcagatgaatattaaaaccagagaactaaaggagctggtagaggcgctggcatcagagaaaaggatttgcgcaacgtggagaaaaacagctgagtcgaccggtgaaaagctggagaaggcgcaggagactattgcatttcagcaaggagaaattaaagcgcttttgtcgtcattggagtcccgcaccgtgaagctgccagatgaagtcgacgtgctgcttaatcatcttgaggatgtgttgccgtttgaagtatttcagctcatcgatgctcacaagtggaatgcggtttctcgtttgtctgccgctggcatcaaggtggaggctgagtga

SEQ ID NO: 265510 - DNA, 624 bp, Klebsiella pneumoniae
atgtctggcgatattagcgcagtatttgatagcaatttaattgcaactcaggcaggtaccgttcaggtatttcattttgatatgacaacccgggagtttatcggtaccgagagagtttatattcatgtcggtgttggtcttccggcgttttcctgtcttgaagaaccgccagtacaaactgaatgtcaggttgctgttcgttctaacgataatttattctggtccgttactgaggattatcgcggtatcactgtttatgacattcagacgctggccagccacattattaccgagcctggacctattcccgacgctgtaacgacctctgtgccatctactccatacgataaatgggacggttctgcatgggtaacggatgctgatgcacagcatgtggctgatgtttccattgctgatgtgcagaaaaaagagctgatcactcaggcatcggcggctatttacattcttcaggatgctgtggctcttaatatggccaccgatgaagaaaaagcccaacttacttctatgcaagcatatcgtgtgctacttaaccggatagatacgtcgcttgcacctgatattagctggccggttcttacaaacctggaggctgagcatgtctaa

SEQ ID NO: 265511 - DNA, 504 bp, Klebsiella pneumoniae
atgccgggcaaccgcccgcattatgggcgttggcctcaacacgattttacgtcacttaaaaaactcaggccgcagtcggtaacctcgcgcataccgccgggcagtgacatcatcgtctgcgcggaaatggacgaacagtggggctatgtcggggctaaatcgcgccagcgctggctgttttacgcgtatgacaggctccggaagacggttgttgcgcacgtattcggtgaacgcactatagcgacgctggggcgtcttatgagcctgctgtcaccctttgacgtggtgatatggatgacggatggctggccgctgtatgaatcccgcctgaagggaaagctgcacgtaatcagcaagcgatatacacagcgaattgagcggcataacctgaatctgaggcagcatctggcaaggctgggacggaagtcgctgtcgttctcaaaatcggtggagctgcatgataaagtcatcgggcattatctgaacataaaacactatcaataa

SEQ ID NO: 265512 - DNA, 924 bp, Klebsiella pneumoniae
gtggcaaagcaaaagttcaaaatcaccaactggcccacctacaataaagccctcatcaaccgtggctccataactttctggctggatgatgaagctattcaggcctggtatgagtcagcaacaccttcttcacgaggcagacctcagcgctattctgaccttgccatcacgactgtgctggtcattaaacgcgtattcaggctgaccctgcgcgctgcgcagggttttattgattccattttttctctgatgaacgttccgctacgctgcccggattacagctttgtcagcaggcgggcaaagtcggttaatgtcagtttcaaaacgcccacccggggtgaaatcgcacacctggtaattgattccaccgggctgaaggtcttcggtgaaggcgagtggaaagtcaaaaagcatggccaggaacgccgccgtatctggcgtaagctgcatctcgccgttgacagtaaaacacatgaaatcatctgtgcagacctgtcgctgaacaatgtgacggactcagaagccttcccgggtcttatccggcagactcacagaaaaatcagggcagcatcggcagacggcgcttacgacacccggttctgtcacgatgaactgcggcgtaagaaaatcagcgcgcttatcccaccccgaaaaggtgcgggttactggcccggtgaatatgcagaccgtaaccgtgcagtggctaatcagcgaatgaccgggagtaatgcgcggtggaaatggacaacagattacaaccgtcgctcgatagcggaaacggcgatgtaccgggtaaaacagctgttcgggggttcactgacgctgcgtgactacgatggtcaggttgcggaggctatggccctggtacgagcgctgaacaaaatgacgaaagcaggtatgcctgaaagcgtgcgtattgcctga

SEQ ID NO: 265513 - DNA, 1527 bp, Klebsiella pneumoniae
ttgcttgaggttcgcgaaggagaaggtgcgccgacgacagacctctccgtatttgaagtcgtcaatggacagccagcaggaaactaccgggtagatatctacgtcaataacgaaatggtgaccgcagatgcccgcgatgtgatgttttcaaagaaccaggatgggaagctggagccctgcgtcacgttggcagaactcagccaatggggagttgatacggcctcatttccagaactcgccgtcagtgatagcgaatgcgccaatcttgcgggcatccctgatgcatttgccgacttccagtttaaccgccaaaagctgaatctgagtatccctcatgcggcaatgaatacgcgcagcctggatgaagtgcctattgaacgttgggatgaaggtattccagcccttctcctcaattacaacatgaatagctatcagagccgatataagggtgcagaaacttacgaaagcacgtatttgaacctgcgtcccggtctcaatatcggtccctggcgtctgcgcaactacaccacctttgagcatagtaatcagagtggaagtaaatgggacaacgtctatagctatcttcagcggaatattgtctctttgcgaagccaactgacgttaggcgacagttcagcaccagctgatgtcttcgatagcgtgccgtttcgtggttttcagatggcctcggatgatgacatgctgccttccagcgtacgtaactatgcgcctgtgattcgaggggttgcccgcagcaatgctctggtcaccatccgtcagaatggttacgttgtctatgagaccaaagtggcgccgggggcgttcgagatctccgatttggcctccaccggaggagcaggcgatcttgacgtgaccatcaaagaagccgacggcagcgagcagcacttgcgcatcccctacgcatctttgcctgttctacagcgtgaaggtaagtttcgctatagcgttacgggcggtcaattccgcgcctacgattctcacacggaaaaaaacctgtttgttcagggcaccggaatttatggccttccgtggggctttacgctctacggcggcgtgcaaaacgcaggcaataaatatcagtcatatgcgttgggggtgggtaagaatatcggtagctggggcgccttttccgccgacgccatccattcccgatccatgtcgaccgatgccggcaggcaacagggccagtcgctccgggtacgctatagcaaaaatttcctgcagacgggaacaaattttaccatcgccggctatcgctattccacctccggatttcgctcgctggaagaaacgctgggtacctaccgtagcgataataacattccttcttatatcaccgatcgccggcgtaaccgggctgagctgtcgctgaatcaggatcttggcgataactttggggcgttgaatgcatccttgatcagcgaggattactggcagaacgaacgtaacagcctgtcggcaaatctgggctattgtggggaggtaattaattctgcacaacaatga

SEQ ID NO: 265514 - DNA, 297 bp, Klebsiella pneumoniae
atgattaattcctcaatacagagtcttctccagcaggctatcagttccggcgatgaggcgcatgatttgcgcctggttaaatctgatgctgaccttatcaagggtgcgttgctggggggaatctcctttctcgggcgggaactggacgaaggcgccgctcaatcaaaaatgggcagaggttatggcccggcagaccttgccgatctcggcagattcctgaacagttctgttgagctaataaaaatgatggatgccgtgattgatgggtgtaacgatacgaaagaaggcgctaactga

SEQ ID NO: 265515 - DNA, 906 bp, Klebsiella pneumoniae
atgattgtcaacaaacaaaatctccatactatttatgtaggctgtaagactacgtttaatcaacgcttaagtgaaagcaaaccactttacccgcaaatttccactaagattccatcctcaacgaaatctaatgtttatccgtttcttggagcgttcccaagtttaaaagaatgggtaggcgagcgagttgttaaaagtatttccgcttatagtttttcaattgataaccggaaatttgaatcaactatcagtatttcgcgtgaagatgttgaagatgataatcttggtatgatggcaaccatggtttctgatatggctgacgcggcagctaatcatcctgatgaattagtctttgaactaatcaaaaagggattctatgataaatgttatgatggaaaacccttcttttctcctgatcatgtggttaccgtaggtacagaggagactactgtttctaatgtgcaacttcctgttgaggaagaagatgaaaaaccattatggattttactggacacgacacgtccaattaatccattcatctggcaggagcgcgtcccgtatgaatttcagcaactgactgatgaagataaagcactttcgttcatgacggatgagtttttttacggcattcgtggtcgcggaaatatggggtatggtttctggcaaatggcttttgccagcaagcaggacttaaccacggaaaattttaacgatctgtatgaccgcatgtgttctcaaaaaaatgattcaggtcgaccgttacgtattaagccttcaattctgctggtcggtatgaaaaatcgtgagcaggcctttaatatagctaaggcacagactctcgataacatgaaaccaaacccgaactatggccttgttgaggtgattgtaacgccgttccttgactga

SEQ ID NO: 265516 - DNA, 342 bp, Klebsiella pneumoniae
atggaaaagcactcactgttatacggcgttaaagttggtgataaggtacatttcgactttcaggtgcgtatgcctgtagtcagggatactatcgaggctctgagcctcacgtatgaaaagtttggcactacagagggggcggcggcggctacctattaccgggtggcggtaattgctcaggccattacttcactcggcgatttaaccgaagatgagatcaccgttgatctgctgctaaacgaactcaatgatgatgattttgatttcattgatgcacagattgaatccattaaaaaaaagcggttgctctcgaacgacagctctcaggctacagaagcctag

SEQ ID NO: 265517 - DNA, 2163 bp, Klebsiella pneumoniae
atgtctaaaaatttagcgctcacattaagcctggtagccaaagatagcggctcgaaagttattcgtgaagcgatgcagcagaccagtaaacaggctaaacagcttgaaaaagaacagcaaaggtccagtgaaacaggagtaagggcatcaaaagcgctggctgatgaatacaggcgcacttcggaagctcgatcagtccttggtattcgctcagaacgccagatccagagggaaatccagcagaccacggcagcatataaccggctgacccgtacagggcttctgtcagcgaatgaacaagcaagagctttcgatgctatgaggcagaaagtaacaggtttgagaggggaattaaccagaacctcagacacgatgtcgcgcatgagtaaagccagggcgcttggtggtaatctcgcctcgattgccggtggggttactgctgccggagctgtaatcgctcaacctgttcgtgagcaaatgaattacagccaacgtctggcgaatattacgaatacagcctacaaccagttacccgcagaagagcgaatagcggcaaagggacaattaagtaacgcaataaaggaagccgtcaggaaaggtggtggaacggcagacacggctgcaaatgcgctcggtgtattaatgtccaaaggtggagttgatgataaaacagcaatgtctgttttaggggatattatgtatacctccacagctaccagttctaacccggaagaaattgcacaacttgccgttactgcactgaataactttaaaataaaaaaagaagagcttcctttattcttcgacaaacttacccgttcaggtgaactcggcggatttgaactgtcaaatatggcaaaagaactccctaccataatgacaaactattctaaattaggtatgggaggcatcaaggaccttgatttacttcttggtaatttacaggccaactctgaaaccgctggtaataatgacactgccgccaataactataataatctgctattaaaaatcaccagtgccgatactattaataatcttaaaaacagaaagtttagagtatccggtggtaccccaatgtcatactctgagtatcttgtttctcagagggctaaaggttacaacacctttgattcattcaataatgcggttggctctataatatccggcgataaagattataaaaaaatcactgcagatattgaacgaaacaagggaacaaacaaagaacaagaccttatcaacgcaagagacgtgcttgtttcaaccattattgcatcgataattcctgatgctcaggctcaaatggccctgacaactgcttttttaaagaaagactatattaaagagcagataacaggaacacagaaagctaatggtgctgtaagttcttcctttcaggtcgtagcaagcgaacccatgtttaaatttaatcaactggcaaatgaaaaatttttcgcggacggtgatgtattcggaaaatttaacaaagaattgggtaatgcagcgattacacttgctgattatgctaaggaatatccagaactgacggttgctgtcgatggcgcaacacagggaataaaggccatgaccgcagcggcatatgtttttgctggtctcaggttactacaaggaggatttggctcaacctcgacctcagttcccggtggggccgtggggacggggggcaaactcgcaggcgcattatcaataaccactcctgcgattgctatcactgctggttctgtcgcattaggcatgatgcaggataaactgagagaggattttgctaagaaaaccattcctgaaaaagttaaatcaattcaggatggaacttctggttatagttttgttgatgtcgcatgggccgtattaaaaagcaaatttagccaggacaagcgctcatcatcaattagcattccgtacctacctgatggcatcgttgacatcgccccgcagctggatcatgatggcgtcaattttggtgtcccagcttatttgcaacgtggcaacaaaagtagttactctggtggcggaacgtcagaaaacaaacagccactcattatcaaaaatcaaatcattcttgatgaaaaagtcctcgctgaggcagttaataatgtcaatggtgaacaagctaacagaggcccaagagggctgtattaa

SEQ ID NO: 265518 - DNA, 774 bp, Klebsiella pneumoniae
atgtcaatggtgaacaagctaacagaggcccaagagggctgtattaaaaaggtgattgctatgtccagtgtgtgtgatgataaaaataataaggatacattccttaacgcggtttccgacattacagcgaaaatgggcgtggctgttgatgcattgattatgttaacggatagtgataagaaatatttcagtgatgctaatgctcaaaacatccgcgctgcaattaatgatatcactagtgccgccacacatattttaactgatgctattagtgctgtagcgcctgaagagctggaaaaactaaaagccacatatgctttcaataccgcccctcaaattaatgggtctaataaaacatatgacgaagatattcttagcaaccttccagaggccgcagccgatatcgttcacctgataggaatcaatcaggcgatgaagttatttaaagcctttggcggaacaaccttccccattggtaagggagttagatttcttggcggtgcacgtgcaaaagccttacaaactattataacgaatgaagaaataaacctgcttatacaccactttcatggtgagactctgtaccttccacgatgcgagcgcttgttaagggaggttcgtaaccgtaagtttcttagtgagttcgccgcaatgcgtcaggatggctcatcggcgctaatgacgatgatgcttctctgccctaagtacgggttcagcgaccggtacggatggaaattacttaaagatgaaagagattcacaggcagaccagtaa

SEQ ID NO: 265519 - DNA, 141 bp, Klebsiella pneumoniae
atgtaccgggtaaaacagctgttcgggggttcactgacgctgcgtgactacgatggtcaggttgcagaggctatggccctggtacgagcgctgaacaaaatgacgaaaacaggtatgcctgaaagcgtgcgtattgcctga

SEQ ID NO: 265520 - DNA, 396 bp, Klebsiella pneumoniae; identical to SEQ ID NO: 264926

SEQ ID NO: 265521 - DNA, 375 bp, Klebsiella pneumoniae
atggcacttgaagaatacgtcggctcaatcgtcctgtacgtggacggccaggagattgaggttaccgatattcgtccccagacgaacaccggccgcaagctggtgaagaccatgaaccgtaccggccgcgccaaaggttacgcaaaaggtatcgcggaacatcagctgcagatcaccgtcgtgatgccgaaaaacgtcgcgcagccggactgggatgaaatggtgggtgcaaaactgaccaccatggatatggacggtaacccgctgtatagctacctggactgcttcaccacccagacaggcgaacagtacaccgtggataacgaagcccgccgcgatatcacgatccagtcactgcgtaaggtacaaggctaa

SEQ ID NO: 265522 - DNA, 1419 bp, Klebsiella pneumoniae
atgtccagcccgaatatttctttcgacaatatcccgtcgagcatccgcaagccggggcagtatttcgagttcaatacgcgacttgcggtacgcacgttgccggcgaatgcacagaaggtgctgattgtcgccccgatgctcgcctccggtagcctcgatccgcttgtggccaccagtgtattcagcggcgatgaggctgcggtttactttggctacgggtccgtcgcgcaccttatggtcgtgacggccattagcacctatgcctatcttgacctgaccgttatcggtgtcagcgatgcgagcgccggcgttgccgccaccggtacgctgaccatcaccgggcccgccagttcgcagggtgttgtcagcctgtgggtcggtaaaacccgcgtggatgtggccgtcagtgcggcagataccgcaacggccatcgccgcagcaatgaagactgcgatcgacaatcagccagaactgccggttaccgctgcagtggctgctggtgtccttacgctgaccgcgaagaacaaaggtaccgccggcaacgatattcgcctgcgtgcgcagaccaccgcgtcaggtacgacgactgccatcgttgcgatggccagcggagctactgacccggatatcgcgccggcgctggcgaacgtcgtggctgcaggtcacaacatcatcatcagtccgttctgcacccaggcaacactgacggcgctgcgtacccatctggattttgtttccggtccaatggagcaacgtggtgcggtgggcgtcgccggctggccgggtacgcttgccgcaggtaccacgctggcgtcacaaattaacagcggacgtattacggtgggctggcataacggttccgtcatgctgccggcagagattgcggcggcatatggcgcacgtattgccagtgaagaagacccggcccgaccgctgaacaccctgacgctggcgctggatgtgacggaccttgccagccgcccgggacgaaccgagcaggaaaacgccctgcataacggcctgactccgtttgaagtgggttccggtgagacggtgcagatcgtccgcgccatcacgacctatacccgcaatgccagcggcgtcgatgacgtgtctctgctggacctgacgaccatccgaaccctggattacgtgcgcaaagcctgccgcgagcgtattgcgctgcgcttcccgcgtgaaaagctctctacgcgtacgccgccactggtccgcagcgagctctatgacgtgctgctgaagctggaagagctcgaaatcattgaggaagttgacgccaataaggacgcgctgatcgtcgagcgagacagccaggacgttaaccgtctgaatgcccgtattccgtcggatgtggtgaacggtctccacgtcttcgccggtcgtattgatttgcttctgtaa

SEQ ID NO: 265523 - DNA, 171 bp, Klebsiella pneumoniae; identical to SEQ ID NO: 264927

SEQ ID NO: 265524 - DNA, 651 bp, Klebsiella pneumoniae
ttgattatcacgcaaatcgaatccgccattatcgacaggctcacccgggggctcggcaaactggtccgcgaggtgcgttcctacagtggcgaactcgatggcgaacctgctgaggtggttcgccagttgccgggggtatgggtcacgtttggcggtgtacagggttcagagctgctgagcaccgcccgtaataagtggcgtgataccgggcgttttgtggtcatcgcgggcgcgcgaagcgtgcgcagtgaccaggctacccggcacggtgggccgtcattcaacgaggtcggctcctaccagctggtttacgccatacgccggctgctggcgcggcaggatttagggttaccgattgaccacctgatgcccggcaaggtgcgaaccctgtttaacacgcaggtccagaaggccgctatgtccgtatttgcctgcgagttcgacacccgttttgattctgaatcactgcaaaatggccgcttcccgctggctcctgcagacctgccgcccggtcatcctgaccagatttttggcgagtatggcggtgccagcagcgaagacgacccggcctggctgaccactgatttgcagtatttcctgaacggccgggagccgttcgctgctgaggacattattcatcatgaaagttaa

SEQ ID NO: 265525 - DNA, 429 bp, Klebsiella pneumoniae
atgtacgcaacccgggacgatatggtcaggcagtttggtgaaacggaatgtatcgcgctttccgatcgtgactataccggtgagattgacgacgacgtgctgaacggtggccttgaacgcgccaccgccaccatcgacagctacctcgctggccgttatccggtgccatggaccgatacgcccgggatcctgacgggtaaatgctgcgatatcgcccggtacgaactgaccggcgcacagacgcagaacacggaggagatacgtcaacgttatgaagacgcaatcaggtatctggagcgtgtggctgatggccgcatcacgctgggccgtctcccggatggctcagtcgctcagggcgggagtgtttcccgcttttcctcaaatggccgggttttcgggcgcagtgaaacggatgggggtgcattttga

SEQ ID NO: 265526 - DNA, 357 bp, Klebsiella pneumoniae; identical to SEQ ID NO: 264928

SEQ ID NO: 265527 - DNA, 909 bp, Klebsiella pneumoniae
gtgattgttaacaagcagaacctgaaaaccatttttatcggtctcaagaagacctttcagaatgcgtttgatcagacgccaaacgactggcagcagattgcgatggtcgtgccgtccaccaccaaagaagaaaactacgcctggctttcgcgcttcccgaaaatgcgcgagtggattggtgaaaaagtggtgaaagcccttgaaggcttcagctacaccatccgtaacaaagactgggaagcgactattgaggtcgagcgtaacgacatcgaagacgacaccatgctgggctatgcacagcaggcacagggcgcgggccagtcggcagcagaactaccggccgatatcatcgggcgactgatgagtggtggtttcaccaacctttgctatgacggtcagtatttcttcgataccgatcatccggtgggtaaaaactcggcttccaacaaagggaccaaaaaactgtctgcggcgacgttcgcagcggctcaggcatcctacggtgccggtcgttcagcgatgcgtgatttcaaggacgatgaaggggaaagtctgcgtatcaatcctggcgtactggttgtcccgccggcgctggaagatacagccaactacctgatgacggctgaccgattcccggataacacgccgaacatctacaaggggacagcgaaagtactggtctggccagggctggcgacggataccgaatggtatctctttgataccaccaagcccgtcaagccgttggtctaccaggagcgtaaaaagccggtattcgttgagcagacgaatatggacagcgacgacgttttccttttgaagaaatacaaatttggtgccgaagcccgctccaacggcggttatggcttctggcagatggcttttggttcaaccggggtggatgcataa

SEQ ID NO: 265528 - DNA, 396 bp, Klebsiella pneumoniae
atgcctgatcgtaatactccctggcgtaacggcgatctggtcgccgtgcctgtggctgcggccacgatgatttatggcggacacctggtcggcatcaacgccagtggtctggctgttccgggggcagccactgcggccctgaccatcttcggcgtctccgatgagtatgccgataacaccgccggtgcggccgaggcgacctctgttctcgtgcgtcgaggtaaggcgtggaagctggcgaacttttccggggatgccgtaacccaggcagatgtcggtaagccctgctatgtcgccgacagtatcaccgtggcaaaaaccagtaacaccgatgcacgaccggtggccggtaaagttattgccgtcgagtccgacggcgtctgggttgaaatttaa

SEQ ID NO: 265529 - DNA, 1086 bp, Klebsiella pneumoniae
atgaaaactcgtatcgcgtcactctcacaggttatcaacgccgccactcgcggcgtgatccagctgttaccggccggcaccttccgtgccggcgacggtcgcccggcggaatgccctgacggctggtttattgacggcactatcgcggccgcgcttatcgcgggggctgacgcccgccagaccccctatgtcatcgactacgaacaccagaccctgcgatcggcgaagaacggtctgccggctccggcttccggctggttcaaaaagctggaatggcgcgagggtgtgggtctgttcgcggtcgatgtcgaatggactgaggccgccgccgccgctatcgacgccggcgaatacaaatttatttcccccgtatttttgtacgacaccagtggtctggtcaccacgttaatcaacgcggccctgaccaatacgcccgccctggacggtatggatgaggcgatgcttgccgccgcgtctctgctggccatcaattcaactgaggattcaacaatggaagatttactggagcagctccgctggtttctgggactgccgctttcgtcaacggaagccgacattttgaacgagctacagaagctcattaacaaaattaaggcttcggacagccaggccgccgccggacttgcctggattaacgggctggaagcgagcgtcgctgcgctgacgtctcaggttgaaaccccggacccggcacgctgggtctctgttgacgtcatgaatcaggcgatcgagcaggccctcgcatccggtgaagagcaaattgctcaactgacgctgcagcagtccaccgacctgattcaggcagcgttgtctgacggccgtctgttgccggcgcagaaaggctgggcggaggcgctggccaaatccagccccgacaagctccgtgatcatctgagtaagcagcctcgcatcgccgcgctgacgactactcagaccggtggccgagctcctgcaggtcaactatcccgcactatttccgccccggacgatgagctgaatccggcgatgctcagcatcatggggcttgatccgaacaactttaaagaggaatccggcaatgcctga

SEQ ID NO: 265530 - DNA, 546 bp, Klebsiella pneumoniae
atggcctatgaaatcgtttttgacgtcaccgactttgagcgctctctgggcgagctcatcaggagctttgagaatcgtgcgccactgatgcgaatgctggccggtctgatggaagactcggtccaggagaacttcgagcaacagggccggcccaaatggcagcactggaaaagtaatgcctactgggcgcaacgccgtggcggtaaaatactccaacgctccgggcggctggcggcgagcatcacggcttacagtgacaatgatatggcgacggtcgggaccaatgtcgtctacgctggcattcaccagtctggtgggaagattaacatccccgcccgcagccagcaggcgtactaccgccagaacaaggacggcaccctgaacaatcagttcgcccgcaagagcaaagccaactacagcgagtggcataccatccccgcgtatgagatcaacatgcccgcacgtccgttcctgagcctgaccgaatccgacatcagcgatatggaagataaagcggcggactatttcagccagatctaccgataa

SEQ ID NO: 265531 - DNA, 1272 bp, Klebsiella pneumoniae
atgcctgacagcgttgacctgagctatgcgatcggcctgaaacccgctcaggccatcgagtatttccagtccaagggctacaccataggctttaactggcatgaggtggaggcgcgggcgcacgcgacggcgttcaccgtcgccggcatccttcgccaggatattctgcaggacgtgcgtgccggcctgcaggattcactggataacgggctgacgctggaacagttccgccggcagatgacgcagaaactgacgcagaaaggctggctggccgataaggcgaagctggtcgccgatgaggatggcgtactggagggcaagcagttaaccccgcgccggctacgcaccatctttgaaaccaatatgcagtcgtcctatggtgccggccgctacgcccagcagatggagaatgccgccgaccgcccgtactggacgcgcgtggcggtcatggacctgcgcacacggcctgcacacgcggcgctgaacggactgacggcccgctatgacgatcccatctggcagtttgcctatccgcccgacggctggggatgccgctgccgcgtccgggcacgttcgcaaagcgatatcgacagcaaaagcatctccgtctggtcgagcgaggggcatctggaaaccgtgcagcaggcatgggggccgcaggatacccgcgaggtgcaggcgttccgctacaacggtcagctctatacccctgatgccggctttggccacaatccgggtcagggctggctggccggcctcggtcagagactgatggaccgttcaactacagcaccaccacagatggccgcactggctgttcagcacacactttcggagccgcagctgcttgacgcgatcacgtccgacatgcgccgcttcgtgaaccagtcgctgctgcgtgagcccgccggagctttccgtcatgccggcgcactcagcacccgcacgctcgatgcgctggccggtcgtggtcgtatgcccgacgccgcagtgatgacggtgaccgacagcgcggtggtacagtcgcccgggccgctctgggagctgctgccggcacagctgcgccagcctgcagcagttctggctgatggtgacgatctgctttatgtcatccgcaatggcgagtcactccaccaggtgcgggccgttcccgtgcagaacgctgccggttacgagctgcagttaccggacggtggcgcagaactgacaccggcgtccctgcagtcgctggctgaattaccgttactggagggcacgttaaatggcctatga

SEQ ID NO: 265532 - DNA, 1569 bp, Klebsiella pneumoniae
atgggcaagatagttgatcagtggggccgcccatttgataaggcggtaaccaaagcgccgcagacggcacggatgattcagctgaacagcacgtatcccgatcacccatcgcgggggctgacgattcgccgtctgccccggatactgcaggaagccgagcagggttatctttccgcccaggctgacctttttgacgatatggtcgaaaaagacggccatattttctcggagatggccaagcgtaagaatgcgctgctgggtctcgactggagcatcgagcctcgccgtaacgcgacagcggaagagaagaacctcgcggcgatggttcaggagtggttcgactcactggataatctggaagatatcatcctgcaggcagcggatgcgatcgggcatggtttcagctgtcaggagctggagtgggagcttgaagagaatgtctggctacccagcgaagcccacctgcggccgcatcgttggttccaggcccgccccgaccgtggcgatattatccgcctgaatgatggcagcatcgagggtgccgagctgatgccgttcggctggatggtacacaagcataacgcgaaaacaggctttaccggtcagtctggcctgtatcgcgtgctggtctggccgtacctgttcaagaactttgcggttcgtgatctggcggagtttctggagatttatggtctgccggcacgggtcggtaaatatatggccggcgcaacggaccaggacaaagacgctctgttcgaagcgctggtcaccctgggccataacgcggccggtattattccgcagggtaccgatattgactttaaatcggcagcatctggccaggcagacccgttcgtcgcgatgatggactggtgtgaacgcaccgaatctaaagtcattctcggggccacgcttaccagccaggccgatggcaagacctccaccaatgcgctgggtaacgtccataacgacgtccgccacgatatcctggtcgcggatgcccgccagctggagggtttcttccgcaacatgattgatatgttgctgcggattaacgggtatgaggtttcacgccgcaagctgcctaaactggtatttgatacccgggatatcgaagatatcgaaaccttctctgccggggtgaaaaacctggtggaatcgggtgtgaaaaccattccggcatcctgggtacatacaaagttgggtattccggttccccagaaagatgaggccgtactggaggcaccggcccagaccggcacaccgttacccgttgcactgagtcagcgattccggcggattgctgccctgaccaccgccgcagagctgtcagacccggcgcaggaggcgctggataacggccgtccggtgccggagaagatcgccgccgccatgcagaacctcatcgcgccgctggtcgctgccctgcaggatggccgcctgcctgatgaggccatggatatcattgccggcagttacccggacctggacgacagcgagctggtgaccctgctggagcaggcgctgtttgtcgcggacgtatgggggcggctgaattccgatgcctga

SEQ ID NO: 265533 - DNA, 1704 bp, Klebsiella pneumoniae
gtggcgcgtaaaaagaatgtcaccctgaacaaaaaggagtttgaggcccagctcaacgagctggccgcatcgctgcgccggtccatcgaggcggaacaggtcggctttgacccgtctcaggaggccgtcaatcagcgccgtgaggcggtcagggatccggttaacggctttcgttactttgtgcagaactacttcccgcactatatccgccataaagatgagtcggagcttcataagttcctgtttcagcgtctgcctgaaatcgttaacgcgaccgtcagccagcaggacgccatcgccgctccccgtggagaggccaaatcgaccatcgtcagccagctctttgttctgtggtgcatcatcctggagctgaaaaaatacccggtcatcatcatggacagtatcgaccaggcctatccgatgctggaagccatcaaggccgagctctgttggaacccgcgtctgaagatggacttttccgacgcctgcggcgcgggccgcgtctggcaaatgggtaccatcctgacagcgaccgatatcaaggtgcaggttgccggcagcggtaaaaagctgcgcggcctgcgtcatggtccgtatcgtcccgatctggctgtactcgatgacattgaaaacgatgagctggtccgcaacccggaccagcgcgacaagctggataactggctgaaaaagaccgtcctgccgctgggtggcgcgggggccaagttcgatgtgatctacatcgggactattctgcattacgactcggtgctatcacgtaccctgaaaaacccgctgtggaagcgtaaacgatttaaagcgctgatcacctggccgtcagacatgacgctgtgggataagtgggaagaggtcctgcgtaacaatgacgaggacggcgagctgctggcccgggcgttctacgatgaacacagggaggcaatggaagccggcgcggtagtttcctggtcagcgcggccactctataccctgatgttgatccgcgcccgtgatggtcacagcaccttcgacagtgaataccagaatgacccggtaagcggcgatgatgcgccgttcgccacctgtatcactttctgggttaaccggctgaaggaatggtcattctttggcagcatcgaccccagtctgggtcttaaaggtaattcccgcgacccgtcggcgatcctggttggcggttttaaccggatgaccggagtcctggacgtcgtcgaagcccgcatcaaaaagcgtctgccgagtgtcattatcagcgacaccatcgcgctacagcgggaatacggctgcctgtgctggtctgttgaagccgtgcagtttcaggagttcctgcgtaccgagctggtccgtcagtcagcggaactgggggttccggttccggcgatgccggttaccccacattcagacaaaatactgcgtatcgagtccctgcagccttacgtgttcaacaaactgattcggctcagcccgacccaggtcaccctgatagagcagctccgccattttcctatggcagaccatgatgatggcccagatgccctgcatatgctctgggcgctgtgcaactcctttgggacgcgtgacggcttccgccacgttccgcgccggcaggacgatgacagagatgatgacaacagacattcaggccagcagcgccagcgttcccgctcgcgctttggtaacggaggatggtaa

SEQ ID NO: 265534 - DNA, 330 bp, Klebsiella pneumoniae
atgtttatttccgccgttgtgaaaaatgtgtctcacgatcgcctgtctttcatctgcccgggctgcggttttccccatcaggtgaccattggccagggcgacggcccgcgctgggactggaaccatgattatgttcgcccgacttttaatcccagtatcctggtgacctgggaagagccgagcgataacccggcattttttgatgaccgggctaaagaccagcaccgtgtctgtcacagttttgtgcgcgatggccttatccagtatctggcggactgcacgcacgaactggccgggcagacggtcccgctttcgcgtatcggggaataa

SEQ ID NO: 265535 - DNA, 210 bp, Klebsiella pneumoniae
atggctgacaaattaatccgggtgaattcccgcgtcagcgtgatggccagccaggtggcttacgtcatcgcgccggagtttaaggatcgtatcgacgttcacctgctggatggccgcgttgaagagttggaatactctatgcgtaacgaacgctggaacgctaaagaccgctttgaacaggctgttaacgatgctttaaagggggaataa

SEQ ID NO: 265536 - DNA, 501 bp, Klebsiella pneumoniae
atggcgcatccgcccgagacaagggaaaaagtacggcggctttatattcagagccagctgtccctgcagatcgtttcttcgcaatgcggcgtcagttttgcgacggccgcccgctggaagaaagacgcgcaggacagcggcgacgactgggacaagctccgtgccgcgaacgtgctggcgggtaatggtatggaggacgtcggccgggccatcctgatggggttgctggtccagtatcagaccaccattgaacagctcaacgttgattcacaactgccaccacaggcccgggttgagctgctggccagtctcagtgatgccttcaacaaagcgactgtggcgagcaagcgcgttttgccggagacctcgcaactggccacggcaatggaagtgctgacgatgctcagtaccttcatcagtgaaaaatacccgaagcatatggaagcctttgtccaggtgctggaaccctttggtaatgaggtgcaaaaacactatggctga

SEQ ID NO: 265537 - DNA, 315 bp, Klebsiella pneumoniae
atgaaggccagacaaaaacggcggcagcgtcgtattaccacagcaaacgtgacgccgtcggtcaggctggccagcgatgacccgttaatgcttctgcagcagttgctgacggaacagcgccggccgttctcccccgacatcatgccggagctggagaaaatatccggggcggtgatgcgtatcgatcggcgtattgatgcgatggaaagccgggttatccgtcagggtgctatctccggcgggctgaccggggcgctgtcgggcgggctggtcgtgacgaccatttccttaatcaaggccaagatggggttctga

SEQ ID NO: 265538 - DNA, 246 bp, Klebsiella pneumoniae; identical to SEQ ID NO: 264929

SEQ ID NO: 265539 - DNA, 636 bp, Klebsiella pneumoniae
atggtcagtaaactctggacgctggttaaaccgctgctcccctggctggttgctatagcgctgattctgtttgcggggatctggattggtattcaggtatgcgccagccagatgcgtggagatgtacagacggcgaacaacgcgacggcgaccgtccagaaggcgttcgacgattacaagattgagcgcgaaaaaacggatgccgacacggccagacagaaccagtcacagctgcaggctcaggtaaatcttgctgaacactaccgccagcaggcggacaaattgtccggggagctgctggccaaaagcaaagcgctgacgatcgcacagcaaaaactgaaggaaaaaattgatgaactcgcacgcaaagatggtgctggctggactggtatcggtcctggcgctttgtgcctgtaccagcagaacctcggctatccagccggacccggttgtagtcaatatctgtcagcagccaacagcggaaatgctggatattccagcgatgccggcagcgccggcggcggactctctccccggggaatcctcggccacagcaacgaatacggcgaatggtgccagctcatccgcaacaaactgaacaccatccgccagctctacggtaaggagccacaatga

SEQ ID NO: 265540 - DNA, 249 bp, Klebsiella pneumoniae
atgtccctcaaagaactgatatctaatccatcgggtcggttaagcacctctgacaccattaccttttttacctttctggtcacgtccgcgatcgtcatttggtacggctacagcctgcagctgcaggagtggatgtttaccgcctacatcgtcgcgtgggcgggccataacatcgggtcaaaactggtggccatgaagcgcgatcagcctgccaccggtacaaacggaggttctcctgatggtcagtaa

SEQ ID NO: 265541 - DNA, 600 bp, Klebsiella pneumoniae
atgaatgaccgtgaaacgcgctgttacagcggggaggtcagagccgagcaacgcaccgatgaacctacccgcattctgggctatggctcggtgttcaacagccgttctgaacccctatggggattccgtgaaatcatcaagcccggagcatttgacgatgtgctgaatgatgatgtccgcgggctgtttaaccatgaccccaactttattcttggacggagcgctgccgggacgctatccctgtctgtcgatgagcgcggcctgcgttacgacattacagcgccggatacgcaaactatccgcgatctggtgctggcgccgatgatgcgcggtgacattaaccagtcatcttttgccttccgggtatcccatgacggtgaaaattggtaccaggacgatgaagggatcgttattcgtgaaatatcgaagttttcccggctgtttgatgtcagtccggtgacttatcccgcatatcaggaggctgactccggcgtccgatcgatgaaagcctggcaggaggcgcgcgacagcggtgcgctaaagaacgccattaatcaacgaatggcgcgtgagcgcctgctgacccttcttaacgcgtaa

SEQ ID NO: 265542 - DNA, 444 bp, Klebsiella pneumoniae
gtgtacgccgtcgggcagaagcggctgatggctgaatgcggcctcgacaccttcgacagcgtgcagagcctgctgacgatggccgacggcagttcgtgggtggtggaaaactcgtgggtactgccggagggctttccgaaggacaacgacgggcgtatcgatattctctgcgaggcaacgtatatccgcagtacttcccaacatcgcgggctggaaatcaccacgccgggcatgacgctcacgcccaacagctatttcatcaactaccgcaacggcatcgccagtggtttcggtatcgacccgatcaatgactttgttcactccgtcagacataaagcgccgtacccggtcaccgcaatggacggactggcggtcagccggatttgtgaggcagtgcaccgcagcctggaaagcggcaaacctgaacgcccgataaagccataa

SEQ ID NO: 265543 - DNA, 651 bp, Klebsiella pneumoniae
atggacacttttttcatcatccagtggtataggctccgggccatcaacatatttttcccatcccaacgctttcccatcatacagaaccttaatttcaccgttaaagctttcgcataccgtgacaaccgaatgccgaagtcgatatccccggccttcactgcgaatctgaaacgcactgcttttgtactggaaagtgagatttttggagagaacgcgcttcgcctggaggctgaagatataacccagttcctcttcagaatggtgtacatcaagatgggcgttatcagcaatacgaggcggcgtagcaaaccggttgttataggcttcaataaaggtcggcaaccatgcgtttgctgtttcaatatcactgataccctgaagccgcatttctttgaccagcctgtcctgcagtgtctgattggcacgctctacccgcccttttgcctgcgggctgttggcatggattggctcgatgcccagtgtctttatcgcacgtgtgaactgagtcaactctccttcccgctccgggttatttactctgaatatactgtgtctgtcagaatagagagccagtggtacgccatgatcattaaggtaaccccggagggtttccatgtaagcccgggttgtttctgcaggagcgaatcgtag

SEQ ID NO: 265544 - DNA, 339 bp, Klebsiella pneumoniae
atggataactccacctcatacaacaccctacaatctgtattacagacataccacgataattacgctgtccctatgatgcgcgtggtaaacgaaacagaacgtgatagaacgcctgagagcgtcctagctgcgattaacgcgcaagatttagcgcaagcaatgctccaacatattagcgacgtggcgatccgtatagcgactgcggaacactccacgctaacccaggaggaggcagatagtatttcagaagaaatttctgatgctctgctgctgctattgcagtgcattgaggagacgggcgaaatagcgcttgaactggcgccgaacaacaactactag

SEQ ID NO: 265545 - DNA, 894 bp, Klebsiella pneumoniae
atgagcatacatgttgaactgaatgacctgatgacccgcaaaggctacagccagacacaggtagcccgggcgattggcaaaagtaccgcgaccattaatcaatacctgcaggggaaatatgccggtgatgttcccgctattgatgagctggcccggagctttattaatcgggaagtggaaaaggagaaatcgcagcgtattaccgccagctttattccgaccatcacttcccgcaaaggaatggaggtcatacgcctggcccatcttgatggcgatcttaacgttatctatggcgcagccgggttaggcaaaaccatgatgctgcgtgagtacgccgcacagcatcgtgatgcattgcttattgaagccgatccgggatacaccgcccgtgtggtcctggaagagctctgtggcctgctggggctcagcaagcgtggcaacatgcacgaactcagtgaagcctgtattgctgcgttgcgcgagtctggtcgcatcctgatggtggatgaagcggaaaacctgccataccgggcgcttgagactctgcgacgtatccatgacaagtctggtattggccttgttctcgcaggaatgcaccgcctgattattaacctgaagggtaagcgcggtgagtaccagcagctttatagccgtgttggcctggctttctgcatcggggattcactgccgcaggacgatattagcgatattgcgatcagcatgctacctgatgccagtaaggacgatgtgagtgatgccctgtttaaagccagcaacggcaatgcccgtcgtttgttcaagctggttcgtggcgtcagccgtcacagcgagattagtggcaatgctgtcagcgctggcgcggtacgtaagttcgctgaaatgctgattaattag

SEQ ID NO: 265546 - DNA, 219 bp, Klebsiella pneumoniae
atggccaggattgaaatatctgtaacccggaaaggaaaaggcattgatgtccagtgccgaatgattaaagacactgaggattcagaacaggttagtaaagtcgcccggactattcaggcatcactcggcgggtttatccattcaattctgagaaaaatgttcggaacagttaaagatttttcgactgttccagaaaaaggtaaagattcatttcattaa

SEQ ID NO: 265547 - DNA, 168 bp, Klebsiella pneumoniae
atgaaaatatcagctgaaagatgtcttgaccgtctgatgatgagcgctcatctacgggcgattgcctggttgttttgcatttttttttgcatcgcaatatggggcgtaggtattcattacggcctgaaaatgattgaactgttattaaccttatttaagggggcttaa

SEQ ID NO: 265548 - DNA, 519 bp, Klebsiella pneumoniae
atgggcttttataaaacaaccgcaaaaattgcgcttgatgcctgggataatgaaattcgtcaacgtgcagagctgaaagagaaatcacttaagtttgcaaaaaaatttggcggtaaaccggtattctgcggcgatgctacagacttccacttttacggcctgtcattcgatgctgccccattgattggccactgcagtttatggacgctctcccgctcgcagaatggttatacccgcgaacccaggggcaaaacccgtattccccgtgagcgtcgcgaggaacataagcagttgctggacgcatgggatgacggtcgccccacggaaagaatctcaagggagccttactggaaagcgctgggccttgaatgggggatgttgatcctgtgtggcattacccactaccgggtcggggatgtgatttatttcaaaactgacgccagaccatccccggattctggcgcaatagaaattgttgaatcggaatttaaagccgctgaaaaaatactgggctcataa

SEQ ID NO: 265549 - DNA, 2652 bp, Klebsiella pneumoniae
atgagtgaagagattttaaaaagaggttatggatcccgcggcgatgcatttggtgactgggaactctttactattggagagacaaatctcaatcaattaaagaaatttggcataattccacaaaaaaactatggtgaaagtggtcattatcagccagacgaactaattgttgacaggagaacgtcttcaccggaggttctagttgtagttgaattcaaatcacccgcagaatttgatagtgagagaaaaaaaatagctgcggtgaatcagtgcgtcaataagtattgtaaacctttaaatgcgaaaattggtattgttactgatcgtacagaatacatctggattaacccgcaagtatctaattccgaaggttatgaattaatatgtcgtgaagatggatatcctctggatataccactagaagttaagttagaacaggaaaaatccctaaatattgttcgaaaagtccttcgttcaatttcatcacataactcaatacttgaaaaagaagaagtcaaaaacccttcagaattagctgacaaagtttggcaaacaatttggcttgcaagtggggaaaatcccgacgtctgcttatcgacatttgttgaaatcttccttttcaaatatcttagcgatttaggtgttctaacttataacgagaacggagtaggagtatcttttaatgacacattaaaagtacctgaagaccgcatcttcagttattattacaacaatattcgaccgtatataaagaagatattccctgcagatagcgaagacaacacttctataattaacgggattgttcttaaccctgaaatatcagaacataatttcatcttcaaagaaatacttactggatttgaaaagtttggggaactgaaaggtattgatcctgaattcaaatcgagactttatgagaattttcttaagaaaagcatcagccaaaaaaactggggtcagtttttcacacctcgaaatattgtaaaagccattatagaaatgagtggactcaaatctctaccggaaggtagtaaggtttgcgatcctgcatgcggagtgggcggattcttacttgagccaataaataccgtcagacctaacgactatatctttagcaaaaataaaattaaacgctctattaattatagcggttttgataaagataaaaaaactatcattcttgcaaaagcaaacatgcttattcacctgaatgagattgttagagattatgctaaattccctaaagcgtttagcaagattttcaatgatacgtttaaatccaagcattcttctattttaggatcactgtcagaaacagaagtcaatgaatatgacttaataatgacaaatccaccatatgtggttactggcacaagcacgattaaaaagtatatttctgaaaaatccgagttcagccaatattactatattaacggggctggaatagaggggttattcctagaaaaaataattcgttcattaaaacctgctggcaaagcctttgtggttattcctgatgggatacttaacagattagcagattcaaaactgagatcttttatattgaatgaatgcttgcttctgggcataatttcattgccaaaaaacgcattttatacgacacctaaaaaaacatatattttatgtctacagaaaaaaacttctgcgattgaaaaacaattagataaaatttttacgtatgtcattaccaatacaggggaaacactcgatgcacaacgatttgagtgtgagaatgatttcccaacaatggttaaaaattacaaaattttccatgcttacccagaagaattcaccactgatgatcctaagtgcaaaatttggcctctctcaaagtttacttcagatgagcattggagtgtagaccgttggtggtccgcaagtgaaaggatcgaattaaaaatagatgatgagaaaaaaataaccgaccctcatggcttcgagaatattttgctgcgacataaaagccttatcaattcatcattagaaaaactcaaaaatgctcagaaaacgatgcctgtcgttgagcattctgttccagtagaactatctgatagctcatatttttcacttgccataggtaaaagagtacttaaaaaagaggtatataatcagacaggtgatataccagtatatagtgctaatgtgaatgaaccattcggatggatgacaacttcaaacctgaccgacttcactaaaccttatgttttatggggtatagatggtaattttgatttttctgtgaaaatgcctggagaaaaatttaggagcaccgaccactgcggtactataaaaattgaaagggaagatattaaccctatgttcgtatattattctctgcacgccattagagaagaaaataagctagatcgcgaactaagagctaatcttaaaaatgttcagcggtttaaaataaaactcccagtactggttgatgaaaataaccaacccaagttcattgagattattaatgaagtaacaaagaaaaaaacaaaagtttatcaattcgacacggaattgcagcaaaagatcgttgattattacgctgtgttcgaagaagttaaaagtgaaatcttcacttctgccgaccatattagcggactagaaatggaaacaatctccaataaataa

SEQ ID NO: 265550 - DNA, 237 bp, Klebsiella pneumoniae
atgattcaatatataaaactgaacaacacaaaccaaatccaaatcaacgattcaggaaaacaggtgtattattccctgctgtggttttggaagggacgaaagactgagattagctatggagagattacagagaaatcaaatgtttctcattcaggatgtctattctggatgcgagcattacaaaatctagggaaggtgcgaataagcaggtcatttcttcccaagctgactcgctga

SEQ ID NO: 265551 - DNA, 201 bp, Klebsiella pneumoniae
atggctgatgatcggacactgcaactgcgcctgaccgggttccgcaaggctgaagcatctctcaggcttgaaggcatggatccttccggaacgccgctctatgagtccgtaaaagcgcggcttctttccggtgagatcacctacgacgaaggccgcgctgagatactggcccatcaccagaagcgggcaaacagtaactga

SEQ ID NO: 265552 - DNA, 405 bp, Klebsiella pneumoniae
atgggattcataagccagctttcaaaaacaaaaatatcaacacgccggggatctgctagtcagataacagtgacccaatcattcaagccttcaacgtcagcagaagagctttccatcaggatctcgactgaatgcctcaacaacataagcttgaaaatcggagataacgttgacgtactttatgatgcagatagcgatacatggatgataaaaaaagaggcggaaggctataaaatatccggaaaaccggatgctccgacaggactgatccgctacacactgaaagaaggccacaagaaatttaccagtacccgggaatcacttccggttaaaaaagatagtaatgacgacaccatcgtattcatgggtgacaagatgacgtttaagctgaaggaaagcgaatga

SEQ ID NO: 265553 - DNA, 285 bp, Klebsiella pneumoniae; identical to SEQ ID NO: 171118

SEQ ID NO: 265554 - DNA, 1323 bp, Klebsiella pneumoniae
atggcaatcaaatccgggcagttaggttccttcgaactaaaagaccaggctaaatggctcccgcagcagcttgccgccggtaatgcgctggggatgcgcgggcttggtgatctggctgtattgctcggcatcaaccaggcctcagcgataacagccggctcaacagatgaagccggtaataacgtggttaacctgctggcaaaaatcaacagccaggacgcagctacctctgcaggtaagatcgtatataacggtaaattgattgacctatccgggtcgttagttgcagcccgtggtaagggtattaatgcgttagatgctttcagcggtatcgtagacaaaattgttaacaacaatccagcctaccaaaagctggagaagcaattgagtagcacctctgacggatctaaccgtcgggagataatggagtcacaggcgaaactgctggagggttctgcagttggcaaaatcatagctgaccgtcaggcattgatggcacttatcgcataccgtgcgaatcgtaattacatgaaagatgtaattactggtgttaacaaagaaagagatttacctgctggccaaatgtctggtgacgtgaacttcgagctgatggaagggaccaaccgctttaaacttaaccagctcaataatacccgggactttgcgcagatggactcgatccagccgctgtcagatgtgctgggtaaactctctggcgagctcaacgattacgccggcgcgtatccgggccttacaaaagcactggctggcgctgagaccgcaatcaaagccatgacggccgcagcatgggcgttcgccggcattaagtttctatcctctgccggcgcggccgcaacagccagcggttcagcaaccggtgctggtgctgccagccgtattccaggctgggctggccggctcggcctcatcggcggtcgcgttctggcaccgtttgcactctggcaaggtgctgaagccgcgccactggtgcaggtcagtcgtggtgatgccgaggcacgcgcccggcttgaaaaaggtaattaccccaacgagcaggcccgtatgcttgatgcactgaaatcccgcccggggcttatggatgcatgggatgaagtaaaagcctggtgggcgtcaccatcaaatatcagcatccctcagtcagccaacggttacccggtgccgccgttcgcgcagcagccggcacagcagaccccaatcaacatcaccacccagttgcaggtcgatggccgtgtactggcagaggtcgttaacgaggcgaacggtcagtcggccgctcgtgggccgcagggaggaccgcactga

SEQ ID NO: 265555 - DNA, 522 bp, Klebsiella pneumoniae
atgattagggtaaatttggatgggtactatgctccttttttatatgagaagccgtggactgctgcacttaaaggtaaaaaggtattagttattcatccctttgattcagagattaaaagtcaatatagtaaaagagcattattatggaaagataaaaatgttttacctgactttgatcttattacgtataaacctgttgtctctatgttgggccagcaaacagaatatcggtcatggatcgaggcgctagaaaaaatgcaatccgatatccaaaagatagactttgatatcgctttaattggatgcggtgcttatggcatgccccttgcctcattcattaaaggaattggaaagcaagcggttcatcttgcgggttggactcaaatattattcggaataaaagggaaaaggtgggatgatttaccatatgtttcaaagttctataataatgcgtgggtaaggccacagcagcaatcaaaaataaaaggttttgattcgatagaaaagggatgctattggtaa

SEQ ID NO: 265556 - DNA, 210 bp, Klebsiella pneumoniae
atgcccgatctgtgcaataaagccagcctggcgcaacggggtattgataaagaattcggccatggccgcattcagcggatcaagccattgctgcgctcgctgttgcgtaatgccggcggcacgctggaagtcgttgagattcatgtactgacaccacggaaaataaaggtggtgtcagtatcgcgggagggggatcagggaatcaggtga

SEQ ID NO: 265557 - DNA, 141 bp, Klebsiella pneumoniae; identical to SEQ ID NO: 102393

SEQ ID NO: 265558 - DNA, 270 bp, Klebsiella pneumoniae; identical to SEQ ID NO: 248166

SEQ ID NO: 265559 - DNA, 924 bp, Klebsiella pneumoniae
gtggcaaagcaaaagttcaaaatcaccaactggcccacctacaataaagccctcatcaaccgtggctccataactttctggctggatgatgaagcgattcaggcctggtatgagtcggcaacgccttcatcacggggaagacctctgcgctattctgaccttgccatcacgactgtgctggtcattaaacgcgtattcaggctgaccctgcgcgctgcgcagggctttattgattccattttttctctgatgaacgttccgctacgctgcccggattacagctgtgtcagcaggcgggcaaagtcggttaatgtcagtttcaaaacgcccacccggggtgaaatcgcacatctggtgattgattccaccgggctgaaggtcttcggtgaaggcgagtggaaagtcaaaaagcatggccaggaacgccgccgtatctggcgtaagctgcatctcgccgttgacagtaaaacacatgaaatcatctgtgcagacctgtcgctgaacaacgttacggactcagaggccttccccgggttaatccggcaaacccaccggaaaatcaggtcagccgccgccgatggcgcttacgatacccggctatgtcacgatgaactgcggcgtaagaaaatcagcgcgcttatccctccccgaaaaggtgcgggttactggcccggtgaatatgcagaccgtaaccgtgcagtggctaatcagcgaatgaccgggagtaatgcgcggtggaaatggacaacggaatataaccgtcgctcgatagcggaaacggcaatgtacagaatgaagcagttgttgggagattcactgacgctgcgtgactacgatggtcaggtagcggaagctatggccatggtgcgtgcgttgaacaggatgacaaaggccgggatgccagaaagcgtgcgtattgcctga

SEQ ID NO: 265560 - DNA, 942 bp, Klebsiella pneumoniae
atgttcctgcgctgtaacgttcacgacaccggggctaccggtatcggtaatgattatcctgaccggtcttttattctgggctgccagacggataactgcggccgcctggcgcctgatggtagcggtggtgcgtcaggaattggtatcggcctgggtgctattcaggatgaagctctcattgtggcccagtcgatcaccaggaactgcaaaaacttcgggatgtttttcgagcagcaaagactgtcaggcccgggccagccttacgttgcaaggcagatcatagtctctgatgtcgtcagcacgggtaacggccacggcttcggggattgcggcgcctctggtctggtggtggtgaacggccagttcaatgacaatctcaaaaccggtatcagcattgatgcagggacgctggctaacaacggtatagctccccgcccgggtaagaatggctcgatggtgaactgtcatgcagagcgtaacggggtaaccgggctccattatgactcgaccaaaatccaggccgatggcggctactcgttctccgatatgcatattcacgagaacggtcaggacgcaattttgattgaagctggtagcaatactcttgcagacataagttttgaaacacttaagattaatgataacggacgttatccggtgaatgtcgccagcggcacctttaccgacctcgacttcacgaatctccgcatgctgcgaaatggcggcgataccgcgtttaagctggacggcaatatcacgcggggcacgattcatgattgtaagcttcgctcacagaatggcgctgcagcgattaccggcgcagggactatcagccattttgacatcgccgaaaaccagtacaccgacaccaacagcaatcccatcaatctcaccggcacactgactaatgtcacttacggccgcaacccaggactggagtaa

SEQ ID NO: 265561 - DNA, 210 bp, Klebsiella pneumoniae
atgcccgagctgtgcaataaagccagcctggcgcaacggggtattgataaagaattcggccatggccgcattcagcggatcaagccattgctgcgctcgctgttgcgtaatgccggcggcacgctggaagtcgttgagattcatgtactgacaccacggaaaataaaggtggtgtcagtatcgcgggagggagatcagggaaacaggtga

SEQ ID NO: 265562 - DNA, 321 bp, Klebsiella pneumoniae
atgaaaacgcctctgccacccgtattgcgtgccgccctgtatcgccgcgccgtggcctgtgcctggctgaccctgtgcgaacgtcagcaccgctatcctcacctcacactcgacgcgctggaaagcgccatcgccgccgagctggagggcttctatctgcgtcagcacggcgaggaaaaaggccgtctgattgcctgtgcgctgctggaagatttgatgcaggccgggccactgaaagccgccccgtcgctgtccttcctcgggctcgccgtgatggatgagctctgcgcccgccatatcacatcgcctgtactgcactga

SEQ ID NO: 265563 - DNA, 225 bp, Klebsiella pneumoniae
atggatgtggccgttgagaaacgccgtcagcgtcgtatgaaacgtgtcgaagagaaagtccaggagatcgaagccgagggccgctctgtactgccggggcaacgattcgatgacctggggagttttatccctgcggaatataccgttgagaaagaagaagagccttatttcttccttgagactgaccgcgacgaatatctgaaaaaaatcggtaatacccggtaa

SEQ ID NO: 265564 - DNA, 2025 bp, Klebsiella pneumoniae
atgagtgagtttaaccctccgctaggatcaagtgatcctagcgtatttgaagacaacgttaagcggctagataaactggtaaatggcccggccactgaagtgcctgatcgttccggtgagccactggattcttggcgtgaaatgatggaaaggaacgatgaaatccgacaaaatttaatccctctcagtcgacaatatatgactattgaggctgcgcaagctgatattgccaatgtccctgatgggtcgacaacatatgtacgaagtacggaagagcgctttctggctcaggagtttatcaataaatcgggaacgcttaccgcaacagggagaaaattaccctcctatgagcttataaagccaatagtcagtttaattgagtcggttttatatgcagagaataatgagtatgctcgttcatctgctgattctgcgattctggataaaaatcgcagatggcttttgcaatggcgtggtgatgaattattattgaaaaatgcagaggttgaaggtttcctaaaaactaacgatttattagttgagggggctgtttcattcaatgaagcgaaaattactgatttgaaagcaaccagtgttgatgtcgataatataaaaataggcggcattagtgttcccgttgaattagttgtaccagatgaatacatgcgatccccggcagattctgcaataatggacaatgatcaccgctggcttttatactgggagggggataaattaaacctgaagaatctatatgttaagaataatgtatcaaccgcgtgtatagagtttcttgaaccagatgagtatgctcgcgttccttacttggaactgacactcgataaaaatcttcgaatctacagaactgtcgatgatgcaggccatgttgtaatctccggagtgagaattaatccagaccctcatgacagggattcttatgaggtttttgaagacagtggtaaactttatcgtatcagcaaagctacctccatccgtgagttaattgattccagtcctgacaattccgacgtgcagaatgctccagatatttttacattcaaatctacgcgtgatgagactgtaatcggtaatagatggttcagcagttacgaaccctataaacctgcagcttatttcgggcgcagggcgattgttggtttcggtcattcattcatggctaacccgcgattcctgcgcacgctgtctgatttaaccggtctgccgacctacaattttggccggtctggcgggctgtcgcggactgttgcgctgcgcgagggggcctacactgtttcgtatacgccggtgggtggcagcattcctgcgtctggttctgtagcattaactcctgctgacccgggtgttttgcaggttgttggtaacgcctctcttactgaggttgtgaagggtaatattgccggggttgacggctctctcgcttgggatggaaccacactgacattcacccgagagaataatggcacagcagttcccgtaagcaaaccggaacccttcatctactatccctacacaattgactccaccaatactgtggcctcaggagtgcggtatgatgatcatggtgacgcaataaacttgctttgggttggaaggaataatgcaacgcagcaggggcaaattctgagtgacgtaaaagcaattattggtaaccttacagcacatcataagcgttttgttctgctacctgaatttcagatggcgtcagaaacaaaaacaacatacgggaatggaaatattctgtggctaaatcgtgaattaaaaaaaatggcgccgaataattattgtgaaatagatggcatagatttattagcgaacttcaatgctcactataatcctgcatacgctcaggatgtagcggatattgccaacggaattacccctacatcattacgtcaagattcgttacaccctagccagacgctgcaagctaatgctctttatatcggagcggacgttaatgcgcaatttgtttatcaatttctgctaaaaaaaggttggttataa

SEQ ID NO: 265565 - DNA, 792 bp, Klebsiella pneumoniae
atggaagagtcttacaatcaattatgcaaaagcactactaaaataaaagtaggagctataatagtattaaataattccataatttcatatggatttagggataaaggtattcatgctgaaaggatggcgattgaaagtgcaaaaaaaaatggacttaaacttgatgaggctgttttatttaccactttagaaccctgtattgaaatgtctgacactcagaaaaaacagtgttgtgctgatttaataattgaatcaggaataaaaaaggtttatataggaagttatgataacaatgtaactgttaatagaaaaggctggaaacgattaaaggataaaggaattacaatcaaagactacaagcctaatataagagaaaaaataaaaaaagagaatgttgtatttgaaaattttttcgaaaaaggtattggtccaaaaggtggtgctaaactttatcataaaaatggggctgattttgaaattcaattatctgaaagtgacactagaagtgtaaaaattcgttttactcgttgcggaagaaattgtgtttatggatatgctatagaacctgttaaatttgcagatgctatttacgcagaaaactttgatgacatagatgacccaggtgcatacaactttgattatactgcaaaaattgcaacagggggtataggtatattctcctctccagaagcatatattttagtgaaacctgtagaaatagaaagtggtcctgattacggcgataaagattattttgtaaaatttgactatgaagttcgcatccgtaattaa

SEQ ID NO: 265566 - DNA, 135 bp, Klebsiella pneumoniae
atggtacacatcggctcggcaatgattgatggggaagaaataacggcttatccgccggggtatgaaccggacgagagtattttttacgacggccagagccgttatgacggtaacaattatgtatccggggattga

SEQ ID NO: 265567 - DNA, 210 bp, Klebsiella pneumoniae
atgcaccccggatgcgatttccccacggcggcggcttttctgggtgacgacaacaacgtttttcttcagcttaccggtctgttcgggagcacgatcaatcacttcctgccggagaacttcagccccggctcgggtcgaatcccggaggactttattgttttcggctttgctgagggtttgcaggtctcgggcaatatcctgcagccctga

SEQ ID NO: 265568 - DNA, 198 bp, Klebsiella pneumoniae
atgacgatgttgatcgcgagctgcgcgagcacttcacccgccccggtagtcgttgatacggcctgcgactgggtgagggtcatctacctgaccgaacacgatattgacgtgatggaccgtcagaccaagcgagacattctggcacacaacaaatctgtgctggctaactgcccgaactttaaccccaataagggataa

SEQ ID NO: 265569 - DNA, 1266 bp, Klebsiella pneumoniae; identical to SEQ ID NO: 249356

SEQ ID NO: 265570 - DNA, 438 bp, Klebsiella pneumoniae
atgggacactgtcactttatggcatggcacacactccgggacgcactaaaaatgacaggcagatcgcgttcacagttttaccgtgatatgcgcgcaggccttgtcagttaccgtaccggcagggacggacgacgggagtttgaaaccagtgaactgatccgggcatacggcgaattaaagcagaatgagacaccagaaaggcacagtgagggacatgcagaaaatccacatgatcagcagacagaacgcattctccgggaactgaatgagctgaaacaatgcctgacgctgatgcttgaggataaacaggcacaggatatggatcgcagacgccaggaagcagaacgggaacagctacaaaatgagatagcccagctcaggcaggcactggaactggaaaagaaacggggattctggtccaggttgttcggtcgctga

SEQ ID NO: 265571 - DNA, 1569 bp, Klebsiella pneumoniae
atggaaaccgcggtagcgtactataaagatggtgttccttatgatgataagggacaggtaattattactcttttgaatggtactcctgacgggagtggctctggcggcggaggtggaaaaggaggcagtaaaagtgaaagttctgcagctattcatgcaactgctaaatggtctactgctcaattaaagaaaacacaggcagagcaggctgcccgggcaaaagctgcagcggaagcacaggcgaaagcaaaggcaaacagggatgcgctgactcagcgcctgaaggatatcgtgaatgaggctcttcgtcacaatgcctcacgtacgccttcagcaacagagcttgctcatgctaataatgcagctatgcaggcggaagcagagcgtttgcgccttgcgaaagcagaagaaaaagcccgtaaagaagcggaagcagcagaaaaggcttttcaggaagcagaacaacgacgtaaagagattgaacgggagaaggctgaaacagaacgccagttgaaactggctgaagctgaagagaaacgactggctgcattgagtgaagaagctaaagctgttgagatcgcccaaaaaaaactttctgctgcacaatctgaagtggtgaaaatggatggagagattaagactctcaattctcgtttaagctccagtatccatgcccgtgatgcagaaatgaaaacgctcgctggaaaacgaaatgaactggctcaggcatccgctaaatataaagaactggatgagctggtcaaaaaactatcaccaagagccaatgatccgcttcagaaccgtcctttttttgaagcaaccagacgacgggttggggccggtaagattagagaagaaaaacaaaaacaggtaacagcatcagaaacacgtattaaccggataaatgctgatataactcagatccagaaggctatttctcaggtcagtaataatcgtaatgccggtatcgctcgtgttcatgaagctgaagaaaatttgaaaaaagcacagaataatctccttaattcacagattaaggatgctgttgatgcaacagttagcttttatcaaacgctgactgaaaaatatggtgaaaaatattcgaaaatggcacaggaacttgctgataagtctaaaggtaagaaaatcggcaatgtgaatgaagctctcgctgcttttgaaaaatacaaggatgttttaaataagaaattcagcaaagccgatcgtgatgctatttttaatgcgttggcatcggtgaagtatgatgactgggctaaacatttagatcagtttgccaagtacttgaagattacggggcatgtttcttttggatatgatgtggtatctgatatcctaaaaattaaggatacaggtgactggaagccactatttcttacattagagaagaaagctgcagatgcaggggtgagttatgttgttgctttactttttagcttgcttgctggaactacattaggtatttggggtattgctattgttacaggaattctatgctcctatattgataagaataaacttaatactataaatgaggtgttagggatttaa

SEQ ID NO: 265572 - DNA, 519 bp, Klebsiella pneumoniae
atgagcaatcttttgcagacgggcgcggagttcgagaaaaagctgaaagagagagccgaatctacagagaaaatgctgaacaacgagttcaggaggctcggcgaatctgtaagcgaggctgtgacatcaaacgagacgaaaatcagagacgctatagccctgttcacagcctcgacagaggaatcgctggaaaaacaccgggaaggggtgaaagaggcgatgatgcagcacaggagggacgtgttaaagctggcagggaatacgggcatgatgttactggggatagtctttctcctgtttaccgcgagtggcgggacgctctggtatcttggagggaggatacaggcgaacctggaagaaatcaggaagcaggaagagacattgcagaaactgaacgcgaagacatggggcgtggagtttgtgcaggacgggaacaggaaattccttgtccttccgtacgggaaatcagcggaggtgattccctttcaggggaaagagtgggtacatctgaaggagtga

SEQ ID NO: 265573 - DNA, 162 bp, Klebsiella pneumoniae; identical to SEQ ID NO: 28306

SEQ ID NO: 265574 - DNA, 648 bp, Klebsiella pneumoniae
atgaatgttcactataatatcggtagtgggccgtcatcaggtaataaactgactcgtgatactataaaaagctttttagaattcaaggcagaaaatgaagctaatgctgtaaatgatgcaataagcaaagttaatgacttttataaagagttagcatcaaaatacggcgataagttggagaaagaagccaaggcactagccgatgaagctaaagggaaaaaaattcgcaatgctaatgaggcgattaaagcctttgataggtacaaggatgtgcttaataagaaattcagcgtatccgaccgagaagcgattgcaaaagcactggagtctcttaataaagatcaaatggctaaacagttaaaaatttttggtaaggcctttggtgtcgtaggtgaggctattcagtgggggggatttatcagtggcttagttaaaggattcagaactggtgactggaatgaggcttttataagcggggaaaaaatcgcagtcggcaaggtagcatctgttatggttacagtggcatttagtgctatggcagtaaatcctattggtattttagggtttgcagtaattatggcagtgactagtgccttaattacagatgaaaggctgaaacaactaaacagctttattaacggcatttaa

SEQ ID NO: 265575 - DNA, 534 bp, Klebsiella pneumoniae
atggccagcacagaagaaaaattactcacgctcctgttatcggtggagcatttgcaacataccgcaatggagcaacagaaagctgttgctgattctctggctgtggcaagggaaacacttcgcggatatcgggatatttctgacggtgtggcaaaacaggtcagggatgaagtcagaaatgaggtgcagaatctggacgtagcagggctgataggtgagcgcatcagccaggattttcagcggctggaagagtcagtcgcaaacatgaaggcaaacgcggatgccctgaacagggatattgcgacaattcacagcaatatcgtgcaggaatacaacacccttaaagggtatagctggaaatggctgggtggggtgtcagtggcttttctagttatgttctgtgtgctcggatggggaatgaaaacaatgctcgacaggaactacaacgccacagcggcggtgtatcagaaagttgtgatactggaagataaactggcggaaaaacctgtcacgggtaagaaccggaaaaactga

SEQ ID NO: 265576 - DNA, 903 bp, Klebsiella pneumoniae
atgacagaaagtagcattaccgaacggggcgcgccggaactggccgatacccgtcgtcgtatttgggcaattgttggcgcttcctcggggaatctggttgaatggtttgatttttacgtttactcattctgctcgctctatttcgcgcacatcttctttccatccggaaataccaccacccaactgctgcaaacggcaggcgtatttgccgccggatttctgatgcgtcctatcggtggatggctgtttggtcggatcgctgaccgccggggacgtaaaacgtccatgcttatctcggtctgcatgatgtgctttggctcactggtgattgcctgtctgccgggttatgcggtgatcggcacctgggccccggcgctgctgctgctggcgcgtctgttccaggggctgtctgttggcggagaatacggcaccagtgcgacctatatgagtgaagtcgcggtggagggtaagaaaggcttctatgcctccttccagtacgttacgctgattggtggtcaactgctggctgtattagtggttgtggcgctccagcaggtgcttagcgatgaagatctccatgcctggggatggcgtattccttttgccctcggggcggtactggctatcgtcgcgctgtggctgcgtcgccagctggacgaaacctcgaagcaggagacccgggcgctgaaagaggctggctcatttaaagggttgtggcgcaatcgtcgggcctttgcgatggtgttaggctttaccgccgccggatggctgaccttctacaccttcaccacctatatgcaaaagtatctggtcaacacggcgggcatgacggccagcaccgccagcgtgatcatgaccgcggcgctgttcggtaatccccccgaaaaaccagtgcatgaataa

SEQ ID NO: 265577 - DNA, 204 bp, Klebsiella pneumoniae
atgtctaaatttaactttgaagaaatgattgctgctcttagcccgaaacgtgaagcagtagaactaaatggctttaaattctatgctcgtccaatgactgtatctgaatttggtgaagctttctatcagggtaaagataaagaagaccgaaacgatatcatgatctgtatctttactgaaactgtagaagaactggaaaagtaa

SEQ ID NO: 265578 - DNA, 996 bp, Klebsiella pneumoniae; identical to SEQ ID NO: 26186

SEQ ID NO: 265579 - DNA, 756 bp, Klebsiella pneumoniae; identical to SEQ ID NO: 166082

SEQ ID NO: 265580 - DNA, 1500 bp, Klebsiella pneumoniae; identical to SEQ ID NO: 181156

SEQ ID NO: 265581 - DNA, 231 bp, Klebsiella pneumoniae; identical to SEQ ID NO: 228518

SEQ ID NO: 265582 - DNA, 411 bp, Klebsiella pneumoniae
atgatacagggctggttaagccggggttatgaaggcgcagtgacaggcgccgcgcttggggcaggaattaccgcttacaactccagttctgcaggggcgactctgggagtaggacttgcagccggtctggtggggatggccgctgatgcgatggtggaagatgtgaactacaccatgatcaccgatgttcagatcgcggaaagaaccaaaacacaggttcagactgataacgtggccgtattacgtcagggaacatctggcgcaaaagtgcagacaagtactgaaacgggtaatcagcacaaataccagactcgcgtcgtctctaacgcgaataaagttaacctcaagttccctgaagcccagcctgttcttgaagaccagctggcaaaatcgatcgcaaatattctgtag

SEQ ID NO: 265583 - DNA, 366 bp, Klebsiella pneumoniae
gtggtggccgcgcgccgcagccgtgtggaatgggaaaatcagcagcgcaaaaagcagaaactgaaaccgctggagatggacgaactgatcgcaaaagcgtggcggttcgtgcgtgagcgttttcgcagctaccagtctgaacgcaaaagtcacggccgaaagcgggcgaccgccaggcgggatgcttcacggcagcgtaaggatatcgagacgcgcgtgcgtcagcaactgacccgcgaatacgccaccggccgcttcaggggcgatcatgaagcgctcaagcgtgaggttgagcgtcgtgtgcaggagcgcatgctgctgtcgcgcgggaacaactacacgcgactggccacagtccccatataa

SEQ ID NO: 265584 - DNA, 825 bp, Klebsiella pneumoniae
atggcacgcaagttggaagagttggggcattccccaaagctgatatcaccacaatttgtccgcccgttcgttaaaagcaataaaaacgactttgtcgacgccgaagctatttgtgaagcagcatcgcgtccgtctatgcgttttgtgcagcccagaacggaatctcagcaggcaatgcgggctctgcatcgtgtccgtgaatccctggttcaggataaggtaaaaacaaccaatcaaatgcatgcttttctgctggaatttggcattagcgttccccgaggagctgccgttattagccgactgagtaccattcttgaggataatagtttgcctctttacctcagccagttattgctgaaattacaacagcattatcactatcttgttgagcagattaaagatttggaatcccagttgaaacgaaagttggacgaagatgaggttggacagcgcttgctgagcattccctgcgtcggaacactgacagcgagtactatttcaactgagattggcgacgggaagcagtacgccagcagccgtgactttgcggcggcaacagggcttgtacctcggcagtacagcacgggaggtaggacgacattgctgggaattagtaagcgaggtaataaaaagatccgaactttgttggttcaatgtgccagggtattcatacaaaaactggaacaccagtctggcaaattggccgattgggtcagggatttactgtgccggaaaagcaactttgtcgtcacttgtgctctggcaaacaagctggccagaatagcctgggccctaacggcacgacagcaaacttatgtagcataa

SEQ ID NO: 265585 - DNA, 459 bp, Klebsiella pneumoniae
atgagaaagccagaggtctcaccgctggtcagtattcgcgacggtattcaggtggtggccgaggtgccgcgccatgaaaaggcccggctggaatgggaaatcctccgggatgatgaggtgtttcgccagcaaaggtgtgagcttacaggcctgaccggacgggttatcagccgggggctgttgtatacgccggcggtgatgctggtcggtatcggtattctcgcctggggttccccacaggatgccatccggctgattaatgctcttcgtaatatgcctgctgcggaactggtgcatcagattggttttgtcctgtgccacttcctgcagattagcgtcatatcagttctgattgctgatgttgtagccgggagaggactgccgaatgtatttcgccgcgcgttgctcgacaggctgccggcagagttctgccttatcagaagagggacagaaagatga

SEQ ID NO: 265586 - DNA, 294 bp, Klebsiella pneumoniae
atgaaactcacgcccgaccgtatcacggactacaaagccccgacagcggaggaagccagcgacgcgaagaaagcggcgaagcgcccaccgatcgtcaactatccgggcgaagggttccgggaaatgacaaaggccgagtgggcgaaattacccgctgattataaaggcgtgcggggtgctgcagaaactgaaacacacggcgcttaccgcttccgccggtgcatgacgcacggctgtaggctcgtgaatgtgtatatcacagacatgaaaaccgttgaaattccgaaaaaatga

SEQ ID NO: 265587 - DNA, 339 bp, Klebsiella pneumoniae
atgaatacccgcatcgtccattctaaatcgtccgttctgcgtaccgatggttttgtgcgcaacatccacactcgtaaccctttcgatgttatccgcgccgatgtggtgcttgcgcgcatcgagaaagaagcagggcgctgctgcgggatgcactacgagctgtatcaggcgcgcgtgctgggcgatgcgctggattatctggatgcgctgccgctgaaagaccgcccggcgctcatgggcgcggcggcaaaacgcggttacatcctgacgctggctgaagaagggtacgcgcaggaagcccgcgatgtgctgatgagtgaactggcggaaaacgaatag

SEQ ID NO: 265588 - DNA, 294 bp, Klebsiella pneumoniae
gtgacgcttttaaccggtattaacctgttttttattccgtttcagcctgttccggctctgtggggggctatcctggccgttgcttttgttctgattaatgtcgtggcggataagctgcgcctctggagtggcattgcgtggattatcgttgccggcatcatcataacgctgatgctgaaggggaaagagccgggtgacgaattacgcgggttgatcaccgtttttgctttcctggcttcggcctggtactgcgttgtacagtacagaaaagagcagggcgaatctcagtcctga

SEQ ID NO: 265589 - DNA, 198 bp, Klebsiella pneumoniae; identical to SEQ ID NO: 226861

SEQ ID NO: 265590 - DNA, 1923 bp, Klebsiella pneumoniae; identical to SEQ ID NO: 229162

SEQ ID NO: 265591 - DNA, 336 bp, Klebsiella pneumoniae; identical to SEQ ID NO: 199854

SEQ ID NO: 265592 - DNA, 288 bp, Klebsiella pneumoniae; identical to SEQ ID NO: 229143

SEQ ID NO: 265593 - DNA, 222 bp, Klebsiella pneumoniae; identical to SEQ ID NO: 206988

SEQ ID NO: 265594 - DNA, 219 bp, Klebsiella pneumoniae; identical to SEQ ID NO: 229135

SEQ ID NO: 265595 - DNA, 627 bp, Klebsiella pneumoniae
atgcttctggaagaacgtggcggtgaagtccttcaggtctttaatcaacgtgttgtcggacttcgcccagttcatggagaaatcaaaactgtttttatcccgcttggtggtattggcaaagtaacgggtatcggtgccgttggatataacaaacagttgcaggtacttaaacagagaattgtcactgttaaagctttccttgctgtaacggtgtatctgattgaaggcttcacgtatagcgacaccgcgttttttcaattcaatttgcaccagcggcaggccattgaccagaatggtgacatcgtagcgattggcatgcgtgcctgcttgttcaaactgcttgatgacctgcactttattgcgaaggacgttttttctatccagcagatagatattctgaatacggccatcgtcgaagacgaaatcatgaacataatcatcatgaattttgcgggccttttcgacaacgccatcgctgggcttgtccatccaggtttctacaaagcgatgccattcagcctccaggaactccacattgttaaggctttgcaactgttccctgacattggcgagcatagccttggtgttgttcagggttggcaggtattcatagccctggttaactaa

SEQ ID NO: 265596 - DNA, 483 bp, Klebsiella pneumoniae
atgacaaaactcaaccgcctctacgccagcagcgggccggaggtgatcattgagacgctgcagatcaccattggttctgacgtccattatctgtgccagggctacgaggatattatggcaacgacggagaacggcgataccgtgacgttttcagcctgtacgatagacattgctctgccggcgcgcaatgcggacggcacgcaggacctcaaatttgccttgtgcaatatcgacggcgttgtgtccacggcgatccgcaatgcgctggctaaccgtctgtctgcattgctgacgtaccggcgttacatctccacggatttagcggcccctgcggaagtgccgtatacgctgaaaatcaagtctggttactggactgcgaccgaagggcagattaccgcgggttatatgaatatcctcgataccgcctggccacgttaccgctacacgctacctgtattccccggactgcgttatatcagctaa

SEQ ID NO: 265597 - DNA, 381 bp, Klebsiella pneumoniae; identical to SEQ ID NO: 229371

SEQ ID NO: 265598 - DNA, 612 bp, Klebsiella pneumoniae; identical to SEQ ID NO: 180566

SEQ ID NO: 265599 - DNA, 351 bp, Klebsiella pneumoniae; identical to SEQ ID NO: 180567

SEQ ID NO: 265600 - DNA, 255 bp, Klebsiella pneumoniae
atggagcccggtcaccccgttacgctctgcctgacagttcagcatcagcccgttcttacccggtcggggagcgataccgttgttagccagcgttcctgcatcaatgctgataccggttttgaggttgtcattgaactggccgttgaccaccaccagtccggatgcgccacagtcgccgaagccattcccgtttccggtacacacggcatcggacacgataatctgccgggaaacgtagggttggcctggccctga

SEQ ID NO: 265601 - DNA, 234 bp, Klebsiella pneumoniae
atgctgcgaaatggcggcgataccgcgtttaagctggacggcaatatcacgcagggctcgattcatggctgtaagctgcgttcgcagaatggtgcggcagcgattatcggcgcagggactatcaaccatttcgacatcgccgaaaaccagtacaccgataccaacagcaaccccatcaatctcaccggcacactgactaacgtcacctacggccgcaacccaggactggagtaa

SEQ ID NO: 265602 - DNA, 156 bp, Klebsiella pneumoniae
atgatgatctcatatcaggaacttgttcgcaccttccttaatataatcaacgcaacgcgaatatttaaaaagagggaagtgtatgaaaccttatggcttgtcttattctgtaactggttgcacctgtgcattatgtcgttcccgggggtaccgtaa

SEQ ID NO: 265603 - DNA, 480 bp, Klebsiella pneumoniae
atgaaatactgcgagtgctctactaaaatcactgtgtttttttctgataatttttttagctttttaaatatatcttcaaaatcgatggggttaatttgggatgatatttcatcgataacaatcagaatacctgttgtattagatgttaaaagcctgctgaaaataagtttttgtatttcccccccagaaagactgggaattgaacgagacaaatttaaatatcccaatcccatattatttattgaggacaacactctaattaatactgagtcacctatagtttttttcaggatattacataattcagatataggagatagtaaaaaatcatcaaatgtaaatcctaaaacatcaagttgggccgtttcttggttaattctgcttccattacaaaatgagcaattttcttcctttttatactttgaattgttttggctccgtcctatattcgaattagcaaaagacattacgcctttataa

SEQ ID NO: 265604 - DNA, 192 bp, Klebsiella pneumoniae; identical to SEQ ID NO: 246859

SEQ ID NO: 265605 - DNA, 216 bp, Klebsiella pneumoniae; identical to SEQ ID NO: 133521

SEQ ID NO: 265606 - DNA, 258 bp, Klebsiella pneumoniae
atgacactgtgtttccctaccatacgacagatactgagattgcctatcagcaatggaaaagtcttgtacagtcccgattcactacatgtaatgatgatattaaggaaacggaaaacatatactgtagtgctcactggagtacagctaagtctattgcaaactctaattctcatatctgtttatgggttatttctgcaggtctgggcctacgacacagttctgaccccgcgatcccttatgatgggctttgttgaataa

SEQ ID NO: 265607 - DNA, 183 bp, Klebsiella pneumoniae
atgaatgttacttttgatcaggaaacctataaagagcttatttatgaggcaaacctccagggattagcagcccctgcgctggtagcacggattatccgggaatacatcaaaaatcaaacaggcccatacgaaggggcaaaccaaccagaggatttaaatgggaacagacgccacattaaatga

SEQ ID NO: 265608 - DNA, 183 bp, Klebsiella pneumoniae
atggtgccgataataggagtcgaacctacgaccttcgattccaataacttacttcataagttattgattctacgaaccgaatgcgctcacagtacaatttatacgtacaaaaacacaatacaaacgcccgttaactctagcggggtaaaagatgaaattcaagcatggtcgctacagacctaa

SEQ ID NO: 265609 - DNA, 708 bp, Klebsiella pneumoniae
atgtttcccgtcgcgggcttcgtcttctttctgaagcactccacggagcgacaaatagaacataaacgtaggtcgggtaaggcgttagccgccacccgacacaaaagtggctccgcgcccgcagttcttgcccggcggcgctgcgcttgcgcgggcctacgggactgcgtcgtctttcccgtcgctgactttgtcttcctggagcgcagcccgggactacaaatggtaaggaaatgtaggtcgggtaaggcgttagccgtcacccgaaacaaaagtggctccgcgcccgcagttcttgcccggcggcgctgcgcttgcgcgggcctacgggactgcgtcgtctttcccgtcgctgactttgtcttcctggagcgcagcccgggactacaaatggtaaggaaatgtaggtcgggtaaggcgttagccgtcacccgaaacaaaagtggctccgcgcccgcagttcttgcccggcggcgctgcgcttgcgcgggcctacgggactgcgtcgtgtttcccatcgcgggcttcgtcttcctggagcgctgcccaaggctacaaatggcaaggaaatgtaggtcgggtaaggcgttagccgccacccgacaaaacgacgccgcaggtagcccggataaggcgcaacgcgccgctgtccgggaagagtcaggacgcgacggcttcgccttcgtcgaggcttttctgccggtttga

SEQ ID NO: 265610 - DNA, 816 bp, Klebsiella pneumoniae
atgtttgacaatatatttagcgttgaatccattgtttctttagcaataaccattacggttagctttgctgttacctttaaaattataaagttaaatctaactataaaaaacaaatcgcatactattaaaggtgacgggaatagcatcgagcataacgaattcaacatcgttatgaaagaaacacaaggtgaatttaggaatctaagtttgcttcttggtgggattattattttactgcttccatattgtggctcttttgtcaattatttcttatataatttttcacgtattgctccttatttttgtgttgttggcatcgtttttaccctatgggctagaggcttttctaatcggttttttgattgtttctatattgtgccgacgttatttaatgtttatttcgcatcacatgcagctgaaaattcatattattttatgagccattttgatggcttgtatgatagaattttaagctcttttgtttctattcttttttctgcgggaaagtttgaatactttagtaactcaattttttattttttagaacagatcgctattttttcatccgttatagggtttgtaacggtgtctgtaatgttgttgtatgcaacttttggttatataaaacaacgcagtttctccagtgcccttacattcgctttaaaaaattgcatatggggttttattggttatctgactgcttctgggattgtgtgggggttgttttatggacaaaatcaatatattgcaagtatttttgagcctgcaattcagttgataaccagtttgtttaatattagaactccactttattga

SEQ ID NO: 265611 - DNA, 633 bp, Klebsiella pneumoniae
atggaaaaatatatttactttatatgtaatagagatataaatatcatattgactgatgattattttttttattatggtctaaagcagttaactggactacctctgtttcatattacatttgaaggagtaattaataaatcaatagttattaagcacaaaaaaaacataagagtattggttgactgcaggattttttattcaggaaaatggagagggtacaaaatgttaaggaaatcattaaatatgataagccaatggatatggcttgatgtttcggggggggggcggttttaccctaaagggtgtgattatgacatctatgttaacatgcaaggaaatgtaaaaaaaaatattgaaaaactatattttgcattcttaaagaaaaatgttagccgaattgtaaaccattatccacggctaacaaaaaaagaacaaatagtactgcaatgcttactgaaaagtaaggggggggatgaaataaaaaatcagctaaaaattgaagaaaaaacactatcatgctaccgaagcaagataacaagaaaatttggctgtaaagggtacataaggtttatgtatctttacagtcttaataaagaaatggttgatgaaagatgtctcatgccaggtatttag

SEQ ID NO: 265612 - DNA, 552 bp, Klebsiella pneumoniae
atgagattgtgtgtcgttacagaaaacacttatttctttgccggcatggaatatattttcgcagaggttcaatgctgtctttgcagaatatcgagttgtgatgtatatgcatgcactcctgattcaaacgcaatatttttattggatggtgtgaatcacaaaatttcgataaaagagtatagctatctaaaaaaaataggctcacctgttttttttattctgaacacaaactgtaaagttaattccaccctcatcggaattaacatcattgacgcacacgaggctatcctaattctaaaggatatcatgctttctctatttaatggggggaaacagcttgattataaaccaataaatttgacaaagaaggaatcttttgttcttagattatatatagatgggttatcattaacacagataagtgaaaaaatagccattagaaaaaaaacccttttaactcacacacggaatattcttaataagaccggtgtaaaacaccacaatcaccttaatattttaaaaaacatccttggcatccacttagcttattaa

SEQ ID NO: 265613 - DNA, 381 bp, Klebsiella pneumoniae
atgggaagtttatctaaagcattactcatatcgcttatatacacggcgatagtgattattcttgatgcagttgccatctactatttcaagctgagcgccccgatcattgtcgtagtgacgacgtttttgatgttctgcatattagcgtttgaatacgtggatgcgacaaagcgctcagaacggaactttgctgagcgccgtaagaatcaggcgcagggggcggcattttcgatgatgtgggataccctagattcagacgctaaacaacgtttttaccaaaaagtcgatgaggggcgagaatccagcgagtttaagtccagataccagctattacagaacgaaattcgatattgggacaaagagatagaacggctacggtaa

SEQ ID NO: 265614 - DNA, 249 bp, Klebsiella pneumoniae
atggtcgttggtgtgggtaaagcgccattgagctttaccccgggtctcatggtcggacgggagttacagataaacggagccatgaccgggacggcaattgaattagaaaaaacgcttaatttcagcctgctggtagctgtgcgcgcgcagattgaaacgcgttctctggcacaagcacaagaggcgtatgaaaaaatgcgtagcggaaaggcgtctttccgcatggttctcaccatggggcaccgttga

SEQ ID NO: 265615 - DNA, 951 bp, Klebsiella pneumoniae
atgtacgagtattcactacttgttggtaacgggatcaataatcttaccgaaggatattcttgggatgatgtattgagaagtctgagtaaggaatatgccattaacattaacactctgggtaaaccattcccgctggcatatgaagaaatttactttaagatcctgaaaagagacggtaacaaaaataccgaaagcgatatcaaggattttatttcagaaaaaataagagcaatcatccccaatgatattcacagagcaatggtcggactaaattgcaagaatataatgacaacaaattacgatttggcatttgaaaatgccataatagaacatctcggtccaaaagctttcaacaacgaaggaaaaattaaagagcagcgctataatgtgttcagacatcatatattggataacaaaaaaatctggcatattcatggtgacatcaatgttccgaactctataactcttggctatgagcactatagcggccatctgcaaagcatgagaaattacacgaccacaggaagtcattataaaaagaaaaaaggctttgatcaaaaaccacttaccagtagacttaaaaccctgacagaagaacatagttggatagacagtttcttcctcagaaatgtgtacattattggtctaactctagattttgtggaaatggatctatggtggctattaacattccgcgaaagaaataaatatttgcacaaactagaaatgaacattcacaacgaaatcacctattatttacctgcttgttttcttgatcaatctcagtgcacacaggatgatattaaacacatgacgatcaaaacagaactactcagaagtgttggcgtacacataaatactgattttggcagtgattttagagaatccaatactcatcaaaaagaattctatatgcaggtgatacaggatattcgcaaccgacacagataa

SEQ ID NO: 265616 - DNA, 183 bp, Klebsiella pneumoniae
atgaatatgttctgctccgggtttgagggcgaactggtcaaccgcgagggtgaggcgtggccggaagcggatatcaccctggtggatctggcgatgtttgcccgcgaagggtacgaagcgcaactggcgattgcctatatctcgctgattaaccatatcaacaacctcggcgaacgtgactag

SEQ ID NO: 265617 - DNA, 399 bp, Klebsiella pneumoniae
atgtggcgcaagctggggatctggctatggctggcgacgcagaacctgagcgacttcccggatgatgcgaaaaagctgctcaatatgattgagtggtgggaactgctggtgatgccgcccgaggaggtggagcaggtcagccgcttcaaatccctgacgccggaacagcgccaactcctgctcagcgccaccaaagcgccggggaaatacaccgaaggcgtagtgctttcaccgcgtgtagaagcgctgttccgcgtggtctcccctgccctgtggctggcgctgggaatgacggaaaaacatgagaaggcggagcggatgaggattatgcaggagtttgggtgtagtgagctggaggcggcgatgagggtggcagagaggcgtttttccagtgattga

SEQ ID NO: 265618 - DNA, 1062 bp, Klebsiella pneumoniae
atgatccagaataaagatggctacccacaaggagccttaataagggcggtatgggattgctgtgatgagctttatcagaaactcggtcgagaaccttcccgaaaggagttcaatgatgaaatcggtagacgtgaaccacatcgcattggaataagcacccattcccgccagtggggggaatggatgcgtcaccataatttctctataagagtgactgatgaaccaggaatcattcctgaagaaatgcactatccacagtgtctccgcgtatggtatgcagtgactcaactgaagtccgcttctgccgcaaatattgttaagtggatccgtaacagtaacgcccctcttaaagaaagtgagattcgtattcagcttgatgcattaaccgtcaacagcaattccagatatcgatattttggtagccgaaaaagcacgcgaacggactcaggtcacccatacgacttattatttcgaagcgggacactacgtaatactcgatatgaagagtatgtaccggagctgcatggcgtatgggacgttggcgatgatggcaagcagcctattcagataatcgttccgcgaccagcagatagaatggtggttgaattgcgagatgagttgttcaatgaaccatctgatcatgaggctgatttccgcctcagagcattacgcgaggctgttgttcgcgaaggacaaccagcattcagacgaaagctcattgaggcttatgagggaaaatgcgctataacaggttgttcggtccaagtgttactcgaagctgcacatattactccctatgcaggagcatggcatacccgcgctcagcatgggttattactgaaaactgatatccataccctattcgaccgtggtttgctctggattgacaccgacttgaaaataaggatatctaagcagcttgccgaaacagaatatgcagaattagatggtcgacgtctgagtttaccgaaaaatgaacgagactggccgcttaaaactcatctgtcaaatcatcgacgatactggactgagaatcgtaatgatgaaccaagtccaggctaa

SEQ ID NO: 265619 - DNA, 1296 bp, Klebsiella pneumoniae
atgtcagagattaatccacacgatgctgtacagactttgcctcaagatcgggaaacattgtaccacttggtctggcgtgagcctgcggaacgtatagctgcgcgatatggcattagcactgagttgctggcaaaacggtgcagcgaaatgcggatacccaggccgcttgctggttactggaaagcgctggcgaagggagctgcgcctgcaattcccgccctgcctgctttgaaaaaagggatgatggtaaaggttcgtgagaatggcaacccatcagtaaaatctcctgtgactacggcatcaaaaccagcgtcttcagtaacccggaagcaagcccctgttacagggaatggttatggactgatcaatgatctcaaaacgtatctgccagcttccccggttaccgaggatggctattacaagccagcgaaaaagaagctcctggatctcaatgtttcggatacagggtttaatagcgcaatagagtttctgagtcggttctttgatgctttgggaaaacagggctatcgggtaacgctggatgtcccaggggaaaggatgcatcgtgcggatattgatattaaggaagagccaaaagggggagggtatcgctgggacaatttatggcggccttacacgccaagtattatctgcgtcggggatatgtactttgcgtttaacctggctgaaatgacggagtatgttccggcgaagaaagtcaaaaatcgctatgttcgggacgaacagatggcgcggtggatacggggaaaaaatagtgagccttttcttcacgtctcgaagcatacgctgcctaccgggcgatttttgttacagctttattcgccttattcttccgcaaaatggctggtgcagttccggcagacaaaacagtgtggattgattagccagatcccaaagatgatttcggcattacaggaagctgttccgctaatttcaaagcagttagaagaggccagaaacaaagccgaggagtggcgcattcagagggagcgggaacacgccatatatctggaaaaggagcggatacgtcaggaagaggaagcatacaatgtcagtcgcacagagctgaaatccattatggtgcagtgggcagaagacaaacgtatggagcagtttttccgggaagcagagtctgatgcagtaatgcttgatgagcggcagaaagtacaagttatggaacgtttgctactggccaggcagttcttatcagaggataaggctgttgagcggttgctgaagtggaaaacgccgaaagagaggttaaacaaagggtga

SEQ ID NO: 265620 - DNA, 681 bp, Klebsiella pneumoniae
atgtcgctacttagcccaccgctgcccgatatcgctgaagccggtggcgatgccaatccccgaactgtcgggcaacacagcaaagtccgctttaaaaatgctgatgcgattggcttccctgccagtgatgcgctggcgaacttcttcgcccagtttggctacgtctgcgcgccatcgtcacaaccttttctcccctactttcacagcaccctggatgggctcgcctggcgcagcggcttacctgagatgttctacccggaggcgttaacgccaggactgcacgaagtcagcaaagacggcgatatatggggcaatatctacccacgagccggggcgctcagccagacgcatgactacaaggccgggtcggtcatcgcccaacgcgctgccgatctggtaacgcgcagtggtcagccgcatgtttatattccgctggctgccagttcacacgatggctactggcctccggatccggtcacggaaggcgacagcaataaccaccagtggcagatgctggttccccaaaaatccgcctcctgcacgatcttcccggatggctcctccaccgattcttacactgataaactggcggaggatggcgcatatgtctggacgctgtggcggccctataaatgctgtccgcgtcgtgggcagacctttctcggcagtagcggaggttaa

SEQ ID NO: 265621 - DNA, 1311 bp, Klebsiella pneumoniae
gtgacaaccaacagctatctggaatactttctgacgctgctcggctggctggtcaataacgggctgtggaacgtgatctgcgcgaccggattattcgccctgccgctgctgattaagctgctggcactgtggttacaggccagaagccagggggcggatgaaggcaacaaagctgcgctgtccctgatctggaccgagcacctgatgtacacctcgttgctggtcatcatgttcacctgcgtgccgatgttgaacatcgaccttgataccatcaaatatgacaccacgcgctcaaagcaatgcgggatgtcggtgccgcaacccgccgataccggttatcaaccgattataaactcgctgggcggtaaaaccgccgccgtcccggtctggtggtactttgttcatgtgatcagcaaaggaatcaccagcgcaacggttgccacccttccctgtcagccggatctgcgtcagatccgctttgaggtacaacacacccgaatcaaggatccggcactggctcaggaactgcggaattttgtcgaggagtgttatgccccttcccgcgcccgtctgaaattccgcgccggagagctggacgatgacaccagtgacgatacggcctggctgggatcatcttattttctcaacacggctggttactacgatacagaccatgcgctttcaccacatagcgtctggccgtacagcgcctcacgagacgccggtctggccgataccagcgcgggcggctaccccacctgtaaacagtggtgggccgacgtcacagttgggctgaaggcccgactcctgcaactcccggccccggatatctggacagcgtttaaaaagatcggccagtcacaggctgtatatgaagaggccgtgctgcgctcgctggtcagtgaacgcaatatgcaggtatcacaaaacggacgtgtttatcccggttatggtggcaatgtcgatggcaccgtcgccaatgccgccacccggctggcatccagcgctgggaatatcctcggcagcatagcggcgttcccggcattcgacagcgtgcgccaggcgctgcccatggtgcaggcgctgttgcaaatggcgctggtgatctgtattccgctgataacgctctgttcagcatgggacgttaaggtggtaatgacgctgacgtttgtgcagtttgccctattcttcctcaccttctggtgggaactggcgcggtggcttgatagctggctgctggatgtactctacagcagcgatacccacagtgctggaatctggcctagatccagaatacgcaggatgatatga

SEQ ID NO: 265622 - DNA, 1098 bp, Klebsiella pneumoniae
atgacccttagatacattggctcaaaatctagactaatagatcaaatcactaatcacatagggtcacctaaagataacgctttctttgttgatgccttctgtggaactggtgtcgtagcagaagctgctgcgagcttgggctggaatgtaagaatcaatgataatcttctctcagcagtgatatccgcaagcgctcgtcttaccacccaaaaacaagcatctttcaaaaagcttggtggttatgagaatgccatagctaagcttaatgcggccccccccaaacaaggcttcatctggcgtgagtacagccccgcatcctatgatctctgcggtattgaaagacggtattttacgcaagaaaatgccgcaaaaatcgattccatgagatatcttattactgactggagcaaatcaaactcaatcaatgaaatagaagaacgcctattgattgcagatttatttagtgctcttaatcgggttgccaatattgcaggcaccttcggttgcttcctatcaaagtggacaaatcaatcacaagatacgttgcaccttcgttgccgtgagcttaagaatcatagtgttctggtcgagactaccataggtgacgtcttcaaggtgccgaatacggaatcagatttggtataccttgatccgccatataccaaacgtcagtatgctagttattatcatattcttgaaacggtggcatggggagatgaacctgatgtggtcggcgtttcaggcttaagaccgtggaaagatagagcatcggatttttgttacaagaatagggcacttaaaacactttcgctcttagtgcaaagtttaagatctaaaaaagtgctcctttcatatagcagtgaagggcacatttccatgcaggatatgaagctcgagctttctaaattaggtaaattcacgatgcaccctcttggagcaatcggacgctatcgacctaacaaagctgccagtaaaatgggggctgaagtaaacgaatttttggtcgaagttgaacataccgccacgagccgattgtgtgacgtacaaagtaacaatgctcaatttactccaattcatcttgtagataactataaatga

SEQ ID NO: 265623 - DNA, 2232 bp, Klebsiella pneumoniae
atgagcgcacccaagacagttgagacacagtatctagcttcagcagaagccgccctgagtaaggccattagccgtagtcatttctcaaattgttttgagttacggctccaggttttagaagctgcttcttcaatatttggcggatttgatttagctgcttttcacttggctttcggtacaaaaagtgtaataccttcggaggagctcttagagctttcagctcccgtcgtaaaagccatagaaaaagcgcctatctatccagcattagcattaagtattttagctcgtgaaactttagatgagcaggatcgaaaaagcacaggggcttaccacacagattttcgattagccatgcgactggctgagcttgcttcacctaacttgacctataaaagcaaggctattgatcctgcctgtggcgctggaattttgctatcagcattaacccaagctgtatgcgggggcgataaagccaaagctgcctattggttggaaaacggtgtatgcgcagcagacctctccgctaattcgttgcgtgcagctctattgagtcttgcttcatttacagacagtatatcggtccttaaaactatgcgctcccgctggtactgcggcgacagcttaatggctgatcatcaaatttggtcagatatgtcttctaacggatttgacgcagtcattggcaatccaccatgggaaaaaatcaaactatctcgacatgaattcctgaaatcttctggcacaaaacgtcactatgggtctctcataaaagagctcgatgaagaacgttttgctaaacaacgccatgagattgctaattactctcaacttcttcttaatcgctacccaaacttaggttgtggtgaaccagacctctatattgcatttacagacctcttctttgagctttgcaaaacacaaggggttgtggcagctcttttacctgggggacttattcgttctcaaggtacacaggcaattcgacagaaaattcttgatgcaagtaaccgagttaccttatcgattatcgataaccgcgcccgctttttctctattgattcacgctttaaattcttggctgtctgtctggttaaagcaggattaaataaaagtaaacgtcaagacatcactctcttgcacgaacaaggaactccaacgggcctagaaattactggaactgccactattaatcataattcattagcctctgtacgtcccgatttgagtctgccagaagtccgcagcgtgagcgaatggagattatttttaaaaatcgctgaaagaggaatatcatgggaagagcctggctacggctggacccccaaattctgccgagaggttgacatgaccaaagaacgttccaagttcctaggccacgcagcaatgggaacaattcctttggttgaaggacgtatggtgcaggcacaccgttttggtgtaaagggacatgtatccggtagtggtcgcagcgctctgtggaaaacttatgccgttggttgttcgcatctttcaccgcagttttggattcgcccatcagatattccccgtgccaatcagcaccgagtaaatatgttacgtgctggtttttgcgacattgcgggtcaaacgaatgaacgttctcttatggctgcattgattccagccggagtggcttgcggcaataaggttcccacgatcctttttccggaggatccatcagaagagcgcttactagtgtggttatccattgtaaatagcttcgcgtttgattggatgcttcgccgcgtgctcaccacaacagtgaattacttccttctgcaaagcgtgcctatacctagactcaccaaggatgatttatcgtggaaaaagctagcgaatgccgctcgtgaattgaatatattagataactcaggggctactcgtgcaactcacgagcgtatggcgcagcttcgtgcacaaattgataccgaagtggctttagcctatgggctcgacttgaaagacatggagttgatacttcaagattttccgcttttagatcgaggtcaaataagacttcgcggcgaaagtagatctacgatcacacgagacacagttttatctgtaatggcaagccgtacaggaaacaatcctaaagtttggtcatccagagtcgcggaggcccataccttaggagctatagcgtatataccctcagaagttactcttggtggggaattaataaaacaagaaggagtccgatatcatggctaa

SEQ ID NO: 265624 - DNA, 597 bp, Klebsiella pneumoniae
atggctaatggagcagggcaagttgcccggatattatataaagaaattgtacctggtgaccttaggaaaattcatgcagaatctaacgacgctaacacgggtggtggggctcgtgactttcgctttggttcttaccccaatatagcatcgattgttaaaaaaatgttcccaaaccaagtaattgaaactcgacgccgtaaaggggcaatggttcccactactatttactcaggctatttctattggaacgacgcagctgggaatatttatagagaagtttcctactttgaacccccaacagatgctcggccagcagaaggaagaatagccagagttcatgagcagccatgtctttcgactactctgatgccgagtccggcccccggaaacaaagtttttctgctcctaattcaactattggactccactgtctggccatattatgcagaagaacgaactttacgtactgcaggattatgggacccccaagtagcgcaaagaatgctgaattgtattgatgcaccacgccgggtagatcaggcggttattggtttttttgattttatgaatggtggaatatattgcaatggccgctag

SEQ ID NO: 265625 - DNA, 1149 bp, Klebsiella pneumoniae
atggccgctagtttttctactgattgcttacgtgttttaaaccttcttgctcgttcaaagaatgttttgctcacaggagctccggggacaggtaagtcaaaactgttagctgaggttgctgcagcatttgagtcagcatttggtattacacctatgggtggaacgccaatgcttaacccaattaaaggtataccaattccaccttctgttgggatggtcaaaaaaatccccgcacctaacaagcagaaacgtaaggtctttaggactgtctttcatcagaactctaaatatcgtgatttcatctcaggcatcactcctgctgtcaataaggcagcaggcgctccagattttaccattgtgaaaggcacactatatcgtgccagtgaacacgccaagcaagccaatggggcagccctactgattattgatgaaattaacagggggccagctgtacaggtgttcggtggcgctattgtagcccttgaatcagacaagcgtttatcagttgacggggcgcctcgtacggaaacacaattctttgaaatactcgatcccatctctggcaatgtcatcgaatatgctttaccacatgatctctacattttagcggccatgaaccaagctgatgcttctgtagagcctttggacgtggcattcttacgtcgctgggaacctttacgacttgagccagacgaaagtattttaagagcttattatggtcttggaactaagaatatcgatgccttacctgatttaccaggaagtaaggctgatgtcttggaggcatctgtcagggcatgggtagctataaatgaacaaatatcccttggacgtggccctgaatttcaaattggacatggagttttaatgtctgatatagaacttcaggggttagctctacccgagattcttggcacgctgtgtgttggatgggccaaagtgcgtgctcacgtagaggaggtgttctttggggatccccgaggtattgctgctgtccttaatgctctagatgggcctagttttaatcctcttaaactcacagaaacgacatttgccgacgatttacggttcagacttgagggccctgcgaattttacagagagtaatatctacgcagccctacgaagttttgctaatcctagaggctaa

SEQ ID NO: 265626 - DNA, 1305 bp, Klebsiella pneumoniae
gtgactcatatcaaaacccggctatctctcgttgagtatggttcacctgttgacttaggtcgttttattgctagtaccactggcatagatcgccccaaggcaaacagtatcttaattgaggcgggaaatcgtgtggcttcaaacttaaagcttaactacaatcctattgttgttgatactaagggtataagggctattgattttgcaggcctaatccgcatcaccccatcattagaattagaagtcgcacccaaattccttggactcaatgatgcttactctgcttggcgcgaagatttctttttcttgtccactctttcacggcatggacgtcttttagtttcggagcaattatcagcttccggaagctcgtcacgagatctaccaacattgatagctcgcgcaatcataaacatgtatgaggcgcataagcgtagacctctgcgcagttaccgccgggtgcgtgaaaaagagttttttattgacggagaccctgaccctatggagttactctttccatcagccgatggttttgaacaggagtttattcgctttgatcagcgaaactgttggaacgctaaccttgtcgctgcggccaaagcattgctaccagaagttaataatccctctgctgtgaatgcacttatgcgcctaattggtaatttgtcaccgcaaaatttacctagtcgtagtaaacctatccctgccagacacagggcatggaggccattacatgaactgtctatggatgtgctaggagggcttggactaggttataagcaggggcaagcacgcgcaccaggttacatagtaggaacttggcgagtttgggaggacttgttaaccatagcaactaggcttggttttggaagcgcggcagtagttccacaaagtggctacactcttggtaacaaaactaaaataacaacaggaacaatgagttcactatctgtatatcctgatctttcaattgaatccgatggtgttaggccaaaggtactcctagatgctaaatataaagggcatatagagaaaggtgcgcttcatattagtcatgccgatatttatgaggctctagctttttccaaagcagcaggtagtaaccatataatactggcatatccttctatgccaaatggtaatattcagcctgttggactatgtaacgtttttgaaaaaatagtcatcgataaagtgaacatcgtaggtattcaggttgaaattcgtggcatttcaagacccggagcgattcaaacattatcccgcaatctagtagaaataacaacctctattttaaacttataa

SEQ ID NO: 265627 - DNA, 630 bp, Klebsiella pneumoniae
atgtctaatttcatcgatgctttaaaggccagcttgaaggctggagacggtaattccgtgacggtatctgttcgtatcagtcaggatgaaaatgatattcttcaaaatattgcagcgcatgtcggtacttcccgacaggaagttgtccatcagttgatcaaattgcatgctatccctgcttggctggcattgcaggcatccggccaggagaagagctcgcttatttcagaaagaaaatcagaatacttcattttgaacactaataagacgaatagtaaaagtgatcatgaactcatgataaatgaaggtattgctgctgcttttgaagatgggtacataggaaaaatagacagaatagaaaagggagatatggtttttttgtatgaatcaggtcatggcattattgcctatggtattgcaactggtgattccattgatgaggaagaacctgaaaaatatgggcataagagtatgcgctatcaatatctcaaaaattttcgacgtttgtcatctccggtttcagccaaggaagtcaagcgtatcgttggccgctctattccctttgttcaaacattatcgtcgatttctgatggtgatatactttaccaagatttaaaaaaacggaaatag

SEQ ID NO: 265628 - DNA, 357 bp, Klebsiella pneumoniae
atgccgcatcctgagcagttcacttcgcgtgaggattattacggcacgctgctgcatgaactgacgcacgcaaccggacacgcttcacggctgaatcgggacggcatcactgccggaaagcataccttcggcgatccgatgtacagttttgaagagctggtcgccgaaatgggagcggctttcctgtgtgctcatgttggcatccagtcgaagctacagcatgacagttacatcgcatcgtggctgaaggtgttgcagcgggacaaaaaagcgattttccgcgccagcggattagcgcgtaatgcctgtgaatatctgcttgaacgggcgcagcagccgttagcgctgagcgcatga

SEQ ID NO: 265629 - DNA, 222 bp, Klebsiella pneumoniae
atgcaattgatgaatttacaaaatggcttaaggataacgtttgatcttaacgttatctgcatagccttatctttaataatgcctagacaatctttagcagatgagttggattttaaaaaattaggtcttaacgatacttttaaacaagatattctgaatattgaagggatccggaattattatgtattcgatgaaaaggaaggtgcgttcagagtgtattag

SEQ ID NO: 265630 - DNA, 660 bp, Klebsiella pneumoniae
atggctaatttttttccggcggtgtatgaggtcgatatatttaactgcccatattgcgccgtgtataccaagcatgagtggttaaggctggctgggataagaactgcgacttatacaatgaatgaaaatacagatatgaaaatatcagtgtgtgcgcattgtaaagaattagcttattggtataaaggcgatttgattataccgtctttttctgatgtagaattaccaactccagacatgccggaagactgtaagtccgactacatggaagccagaagcatcattaacctgtctcctaaaggggccgcagcactcctccgcctgtgtctccagaagttaatggttcacttgggtgagccgggagagaacataaacaaagacattaagtctctcgttgagaaaggtcttcctccccgtatccaacaagctgctgacatttgccgtatcgttggtaatcaggccgtgcatcccggagagattagccttgatgatgaccctcagttaacacatggtctctttaagttattgaatatcattgttgatgaccgcatcaccagacctaaagaaatcgaagcgatgttccagagtatgcctgaaggtccacgtcaaggcatcgaaaagcgggacggcaaggctagcggtcagcccttggataattag

SEQ ID NO: 265631 - DNA, 249 bp, Klebsiella pneumoniae
atgctggattttatcaggcccggcaagccaacgcagaatgcctttatcgaacggttcaaccggacatacagaacagaaatactggatttttatctgttcagaacactgaataaagcacgggaaattacagagcgctggctggctgaatataacggcgagcgcccccacgaatccctgaataacctgacgccggaagaataccggctgatggctgaaaccccggaaatctcaaaaagtgcgtggaactaa

SEQ ID NO: 265632 - DNA, 249 bp, Klebsiella pneumoniae
atgcaacagtcaaagcttgctgagtacttggacctgacggatgaagaattgctggatatgggtttagatgaagatcaaatttatccggatacaggcagttcgggcgaaatgatctattcgtattatttcaatgtaccagaagaaacaccaaatgaaatacttaaaagcaaaggatggtccgtaggggatagaattgaaatagacctcaattatttcgatgagcctaatgatgctcctgaagattggtga

SEQ ID NO: 265633 - DNA, 273 bp, Klebsiella pneumoniae
gtgctcgacagaatcaaagcctgctttaccgaaagcattcaaacccaaattgccgcagcggaagcactcccggacgccatctcccgggcggcgatgacgctcgtccagtccctgcttaacggcaacaaaatcctctgttgtggtaatggcacctccgccgccaacgcacagcattttgctgccagcatgattaatcgctttgaaacggaacgccctggtttacctgccattgcactaaataccgataatgtggtctttaaccgccatcgctaa

SEQ ID NO: 265634 - DNA, 477 bp, Klebsiella pneumoniae
gtggcaactgttcaataccctccgttcctgccgcttccacagcgtgccgatcagaacatgacgcaggatacagcctggctgacgacgcagacggcagtcggtccattgataatcacgccgatcactacggaccttaaagcgacatggacgctgcagtggatattcacgcttgcccaggccgagcggtttaagtcgtggctgcgctcgccgacatactgcgaccgcgggcgcgcctggttccagatgcctatcgacctgggtgatacgcagggcgttcagcggcagacgcttcatttcgtcgacatgccggtgcagaccagcaaaaacggcaacattgtcacctggaccgcaacggttatcagcaacggtatcgaggacataaccgaggactatgacgactggatcgtagaggcccagcctggctatggatactggctggattacctgataaccgaagtgatgccgaggtctgactga

SEQ ID NO: 265635 - DNA, 306 bp, Klebsiella pneumoniae
atgtctgattttaacatcgcatcaaagtcaaaagacgagcaggacaaggtccacgtcgacctggcagcgtccggcgtcgcgtacaaagagcgcttgaatatgccggttgttgccgaagcggtaaccagagagcagcctgagctagtacaatttacgcgagtatttcatggagcgcgtccgctactaccgcgagcagagtatccagctaccccgcgcatccgatccgcgctacatcgagatggccagctagaacgagaaaaaatagcgattttctcgcctatgctcattttgcttttatccccgtga

SEQ ID NO: 265636 - DNA, 225 bp, Klebsiella pneumoniae
atgatgaatacccataagcttctggatacatatatgttagttggtaccggtctttctcgcgtcaaatatgagattttttcaggagatgaaggatcatatgcgtttattacgatttatgcatatgagcctcatttccatattaagggccatgattccttaaagttagacgaagctgttgatgtcagatctcagatcgaaggacattttgcagatagctaccagtag

SEQ ID NO: 265637 - DNA, 186 bp, Klebsiella pneumoniae
atgaagacggtgcgcaggtttaataagtttaaagattggttcaggttagcaggggtaatccttattcctgttctgttgataattaacatggcaacgttattaacgagcgatgatgggttcgtaattgttagatctttattgtttatttttgttctcaacattatagccagacgattaatgccataa

SEQ ID NO: 265638 - DNA, 2850 bp, Klebsiella pneumoniae
atgcttgagatatatgccattgctggcggcgactggttacggggcaacctgaacgcgattgcggcgtttatggggaccagcacatggtcgactatagaaaagatgtgtatcgccatctcggtactcattgtggcggggaactgggtaaaaaaacacaacgtaatggaccttattggctgggtcttttccctcaccctggtctctatgctggttgtcattcgtacccctgtgcagatcatcgattacagtaacgttgcgcaggtctatgaagtcgataatgtgcctattggtctggcgattccggcgtcgctgacaacacgggtaggaaacgcgcttatccagagttatgagatggtcttcgctctgccggacagtgtcacgtacagtaaaacggggatgttatttggcagtaatctggtcgcgaaaagtacggattttttgtcacaaaatcctcagattacgacgctgttttccgattacgtacaaaactgtgtgatgggcgatattttcctcaatcataagtactcttttgaggaattactgaattcacctgatccgtataccctgatttttgcaaacccgagtccactgcgtggcgtgtttgacaaaaacaaccagttccagacatgcgaggaggcctcacgggatctgaaatcggctctcgcgctggatactcagacaggcggtaaaacctggaactactatgttcgtcagctgtttggcggcaaacctaatcccgatctgcttttcagccagatgattggcgacagctacaattacttctacagctcgggacagagcgccgggcagattatccgccagaacgtcacgatgaacgccctgcgcagtgggatccagagttatgcggcccgcagcggggacaccgccagtctggtcaatatggctaacacatcatcccttgaaaagcagcggctggcacaggccacaatggggcaccaggcgcttcgcacacttccgctgatgcagaccgttatcatggggataatgattgggatgttcccgatcatggtgatggccgccatgtttaatatgatgactctgcaggtgctaaaggggtatgtgtttgcgcttatctggctgcagacgtggccattactgttcgccatcctgaacagcgcaatggcctactatgcgaagcaaaatggcgtcccagtcgttctctctgagttgtcgcaggttcagctcaaaaactcggatattgcgaccaccgcgggctatattgccgtgatgataccgcctttgtcgtgggggatcgtgaagagcatgggagcagccttctccagtgcctacagccatttttcttcatcggggctcagtgcaacatcgcaggctgcctccggcgtggtggacggcaattactctttcgccaacatgcagatggagaacgtcagcggctacagctggggtaccaacagtacaaccagtttcggacagatgtcacggcagctggcgaatgggggcatgagcacgcagacgagggatggatcgatggtctgggacagtggtggtgcaatgtcaaaactgccggtggatatcaacgtcggtcgtcagatagccagtgcgcagcaacagatggcccgtgaggctgatgtccaggccgaaagcgcgctgcatggctataacagcagcgtgacaagtgcctggaatagtctgcagcaatttggtaccaataaagggaacagcgcctcaacaacgaccggagctgatactaccgagtcttcgcaggactcgatggccagaagcaagatgtggaatgcggttgttgctaatgcgaaagccaacaacatcagtaatgaggagtctttccagcagttgatggatgattcagctaaaagtacgcagggcgttgatttatacggatctggtaagtggagttcaggggatcagctgtttggtaagctaggtaaatggggaactgggttatctgctgaggccggagttaaaggcagtgcgggttggacccacagctcgggtaacacagataatgttggcacttccggtcgtgaatcgaatgacagccgacatgataccagtagtcaggcggccaaagactttaaggaagcatccgattactttaccagccgcaaaaccaccacatcgggcaacattaccgataataatgccagctcgcgtgttgaccagtttgccgcgtcactctccagtgccaaaaacagctatgaccagtatacaagcagccggacacgcagccatgagtacagtgagatggcgtcacgcacagagagcatgactggccagatgaacgaaaacctgactcagcagtttgcgaactttgttcagcatcgtgctccacaggatgccgaggccattctgaccaataccagttctcctgaaattgcggcgcagcgtgaagccctggcgcgtgaattcgtcaaagagcaggtagaacccagagttgatgctgcgtatcaacagggtcgtgaaagcattggacagaatatggctggggtgtcaggtggtggtggcaatggatcggtaatggccgactaccgacaaaattctggtcgtatcgatgctatgacgcaagatgcgggtattaaggataatgtggatcagaaagttggtgggatgattacagagaataaacaacagcagcaggaaacccgcgaaaacatacaacggcaaggcgcagaggtgaaaaatgagaatactgaaatggaaaaggaccataaaacaaaagcaaatgagtttaaaggtgattataatgaaagaaagagtaaggtgaaatctttaccaggagctgactcgcctactgagttagaggcaaaagcggcgaaaattcaaaaggattatcttgatggtaaaaggtaa

SEQ ID NO: 265639 - DNA, 366 bp, Klebsiella pneumoniae; identical to SEQ ID NO: 95550

SEQ ID NO: 265640 - DNA, 366 bp, Klebsiella pneumoniae; identical to SEQ ID NO: 95550

SEQ ID NO: 265641 - DNA, 603 bp, Klebsiella pneumoniae
atgaaaaagcgcattgcctgcctgctttcattcctgctttcattgtatacctgtacagcactcgccaggcatcaacaactaatgcacaatgtatacgatacgcaagaaagccagagcaaagttaacgaaatcctgtccgccgtctcttttcacgggaatgaacttagctatggcgaacgtatcgctgagatatcttcccgtttcctcggaacgccttatcaggcgcatacacttattggatcatctttgatgcaagagaggctggtcactaaccccagtaccgtggattgttttacttttattgattatgttcgctccatggcgcacgccagtagctggcaaacttatgtatctgaacttgttaagacccgttatacaaacgggatgattgattttactggcagaaaacattttttcacggactgggcggtcacatctccgcgaaatgcacaagatgttactcaggacatcagcccgtatactattactgtcaacaaacggctaaaccaaaagaataaaagacaagaatatgttaagggtctcggcattatctcacgccggataagctatataccggcttctgcaatagataaagaggtatga

SEQ ID NO: 265642 - DNA, 432 bp, Klebsiella pneumoniae
atgaaagcgaagacagagccacttgaaaaaaagtggggagaacgaagcatgcttatgggctggacagcgatccctacatcgctgctttttctacaggcggaactatcaattagtcctttgggtttcaatttgttgatgaaccttgtttctcactggtgggaaactacagagcacccttacccttcgcaagaatcgatggcaaaaagaatgggcgtttcgaaacgttctatccagagagaaatcacaactttggtagagcttggcttactcgataaacagccgaataaggccgggagcaagaaatttaaaggtcgaaacacctatgacttaagcaagcttgttcaagtccttaatgaaaaaacacctgataaaataagcagtttaaaacgttataaaaaaaatggagaatcactagattcagagctggagtaa

SEQ ID NO: 265643 - DNA, 924 bp, Klebsiella pneumoniae
gtggcaaagcaaaagttcagaatcaccaactggtccacttacaacaaagctctcatcaaccgtggctccctcactttctggctggatgatgaggcgattcaggcctggtatgagtcggcaacgccttcatcacgaggaaggccccagcgctattctgatctcgccatcaccaccgttctggtgattaaacgcgtattccggctgaccctgcgggctgcgcagggttttattgattccatttttgccctgatgaacgttccgttgcgctgcccggattacaccagtgtcagtaagcgggcaaagtcggttaatgtcagtttcaaaacgtccacccggggtgaaatcgcacacctggtgattgattccaccgggctgaaggtctttggtgaaggcgaatggaaagtcagaaagcacggcaaagagcgccgtcgtatctggcgaaagttgcatcttgctgttgacagcaacacacatgaagttgtctgtgcagacctgtcgctgaataacgtcacggactcagaagccttcccgggccttatccggcagactcacagaaaaatcagggcagccgcggcagacggggcttacgatacacggctttgtcacgatgaaatgcgccgcaaaaaaatcagcgcgcttattcctccccgaaaaggagcaggttactggcccggtgagtacgcagaccgcaaccgtgccgttgctaatcagcggctgagcggaagcaatgcacggtggaaatggacaacggaatataaccgtcgctcgatagcggaaacggcaatgtacagaatgaagcagttgttgggagattcactgacgctgcgtgactacgatggtcaggtagcggaagctatggccatggtgcgtgcgttgaacaggatgacaaaggctgggatgccagaaagcgtgcgtattgcctga

SEQ ID NO: 265644 - DNA, 261 bp, Klebsiella pneumoniae; identical to SEQ ID NO: 236300

SEQ ID NO: 265645 - DNA, 1257 bp, Klebsiella pneumoniae
ttgaataaaaaaataatctctaattcaatttggatgatgtcagagaaaataatttctatcttcggattaatctttgttacttcttttgtagctaagtatgttgggcccactatttttggtgacattgctttggcaatgtcaatttttcagcttgttcaaataatttcgcagctgggatcagatgtattgatctttaaaagaattagtaggaaagtgtcatcaggagttaatttaattaatgttaccctcccattgagggtgtcaatatatttactattttcacttccagtcttattatatagtttcatatataatcatcattccggtttttactatgttttagctgcttttattgcatgccttctgcaggctttagatgtatatgcaatttactatgatgcattacttaagtctaaagttaatacattaatcaatatcgtgggtttgattatttcgcttttagttcgatggcttattgcattcttcgaattgaatccgttgtggttggtaatccccataattcttgcggctttaattcctttttctattagatatatagtttatatgacgaataacgcgtcaacgaaaatttcaccaaaatatcaaaaaaaatataaaatttatcttttaaaagcaggatcgacatttgtattgtcatccgtttcggtagcaatttatactcgattatccctctttattttaggttttttctatagttcttctgcagtaggtcttttctcagtagcatcaactcttgcaacttcgtgggcttttattttaaattcgataattgtatcaaccctcccgtcaattttttctgagaataataaagaacatgctttaaagcaaacagcaaaactgaacataatagttattttgatttctgtaccaattgttcttggtgtatatttactaggtggctattttattgactttttctatggggcgaaatatcatgatgctgttgaacctttaagaatactatgtatttccactgttatagcagctttaggtacagtctctgcgagatttattgcaaaatactctggatatttatatctttcaaaaaaaatgttatcagtggcgatcgctagtttatttttaaatctgctatgtgtttatttcggtggtgtaaaaggtgctgcttttgcgactttaactactgagtttatctcgctaacattattcaattacttttttaaaaacggcttggttttaaaacttcacaaggatacatgtctactaaagttgagataa

SEQ ID NO: 265646 - DNA, 2697 bp, Klebsiella pneumoniae
atgccaacagtgccaactgtacaaggccgccaggttgaaagccgcggcgtgcagaccggaggatttcagaccgtcgctcagccaaatatcagcgatgcgctggtgaatgtgggtagtcaggcgttggatgtattcggacaggctaaacagcaagcggaccttgcactaacccaagatgcgactcaaaggctttatgctgttgggagcggattgatggatgatcctaaggaaggtctgatgactctccaagggaaaaatgccattggtcaggctcctgggtatatccagaaatttgataacgagatgcaaactattgctggcacgctgcctgagtccgcacgaaatgtgttcttaaagcatgctcaccagcagcgagtgcaatttgccactcaagcagagcggcatgaattaggacaacgtaggcagtatgagtccggtcagcaagacggttatttatccttgcaagctcagcaagctatatcaaatccacagttgttcaaccaatcagctttgaatgccagagcctcaattatggcttatggccaagcgcatggacaaagccccgaagagatcgaatcaaactgggttcaatggcgtgagcaagcagcgaaccgggcgagcgaatcttggtatacaccaatgtatcagcaactacttgggccgaatgggagaatcgaggtttccgatacgccaagtgaatcgcagcttttctccgctatgatctggcaggagtccggcgggaatcagtacggtaaagacggctctccactggtatcaccaaaaggtgcagtgggtgtcgcgcaggtgatggagagtactgggcctgaagctgccagcctagctggtatagagtgggatcgtgacaagtggcttaacgatccgcactataacgcaaaacttggccaagcctacttcggcgcacagatgaagaagtacgataataacccagtactggcggtggcggcgtataacgcgggacctggtgcagtggatggctggataaaaaaaattggtgatccgcgtaccggtgccgtcagcaatgaacagttcgccgcagcaattccatatgaggaaactcgtaactatgtggcaaaagtaaccggaggtgcgctggcgatccctggtcaggccacaatggaaaacctcatcaaccagccattctggaatgcgatgagcccacagaacaaatcagccatgatgagcaaagttgcaggtatgtacgacatgcaggccgctgctggtcgcgtagcgctgcagagccagatgcttgatgacatggtaacgcttgaagctgggggctctgttaatccagtcacgccacagaaatgggctgcggtaatgcctttgcaggcttcgcccgctgagcgtatgcaactggagaaaacctatcagcaatatcaacaagccatgagtctgcagcccgtctatcagaccatcgtgaaaggtaattatcagcaaggtcttgcggccgttcagtctatacaaccccagcagggtgagacgaattccaaatataagagcgagctttatgcctctgccctgtcaaaacttcagcaggttcatgatgcccgcgagtctgatcccggaacttggttgcaacaacattccccggtagttcaatcaaccttcctggagtaccagaataatcaggttaccggtgaatatctggcctcacgcattcaggcagaaaaagaccgacttgggatccgaagcaaaagtgtattaccagcgagtgtagttgagggaatatcggcaaaaattgataacagtaatatgaacttttctgacttgaaggggattattgctggctttggccgttacggtgattctgtcgtagcacagttgcagccaaaaaccaaagcggcagtaagggttgctacagcgataaacgaccctaacgctgctgacacgatgtttaccatacgcaatgtgaagactgaagagctgaagaagaacgctggagaacaagccaaaggtgtagacgcggcctggaactctctaatttctgcagcatcgccgacatttagcctgcagcgacaaggtggagcggaaacgcttgctgatatcaatgagcaaggtaagcgcctggcttattactacatggcatcgggggaagatgctcaggctgcaacagaaaaagcctataaaaaaatgatcggcgatcattatacggtcactgatacatggcgaatgcctaacagcctgggactgaaagagaataatgttaccgacggtctgagtaatatcgtcaatagcctcaaggtagatgatattggcagtcggagtatgttttatattccatcaatgacgccagagcagaatgccgcgaataatcttgcgcagatacagaatagcgctgaatgggtgacagacgaaaatgagcagggtgtttatctaacagttaacggcactcctattctggatcagcatggcgctcctatccatgtgagctttgctgatgccagcaagtctggaattgcaaaaccgagtacaaccggcgccgttcttaactggatgggcgaaaaacgaaaggttactccaccctctgagttctatacaccaaatgttaatgccactatgtccgatgccttcagggtgatccagggtcaggatgggatgaacctacagccccaaaaagagccggacacctcgaggaatgtattgcgcgatgctcttaatacacgaggaggccaataa

SEQ ID NO: 265647 - DNA, 546 bp, Klebsiella pneumoniae; identical to SEQ ID NO: 200699

SEQ ID NO: 265648 - DNA, 135 bp, Klebsiella pneumoniae
atgaaaactctacctgcaacaacatcgcaggcggcgacgctatgtctgtcgcccgtgactatctggcaaatgctgcttaaacgtctgctggaacagcactacagtctgatgctaaacggtaagcgtacagcgtga

SEQ ID NO: 265649 - DNA, 666 bp, Klebsiella pneumoniae
atggtacatgtcatgagtttccagttggctatcttttttaagcagcatataacaagaccggatcagtttttttccagtattaatgatgccgcgggcaatttatttgataggatgcctcaaattatcccacttccagatgaggtaccaccagagatacctagagtggcagcaacaaatatgtcgggaacatataactttaacatatcactcaacagattagatttcacattaaatgtatccgattctcaatttaaagagccagaagctttaagtgactttgcactaaaatcaaaactaattgtaaaaaacattcctaacgaaattgagattatccggattggaataatcggcaattatttcgaattagaaagacttccagctatagccttagcaaaaaaatactccaaaaaagatcttggaaacataagtgagtttaatttccgatacaataaaatatcccaggaattcggatatagttttaataatgttttctcgattagcaatgcagagataaacactaagggaatagtctcagatggagtatttatacaaaaagacataaacaacaatccatcaggattatcaataaaaaaagacatggtaatggaaataataactaagaaaatcaaggagttgtcaacaagtggcttagaggggatatcctaa

SEQ ID NO: 265650 - DNA, 273 bp, Klebsiella pneumoniae
ttggctaccgacgctcagataaaagaaatcaatgtactcatcaaaaagtatccggactcatgctctgtctgccacgaggcatatgatgaggatagtgtgacctacaccgtttttgggtatgaccggaaaggtaaaatgcaggtcactacagggtgctgtgccgcgactctggttgaacccgtactgttaggcgtgtgcgggtgttttgacccggacgaacgcgatgaaattatgcagggccacccgatggcaaagcgttttttcactgaatga

SEQ ID NO: 265651 - DNA, 252 bp, Klebsiella pneumoniae
atggttccgcttgaggctatgagttatggcgttcctgtgattgcaagtgatatcgggcctttcaaagaaataatcaagcatggtgtatcaggcatactttttcatactgaacattatgaagagttagccgatattttgctaaatattaataaatatgatcttgatactatgagtactaatgcactttccaatttaaagaaagagtatacagatacaaatatgaatcaaaaagtaattaagatttaccaataa

SEQ ID NO: 265652 - DNA, 1044 bp, Klebsiella pneumoniae
atgcttccgtatttattggtactattcgtttgttgcgcatgggctgggttagaaaaaataaacttaaagcgtaatgctttatgggttccttgctgcatattagtcagtttcgctgctatgagagcatattatattgggaccgatgcaccaatatataccttgccctttagaatcagcaatgttacgcatggatttgattatgatccgaatatagaatatggttatcaatttgttgttaattgtttgcttcagttagttgatgactattcttggtattttgcagtagtagccatgatagtagttttccctgtgctactgttcatgcgtaaatattctacaaactatgttctttcattattcatatatattacctttggtttctatacagctttattcaatcctgttcggcaaatgattgctgtatctatatgtgtattcgctattaaatatttattagaaaaaaaaatagtaaagtattttataataatcgctttagcatccacgtttcatatatcagcatgggttatgttacctatgtattttgtttgtcacgtaaacgttaaattagagataaagttattatccgcttttctgatatcgttaatagggtcttcgtttattattaacattcttgccgaatcaaatgatcggtattctaattatacgagtgcaatgacgaaaaatggcagcggtctatatactgtggcattttatataattattgcatcctttatttatctttttggtggacaggaaaggaaagttaataaagattataattgttttgaacagttattattatgtggcgttatggcactaataccaattgcagcactaagtacggacccttccgggccacaacgaattatcacttatttcattttttatgtagtagttttaattccaattattttgaaaaggttcaataatgcattcatctatctaatttttggtattttaagtgttatatatttcatgttgacaacttttttatttggttcaatatatccatatgaactaaatgaagtatttagaattttttga

SEQ ID NO: 265653 - DNA, 1920 bp, Klebsiella pneumoniae; identical to SEQ ID NO: 138574

SEQ ID NO: 265654 - DNA, 720 bp, Klebsiella pneumoniae; identical to SEQ ID NO: 230858

SEQ ID NO: 265655 - DNA, 195 bp, Klebsiella pneumoniae
atgagcgatgcgttttttgaagagttaacggatggtgacgccattcccgaccagtcaccatttgatatctggtatgaggaattatgtgcttatgcacttgatcatggtggacgcgccccttacaaaatggcctggctggagtttttcgagcagggactgacggtagaggttgcgtttgacaaattttatgaataa

SEQ ID NO: 265656 - DNA, 1185 bp, Klebsiella pneumoniae
atgtctattgatgctgtttttgctcagtttttcgatgatattcccgaccctcgccagcatgccaagatttattatcctttctacgatgtcctgtttctcaccgtctgcgcagtgataggtggcgcagacgggtgggaagatattgaagatttcggtgaggttcatcttccttggtttcaatccaaggggctgtttaaaaatggtattcctgtccatgacaccatcgccaggatcatctccggtatcaaaccagagccgtttcaggccgcgttcgtacgttggactcaagccatcaaccagcacaccgaaggcgccttggtcgctatcgatggcaaaaccctgcgcagttcctataaccgtgaagatcgaacgtcgaccattcacatggtaagcgcctatgccgccgctaataaactggtgctcggacagataaaaaccgacgccaagtccaatgaaatcaccgccattcccgacttgttggcgttgctcgacatcaaaggctgcctggtatccatcgatgcgatggggtgccaaaccgagatcgccgagaccatcctccagcaaagtggcgattacttgttagccgtcaaaggcaaccagcccaagttgttcgaggcggtccggcaagccctggccccgctggcggctaccccattatgcgcagcaacgatgactcttgataaggctcatgggcgcatcgatggtcgtgagtaccatatcatggcggcgggtgagttagccgcccagtttcctcattgggaacagttgcgcagtattggcgtggccatctcttatcgcattgaaaaaagggaaaaaatcactattgaacagcgttattacatcagttccaaagcactgacgcgggatgagtttgcacgatcggtgcgtgggcactgggccatcgaaaatagcctgcactgggtgctggacgtcacgatgggcgaggacgattgcccaatttatcgcggtgatgccgcagagatccttgcgtgcatccggcacatggggctgaacatgctcagggctgaaacttcacgcaaagcgagcatcagacggaagcaaaagattgcaggaatgagcagtgaatacctggaaaaggtactcaatgggggggtaagcgggaaccccagaaaattccgccattccgcattgtggaattttttgggggggtggtccgcggcatga

SEQ ID NO: 265657 - DNA, 360 bp, Klebsiella pneumoniae
atgaacaaaaaaatattgatactgaccgccctattaatgtctcctgttgctgtttttgcggttgacaaaaccatgccgatgggcgatcaccattccatgtctccagcttctcaagagttgatgtctggtatgaaaagtatgcataacgacatgatggcaggagtgatgtcctctgatccagatgttgcctttgcaaaagggatgattgcccaccatcaaggtgccattcaaatgtctgaaacgcagcttaaatttggtaaggatcctgaaatgcgaaagctggcagaagatattatcaaagcccagcaaccagaaatcgaccagatgcaaaaatgggttaaaaaccatgaaaagccatag

SEQ ID NO: 265658 - DNA, 621 bp, Klebsiella pneumoniae
atgttcgtttttggttacctccgggcatcaacatcagagcaggatgccagccgggcaaaaaatgcactgaaggcatttgcaaaccaacatggccaccgtattgctggctggtatatcgataatgtctccggtacgacaatgaaccgccctgaactgatcaggcttcttggtgatgcggaacctggtgatgtgatcctcattgaacaggtcgacaggcttactcgcctcgatgatgctggctgggagacactaagaaagcaaattaccgacaagcagctggccatcgtcagtcttgatctaccgaccagccatctggcgctatccagcacagtaagtgatgactttacccgaagcatgctgaaggccgtaaatggaatgctgctggatatgctggccgctattgcccgaaaagattacgaagatcgtcgacgtcgtcagtcagagggaatcagtaaggcgaaagctgaagggaaataccggggccgggtggctgatgcgcagaaacatgaactgatacgtaccctgcgcctggtcaacggaaaatcgctgcgcgaaacagctcgcctggctggcgtttctaaaatgacagtgattcgggtctgctccagcgctgataaataa

SEQ ID NO: 265659 - DNA, 369 bp, Klebsiella pneumoniae
atgatcccgggcattgctccggccgcaaaacaggaaggacagtatgtggctaaactgatccagtcccgtttaaaggatgaaaaacctgtcctgaaacctttccggtaccggcatcaggggaacctggcgaccatcggtcgcggactggctgtggttgatatgggacggttaaaactccggggagccatggcgtggtggttctggaaaattatccacctgtattttttgatcggaaccagaaaccggttgagtgtcgctatcagctggatctggaaccacagtatcggatacaggggagcccgcattatcacgggaggtaaatcacctgatccggataagagtgcggtccattcccgctcagaagagtga

SEQ ID NO: 265660 - DNA, 1092 bp, Klebsiella pneumoniae
atgagtaatgtattttatatgccgcctgtaaccctaatgggacttaatgctattcgtcttttaggggatgaacttgtttcaagggagttaaaaaaagcgctgatcgtcactgaccgtgttttggctgacacgggactggttaacaaactgacagatgagcttgaggcgcataaaattagttatgcaatatttgatggtgttcaacctaatccaacagagaaaaatattgatgacggtttagccttgcttgcaaaaagtaatgctgattttgtcatttcctttggtggggggtcttctcacgatacagctaaaggtattgcattggtggccactaatggtgggcatattcgggattactcgaaaggtgtgcatctgtccaaaaaaccacaattaccattagttactgtaaatacgacagcgggtacggcatcggaaatgaccgtatttgcaatcgtcactaaccaggaagatgaaactaaatacccggtagtggataagcactttacgcctatcattgcggttaacgattctgaacttatggtcgcaatgcctgcgttccttacggcaactacaggtatggatgccttaactcatgcaattgaagcgtatgtatcaacagcagctacgcctgttactgatgcttgtgctatcaaagcaattgaaattattgttaataatcttaaagacgttgtagatgatggccaaaaccgcgaagcacgtgatgccatgcaatatggtgaatatctggctggaatggcattttcaaacgcgtctcttggttatgtccattcaatggctcaccagttaggtggcgtttataatctgtctcacggtttgtgtaatgcgatcctgctgggtgaagtatcccgatttaatgcgaaaaaggttcccgatcgttttgttgaaatcgcccgggcaatggggattgatgtctcaacaatgactcaggagcaggccattaattctgctatcgaagcaattgagatgttgtcgcaaaaagtcggtacgaatcaacgcctggctgatcttggtgtaacggaggataaacttgcatttatggcggctttgttgaataaatcagatttcgggtaa

SEQ ID NO: 265661 - DNA, 264 bp, Klebsiella pneumoniae; identical to SEQ ID NO: 132993

SEQ ID NO: 265662 - DNA, 1038 bp, Klebsiella pneumoniae
atgagccagcaactgcgcaagcggtctgacattgagaaaaaggttgcggccggagaggctgttaaggaacagccgcgtcagctaatcagggacactatcaccgggaaaatcatttctaacgagcgggtgcctgaaacgctcccggcctgcctgatagcgatgcagtcgaatacgcttgtctacaacgatgtagatgtggaggcctttcagcgggaagtccgtcagcaggtatcacagatactggacgccatcagggatgagcgatttgaaaatgccggcatagcctatcagcagtttatagaccagtatgatgcgtgtttcgaaacgccttccgtggatgtacttggtgaggtgaaacgacgtggtatagatctttatgcggtgctggaacatcagggaacccgtcttacggcagaaatgtgcgttggaggtagtcatgatcgagcgtctgaacgcagctttaatgccgtcaccgaggctcatatcaatctgttgttctatatgctcacgctgaatctggcgatccataacaagattgataatgtccagaaacagctacgtactaaactcggttttctggaagagcggctcagaacgttgcttaacgagtacatctatgcaaatcaacttggccggatcgttctggacgggttacatgcaagcgagaccctttatggctggattttgcttgaaaaaaatgacctggatgctgcccggttgatttataagaatgatttaaagctgaataacgaaatgaagtttgccgagcttcatgcagaggtgatgagcatctaccaaaagagatacacatctgaaacgcctgaagatcttcggaatagagctttctcaaggtgtgggttatccgaagacagagcacaattcgcttttaagctgtgttattaccttcaccagacaggacagattaggaagtatatcgatgagctgacgctgggtgctgataacaacgacacgagtgacgctaccgtggatgtccggtccctcctggttccctctgcatccgggctcgcaactcaatga

SEQ ID NO: 265663 - DNA, 291 bp, Klebsiella pneumoniae
atgaaagacgaaatagcacgacagatcgccggacttattgagctgaacaaatttaatggctatacgctggtcagcggagaagactggcagaagcctacagtcaccgaaatcctgctggtccggggatttatccccctgactgacaaccagctggctaaccgactggatgtggacgaacgcaccatccgtaagtggaaatcaggagagaccagtatggtgtacaccacctggtgctgcctgtgctggctggctgggctggggatgccgctcgataacattatcagtggctga

SEQ ID NO: 265664 - DNA, 381 bp, Klebsiella pneumoniae
atgcaaacgctaaagagcagacttgaaacggtagtacattgttttgaaaatgattttcgcggatttaaaatcagaaacagtaagaccgatgccatgaaatggctaatgcgattcaatttgccgtactctgtccgagaacatgaacccggtaaatatctgcttcttaatcgtgaatataaacctctgggatttatggcgcaggccggtggccacggcgcggaatacgctgattacggtgatcatcttcttgcaggtgctccgggattactcgatagcgatatttatttttataacgacggttcaaccccgtgggaaagcgctaaaaactggactgcataccagaaggcagtcctccagttccttgaaaaacttccaggctga

SEQ ID NO: 265665 - DNA, 636 bp, Klebsiella pneumoniae; identical to SEQ ID NO: 104002

SEQ ID NO: 265666 - DNA, 267 bp, Klebsiella pneumoniae; identical to SEQ ID NO: 215002

SEQ ID NO: 265667 - DNA, 195 bp, Klebsiella pneumoniae; identical to SEQ ID NO: 215000

SEQ ID NO: 265668 - DNA, 951 bp, Klebsiella pneumoniae; identical to SEQ ID NO: 214800

SEQ ID NO: 265669 - DNA, 591 bp, Klebsiella pneumoniae; identical to SEQ ID NO: 214996

SEQ ID NO: 265670 - DNA, 351 bp, Klebsiella pneumoniae; identical to SEQ ID NO: 146911

SEQ ID NO: 265671 - DNA, 132 bp, Klebsiella pneumoniae
atgataatttgtagtggtgagcttctgggagtacaaaacaaagtgctcaaaattgtcgggctcatggcgtttaacggtattaatttcgcttataataatctttctataaggaaggtgcgaacaagttcctga

SEQ ID NO: 265672 - DNA, 1851 bp, Klebsiella pneumoniae; identical to SEQ ID NO: 221213

SEQ ID NO: 265673 - DNA, 1716 bp, Klebsiella pneumoniae; identical to SEQ ID NO: 210993

SEQ ID NO: 265674 - DNA, 708 bp, Klebsiella pneumoniae; identical to SEQ ID NO: 210994

SEQ ID NO: 265675 - DNA, 1698 bp, Klebsiella pneumoniae; identical to SEQ ID NO: 210995

SEQ ID NO: 265676 - DNA, 141 bp, Klebsiella pneumoniae; identical to SEQ ID NO: 136841

SEQ ID NO: 265677 - DNA, 852 bp, Klebsiella pneumoniae; identical to SEQ ID NO: 210997

SEQ ID NO: 265678 - DNA, 894 bp, Klebsiella pneumoniae; identical to SEQ ID NO: 210998

SEQ ID NO: 265679 - DNA, 246 bp, Klebsiella pneumoniae; identical to SEQ ID NO: 136918

SEQ ID NO: 265680 - DNA, 291 bp, Klebsiella pneumoniae
ttgggaagaaatgacctgcttattcgcaccttccctaaatcgctggctaaacaggtggcgaaacgaggcattcgcgtaaacgccgtagcgcctggcccttactggacggtgctgcaatccagcggcggccagccggacgagaaggtgaaacagtttggcaaagacacgccgatggggcgcccggggcaaccggtagagatcgccccgctgtatgtcaccctggcatccgatgcctgctcatatacctccggacaggtgtggtgttctgacggcggggatggtgtggtctaa

SEQ ID NO: 265681 - DNA, 288 bp, Klebsiella pneumoniae
atgagcgccagaaacttggcacaaacggcagaaaagagggggaaagagtgggtgaagaaagtcccgggcgagacgctgctgcgccatggcccgggcgttcccggcagaagggaattaaatctcggtaatggtcgtcgactgcggcagacgcgacttcggcagggtagcgttgaaatcttctacgctatggtggccgacccggaccaccaccaggctggtgtagccctgggctttcaggtcaaattcctcatcgaggatcgcaaaatcgaccccttcactggctggtga

SEQ ID NO: 265682 - DNA, 753 bp, Klebsiella pneumoniae; identical to SEQ ID NO: 221220

SEQ ID NO: 265683 - DNA, 861 bp, Klebsiella pneumoniae; identical to SEQ ID NO: 210674

SEQ ID NO: 265684 - DNA, 861 bp, Klebsiella pneumoniae
atgaaaatgtttggtataaaaaagggattttcactattggagctgatccttgctctaggcatcggcagtgcaatagctttaataaaattccaagatatgaaagttgaacaagaggatttagttgctaaaacagcaggggaacaaattaaacaattaggtgaggcagttaatggttatatcagtatgagatatgataagctatctacactgacatcaagcagtaatcaaagtagcgatccgggaccaagaacctgtaattctacaggctgtgaaattgattaccatactcttgttaatgagggattactacctgcatcatataacgggaataacatatataagtctccctataaaattatacttaaacgtgaaggaaccgcacctaactatgttattaacggtttgattacaacatcatcagcatggatcgaaggcggacacatccgttatgatcttcttggtaaagcaatgcaagttgctggtgttgacagtggtatgacaaaggatgcgacctctgttgctggattccaaagccagtggaaggaacaaaacaccgcattcaacaatattacaagagatggattacttgccttcagagtcgggtataacagctcgttatatgctatctatcttcgtcgtgatggaacattacctatgacgggtaatctaaacatgggtgggaacgatataaataatgttaaaaatattactgcatcgggaacaggtaatttcggtggtaatattactacggcaggaagtgtcactgccactggtcaggttactgctcataatgggtatggtgatactattacattcggtggcgatggcgctggcggatgtgaaagaggcccggctgtttaa

SEQ ID NO: 265685 - DNA, 228 bp, Klebsiella pneumoniae; identical to SEQ ID NO: 215004

SEQ ID NO: 265686 - DNA, 267 bp, Klebsiella pneumoniae
atgcacaccgctttttcttccccgtcttcagcccctgccgcgccgctgatgccggtttctgatgccgttcaggagcgttttattcgcctgcccgaagtgatgcatctgtgcgggttatcccgctccacgatttacgacctcatcagccgggaggctttcccgaaacaaatctccctcggcgggaaaaacgtggcgtgggcgcagtcggaaatcaccgggtggatggccgaccgtatcgccgaacgcaaccggggctatgacgcatga

SEQ ID NO: 265687 - DNA, 777 bp, Klebsiella pneumoniae
atgacgccagttttacaaaaacaactagatgatctgcttgcagttctcacgcaacacattgattcgggtgttaatttagaccctttcaccttgcgtggcatagtagagaaagctgaaaaaatacctgatgaagccataaagttaatgacccttggtcttgcttatggcgcagcaggaaaacacactgaggcgactgatttttttaaagaagcagtcaagcatggtggtagcgacattgccgcaagaaattatctatcatatctgagtcacactgggcagtacgtccagtacagggaagaagctgtaaggttagcaagaatctttacaagttttccgttgtacattcgagcaagaaatgcagcttatgcagatggcgatggtgagctatccttgttttttgccagaagtgctttttccatgatgggtgatgaccaaaggcgagaatctatggaaagagatgtaaagaaaaaagatgcagagctgaatcttttcatagaaacaacagctttggaaacagcccagataacggccctcactcgcgaggttgttgatgttgccagacagtttaaagtactagctgtatcgcatgattattactctaattccgatggtgatgctgctattatctgtgacatcctttgccttgacgaggatgtgatttcagatatggatctggagattgcaaccagactggcaatgaacgatatattcgctgataaaaatattacagcatggtttcgtgggcgtgataaatcagaggtgccagcaacagtatga

SEQ ID NO: 265688 - DNA, 252 bp, Klebsiella pneumoniae
atgaccggcgccaagtggggacacatggcgcacaaagttaaaaacactcggatcaaagatttgtatgcaataacgttgctgattttaataattgtgcaagttgttgtagtgaatgcggtatttatctgtgtggggcttgggtttctggatctatctgatgaggtcctgaagattttcgctggatgctcgatgccccatatctgtggtcttgtctactgcgtcgtcaattctgttttccgagcaaaaaaatga

SEQ ID NO: 265689 - DNA, 207 bp, Klebsiella pneumoniae
atggagcgcttcttcaggagtctgaagaacgaatgggtgccggcgacgggctatgtaagcttcagcgatgcagctcatgcaataacggactatatcgttggatattacagcgtactaagaccgcacgaatataatggtgggttaccgccaaacgaatcagaaaaccgatactggaaaaactctaacgcggtggccagtttttgttga

SEQ ID NO: 265690 - DNA, 738 bp, Klebsiella pneumoniae; identical to SEQ ID NO: 16657

SEQ ID NO: 265691 - DNA, 1422 bp, Klebsiella pneumoniae
atggcatctttgccttcggatcatgatgcaagtggagatcataaacccactgtggatgaaatttttgcaccaaagcaacatgcgaatgctcttgatccgtatacgacgattgttgtgggagcgagggggactggaaaaagcttttgggctggagttctttctcaagaagatacacttaaagtggcagcagaatcatatccagatttgggactcgataaaatagttgttgctgaaggttataatggctttataagttctaggatattagaacaagtaataccttttgggcaagaatcttctatggcagtttcattttggcaagcagcaatagtgaaagctgctgaagaatgtttggcgcccaacaaaactaagaaaaaaatgtcagactatattaaaaaatattctgatcctgaggatttagatatttatctaaataagctagatgataaattacaagccaaaaatataaaattagttatcacattcgatgctttagataaattatcaaaagaatggagtcgttcaacgctaattctcgatgctttatttgaagttgtttgggatttacgcattcgaaaagccatcaaagcgaaaatattcattcgcccagagcaactaaatgatgagaatttaaaatttgtcgaaatgccgaaacttaggagttctcgtgttgaattagaatggacacaactagaactatatggtttgctgttttcgaggttagcttatacatatgataattgcgattttcatgaattatgcaaatccatcgggtctccattcattaaaatgccctataaacaaagaacaaattgggaagttttaagtaataaagatttccagaaaaagactatgaccgcccttgccggtccatatatgggtgcaaactttaaaaaaggaggtacatatgattggccatataaacatttggctgatgcaaacgggaatgttactccaagaagttttatcaagcttttttctgaagcagctaaacatacaccagaaccgcagaataaagttatatcaccggaagggattcgccatggtttgcgtgaagcatcaaaagtgcgcgtagatcaattaggcattgagtatgtatgggttaagcgagcattggccccactagctggtcttcgggttccttgcgctgctgaagaaatatacacaagatggaaggatagtaatacaattaaagtcatcatggatgcatctaaagatcctagtactgggtttttaccaccctatccattcaaaacacaaaaaattaaatatcctgaggatactgcggctttagctgaatctatggtcaatataggattaatagaacataggcaagatggacgaatcgatatcccagatctttttcgagtagctgcattgatgttaaagaaaggtggtataactcctaaagctaagagataa

SEQ ID NO: 265692 - DNA, 897 bp, Klebsiella pneumoniae
atgaatgaaatatattacgatgatgcattggcatgctttgttagtatagttaatgatgtttttggaaaagatgtattggagagaaatgtttttcttcgtgatgcacaaggaaaattaacctttgtttaccaaaatgaagtattgcaattcaataaaataaagaggttcattaaggaatcatcaagtaaattatcaccatatttagatcgtgattacatcatcgcaacacctgatgatttatttgatgatagtttgacgcaaaaagaaaaatggaggaagataaaagtctcatattctggattgtcattcaatatcaatttaattgaacgccgaattgttggttcagattggttgtcatctgttaataatattaattctaaaccggcaaagatcgtgttctcaagtataaaaggtggagtgggccgtactacagctatttgcattattgccgcacatttttctcgtgagggcaagagagtacttaccattgatatggatctggaagctccaggtctagggtcaatgctaataaaacctgatgtaatgccaaagtttggtttactagattattttgtggagagtagtttagataacgttgatgataaattcatgatagatctcgtaggatcatcgtgggtatctgatggtaaagggcgcgttgacgttattcctgcacttggaagtgtatctttacaacatcctgaaaatgtgttgggtaaaatatcccgagcttacctaagtgaatctgatgtgatgaatcaatcattacttatgacaaatgtccaaaaattaatggactattactcacaaattaatcgttatgatataattttgattgacgctcggtcaggactccatgaaacaaccgcatcattgcttgttggtctaaataactga

SEQ ID NO: 265693 - DNA, 498 bp, Klebsiella pneumoniae
atggtgcgccactttatggtgtttcttcgcagcctgggctttttgctcagtagccggtttagcggccgctttatggtgtttcttcgcagcctgcgctttttgctcggctgccggtttagcggccactttatggtgtttcttcgcagcctgggctttctgctcggctgccggtttagcggccgctttatgatgtttcttcgcagcctgggctttttgctcagtagccggtttagcggccgctttatggtgtttcttcgcagcctgcgctttttgctcggctgccggtttagcggccactttatggtgtttcttcgcagcctgggctttctgctcggctgccggtttagcggccgctttatgatgtttcttcgcagcctgggctttttgctcagtagccggtttagcggccgctttatgatgtttcttatggtgaacagtggtatggctggctgctgcactcggggtggtgctcgccgcatcggcagcgaaagcaactga

SEQ ID NO: 265694 - DNA, 2226 bp, Klebsiella pneumoniae
atgtctgatatcgatgtaatgagactggatcagtctgtcacccgtccggaacaggatcgctatggctttcgctatgttgctgcacagctggcacagtcaatacaggctatcggtcgtgaaggaagcgccgttatcggcattgagggagtatggggctcgggaaaaacgagtctgcttaacctattgcacacggaactggataaacagaaagaagacaacacctttgttctgagtatatccccctggcttgacggcagcggaaccagtctggtcgaatcgctgttgatacctgtggcaggtattattgccgctgaggaagagcgtcttctttcgcctgaagaccgggaaagcctcgaaaagaaaaaagtacttacccggacagctcggaccctgatggaatatacaagagcgactgcccgccatcttgcccccctagctcagactgcagcgatgatcccgggaatacctgatgccagcggtgcgctggatgcgctgtcagagtctcaatggctaaaagaaaaagaaaaaactgctacggagatgcgtactgaaattgcagaaaagattgtcggaatggatttaagctttattattcttcttgatgatctggacagactggagcctgcgcaggctgtggaggtcgtccgcttggtcaaatccgtcgctgattttccccgcttccgctacatactttgttatgacaaatctgtacttgctctggccatcaaaaaaggtctaggcgtggaggatggcgaactttatctgcagaaaattgtgcaaatttcgtttagcctgccgagaccggaatctttcgacctgcgtcgtgaatttttttcgggagttgtcggattatacgaaacggttaacggcgagcttccggacgaagaatttataaatgacttgaatcgcgtgactgatatctacggtgctgcgctgaaaacaccccgtgaagttcatctgtccctgaataatctgcggttcagatacagcggaatacgtgattacgtctatttaccggatctgagctttttgcaattgattcgcaccaccaatcccggattgtatgactggacagaagaatatcttacagagcgggcaattgtggaatctggtgacggcagtgtaagtgaggaagaacaaaaattgctgacacaaaatttagttgagtgtctgtcccgtttccgagctgcagaagcaaaatctgtaagttccctgaaaaactgggtgccgggaatttcagggtaccaggctaatatacagaagctatttgctcagacaagtgatgaagataaagcgttgatgacagcaaatcggcgtctcgggagcacggcatactggcgttattactttgcattttcttcgcctcagaacgtactgccaccagcgtattttgatgagctgttccgtaaaagcagtaatcctgaagaatatccggcgatggcccgtgaactcttggctaggatcaacagcaatggtgtgtcctcacgcacctggtttgaacatattctaagtcagttgacacggccgatgataaacgagcgtgcagccttcgaatgtcatggtctgctgacatttttctttaatgctggcgatgagatatatgaacgttacaggcagagaaatcgctggttttcacggtatgatcttgatgtaaacagcgtggctgatcgtcttctgaaaaggatgttggataatgaccggacgaaaacgatggaaatcctgctttcattgacgatgaaaggaaccgcttgggtctggattgcgaattatatccgcgatttgctatggcagaacgggttggccggtgaccgagctgagccagagaacgagcgtgtactgaacgatggagaactgaactgtattcgtcaacatttctgcgaacgtttaaacaagggtgaactgaaatcactgcttgtgcaggatggcgatctgggggactttgtctgggcctggcaggatattgcaggcccagaatacgttattgcatggattactcaacatattgacagtgataaagtttttctgatgttgttactgagcctgcgatctcatattatttccagtgcaaccgggcactatctgacactaaaaataagggatatagctcacctgtttggaggtgaggaaatgctcttggaaaggttagagcgtattgagtccgaggataattttccagatcaagtaaaagacgttagggccgccatcgccctcagtaagtcattctga

SEQ ID NO: 265695 - DNA, 180 bp, Klebsiella pneumoniae
atgatcctttcctcgcccatacacgtcatgccagagggattcatcggtatcgacggaggggaaatttttttgttggcagaggcgttcgagacgctgatccgtgaattcactgcggggtgcgctgaaggcacactggcggaggccctcgccggattgcactgtatgtatgaggatttgtga

SEQ ID NO: 265696 - DNA, 813 bp, Klebsiella pneumoniae
atgaatattgaattaacaaccttggaagacattgtaaatccagaaattattaaagcaattgactccttaaaagaagaaaaattaaaagctatcaaatatggtgatgaagaaaaagccaatgagtgctggagagtacttaaagcatttgatctaaatgtgctttatattcgagcattcaataatataaaaaataataaatatagagatgcatggaatgaactcgaacagtgtgaaataaattatgaatttcttaatgaaaattcaacggaaacttttttaattaatacaagatctaagttcataatagacaaggttcttaaatggcagtcactttatccgtattgcctatttattagtcccggttttaaagttggttactatacctgcagtatctgtgatcacagagttagaccaagatcgaggtgcggacataaaaaaggtaaaatctataacggtgaactatgtcttcatatagctcatgacatggagttccttgaggtttcaattgtatcaacacctgctcaaaagtattcagtaatgcatgatgatgcaacccttgactttacactgatacaatatatatcaaatattttagaaaatgcattcgaggagtgggatttaaatagaacaactatgagttttccaaaagagcgttttgcaaatgtgagaaacgaggatgattgcccttgtaaaagtggcagagagttccatagttgctgtagtgataaaaaagaaattgaaattccacatattgatttcatactttcaaaagctatcccttctgataaagaagaaattagttttccgtattag

SEQ ID NO: 265697 - DNA, 489 bp, Klebsiella pneumoniae
atgaaaattttcaatgaccgtgaaaagtttgaaatcaaagagtcaatatttacttttgaatccttaattgcggacgcaccaccagaaatatcatcaatgctcaaaggaaaaaacgttattattttaccatctcatgggtatgaagacgtttattacacaggcacattagatacactagattatcttaatgaaaataacattagtgctgaagtatatgctaccgacgacgaatataaagaattggggttgcatgcggcagatatatggcttggtacctttattattaaaaattttgtaatacctatattctgtagtgtagtttcagcatatatttatgataaaataaaagcaaagaaaaatgataaaatttcgctaacattcatcgttgaaaagaaagatggaaagactgtttcaattgagtacaatggaaaaatagaaaacctcaatgaagttctgaatgctgttaaaggatttagtaatgaatattga

SEQ ID NO: 265698 - DNA, 282 bp, Klebsiella pneumoniae
atgatacgcgacaaaaaggccgaagaactggaggctaaagggttgttccgcagggcggcggcgcggtggcttgacgttatggcggcgtgtaccgaggatgctgacagggagcaggcgaagcggaaccgtgaaacgtgtctggataacgtgaagcgcccgcccgtgaaggctgaggactttggcgacctgcataaagctgttaccgaaacgcagcaccgcatggggatagcgcaaccgagcggtaacgcctttcggttaaatggcggcaagaggcaacggtag

SEQ ID NO: 265699 - DNA, 1524 bp, Klebsiella pneumoniae
atggcaaaagagaaaaaacgtggcttcttttcctggctgggctttggacagaaagaacaggcacaggaaaccgagactgaacaaaaagtagaagaacaacaagcggttgtcgaagagacaccggtggttgaaacccctgctgagccgagcgcgccgaaagcagatccggaagcgtttgccgaagacgtcgtcgacgtgaccgagacggttgtcgaaaacgaaaaggcgcacctcgcggagcctgccagcgtgcaggaagaagagtgggtggaaacgccggctctggcggaagaagcgcctgttgttgaaccggcgcccgcggtcagcgaaccgcctgaacagcccgcggtggctgagccgctggcggaagaggttatcgccgaaccggtggtggcggaagccgtagctgagcagcctgtggaagaggctttcgccgagccgcaggagacggacgtcactgaagaggatgcgccgctaagcgatgaagagctggaagcgcaggcgctggcggccgaagcggcagaagaggcggcggtggtggtgccggcgcccgaggacgaggcgccggttgaagagctggctcaggagcaggaaaaaccaacgaaagaaggctttttcgcccgtctcaagcgtagcctgctgaaaaccaaacaaaatctcggttccggatttatcagcctgttccgcggcaagaagatcgacgatgatctgtttgaagagctggaagagcagctgctgatcgccgacgtcggggtggagaccacccgcaagatcattaccaacctgacggaaggcgccagccgcaagcaactgcgcgatgcggaagcgctgtacggcctgctgaaagaagagatgggcggtattctcgccaaagtggacgagccgctgaacgttgaaggcaaaacgccctttgttatcctgatggttggcgtgaatggggtggggaaaactaccaccatcggcaagctggcgcgtcagtttgagcaacagggtaaatcggtgatgctggcggcgggggataccttccgcgcggcggcggtggaacagctgcaggtgtggggtcagcgtaacaatatcccggtgatcgcccagcataccggcgcggactccgcctcggtgattttcgacgccattcaggcggcgaaggcgcgccatgttgacgtactgattgccgacaccgccgggcgtttgcagaataaatcgcacctgatggaagagctgaagaagattgtccgggtaatgaaaaagctggatgtcgacgcgccgcatgaggtgatgttaactattgacgccagcaccgggcagaatgccattagccaggccaaactgttccatgaagcggtcggtttgaccgggatcaccctgaccaagctggacggcaccgccaaaggcggcgtgatcttctcggtggccgatcagttcggcattccgattcgctatattggcgtcggcgagcgtattgaggatctgcgtccgtttaatgcgggcgactttattgaggcactttttgcccgagaggattaa

SEQ ID NO: 265700 - DNA, 948 bp, Klebsiella pneumoniae
atgctaaacgatctctgcaaaagaaaatataaggattttactattccagaaatgatgaaaaaatatgcgccggggaatgatggtaataaccctgaagcttatgccaattttatcatgtctgaaagtggggtcgctcagggggagaaagtaggagatcttgacgatacaaaattcagtaaggtaattaaagcaattagcacaaaggaaggtggcttgaagccgggcaccgaaaaatgggtgtatgtgacaaatgtgactgtttctgatggctctcgaccagttgctgatgtgccatttaaagtgacgctaggaaacactagctacgagtggaaaacagatgcttacggtaagctcaagacaatcatccatacgaaacaaggaatgactattgttgtcaaatatattaattctgctggaaaagaggatgttgtttattcagcagtcgctggggatgaaacgaagaatatactgctcacgcgaaatttttcgcaattctctgcaaaaacacttgccgagaccccaaaaactccacgtgcgaagagcactcaaaaacctattgagtatatattcatgtcaggtgacactctctcgaaaattgccgaacgttataagacaagcgttgatgaaatagccaaaaacaataatataaaagatgtgagtaagatctttccaggtcagaatttgatgatatatggtgtcaatgctaatagtccttcgatctataccgtagctccaggggacactttggcgaagatcgcagaaaaaaatggtgtgaatgttgaagatattgcccggcagaataatatatcagatcctaataaaatatacccaggacaatcaatttctatagacaaaagtggcaatattacgtctggtcagactgaaaggccagttgaaaatccgatagcctcaaaaccagttaataaaaaaactgaaaaaatagtgtaa

SEQ ID NO: 265701 - DNA, 234 bp, Klebsiella pneumoniae
atgaaagttaagttaagcattgattatgctaaagaaaactctaaaggctcatttcaggtgatggagcaacaattgctgagtgggttccagaatcaattcgacgagtacagtccggttatacgccctacaggcactgaagagtttactgtttacggtggtaaaaaagaggttaagaacacgattgaggaaatcctcttgcagacttgggaaggtgcagacgactggtttatttga

SEQ ID NO: 265702 - DNA, 900 bp, Klebsiella pneumoniae; identical to SEQ ID NO: 218574

SEQ ID NO: 265703 - DNA, 156 bp, Klebsiella pneumoniae
atgaatgataaatgggaattctataaagatggttctgataaatggcgctggcgtaggaaagcatcgaacggcaacattgttggggcttccagtcagggttatgtcaacaaggctgactgtatagaaaacgctaaacgcaatggttataaaggttaa

SEQ ID NO: 265704 - DNA, 327 bp, Klebsiella pneumoniae
atggataagcgcggcgttcccggggaggtgaccccggtcgcgctgcgcttaccggggctatcaaccggataccagaccgtagatactgttatcgatttgcaactgttttggtccgggaaaaacagttttttattatttcagagcagattgcgctcccgatatttcttctgcgttatgtctctcatggcgcaggtgttttcccggaggcggcgcgctgcgccttgtccgggctaccaaatcgcacagcgctgtagccccggtaagcccagcgccaccgggggttttgagatcgccaataccggcagtttcagccagcatggtgaataa

SEQ ID NO: 265705 - DNA, 585 bp, Klebsiella pneumoniae
atgacggctcaagaattgtatgataaatttagatatcaatggtttgaaccattagctgacaactaccgtgagttgctttatgtaaacgaggcggactatgctaaagaggcttacaaaatattctcttgggctgacatagcaaagttttccttggtggatagaccatcttatagtttttacaaaaatatggaaggtgactggaaacaaaatccaaaaggtggagcaggttatcttttagtcttgatctctggcataccttactggaccgatgccgtaggccagattccctttgctgtcgatacctaccgtagtaaacagagcataactaagacagtacagaccggaattcaatggggtaccgggacgctaactgggaatgtggattactctaatgaatacgataattattttgttttgagaggggctttgtttgcaagcaaaagctttacatataaatccaaatcttctgagcaaacatatcctgccatcgttgtagaagagactcatcatccagtaaacccacaggttcttggtgatccaattaataataatgagttgatgcaatatggtatctggaaaaaataa

SEQ ID NO: 265706 - DNA, 1473 bp, Klebsiella pneumoniae
gtgctggagccgcaggggaatgtcatccgggcgctacaggaaggcgtcatcattacaacggtgaactaccatgccgcccgtgacacccgcctgcacgttactgtcgaaggcatgccctacagcgaacgttactgttaccgtcctgctgaggttccgcgcccggaaatccacggcacgctgcctgcccgcatcgagagccgggagaaggacgatatttacgcgcacctggatgaccagggccgctaccgggtgaagctggactttgaccgggaaacgacagagccgggatttgcgtacctgtggctgcggatggcgaagccgtatgcaggcgaaacatatggctggcataccccactcactgacggcaccgaagtggcgattgcctgcagcaacggcgatatcgacctgccgtacatcgcttatgccctgcatgactctgaacaccctgaccccgtcacccgcgacaaccacacccgcaatgtgctgcgcactccggcgaacaacaagctgcggatggaggaccggcgcggcgaagagcacatcaaactcgccacagagtacggcagaacccagctgaacaccggacatctggtggacaaccaggagcagccccgcggtaccggcgccgaactgcgcaccgatgaatatggcgtcatccgtgccgggaaagggctgtgtgtcagcgccgacgcacaaccaaaagcagaaggtgacgtgctggatatgcacgccgcgctgaaggaaatcaaccggcttaaccagcagctgcaacagctggagatggcggcggagcaggcgcaggcgctgaaggcggatatcgacagccagatacggatgtttgagcagcggctgaagccgctgaatgaggcactcctcttttccgctccggaggggatggccttcagcagcggggagcatctgcagctggcggccacgaagaatgtcgccatcaatgccggaggcgatatcagcgtcggcgtcataggcaatatgacggcgctggccggagagaaactggggctgttcgcccgggccggccaactgagcgtgaaaaacagcgaaggcccggtggagatgcaggcgcagagcggaaatatgcggatgtttgcggagaaaaagctgaccctgacctcggagagcgatatcacgtttgccggaaagaaacgcatcacgctgattggcggcgggagctatctgcggctggaggcaggtaaaatcgagtacggcacgacggcgacgtatctgcgccgggtgaaaaggacgatggcagcgggggcaagcactcagccacttgactcattgaagcagatgcaaatgataacccaatacttcgatagaaaacttcatttttcctctgatatcaactttagggttgaaactgttgaaggagcagaattactttccggttcaggtacgagtggttatatcaccaagagtgatagtgaatctgagtactgggtctttataagttga

SEQ ID NO: 265707 - DNA, 927 bp, Klebsiella pneumoniae
atggataactggctggcgctgtttgacgggcagccgcgctatcttctggagattaacgacagcgcggtgaaaccagatgtactgaacttcaccggccgggaagcgctcagcgcaccgtttagctgggatattgaattcaccaccccgcaggcccgtatcgccccggaacatatactgctgaaatacgccaccctgcgcatgcgcagcggcaaagcggtgcacggcatcatcacccacctgaaatggctctccaccactgccgatcagtctcactatcaggtggtgctgagtgcacgtctgacgctactgcagcgtacccgccagtgccgcgtgtatcagaacctttcggttccggaggtggttgagcaggtgctgcgcggccacgggctggaaggccccgattttgatttccgcctggagcgcacctatccgccgcgtgagctgatgacccagtggcgggaaaccgacttgcagttcattcagcgtattctctccgaagtggggatttactggcgcacggagatggacgacgagcgcggtctggatatgtatatttttgccgacagccagctgaactaccggtttgacgtgcgcctgccgtactgcgaaccctcgggactgtatgacggtgcagaggagtcggtgtggggcgtgcgcacccgttatcaggtggtgccgggcagggtcagcacccgggactacaactaccggacagccacgatgccgatggatgcctccgtctccgtgcgcagtgaggcgacaaccgccggggagcactaccgctatgcagagccgtaccgggaggcgggagacgacaccactccggagccggaaaccgaatccggcgcgttttacgcgcgtatccatcatgagcgcaagctgaacgcatgggcccgcgtcagtcttgagagtaacgcgcctgcctga

SEQ ID NO: 265708 - DNA, 3852 bp, Klebsiella pneumoniae
gtggcaatttttgacattgaaaaggatgaattacttcggctctccgatactcagctagaagagctgatagctcggctagcggaagctgaagtggcaatacatggtcatagccctgcatgtgtaaattggtctggctcaattacagcccctgacggaggaattgatatccatgtgcaggttccagttaatcaactgaaaccaggctttcttataaggcctaatacggtctttcaggcaaagaaacataaaatgccaaaggctacaattgagaaggaaatgggcatcggcaaagcgctttcccccataatctctgaacaagccagaaagcaaggtagctacatcattgtcagcctgggtgatgattgctcgccgtcaggaaaggcggatcgtctcaaagcgatgagggatgcagtaaaagatgatcctaacaaaagcaatcttcatctcgatttctacgaccgttccaaactcattcaatggctccgccaacatccatcagtcatgctgtgggtaaaagggaaacttggacaagggtattccggttggcaaccctatggagcctggagcaatccgccccaaggtgttacagacactttaatctcagccccaggtgtaaccattactttaccgtcgggaaaggggcaaaaactcaaaattgatgaagcaattagcccaatgcgagcacttatccgttcgacgaataaggcagttcgtattacaggattgtctggtgtcgggaagactcggatcgttcaggcgctctttgatgaaactgttggaacagatgcgcttgaccggacagtagctatttatgttgatactggctctgagccagtaccgtcggctacagcaatgcttgataagctgatcgctgaggaccgacgagcaattatgatccttgataattgcccatcagaactccatgcttcgcttgccagcaaggtatcagccgcaggaaaagaagtaagtctcatcactatcgagtacgacattagggatgacaaaccacagacaactgaggtcatccatattgagacagatggtccggaggtggcagagcaacttcttatccgtcgcttcccttctattggtcagaataatgcccgtcgtattgctgagttcgcagatgggaatgcaagggttgctttggctatagctgagaggggggaagaaggtgagagtttggccatactttctgacgcgcagttgtttaatcgcttgtttgaacaacgtaatcatccagacggtgatttacgggaacaagcggaaatattgtctctggtgtattcattctcagtctctgcgactggtatgaattctaatgagcttgaaatattaggttcactgtcggggtactccaaagcacaattatttagagcagttacgaagctaatgagtcgtcacgttgttcagaagagggctaattggagagcaatcttaccccatgccattgctaacaaactggctgcatctgcacttgatagtatcccggtttatcaactcagggctgtctttgaagcacctgacagggcgcgtttattactttcatttactcatcgactggggttgttgcatgaccaccctattgcaaaagaaattgttgaagcctggcttcagcctgaaggactaattgggcaaattttagacttggacgatgagtcggtgcgcatactggattatatcggtccagtcgcccctgaaactttgttaaatcggattgaagcagaacttaccgcacctgactttaaaggcattgaaccgacttatgatccgcggcgactagccattctcaatctcttgcaatcgttggcatatgaatctaacgcctttgacagatgtgccaggcttctgatccatatggcagactatgaagacgagagtaacaatcacgactcagctcaaggcaagatcgtgagatttttccaagcgtatttgtctggcactcatgcttctttaaaccagcgaatcatgctgatgaatgaatgtttctcatcaggcgtaaccagccgcagagcgttggggttcaaaatgttatctactgctttggaaggctcacactggacaggcgttggggtgaacgagtttggtgctcgccccagagattatggatttgacccctcctatgatgagcttgttgaatggcgaagtgctttcatcgatgttgctgtgcaactgggtacctccggcgattctgaaattgaagcctctgctcgtataaacctggctgacgcatttcgaggcctttgggaccaggatgcgatgagggaaaaactcgccgatgcagctcgtaaattgcatgcttactccccttggggagatggctggaaagccatccgttcaataatttatttcgactatacaaggcctacagatgccgagggggttgagccgatacctgaaagccttgcagcactggagaaggagctggagcctagcgacttagtagcggaaataatgacttacgtacttagccgagggggagactattgggcgcttgatgctgatttggggcatgacgaaaccgaaaagtttagcgcggctgagaagcggcttgaaaccaaagctatcctattaggacgagattttacggcatcaaatcataagcttgaagaattgggccaaaatttgttctctaccgattggatgccctatcgcattgcatttggaaaggggttagctgacggagaatatgatctgcaaattggctggcagcagcttgttaacctacttgatctatatccaaggattaacaaagattttgcagtttttgccggtttcatcgaacaaacagatgctgtggctccgacgttagctcaagaatttctcgaacaatgttcacaacacccagaacttcggcgggttatagttggtttgcaccctcggcgagagtttacagaaactgatttaaatcgctgtatgtcagttctggatgatcctgaaataagcccgcacatatatgggccaattttgtggcgggaccaatatgttaatttgtctgcaggtcgtgttattgaacttgctcatcgtctcctgagtaaaataaatggtgacgatgtagtgttggattctttaagtatgaggttacctcgtcaagagaaggctgaggatacacttggtgctaacctgcggcagattggtttaagagccgcaatcattagagtccaaagagatcaccgtgactctggtgggtctacagattatcgcatggaacgtgtcgttggcgctgctctgcgatttgatggttatgagtcacaaaaacaggagtggctgaacacgattttttctgttttagatgagcattatgggtattttaattcatttggaagaaccattgaaacgactgccgcattgatgccagaagcatttcttgatcatgtttttgagggtaacgaaaaacagcgacaacgacgtttattttttatcagtcacggaagcttacgtcggttgcctctttctaaaattgatgtagacgttttaattcaatggtgccgcgccagaaatgatcccaatgtttggcctgctattgcaactggtgtaacactttgggtgaaggatgatgaaaagagtgtaaccaccatacaggaagcagctttagctctattagaggcctcacctgaaccaatggttgtgctggaggccttcgctgaacgcattagcccatcatcctggactggaagtttgtcaaatatcatgcaacttagagctgatgctttcagtatgttgagcaagcatgaacgcccagatattgctaaagcagccagaatagtgcatgaaaaaataattcattggatcgaacgccaaatagaacgtgagcaacgggaagatagtgaacgggaacagcggtttgaataa

SEQ ID NO: 265709 - DNA, 4611 bp, Klebsiella pneumoniae
gtggagttttctgttttaattcgcccctttttgtcaatgggcaaaggcatctgggcccagattaaacgaccgttagcagaacggaaggctctgacgcaccctgaacaagaaaaacattcactctctagtgttatggaaaaaacgttagtgcatcttggcgtagaaccatcggcattgcagccaacctggaagcgttgggttttactgctagagagtaagattgttggcacggaaacatttgcaatgcctcacgttaaggagtggcttaatgtcgctgaggttcaggaacacctcaaaaacctagcagtacaaaaattaaccggcagcataaatccctttgagagtgagcaggtattaattgaaatctacgtagctaaaacaggggaaactgaacacagggcaaaagacattatatatcaatcggttaatgccattaccgaaggtactcttagcggccttaaagatccagagttgggcatcttaatgagaattcattctcaaacaatgcatgaacgtttcgaagaattaaatcgacggctttttccagaacaaatgttctcggttcagcacctttgctctgttaatgaacaatggttgaaagaaacactgtcaaataaaatccgctcaaaaacaagacttgggcaagtgctatgcccgggtgactctcaggtcgtgcttacacgcactgcgctcataaagcaattttccgacgacctatcaaccttaccagaaggcggagtaatcgtcgtaacgggagcagagggtaatggtaaatcatggctagtagcacaacactggctgtccgttcctgtaaagccactaacagcgtttattagagcggaagacatagaggaaccttgtaatgatatcgctgctgtcgtcatcaacgccctgtgtcgtagttgtcagggagatctatctcttcacaccaaattctggcatgagcaattcaggacgtggtccgatagcgaaaagcgccccgcatgtggattgattgtcatacttgacggtataaatcaacgtccagcgatccgctgggcacatttcatcgacaggctgagcgaattccttcagtgtctgggtggcaaactgattgtgacgtccagaaagcattattttactcaaaatgttgaatccagactggcaacacccgttataaaaaggcctgtcccggaatggtccgcagaagaacgggactcaatactcgctttatgctatatcagcatcgcaggaagaaaactcagtgagagcgttgcaaccagcctgcttaatccacgtatgcttggaattgcattagaactgtttagtgcagaacaattgcatgatttagcagagctaagtgtatcgttgatgttgtttgagcacattaaagtcagccaacgagatagttatgaactctctgcagagctattcagtaataagctgcgttcgttcggacaggaagtgcttgaacggatcgaaatcaaagacaatgaagatattgatattttcaatgcagaacttaacggtatttttcaaggagggttgcaagccgttattgatgggcgtttttttatccccttgcctgaagacccaacaagctatcgtattcatcctgaaggacttagcctggctctggggatggctatccttgatattgtcaataaagcagccagaaatcataaagatcttgatgaggtaatggcctccgtcgtcgagcccgtcatcgcgcttgataagacgtcggataccctctttgcagccctcaccattgccagcctagaaaggcagtatcctgttgcaagcggcgttgccattctagttagttttgccggactgcaaaatcccgacgcgctgcttacccctgcatttatggctctagcgcgacgtcggcctgaaatattcatcaatgcttgtgaacatcttgcactacgtgatatcaatctcccacagcattactggattgaagatgcgctcctgcacgcctcccgacacacatcctccgcggaaaaaattctgacagcagctaataactggcttgtatggagtccaactcttacccctctatggtcagtgggggggggtcagcgtgatgctgacatacagactgaaattgaaaaacggcaaaaagaacgtgagcataaaattggcctattgtcgcctgaagaaacagaaattttcagaacattagtcttaaaagacacagatagtttatcggcacttcattcactagccatgaagctttttgcaggaaaggctttaatgccgcatattaatgcgttagttaaatggaattttgcttctaatataaaccaggattatggcgttccctggcagacattccgcgacttgatcgcgtttaactcaattgactggcaaaacgtccgttcccacttgcgggatcaatggacgctttttgtacataacaaaagttcacgtacaggtaaatggacggctattaatcttttgatggcgacaggtaattctgacgatgcgcaactcgccgagatgcttgcacaccagttacgtgacaatagttcggacatcaaaagttggcatataaatgaatcatggtgtgaagctgacccctgtaatccggctaatccagaatccagcaatgtcagccaaacggcagagaaacatagcaaattggacgtaagcaagctcttcaattccttcggcatcggttatcaagaaagattctttacgggggcaaccacctctcttgcccgttaccaacctcaggtagctatcgataatcacctcaaacttgctgaagacattctgtgccgaagcggtctcccactacgacagggtatttttgcgctcttaccgcatagggcattaataactcctgatattgcaagaaaactcgtaagacgagtgaccagcagcactaaagacgaccggtcagcatggtcatctctgggcgaggaatcggaactgatgcagcagttccaattgattctggcttttcatcaattgagtgttaatgaacaaatctccgttttaaggacactccgctatggagataaactgattatgtcgctcagtgacagcttaaaaacactgaactggcaggatactgaaaacaacgtacttgcggcgttagctaatggcgatacggatgagcagctaacatcgttactgtttcatcctaagactggcccgttacctgcgggcctagtaaatgcccttccgcaattgctcagtagtgcatcgaaaagcgtccgacatcttacgctgaagatgctgataaacgtgaatgacccgattgcgttacgttgcggtgccgagatcgtgatgtctgaatcaatcacaacatccgatcagtacgagcagtggcacttctcagccttgctgctcaaggcaattaatcaaaacatcatcgggtggaaagaagggaaaacgcacttaacctatttccacattgctcaattggcaagcatttataacggagaaatcgctagagatgctgcgcagtattttgacgtactcttgaataatgcctttcagcagacaattgatgtggggaccctgcagcttaaactgcttctgaggtcgacagacgacagggcttatacatttcaccatcttagtgaggttgtcgttcctaagcgagaggatggtgaagacatgagatcactaatggcacttcaggagatggataacttcgaaaagcaacagcaacgcattcaacataattaccatgaaatcaaagatgtacttaccaaactaaatctatctgatctgactaaccattattatcctgacgacattgcagctctggtgagggctgaacctgagcgttcacttgcatgggcaaacctgttccttgataacaaaaatgtggatgttctccaccaggtcagacatataggactaacacttgcacaggccatctcgactcagcatccagaagtgtcagttcgtctttttgaacgacttgaccacattgttcctttctgtcgcgttgtgtttaccgaggccgagcttgatctgtgtgctgttgcggtctggtcttcgttcgacagccctgagattgaggcattgcgctggcgtcgattagctctagcggaaaataacaatcggcttgcccatgaggtttgggcagccctgttctgtcagcagagtgaaaaattactgcaatacactcggaagtgttgtaactcatcctggcctgtgctccaagctaggggcatcatgatggcggggtatttaggtcagaatgagctttcggacggcacgctcaaagcaaacacctattcgggccttctccaaaagtccttaaaaagtgcaagtgactcctatcagcgtcatttatggacgcgtcactggttcaaattgatgcagcaggcgccctccgcagaatctttctggtgtgcttcagttatatttttgcaagtcgtcgatgaaagattcttggcaatcgggtatgaacacactgataacagagatatttttcagcaatactggcctactgttttgtcgaagctgaattcccgtttccagaagcctagcaacaaacgaatggagcatttgtttggaggaaaagcaccgtggccaggttttcttacatgcccaaatttaagccgtcagcatgatgagggtgacaccgtacgtgggctttaa

SEQ ID NO: 265710 - DNA, 1422 bp, Klebsiella pneumoniae
atggtaaacctggttattgtttctcatagcgcccggctgggcgaaggtgtcggagaactggcccggcagatgttaatcaacgatggctgcaagctggcgatcgccgccgggatcgacgatcccgacagcccgatcggcaccgatccgcttaaagtcatggaggcgatcgaatccgtggccgataccgatcacgtgctggtgatgatggatatcggcagcgcgttgctcagcgccgaaaccgccctcgatctgctcgatccggcgattgccacgaaggtgcggctatgcgccgcgccgctggtggaagggacgctggcggccaccgtcagcgccgcctccggcgccgggattgacaaagtgatcgccgatgccatgaacgccctggaggccaagcgggttcagctgggtttaccttcgcatacgcctgacgccatcactgccccaacgcttgctgacgacggcgacacaaaatcggtttcagtcattattaacaatcacaacggcctgcacgtgcgtccggcgtcaaagctggtcgccgcgctggcgggctttaacgccgaactgctgctggagaaaaacgggaagtgcgtcaaaccggacagcctcaaccaaatcgcgctattgcaggtacgccgcaacgataagctgcgcctgctggcccgcggtccggatgccgacgcggcgctggcggcgtttcaggcgctggccgccgataacttcggtgaatcacctgcagcgcaaccagctgaggatccggccacgcccgagcgcgtcgaaggcgctgccctgcgctacccgctggccctgatccagccggttcacccggctgccgctgatgccgcccgcgagcagcagcgcctgcgccaggccattgaccagacgctggcggatcttatcgccctgaccgagctggcggaaaacaaatttaacgccgatatcgcggcgatcttcgccgggcaccataccctgctcgacgatgacgatctgtttgatgccgccaacgatcgtctgctcaccgaacaatgctcggcggaatgggcatggcatcaggtgttgatggagctcagccagcagtatcgccagctggatgacccctacctgcaggcgcgttacatcgatatcgaagatattctgcagcgtaccctgcgccatctgcagggcgttcaggagagagtgccggcgcccggcgagccaacgattattatcgccgacaacatttatccctcaaccgtcttacagctggatgccagcttcgttaaaggcctgtgcctgcgcgatggcagcgaacaggctcacggcgcgattatcgcccgcgccgcaggaattgcctggctgtaccagcagggcgaggcgctgaacaacgtacagcccggcgagactatcgcgctcgatatgcgccaccagcgccttatccgtgactaa

SEQ ID NO: 265711 - DNA, 249 bp, Klebsiella pneumoniae
atgaaaagtaaatactttattatagtattgatatctacactcttattaagcgcctgtgcatggacttcgcgaggtaaaatcaaccgtaacctggagagcgcttcctatctggcaaataagaattcatattcttcttcctattgtgacagccttgattacctgaagggagccctggcaatcgcacaggctaaggggagtaccggtctgcaagccaaagtattgcaggcctatgtcgataattataattaa

SEQ ID NO: 265712 - DNA, 249 bp, Klebsiella pneumoniae
atgcgccgttgttttgtcgggtggcgcttcgcttgcccgtcctggggttcgtgcgacctgccgttaatttattcgccattcttgctgaaactgccggtactagcggcctcaacatcgctgagacgttcccggaaagccggggcgatacccggcaagcctatgctcatttgcagccaatcgcagaaaaatgtgctgaaactggaatcagggacgaaaaaggccgcgactgagcgcggcctgagtggttag

SEQ ID NO: 265713 - DNA, 1545 bp, Klebsiella pneumoniae
atgaatccacgtcccagccggatcgcctgggggattagcctggcaatgacaggcattctcgcactctgcgcaccactggcggtcaacgccgccgacaatgccatctctgagatagccgccaaagtggtgccctatcagaccacgccccgtgtctttgtcctgacggatattggtaacgagcccgacgatcagatgtcgctgacccgctttttactctacgccaatgaaatgaacattgaggggctggtggcaaccacctcaacctggcagcgggagaaagtccataccgatatgattgacctggtgctcggccattacggtgaggtacagcctaatttactgaaacatgcggcgggcttcccgacgcagagtcaactggaaaaggttgtcgcccccggacttgcgggttacggtctggccgccacgggcaaggggaagaataccgctggctccgacctgttggttcgcgccatcgaaaagagcactgatgccaatcacccgctctatatcaacctgtggggtggcgccaatacgctggcacaggcattacaagatctgagcgcaaaacatccagccagcaccgtgaccgctctcactggcaatctggtggtgtattcgatttccgatcaggatgacgcgggtttctggatccgtgcgcactatccggccatcacctatatcgtcgatccctccagtcagaatggtgaagactacgctcgcgccacctggaccggcatcagcggcgataaatattatcgcaacgcgccgggagcagatttcaccaccgtctcccagcactggctggatcaaaatatccgcagtaaggggccgatgggtaaaggttatctgcagtatttgttcattatggaaggcgatacgcccgccttccttgggctcatccgcaacggtcttaacagcgagcgaaatcccggctggggaggctggggcgggcgttacattgtccgccagccccagcatgaaacccgcccggtctggagcagcggcggcgatttttacccaggcaacccgaatgctgccgataccgtgaccggcgtcgacggtaagccgtacacgtccaatcaggcaacaatctggcgctggcgcgaagcttttcagcatgatttcgctgcccgtatggactggactatcaaagattatgcttcagccaaccacaatccgcaggtggtggttaacggcgacagcgggcaggcagcgctactgctgacgaccaccgtgggggaaaccctgaagctgagcgccgagggcagcaaagatccggatggtaacatgctccgttatcaatggttcctctatccggaagccggctccgccagttcgcaaccggtggcggtaagcgatgttcagggccgtcgcggtgaggataatctgcaggcgccggcagtgctggccctgagtgaacaaacgcaatcgcgcaccgaggtcaaagcgttacgcaagggcaccgaacacctcatcctcgcggtgacggataacggtacgccttcactgacctcctatcgccgggtgatcgtcaccgtcaactag

SEQ ID NO: 265714 - DNA, 1017 bp, Klebsiella pneumoniae
gtggactaccgacagcagatcctcaatatcttgcacagtgaaaacgaatcgcgggcggagatgacccggcgtctgggcgtcaccaaagcgtacatcactaaactgaccgcccggctgctggaagagggcttaatcgaagagcgggatgtgaaggatacgtcgtttggtcgcccacagcagtgcctggccgtcaaagagggctgtgcctggagcatcaatattatgttgcgccgggggagctttcaggcaacgctgaacgactatcggacgctgaacgccccgctggccagcgagcagttcagcctgccggacatcatgacgcccgacgaactgacccagtttattgccaaaggtgtccaggcgctatgtctgcaggcctctctggcagttgagcatattaacgtggtgagcattgcgctgcagggcgggattgagcataccactggcgtagtgcgctactgccctctcttccccgatgaaaatattacgctgatggcgcacattgagcagcgtctcggccttcccacccgcatttataatatcgcccactgcacgacctatctgctggctaaacgctggccgggtcgctcctggatcgcgtttatgccgggttttggtagcctcggttttggctattgcactcacggcataccgggactgggcgagaacgggttttacccggaaattgtccacttgccttatgagggtggtctggagcaggcgtttaacgttaacccggcgaataaggcggccggcattcagcaaaccgctaacgccctgtacttcgccatctgctgcacggcgccgatccacaacatacggctggttatcgccactggcgaactctttgaagattatggcgacgagattctgccattgacgcagcagatgctggccgccagtccaaaccgtcatgttcgcgagattaccttacaccacgacaaaaccgggcataactatggctggcaagggctggtccagctcagctccgatgccatcaccgcgcaactggcgtaa

SEQ ID NO: 265715 - DNA, 1176 bp, Klebsiella pneumoniae
atgttcgaaacttatctgggccttaccaaccgcgacgccaaaaatgccagtcttctcgaaaagtatcagccggatattgacgccctgtgtgaacgcttctctaaagaaggcttgctaaatttgatgaccgtaactgatcaaaataacgacaggcagatgaaacccgccagtgggatagttgatgtcatcagctcattggccgaaaactctaatcagattagtttttttcaggatgtggctattctgaaagaatggtgcacgcaacaaagccgggaattttatcaattagcactaaagatttatgctgatgaatcagactatcagaatagaatacctggaagagtaataagacggataaaaaaattcatagacaggggatgggctaatgatcatattccccaccctcttttacgttcttttctgaatgtactggatgatatgcaggatccccataccttccatgattatcctgacaataaaactggcaacaatacattcaataaattcgtagaagaacatcctaaagcggtcactgagtatttaacttctgaaatctggttgaatagcattcccaaagacctgctccttaaggctaagagccgcaacgaacgtgagaacgttggaatgtgcaataaatgcaaggagcgtgaggaacgcatgcgagtttcctggctggtattctctattttttgcgcaaaaaattattttcactcaatcatttcaactcttgattacatgcagcataaagaaatcatatgtaccactaaacttcatcatcataagatgattccgttaattacattagcgatactaccttatatcgtaatggtccctgtcatatcaaaaaaccaatacgacattacgattacctgtcctgatgaattcattgtaaaaaatgtgatcccgttcggcaaagccaatttgacaggctataaaaaagatactgaacaactctttcgtaagctctatatttatatagctttgctcatcaacccgaaatgggctcctaccgctaatgaattaatctcttttcttgaaggtagcaacgagaaaataacaggatcacttaattttaaatccacatccagaaatcgcaactcgaaaaccaataatataagctcactgggcaggaccgaatatacaaaaaaacttctcgaaagggcaaaaaacaaataa

SEQ ID NO: 265716 - DNA, 1122 bp, Klebsiella pneumoniae
atgcccattttcgatatccgcttcagccataaatcactgtctcagctacctcatccacctgccgggtgtgaggaataccgcgatactttgtgtccccatctcagggcactcgtttatccaaaacggatcacactcgcccttcgctgtacaattaaaaacaaacgcatctacgaaaccctcggtactttccctcttctcagtgtggatgctgcccgtcaatacgttcaacaactgctgactgataagcaccggcttcaaatgcaatcccattcgcatactattgagcatgctgttaatagcctgtggcttcctgatatgcgcttgtataaaaaaagcccccagtctgaactttccaaactccatcgctatatcctgcccagttggggtagccgccagctgcacgatattactgctggcgaaatagagttgtatgccgcatcccttcgagaacaattgcgcccggcaaccatcaaccgcattctggccattctgtcaaaaatatacactcttgctgtcagagccggttggatcacccactccccaatggggcacgttcgctatcttaaagaaaataatattcgctatcgcaccctttctgacaacgagatccggttatttatagacgctgcaaaaaacctgcaaaccccggccgccgatgcgatcctgcttgcgctctataccggcatgcgtattggtgaagtctgtacgttgaattgggattattggtaccctgaccagaatcagctgatcctgcccgataccaaatcggggcacccgtttacctgcccacttgcaactcctgcctttaatctgattcgaaaacaacaacaactggcactcagtacaacgtatatctttccgcaaattacagataccaccagaccactgggttatccgcgtggaaccttttcccgtatatgccgggatgctggaataagtggtttacgtatacatgatctccgccgaacctttgcgactcgtgtgctgcacgaaaccggtgacatcgacatgacctcccgcctgctgaatcatcattcgctctcggtcacccggcgttatgctttccacaacaccacggcaatgcagagcattgccagtcaggttattgataaatatgagtaa

SEQ ID NO: 265717 - DNA, 189 bp, Klebsiella pneumoniae; identical to SEQ ID NO: 133568

SEQ ID NO: 265718 - DNA, 603 bp, Klebsiella pneumoniae
atgaaaacctcaaaaatacccagctttgactacctggttaacgccagcgacatacttatccctgtctctgatgtcatcagcatcagtctcgttgaaaaccgcctcaattttattagtcgggcgtgccgcctgctgcacaccgagtcttttgatacggatgaagcagcgaaaactgcgtttaacacctatgccctcaacttcgaaagtaacctgcctgaagaggctgtctaccggggtaataactgcattgcccgacttaagttcgtctacggcatcagcctgttccagaacgcagagcgggctatcctgacgctcactaaccgttatggcggaacgctcgtcagtgaatcagccaaacctgacactcttgatgaggcatttcaggaactggctaccgctcttggcggtcgcgaatatgaatcaatgcgcttccgttggttacatgcaaattgccttctctcctcgcgactcctgccgatggtagaaaagaccccgaatggcgtcgtcattaaagtcaacgataacttcgtatctttcgtagcaacgaaagacgatgctctaaaagagcaactgtttgctgagattcgtacagcccttgcctga

SEQ ID NO: 265719 - DNA, 2601 bp, Klebsiella pneumoniae
atgtttgacatgaatgcactgctcgcagatgcggcgggagtgacgcaacctgtcgcccggtcagctaaaacacgtgataactttccgttaataccgcaaaaatcaaaaaaacggctggacgtcagcagccagttacatcttgatatcggctttgatactgaatatgtctataacccacagacaaagcaaaacgacattctgtcttatcagagttatgtcgtgctgcctgatggaacgggtgttcccggaatcctgtaccccgccagcgcccacaaaaaagatcgcctgtcgctgaaaaactttctcgcgaaaaccctgacgccgctattgaagaatgagcagattaacgaatggccgggttcgattacgctgtatgctcatttcctgcgggctgatgttgcctcgttttccgatttctggagcgatcacaaaatactgctgaaaggaattcgcagcacagttagcagttttaaaaaccgctacggtattgattttgatgaagtcgaaactcgtcgtgaaaaaaatagcctcatcacgtttgataaacggaccagcccgcctcgttgcagcaatgtgacgttcaccgatacgttgttgatcactcctggtgggatggggctggcggaatgtggccaattacttggcctgccgaaactaaacattccagcaccttattcaatcagcgatatgcgccagtatttaaaaggcgatcgacgcggtttcgaagcctatgcagttcgtgatgccgaaattgccgtgcgctatgcattacaggtgaaatcgttctgcactgaaagtctgctgattgagcgcgtccccaccacgattggtgcgatggctgtttcccggtttatcaaaaccattaaggaaagcggccagtctcctgaagtctgtatgggaacctggacggaatcgcgccagcgctggaacccggacactcagggattcagaacattgaaatcgacgcagagtatacccgcaagggaactttatgagacgttcgccataaactgctatcacggcggtcgaaatgagtgctttatgatgggcatcacccctgaaagccaatggtatgactacgatttggcaggtgcatacaccacaggcctgttagatgttttgcaacccgattatgacaatctttatacgagccaaaatcctgaggaattttgcggacataccatgggatttgcgctggtcagttttcggttccccgacatggtacgctacccctgcctgcccgtcagaaccgaccagtacggattgtttttccctttgacaggtgagtcatgggcgaccgccccggaaatagccctcgctctgtctttgggtgcggaaataactattcagcacggtattatcatcccatggcgtcagtataaatctgataatgcctcgtccccgacagaaccagcatgctccgtgtttttaccctttgtgcaacaggtacgcgaaaatcgtaatcgccatgataaagggtctctggaggagaaattctggaaagagatcggaaattcactatacggaaaacttgctcagggtcttcacgcaaagactgcatttgatacctcccgtgggctgaacagccctctgccgccttcgtcagtcacccagccattctttgctgcacatgtcacgggatttgtccgcgcggtggtgggcgagttgatgaatacacttcccccgaatacaaccgtggtcagtgtgactacagatggttttctgacggatgcctctaccgagaatatcgatatgtctggtccgttatcgtcacgttttcaggcgttatgtgacattgcggatccgggctcgtctatgctgacctgtaaacatcaggtccgacaacttgtcgccatgaaaacccggggacagttgacctataaagaacttgcaggctacccaatagtacacgcccgtgcaggcgttaaaccgcctgctgatattccacgcgacgactataaccgctatatggtggacctctatcttaacagggctccgggtcagaagcttcgcaggggctctctcatttcaacccgtgacatgtggttgaatgaaagcgaccttgtcgccgttgaatcggatatccggttaaatcttgagttcgactttaagcgccaactgatcgccccaacgatgaatgatggccatttgttgatgtattcccgtccgtggaatgatatagcgcaggcacttaagcaacgccagctttttgatgactggcggcagacacataccctgaaagacgaatccgactgggaggactggtgtgattttctctattgcagaaacatttttacccctctgaaactgaaagtaggacaaaatcgaagcgatgacgtccttgttcgccttttcctgcgggccctggctcaatatcaatgggggcttacgccggacgacagaaagcgacaaaccagtgtggagatagctgcatggctggtcgaggcaggctactctgtgacacccagcgatgtaaaaaatgcaggtcgggctaagctcccacccattatctttgattccctgactgcccgaatgaatcgcctgatggaccttataaagctggtatatcccggcttcgcattgccctcggcagtgttgtaa

SEQ ID NO: 265720 - DNA, 927 bp, Klebsiella pneumoniae
atggataagcatgacaaacttgggtatcgccttggattgatactgactcgccttaacaacggtgaatcagtcacggtgagtgggctcgctgaagagtttaatgtctgtgataagaccatccggcgtgatcttacgcagcggctggcttatctcaaccttcttcgcagtggtaagaaatatcatcttcccgttggtgttctgggacagcgcagcaatactgacttgcgccgctttacgcgtattctgggtattgaagggttatttccacgctgggatgaccgcctgttaggcatattgctgggcaatgccgaaaataatccgtttctgatcaaacagcgtccctacgaaaattgtggggtttttatgtctacgttgaatacattgtcagacgcgattcgcggcagcaaaaaaataagctttatgtataaagcgaaaagttacagcgccattgaaccctatcgtctcgtcagtgacagagggatctggtatctcgctgcgattgagggaggagtgctgaagagtttcgtcatttcagacatgaaaaaggttctccccagtaacgtgtcgtttaccatgtcgccggagattcatctgcaaatcgagaatgcggaaagtatctggtatggcgcagagcttactgaagtactgatgtcagtttctgcacgtgtagccccgtggttcttgcgccgcgcgctgttgccgggtcaggaaattattcacacttccgcaagcggtgatttgctcgtgatttcacgggtggctcacttcggccaaattatccctctcatcaaatactggatgcccgaggttgaagttctaaaaccagcatcgattcgtaatcaggttacgcaagacatacgccttgccctgaaacgatacgagcagaatgaaagtacggaatcaaccggagatacctctaatgaataa

SEQ ID NO: 265721 - DNA, 408 bp, Klebsiella pneumoniae
atgaataaagatgaaaaagcgctcgagaattttttcgaaaacatagcaacggacttactcagcggtcttcttgacgccaatgataatgaacagaatgcgcatcttaaagcctggcttgacgcgccattcaatgtagttcccgaaaacctactcaggcatgccgagatgatttgcaatcacttcagtgctggtgaaaacggtcatttgttaatgcacggtattgatgatcaactggccgcaatgaacctttcccgcaaggaacgtttcagccctatgaaaaaagggatcgtcggttacgcggcaccccgtgatctggaaaaagtgaatgccttgctaaaagtaattatttcttattacgagtgtgcgttaattaaagcgagaatggagaatggtgctcaagatgaataa

SEQ ID NO: 265722 - DNA, 900 bp, Klebsiella pneumoniae
atggtgctcaagatgaataatacagaaactaaaaatcgaaatcctgtgaaggatgctcttgaaatattacctgaaaatatcagggacagtattgcccgacgcatcaatgacgttatcagttatgagccggtcattggcattatgggaaagaccggagccgggaagtccagcttatgtaatgcgatttttaagggtgatatttgtgcagtcagcgatgtcgccgcctgtacccgtgaaacgcaggaaatgcgcatccagtttggcaaacgctcagtgcggttgattgatattccgggtgtgggcgaaaatgctgagcgtgacgctgaatatgaacaactttatcgtgatctgttaccacagctggatctggttctctgggtgattaaaggcgatgatcgcgccttttctgcggatgaacatttctacaaaaatgtgctggcccctgctggcggtgaggctaaaacactgtttgtgcttaatcaggtcgacaaaattgagccattccgtgagtgggatgttgtcaacgcccggccttctccatcccagatgcaaaatatcctcgataaagaagcatatatcacacagcgatttgggtttactgaccatccggtgatcgctgtcgccgccagtgagggatacaatgtgacccatttggtggaggcaatggttcgtgcgctcccaaagcacgctcaaagcggcgtcgcttctcaggtgagagacgagcacaaaacccgtacagttacagaagaggcaacggaaggatttggtgataccgttgatcgcgttcttgatgatattattgataataccctgccagtgcctttgcgcgtggtcgtaaaagccgccaaaaaggccgtagtcagtggattaaaaaaggcctggaactggattttcggctga

SEQ ID NO: 265723 - DNA, 393 bp, Klebsiella pneumoniae
atgaaaaagattgttattacattttttgttataggattttctaccacctcgtttgcagccaaaatatcgcttgaaacggcagggctctgctatgaagcgacccgacaatcaacaaaaatggccatgctattagacccggacgctgctgaatataaacatctcaataacaatacgaaagagttattcggaacgctgtcggggggcgtgggagaaaaggattcaaagaaaatacgggatgcctggaaaaccgtcctggataatgccggaatggaaggtcgcatggctaaatctgatggatatcgggaaatgaaccgatatccacaggaggtgattatgcaggaagccaataaatgtgtccgtctggctcttaaagcaggacttgttaaactctga

SEQ ID NO: 265724 - DNA, 228 bp, Klebsiella pneumoniae; identical to SEQ ID NO: 133572

SEQ ID NO: 265725 - DNA, 435 bp, Klebsiella pneumoniae
atgcaaacccagtatgtcttaaaacaggcaggattaacgctgcctgtcactaaattatttcagcagcacatcgttacgcttctggcagaacaatctcagcaaacatcggtcagggcagtagtcattaattttcgtgacccggactacagtgcagaatccggcggatttcatccggttgaaatgcggttcatccgccaggataacgaatggtatttcgattatgtcacagactttagttacatgggacgagtctatccggagctggaaaaggaaatggacttttgttggtcaggtcaatacgtcttccattatctggctggggatatttcactggcggcagagaggaatgaactctggtccttatgggagggtaattttatgaattacctgtctatggggatttaccgggtaacggtaactgtggaaagttgttga

SEQ ID NO: 265726 - DNA, 510 bp, Klebsiella pneumoniae
atgagaaaatcaaagttagagaaaaataataatgaacacgagaagctggagttaaataatgatttaagtgatattgaaaaaggtatcactgaagatggccaaatattacctgaagagagttataagctgctaattgaatcaggtcaggcggaaaaaatcagccctaaagccagcggtattctgacatggcaactggctatgtctgaaacggataatgaactttacctgcgtctcatggcaaatggcagcggtggattgttctctaaagactgggtcccactttctaagattgaaagtgtactcgaagttcaaccgacaacgggcttcacatcaggcgtattcagatcattatttaaaggagcaagtgccaataatgccggttttctggctgctgttttacgctccccggatatatgtctgcttgaggcgcaccctgagaagttgtttacgcatgttttatatgctgactggcgggcgcgtcttaaaacactcggtaaggttggcgattga

SEQ ID NO: 265727 - DNA, 372 bp, Klebsiella pneumoniae
atgaaatttatctcgaactggcaagacctgccgtcgctccttcttcccgattcagttatgactgtcctgagaaaagaactgatacttccatttgatgatgaactttccgcaatgaatttttggggcgaggtgggtgtaacattaatgtacattgaacccggtgatgttcccgaagatattaaacgacacgtactggatgtaattcatcatttaattgcaaaccctgagttcgtggtccatctgacagatgaatattacttgatgctatcaattacagaagataatggaaatggtatttatctgctatttcatccggaatgccctttgaaggggattgacacattaatgtctatggcggaatcccgtctgtaa

SEQ ID NO: 265728 - DNA, 1203 bp, Klebsiella pneumoniae
atgcaaaaatccttccgattcaccaattcatccatcaaagcccttccggcaaacacagatacccgatctacagagcttgaggtatccgatactgaggtcattggcctcaaatgcctctcaggtcgaacgggtaacaaacgtttcctcctgcgctacacattccacggtaccaaaaaaagtatcagtattggcagattccctgaaattgatgtggggacagcccgtcagatagctcgtcgtcacaaggaggcgattgcactgggaaatgaccctaaggcagaacgcgataattatcgtgctatgccaacgcttagtgagttttttcaccagacctatgttccgttcatcaaacgccataaaaagtcctgggataaggatgttcagcgtttcacgcaatacattgaaccttgtctggggaagatacgttactgtgaccttcgggcccgggaaatccagcaggtgcttttcgacatgcttgagggtcgtattcacggccagcagtatgcaccgtctacctgtaacagggcactggctattctgaaaactatggggcgttatgcgctacgacaggatgtcctggagaagaatgaagccgataagatccctttgctgaaggagaataatcagcggacgcgcttttttgacgctgatgagatcagaaggatccttgatgctgcggcacgataccccaataaggcagccgggggactgatagccatgctgctgttaaccggtacacgcaaatcagaaatgatgaacgtcatgcacaaacatattgatcgggataacaggtccttgtttattccttatacaaagaatggtcgcagccggactgtatatcttagcgaagccgcattatccattattgattcgatcccacgggctggcagtaatccctatctgttcgccataaaggacaatggaaaaccgatatctgaaccccggtgggcctatgaaaaaatactggcagagtgcgggatagataaaagtgaagtctgtttccacactacgcgccattccgtcgcatcattacttgtctccagtggtcagtacagtctgtatgacgttaaagcccagcttgcgcatgccagtattcagagtacggagcgctacgcaaaactgacaccagagcgaatgcgtcagaccgggcagggtgttaccgaccttcttttaccccccgtagctaccagtaaagaacagtga

SEQ ID NO: 265729 - DNA, 882 bp, Klebsiella pneumoniae
atggaaaggctattagacgcgtacaaacggatattacaggaagttgacgcccagtcatttaacctgaatgaagataaatactcaggcgtctttttacccgtgccgtttgaagaatactggcattcaccggtaaaaatcatgctggttggacgtgaaaccgcaggctggaatacgctgaatggtaagaatacgatatcacgggtgttgggacttatgcctgacgtcaccatcgggcaggtggttgaagaagctgtagatcgttacaggaaacatcttccggtacaaaatgatggcaccaccaacctcaaatcacgtagccgcttcacgcaatatcatttcaggctggcccgggagcttaatattcctcctcaggctatcgtgtatgccaatctactggcgtgggattacgacggactgacccctctcaatcgccctcaaaatgaagtgcaggaagtcatattagcctcgctgaagctgctggcggtacaaattaaacaccttgagcctgatttcatgatctttgcatccggagcccggagaacagactacatcattaaacaggtgcttactgagctgggcggttatgagacttcttcagtcattccggggaagctgtgggagttcaaaacaggtaatacaatctgtttcagaattgcccatccaagggctatgcgcggacaccagaagtacagagatgaggtgattgcacgaattaagcaactttgtactaagggcggccagagcattacaacttgctcagcaggccacccttcccggaagagtaccggaaaacaggcaaagcggcctggttctctatgctggaggcgacacgttcgattcggcattgccaggctggagattgcggctcattgcaccccgtga

SEQ ID NO: 265730 - DNA, 3411 bp, Klebsiella pneumoniae
atgaatataccgggtaatggcctgggccggtttggcctggccgggcttacgttggccgggatggctgcaatatggtgggggatcacccgctatggcggcatgctgaatatcaatacgcggggcgagcaggtactggtgtttgtcctggtctgtctggcgttggtatttgttttttaccttcctgcaatgtcccgccgtgtgaaggagagtttatatcgccggcagtcgcagcaggccagcgtcttacccggcgaagaagggcgcgtggcgctgacacctccccatcatattacggtgggggaaattcgccagactctacgctatcagtatggacgcgcctggtcccgcaaagtccgtattctgctgataattggctcagtcagagacgtagaacaactgaccccaaagctcacgcaggaactctggcaggaagatcagggtacattattgctgtggggtggagaccctggggcagcggtagataacgcctggttcacagcgctgcgtaaactgcgttatcgcccggctgatggtatggtgtgggtaacatcgggctttgacggcgttttgacaacgatgaacagaacgaagcccaggctcacgccagatgaaatggacagtgtgtctcactctctaaagctacgctacgaagctcttggctggaaactacccctatacgtctggtcgctgtatgaggggggcaacgaaaaaaatggacgtatcactcagcctgtaggctgcctgttacctgcaggttgtacgccgcaaatagttgccgaacagttcactgccctggcgtcgttactgatagagcagggcatccagcagatatgcggtcagccacagcacaattttttactcgcgctggccgatcagttgacccgtaaaccggaaacggtgacggagccgttatcggtattgcttaatccttaccgcccgcagccgctggccggagtggtgttcagcgcgccgtcggcggaggccggccgcagtatcagccatcactggggccgggataaccgctgggatattctgccggacaggatgacggaattacccgcaggtctacgtccgcgcaaacagggagtcaactggatgcgtgggatgagcgtggccgccgccgccctgatgttactctgggccgcctcaatgacagtctcttttatcgccaaccgccacctggtggcgatcgcacaggagcaggtgcagcaggcctcggcgggaaaacagccgctggccgtacgcctgcatgcgctctccgcgttacagaaaacgctttctcaactggaataccgctcgcagcacggagcgccgtggtacctccgcgctggcctcagtcagaacgatgacctgctggcggcgctgttcccgcgctacggagagagggcgcagccgctgctgcgcgatgcggcggcgcatcatctggaagagcagctcaccgccttcgtgcacctgccgccggacagcccactgcgtgagaagatgacgaagaccgcttacggacaactgaaacaatatctgatgttgacccgcccggaaaaaatggacgccgcgtggttcgccaccacgctaatgcaggactggccgcagcgctcaggcgtcgccgacgccatctggcagggtagcggtccatcgcttctcgcattttacgccgccagcctggcatcgcatccgcagtggcgcctgcctgtcgatggcggtctggtcagccaggcgcgtacacggttaattcgccaactgggccagcgcaatagtgagtctactctttaccagaaaatgctcgcgcaggtggcgaatcagtatgccgacatgcgcctggcggatatgactgccgacaccgatgcttcgcgtttgttcagtactgatgaggtggtgccgggcatatttacccgtcaggcctgggagcaggccgtgcagccagccattgataaagtggtcgcggaacgccgcgatgaaatggactgggtgctgagcgatacgaagcagactgccgcacagtcgacgtcgccggaagctctgcgagccaggctggcggagcgttatttcgctgatttcagcggcgcctggctggatttcctcaacagtctgcgctggcagcgcgcggcgaccctctccgatgctatcgaccagctgaccctgatggccgatgtgcgccagtcgccgctggtggcgctgatgaacacgctgagcgtgcaggggcgaaccggccagaccggggaagccatcgccgattcgctggtcaaatcggcaaagcaactgtttaaccgtgagaactcgcccgccatcgatcaacggtccggcgcgcgcggtcctctggatgccaccttcgggcccgtgctggcgctgctggacaatcgcgacggcggggcgcccaccagccgtcttagcctgcagaccttcctgacccgcgtcacccaggtgcgtctgcgcctgcagcaggtcaccaacgccaccgatccgcaggcgatgacccggttgcttgcgcagacggtattccagggcaaggctgtggatttaaccgaaacacgcgactacggcagcctggtggcggcggggctgggccaggagtggagtggatttgggcagacgctgtttgttcgcccgatggaacaggcctggcagcaggtgctgaccccggcggcggaaagtctcaacgcccagtggcgcagcgcagtggtggaggactggaatagcgcctttggcggccgctacccctttaaaaataccagcagtgacgtctctttgccgctgttggcaaaatacctcaacagcgagaccggacgcatcgcccgctttctgcagacccggctgaacggcgtgctgcataaagagggaagtcgttgggtggcggacagtatcaaagctcaggggctgacgtttaacccggcctttctgcaggcgatgaatacccttacccatctctccgacgtcgcgttcgccaacggcgaagcaggactatattttgcgctacgccccggcaccgcggacggcgtgatgcagacggagctggtcattgacagtcagaagcttgtctatatgaaccagatgccggcctggcggcggttcagctggcccgccgacaccgaagcaccgggcgccaccctgagctggatcagtacccgggcgggcacccgccagtatggtgatttcccgggcgcctgggggtggatccgcctgctggataaggcggtggtcagcgcttatcccggaacgagcagcagctggagcctgagctggaaagcgccggatggtctgttgctgaactacacgctgcgtaccgaggcgggggaaggaccgctggcgctgctggcactgcgaaactttacgctaccggagacgatattctctgtccgcgctcctgctgaaaatatgccgctgaccgacgatatatccggcgatgagggatactaa

SEQ ID NO: 265731 - DNA, 5109 bp, Klebsiella pneumoniae
atgagtttatctacttttttattaaaatgcctaggtcctattgggcgtatcgttatgcctaaagcaaagcaaatttacgctgagcatacggcggcaaataagccggatgaagccatcgaacttcaattggataaatttctaaatgaagccttggggcggctgggggttgtggatgactcgaaaccttggtggtcaactgctatgaatgccctaggtaaagcagctgttcagccagaatcatttaaacgtccacatatacaaaagtggttaactcagcaagagacgcaataccttcttaaacaatttatcagggataagcttactggtaatgaatactcacaagaaagccttaatatactcgtttcaagctacattgaagaatcttttgagagtaagcagtacgctatttcgataatcactacagcacttgcggtactcgaagccagtgtattgggttccattaaagataaaggtactgctgctattgttcaggcttatggggacaagcagttggagtttctgagcagtctgagcgaaaatcttaataacctgatacctgacgacatacggcagattgtcagaattgcacaaaataacgcagaaagcattcagtgcgatataggtggtatacaaatagaacgtacggcatttctgcaggatataaataacctcatcaaatcagtccaattcattcaagtccgcggtttacctggtagtgggaagtctgtactactaaaacaactggctcagcaggctcttgataaaggtcccgtactttttctcagggctgagcagcttgaaggaaaaagctggttcagttatgccagtacgcaggggttatcagcacagccgctatcccagttgctctcccaaatagagaaagttggtactcccgttatattcattgatgccattgatagaacggaaaaagagcaacagcctattattctagatatcattcgtactatcatacagtcaccagagcttgcaaattggcgtattatagcatctctacgtgatactagcgttgatgcactccagcactggcttggggatacagttaatggaatgacattaggaaccgtgtccctcaacaatctaagtaacgaggaagctgaaacacttgcagctgctaatcctctgcttagatcattgctttttagttcaacacagcttgaagatattgttaggcgtcccttctttgcgaaagtactccatcagaattacaccattgatccccagtcaacctttcagcctcgttcagaagtagacttgattgcccaatggtggcaacgaggtggatacaatgagacaggtcagtttgctgtagagcgtcagcgccaactcattgagttggcaaagctccaagctcatgccttaaacaaaccgatcaaaatgaatcagctttctacaatgatgcatattgacgcaatgaagtctgatggccttcttgactctgtgcgtgacggtatctctgtacgttttacgcatgatatcttcttcgaatgggcttttctccatgtcattgctgagtgtgaggagcgatgggttgatgagattcggtcctgtggtgagcctcctgctttagctcgcacgatagagttggcctctcaatgggagtacaactatggggaaaactgggctgcctggttagccctaactcagtcttccgggttgagaacacaatggttacgagcatggctgttaggacctttaggtttgcctgactttgccaagcagcaagatccatacactcgagccattcttgctgatggttgtcagcttttcaaaaaagctttagtttggttccaggcgactaaaattacgccgaacgagtccatcaatactttcgcctttccctctgaaactcaacagcaatatgcctaccttgtaagcttgccctccgattatcttttatggcggcgttttattgaattcattcttgctcacatatctattgtcccaaagagactctatccagatattctcgctgtatttgaggtttggcagaacgtgttcttttgtaccgctaatcccatcacccataaactcttacttcaatgtaatatatggttaaatgatattgataatattaattaccgtgacaattggcatgcaaattcctttgattggcatgaaatacctgaacttgaaaaattcagaaaatctttgagacgactaatttttctctcatcaaaggctgaacctgagatagtctcaacctatctactcaactcaggtcggtcgaatacgctacgccgagatgtttttgacgacgtattaactctttgcccgatattggcacaatctcaccctagcgaaattgttaatattacattggcctgtttaaaagaagaattacccgaagaacaacttgctcgagaagcagcagaaaacaagcgggacagggagaggcggattaccattcaggccaagcccgagtccgaaaggacctcacaagaacaggcatatctcaataatttcagcttattcacaactgtcggtgtttcccattatgattgggatagattgtgtttggatgatggttttcgtaatttctatccacctacaccgcgaagagagcctttccagtcattgttccagcactcacctaatgaggcattagctctagtcagagagctttgcaatcatgcgacaatggcatggagacaaatgcatacatgctcccgagatacacaaggtacgcctatcccgcttgagcttacattttgttggggtcatcagaaattctggggaaacgctcgtgagttccagtggttcagagcagcccgagcttctcatgtaattggctgtgctttaatggcactcgaacagtggtgttatgaagaactaatgcgtgctcgcccactcgatgacctgcttgaacaagttgttatcggccatgataacattgctatcctgggcgtcgccgcaatgctaacactacatactaagacagtttcccctgctacattgccgctgctaacatcacaacgagtgctaagtgctgatcaacagcgaatgcaccaagacttaatttcttgttcgggcatgttttcttccgacggtcagaccgatccctcacttattgggactacatctaccgcatctatacagccagaacggcaacaaactttgacaagccttatttcatcacatttcattaagggtgatgaatatagcgatattcttaaaaagaacattctcagctttactgataatctaccttttgagtacgaagagttgcgtgatcggcctgagtgtatttctagattgaggactgaagccttaaagtatgctgaattggtagactggaataactacaattttcatgaagttgagaataggccagacctgatagcggtttctcataccagttctttttcatccaccccggaaagtattgccaaaagagaaactgcttcgaagtttattaacgcaactcgacttttaacatggtgtttgaaatgccttgaaaaaaaagcattgctagacacattctcaataccagaggctattgctgttggaagacaaatcgacacctctgatgttatgatctattctgcagatgaatcagaagaaactcacttagctatttatcgaggtgcactttcagcaattgcggccgttatattaacttttcgtcaagaaaccacaccttcgagtattcgttgggcgcgagatattttaatgcgcgtgctaaaacgaaaagaaataaaagataagttctggacccccgatgccattaccatagaccacccagcgatatttgctgcgcaaggacttgcagccgaactccgtgagaatgctcatcaatatgaaatcgctcgcagcttattaattctgataactcatccacttaaagccgttgcattagcagcactcaaagaagcctgcgatttatggaacacagcgccaaaactcacatgggtggcactggttttggcattttctcgcaattgcgcatctattcattcattacaagacacgcgtaagaaaggagatataaacttgccgtcgcctgaggctgagattgaaataaatgcactccttgaattctatgaagggagtagcgagtggccgaaactcccactaattccagcgccatgggtaaaacgtaataatttaaacattcagaatcataacaaagataatccaaccgagagtgacgaagaaaagaatgcctctgacattatctggctagctgcagatgctgcgaaagcattcagtcttgttcctgttgaaagcattatggcaagtgaaagaaaagaagattttttaatttttcttgagagtgcgttaaactggaccgttcaagagtatgaggctaacggtgaacaatccaaaggtggaaattattcgctacatgacacctttgaatggtcacaatcgctaggtacaacacttagcttggttgctggcttaattccatttagctcttttaatacacgttttctcatacctattttagaaattgaagatagtcattgtctggaacttttgtatccgttagtaaatggttatgtctgtcactatgtatacgacgcactaacaataccatctgacacagttatcatacttaatatctgtttagaccgattccttaaacttccggagtttgactcaaattctttcctcaaaggtaagctgaataattttcagtatcaggggctaattgatgccttgatgtttgtttctgttgagaaggcagagaaatcagctcgttatgcgaatggtgattggtccgaacttccactaatcttaccagttattgatcactttattagggcagttggtgggttgattccaatcatggaaagatttttaacactttgtgaacgtgcaaaagtaacttatcccgcggatatatttgccgatcaaatcatatcggttttaaatcagggcccagattccctccaaggatggcacagcactctacttctagaacgtattgctgcgttagttgagtattttgcacatcgaaatacgccaatgtcagtcgatttggcacagaaactcttgaggattcttgatgtacttgtagatatgggggatagacggagctctttgttacaattaaatgagtcgtttcgagatatccgtttatag

SEQ ID NO: 265732 - DNA, 156 bp, Klebsiella pneumoniae
atgaagacacggcagtatgcgcaaaaatcaatcttcggtctggaagcaatcttcgaacagtcccgcaacaatgttagtgaacttgaacagctgttgagcgagctgacctttcgcaacactgccaggacgcggacgctaacgtctaaaatcgagtaa

SEQ ID NO: 265733 - DNA, 630 bp, Klebsiella pneumoniae
atgattcgcagaaacaaaccatttaatactctttcccgccgtcggcgtcgttcccagacacaatacgccaagaatctgatccaccgggagcgtcaccgttgcggaggactgcattatgatgattgcgattctgaaaatgcagaggctattgctgcgggttgggtgtggacctggagcgatgttttattcttgggtaattcgcctgatgtgtactggaatgcggagatcattaccattgacgtagctggtgcggatattgtggaaaatctggtgtttgaagaagcccatgctatgttgagccaaaaccagcaggaagatgaagcccgcatggatacaacaccaaactacaatgcgaaagggaaggtggttagccatacggtggtagaacgtacccgcgtttcttatcctcaattcggtggattaacctatttcgactacattgataaacgcttggccgaggtcatgcgtgacaatccgcctgtagttactcctggctaccgcattcaatctggctatcgtagcggcattggtttgcaagtcatcgtggaagagtcggtgctcactcgcgagataatcgacagtgcgaaccgctcattttgggctggggatatgcccctggtccctaagtaa

SEQ ID NO: 265734 - DNA, 1275 bp, Klebsiella pneumoniae
atgttgaaaaacaaagttttaaacagcatcacctctgcatactacataccttctaaatacaccattttttcctataattcaagagatttcaaaaaaaaaacgaactttgatgacgctaccttctttcatgagttccttcattttatacaggatgtcacactcccgtacctgctaagacaggcaactgcttcaagtcttgaacgccattacttttcattatcagcatgccatgctcaaaaaatcaccgctcctttttataactggccaggtgattatcaaactctgtctcagcaatatgatttcacttgggggaatcagcaggccattgaaaattttggtacaataaccagccatgaaaaaatctcagagcactcaattaatgatattaatgtacacaagtatgaattaacttcatccactggtatgaaatgtactcttagcgcaaaagatttaattgaattcatcacgcgtaagatcgaaaacaaaagatggaaagagaaacactattacgacattccttataaaattgtcgacattgtgttagattatcttggtcttggtgaaatatgcgactcaaccaagatattattaattgagttttgtttatataatgacaatcctgtaaatcagctattcttcattgcaaaagatcataaacatgaaataataaaggcagatgataataacactgcctacgattttttcaaattgtatcaatggagatcacgcggtaatttctctgagaatgtattatcaaagttgttaaggcgaaaaaaaagtcacttagaatactttaaagtgtgttatggtgaagatacgtttgtaactattcgtgaatggcttcatcacgttttaacttacaagtttaacgatgataataaccttttcgttttctactttttatttcagttagatcccatgaaactcaaatttacacttgaagattatcttactgaaattggaatacccgtattaataaatgaagcgggtgaacatatatcgatgactccagtcaaattcacatccaatagctttattaacttttatgttgaaagcttgctaattcaatcattacaagatggagactggatgtgtcctttattaaaatataaaatgtgccccggagttaaaaataattacatatggtgcaaaaatgatttccttaatatactagcatctaggcacccatgcttaatgaccgagacattagataagatgaatttatctcacctgccaatcattagaattaaccctattgatttttatgaagcataa

SEQ ID NO: 265735 - DNA, 591 bp, Klebsiella pneumoniae
atggctaattggcttattcaaatagcagaaaaagactatgaaggcaagctttttcataatgcatttggagtttttatatataccaatgccaatgcatcgatgagaaagttgattgaagatgaacactattgggaagcattgcatgataggtcaggggagaaatggaatatatattgtataaaggcttctcagggaaaggatgaatttcctcccatgccacgaggttcaatgggaatgatggttccggtctggagggagccaagagaaaataaggagttgttggagttgtttaaaataaaagatacaaaggaagcatactttgttttcttcaactttgacaatgaggataaatctattgtttttagaaaaaatataattaaagaaacaagtgttgaaaaaatgtttgatgaagttagacggttaatagatgaatatacgagtatagtagaaggggtcttgcctgaaaactctcaggagggggttagcatgcatatatatgcggagtccaaaatgtctctagatgagcgtattaattttttgaagaaattaatcccagtagcaagaaattttaaattcttaatcaatggttga

SEQ ID NO: 265736 - DNA, 360 bp, Klebsiella pneumoniae
atgaacagaaaactgttggccttattgatggcagccatgacgcttccggctgcggcagcgcagtacgtaaaacccggagcggttctaaccctgcatccggggcagaataacgctgaattcaacattaatgcctcaacaggagacggttcaggcgtatgcaatatggagggaacggcacagcaaatagctgtcggagaaagccagaaacgtcgctgggcctggaatgacaataccagccagtgtgttgcagtaattagtgaactaaaaaacggtaaagccagctttatgactcgtggttgcgagggatactgcggggcttctgcggcaggcgcaatggatggtctatttaataagaaataa

SEQ ID NO: 265737 - DNA, 375 bp, Klebsiella pneumoniae; identical to SEQ ID NO: 10726

SEQ ID NO: 265738 - DNA, 930 bp, Klebsiella pneumoniae
atgagaagggctgcgttgcgtcaggtcgtgccggtggtgcaaaccaccgtgttcgatgcgtatactggcggtctggctccttcggggcgcagaggtatcaccagcctgttaaaccgcagcgccagcatacttaaacgcggtacggatgcagcagactacccgtgggaacaacttaactacgccgccgtcgctaaagtacgtgcggcactgctggatgacggttacgccgtgtcgtcggtgaacatggcgctgtcagcactgcggggcgtggcgcagacggccttttacctcaactgcatggatgccgaaacgatggcacgtatccggtctgttaagcgcgtgagcggcgatatccagcgtaagggaagggcattagacaggcaggaaatccgggcgctgattcaggccgctaaacagcatccgcagcatgtacggcgctaccgtgatgtcgctatagtgctgacactttgcggaacaggcctgcgggccggggaactggttaaacttgagcgccgggactatgacaatggtgttctcacggtcagacagggaaaggggcgtaaataccgtgaaattcacgtggcggatgcagtggataaggctatccgcgcatggctgaaagttggcgcagacgaggctcacagcgcactgttcagccgaattcagcgcaacggtaaggtcgcaagccagccgctgactacgaccgggttaacgggtatcctggctgatttacagcagacgtcaggtattgcacgtttcaccccacatgacatgcggcgcaccttcatcacccgtttactggagcagggcgtggatatcaacaccgtccgccaactggcaggccacagcgacatatccacgacaacccgctatgactgtcgtggtgagagcatgaaagtcagcgccagcaaacgcatcaggtgtttttag

SEQ ID NO: 265739 - DNA, 615 bp, Klebsiella pneumoniae
atgattggtaaccaaagcaacaaggctgacgccagatgccaccgggaacggaaaagcagtaacgaggtctttgaatttctggagaagaagctctatctggggcgggatacccggcaaaagctggcactgattgcccggaaactgacgggagcgggttttagcccggataaattcgctgcagagaaagcggcggatgtgctgagtgcctgcgtgaaccacatgtttaatgacctgctcaatgagggagagctaaacgggatttataggtcggaggaacaccccatgatagtcccggccaggtcccctaaggcactggaaatctacactgtttaccagcttgtaaaaggtcgttttgacaagcttcatacgggggagtcagatcgtgagaaatatgcttcggtagcagaaaaacttaatgggtatggaatatggaaaccccggttaaaacgactctctgacggtaaagaatgggcgcgtgaggatgttgcgtgggtacttcagcctgaaaatatcaatgcactgattaacgtccagaatcaaaagtacgcgcggttgagtgctgaagataaaactaaagccgcgtctggaaacggctcaaaagctaaaaacacctga

SEQ ID NO: 265740 - DNA, 198 bp, Klebsiella pneumoniae; identical to SEQ ID NO: 158741

SEQ ID NO: 265741 - DNA, 954 bp, Klebsiella pneumoniae
atgaacgaatcttattacttcagaacatcagacccggattacattcgccacgcaccgtcaaggcttgagattttaagtaaagcattccccactattattacgcagcaggaaagtgagcatgaattgcagcgtcttattcatttactaaataaactgaaaggcagcaatcgctgctacaacatcattgctcaaaaactcaggcagtgcagaaacggatctccatgcaacagtcttatatgcccgcattgccagcgggaacgcattctggcgcaactggctatgctgcatgtcctgccggggaattcagcagaatatgtgggagtggtcctgtttttcaacaaggatacgcaaactccgccgccatggaagaacaccgatgcgctcagggcgcaaattggtcgttataagcagaggataagccgggtacttaaccgactggggtacgccggtccggccacaggcacctttagtatgatgcgccatatgcctgatggcccagaagcgcgtattttctgggttccacagttgagtttgttcctgcccaatgacagtacgttgattaaggggctaaaagcgcatatgtcgcgaagtagtggggaatttattgatgagacgacagttaacacgccggtgatcgtgcccaggtataaagaccccgccaggctactttcatgcgccctggatcccgcctggcgcacaacggattatacactgactgataaagacgctcttgttaagtccagagtagcgccattgaaaggtcggacactgttaaaaagtttactggccctggactcactgggaacaggtgccgtttctttttcgtttgggcaaccccagggaaagtgcattgatttcccggtaatgcagccactgcaatgcacttttgttgttgatcaaattgcagtggaacgacgggtaacactggcaaccactgcattttcgttgttgtaa

SEQ ID NO: 265742 - DNA, 1146 bp, Klebsiella pneumoniae
atgtccacgctggtcgatttcctgtcgacacagccggatattgaatttcgtgcagggaaagcgagtaaagacccggacaagcgtaaagccaatgcatggctgttcaatcccctgcggcctgtgtgtgatgagtctgccaggggtaagttaaatctggttgatgcggatacaggtgagtctgttagttttagagctctgcttcaggggaacgggaaagctcctgggcatgcgatagatgtagagaaacgccagacggccctaaaacaaacggaaaaggacttcttggccaaagttgggcgggggcgcatgagtatacagtttgtgaaggaattgcgtagccgtgagccggatcactattaccgcgcaggtatacgcagccttaaccatctctacaatggcagaattgagggacaatatgtcacttacgaccatcattatcgtctgacgtttggagggcggtattatgatcaagctttccagaatctgcccaatgagttcaaagctaaatttcggaccgggttactcaactatgacatcgaagcgtgcaatctggcctgtctgaaccatctgttcagacagtatgacgtcgattatcgtgtgaagtcatcgatatataaaaccatgatggaacataccgggctgacccgtaaacagtgcaaacagatggtccataccaccacctacagaattgggcgtgtgactattggtgttaatgatggccttggggaaaaagtgtatcagtggtgcggtaacagccaaaaaaaggcgctaaagattttgcgttggtggaaccgttatatcagtccattgaaatctgcgcttgagtcattgctggaacgtgtgcatggcacacaccgcaagagttgttcatcaccgcggaactatcacaggtacgctaatgaagtcggattaatactggatctaaatagtgaggtgtatcagcgtgaaaagactcaccatcagcaatatgcgcgaaataaggcactgttggcgtttatgatctgtggtgtggagcaggcgtatatccgtgaggtagtcagtctgaaccctggtcgtgtctgcatgctcgatcacgatggggtagtggcaacgggcacgctttcactgcctgactggcggggtttcacgatgaaggtgaaggactag

SEQ ID NO: 265743 - DNA, 2754 bp, Klebsiella pneumoniae
atgaactggattggttctcggtggtggaaattcgacttccataatcacactccggcatcggacgattatggaaaaggccctaatcagggccagtatatgcagatcactcataaagattggctgctcaactacatgcgacaaggcatcgattgtgttgctgtgacggaccataattcaggcgcctggattgatccgctcaagcaggcactcaaggaactggcatctgagagtcatgaggattatcgaccactctacttattcccaggcgttgagcttactgttcaggggaatatccatattctggccattttcggagaagacaagacaacctctgatatcgactcactgcttggtgcggtcaggtatcgcgccaccaaaggaaagagcgacggctgctctgaatgctcggcagttgaggtgatcgacgaaattgctaggtcaggagggcttgcaatacctgctcatgtagatcaggctagcggactttttacggtctgtacgggcaacacactagagcaggtgcttgacaataaatgtgtttttgctatggaagtaacggaccttgctaaatcaaaaccgcagctctacattggcaagaatttgaattgggcagaggttcttggaaccgattcccatcatccgtccggtaccggaaatcaacgctacccgggtagccattttacttgggtaaaaatgtcggagccatcttatgacggattacggctggcgctcattgatggggctctttcactgaagcggtcggacaacttcactggtgaccccaatatccatggacaactcgccatcgaaagtatcgtggttgatgatgcgaagtacttagggcgaggccaatctttatcttgtcaattgaacccctggcttaacactatcattggtggacgaggcactgggaaatcgacttcgttggaattcctgcggattgctcttaaacggaagggagaaatccccaagagccttgaaaaggaatttaccaaatacagtcaaacttcgaaagaccgccaagatgaagggctgttaaaagattccacgaaaattactgtaggctttcgaaaagacggtggccgttttcgaatcacatggtctaataccgacgacatatacgacatcgaggaagagaccgctcccggagtctggtgtgcttccgagggagacatagcacaacgatttcctgtcaggatttacagccagaaacagatattcgaattggcaaagcatccccaagcactcttgcaggttgtcgatgatgctccggtggtcaatcatcgtgattggcagcttaagtgggacgaattggtttccaaatatctctcgcttcgcgcccaggagcgtgaagttcaggccgggcttcaggaggaatcggtaactaaaggtcagcttgaagacgtcaaacgcaaactcgatgtttttgaaaaggcgggccacgcggatgtccttaagggttaccagctcaggcagaaccagagtaaggctatggactcttgggtaacgacttgggagggttccgccgaacaggtccgagatatttctagaagcctactgccagcagaattggatttacaatatttcgacattggaaatacggatgacaaagaactcttcgataccgtcaagggcatccgtgcgacgtttgagaagcttcagatagagatgaactcgatcgcgcagcggattgatgatgtgaagaactcatggaatcaagcgcggccagacttgggaatatcgaaaagaattacagcggcgagccaggaatacaccggcctcctcggtcaactcagcgcagcagacgcaggtgatccatctgcatatggtgttctggttaagcagcgacaagatttcgaagataagctcaagggattcgacaaaaagagagaaactcttacgcagcatcagaagagcgctgaagaatacttggtcaagctccatgagcatcgagcattgataaccaagcttcgtgaggactttctcaaggataccctcgtcggcaattcatatgtacagatcaatgtcattccgtttggaaacaagcttacggttgaggaagaattccgtaacctgatcggccgcagtagtggcggatttgaccgcgacattggggttgttgacggggatgagggcttgctggcttatttaacgcaagaccaatccaaaacaatggatgataaaattgagaaattaaaatcatcgctacttgcaatccatgaaaacgatactatagcggtggattcctgcaaagatcgacgttttgtatcccacattcaggggctaactccggaacagatagatcgaattcaatgctggtttccaggtgattctctggatatcagatatagccttaagaacggcgagagtttcaaacccgtagagcaaggatctccgggtcaaaaaacggcagctctccttgcatttatcctttcatatggcaatgagcctcttgtacttgatcagcctgaggatgatcttgataaccacttgatctatgatctgatcgtgacgcaattgcgtgagatcaaacaaaaacggcaggttttagtggtcacgcacaacgctaacatcgtcgtgaatggtgacgcggaaaacgtcattgcccttgatattcggtctggccaaaccagaattgtgacgcaagggggtcttcaagaaccttccatacgcgatgagatatgccgagtgatggaaggtggcagagaggcctttacccaaagatataaacgaatcaatgcagtaatcacatag

SEQ ID NO: 265744 - DNA, 495 bp, Klebsiella pneumoniae
atgcactacttcgcttacggatctaacatgtcaacttctcgattacgagaaagagtccccagtgcagaggctcttggatgcttcgcgctaggaggacacgacttaaggtttcacaagcctagcaaggacggttctggaaaatgtgatgcatatttaaccaaaaacgctgtcaacatcatttacggcgttttgttcaaaattgatccaaaggaaaagccagccttagataaggcagaggggcttggatatggttacaatcagaaagaaataactgttacagcttctgatggatctttagtaacggcagtaacctatgtggcaacgaaaatagacaataaccaaaaaccctactcttggtatgttaatcacgtattagttggtgctagggaggcctcacttccaccacaatacattgaagaaaaaatagcgtcaattgagtcaatcgaagatagcaataaagaaagagacatgaagcaacgtgctatacatagctaa

SEQ ID NO: 265745 - DNA, 459 bp, Klebsiella pneumoniae
atgaataccaccactttacctcccgacagcgtgggaatgtctcccgccgcacaacgcaccatcagatatgccctgaccctgctggagcgccagttacgcgaactcggcacgtcatttacgtccagcaacgccgtccgtgactggctgcgtctgcagcttgcctcgctggaccgcgaagccttcaccgtcctgtggctggataatcagcatcgcctgatagctcacgacacgctgttcctcggtacgatcaactctatcactgtacatccacgtgaggtcgttaaatccggtctgaaaaataatgccgctgctgtcgttcttgcgcataaccacccgtcgggtgaggctgaaccgagtaaagccgacaggctgattacagaacgtctgaaacaggcgctggaactggttgatattcgcctgctggatcacctggtagttggcggcatggatatcgtttag

SEQ ID NO: 265746 - DNA, 486 bp, Klebsiella pneumoniae
atgaccgacattatcaaccttaacgacaacaacctgttacgtccgcaatctgccgataacagctctgtacccgcgctggccgccaccctcgtacaggacgagcagcgcgcaggattctggccgcagcacttcggcagcataccgcagtggataatccttgagccgaccgtcttcgcctggatggaccgcttctgcgcggactacagcggcggtatctggcagttttatacgctcagcaacggcggcgcgtttatggccccggaagtgaatgaggatactgatgaacactggtcgctgttcaacaccatgaatggcaacggtggtgagctcagcgttgaggctgccggaattgccgtctgtctgatgacgtacagccaccacgccatgcgcaccgaatgtgacgccatgacggagcactattaccgcctgcgtgactatgcgctcagtcacgcggagtgcagcgccatcatgcacatcatcgactga

SEQ ID NO: 265747 - DNA, 819 bp, Klebsiella pneumoniae
atgcgattagccagccgctttggccgtatcaaccagatccgccgtgatcgtccactgacccacgacgaattacaccagcatgttcccagcgtgtttggcgaagacaaacatgaatcccgttcggaacgctacagctacatacccaccataaccctgctggagaatcttcagcgcgaagggtttgagccgttctttgcctgtcagtcacgcgtccgtgatccggagcggcgggaacataccaaacaccttctgcgcctgcgacggtcgggccagataaccggacagcatgtgcctgaaatcattattttaaacagccacgatggagcctcgagctttcagctcttgccggggtacttccgccaggtatgcacgaattccctcgtctgtggacagtcgtttggcgaaatcagagttccgcaccggggcaatatcgttgagaaagtaattgaaggcgcttacgacgttctcggcgtctttgaccgggtggaagagaagcgcgatgccatgcagtcgctgctgttaccgccacctgcacaacacgccctggcgaacgccgcactgacctaccgctttggtgaagaacaccagccggtgaccgctacgcagatactgacaccgcgacggtatgaggaccgtcaggacgacctgtggaccatttataaccgcattcaggagtctttgctcaaaggtggcctgagcggacgcaccgcacagggaaaacgtactcacacccgcgcgattaacggcatagatggtgacgttaaactcaacagggcgctctgggtcatggccgaagaactgcagaaggcactgagctga

SEQ ID NO: 265748 - DNA, 234 bp, Klebsiella pneumoniae
atgcacaacactgacgataccccactaccgcccggtcagtttactcacgggcaggccgatgccgtggtcgcggtgtaccacaatgtaaccattgaagacgacctgggtacacaattccggctggtgatccgtgacagcgaggggcaattaatctggcggacgtggaattttgaagccagtgccggagaatggctaaaccgctatctgctcagccacggtatcctccggaactga

SEQ ID NO: 265749 - DNA, 297 bp, Klebsiella pneumoniae
atggattgtccgaattgcggttcgcaaaacatacagctgcgtcatgtgggtaaaaaaacgggcggcgtgattggcgcaaccgccgggggacttgccggtctcgagggggctacggccggcgcaatgattggctccgtctttcctgtggtcggcacactggccggaggactgattggttttctgtcaggcgcctgtgctggcgcggtggcaggagcggtagccggtgagaagctggacgggacggtatttgatgaatactgctgcacacagtgtgagcagaccttcaatatgccgtaa

SEQ ID NO: 265750 - DNA, 969 bp, Klebsiella pneumoniae
atggctgtaaattatgatgatggcaggcgaggactcataacgagtcgggacctgagagtttgcgcgttttatgccggatggttgaatgccagcaacaaaattaacaccagcaatgttcccaggcaggatgcagaaagctgccgacaggcgttaaaccagctaattaatcaggccatcccggataaaaaccagcaggcaggactgctgtctgaaatggaaacagcccgtgatgaaaatgtgcttccactggattgttttgactggcttcgtcagaatgagcgggccacgttctggctatgggcgtatctctgtaaggccggggattatgagtttggcattggcccgccagcaaatgctgaattcgggaaaaactggtatcagcgaataaatctgagtttatctccggcaagtcatcaggagagaatacatattctcatcgccttctttgacaacatttacatttccactccccctgtgaatcaccttaagaaacaggtgatggaaaaactcaaagaccggtggaaaatcatatacagtaaaccgctaccgttaaaatggctgacggatgaagaagacgcggtattatgggcctggaacaacctgcaaaaagttcagcaggagaaagccggtaatatcggcggactctatatgagtttatccacgccaggattaacgacctggcttacgccattgagtcattctgagcgcaatttagccctgcgtgcagcgatcgatttatgggatgatgcgccggacacaaagcgtttgtttctccttaatctgaacaaggcctggaatcagcagaagctacgccagtcccgcaccgataaaaaagcactcaatacgtacctgaagaatgaaactaaaatgcgactggactttatggcagaacgtagcggtgttcgcatcagcgatttgctggaaacgctgattaatgaccattaccgaaaaacctgtggtggggagtga

SEQ ID NO: 265751 - DNA, 570 bp, Klebsiella pneumoniae
atgagttacacctgtgaccctttctggcagcaacgtattactgatacctttaactgtgcgctgaacgcttatacccgcgtactggccctgcgcgttgacctcaggctgccagattcgccagcggccaccgatgccgccgttatctcccgttttactgattccctgaaagcccgtattgacgcgtacttacagcgtaaacgccgtgagggtaaacgcgtctggccgaccacgctgcgttttgtctgggcgcgagaatttggcgacatcaaagggaagaagcactaccacgtggtgctgttgctgaaccgggatacgtggtgcgggccgggggattaccaggacccggactcgcttgccgggatgattaaacaggcatggtgcagcgctttgaaagtggaggctctggcacatgccgtgctggcgcgttttccggcgagcccggtgtcatggctgacgcgtggcgatgaggctcagctgcagcaggcgctgttacaggcgagctatttagccaagctggagacaaaagcgaccggagacggcgagcgtaacttcggctgcagccggggctga

SEQ ID NO: 265752 - DNA, 372 bp, Klebsiella pneumoniae
gtgtttagtggttttgtggtgtttttttgctgcctgggctttctgggctaccggtttagccgcagttttgtggtgctttttcgctgcttgggctttctgcggagcggctggtttagcgtctgcttttttgtgttttttagcggcctgggctttctgggcagcggctggtttagcgtctgcttttttgtgttttttggcagcctgcgctttctgctctgcagccggttttgccgcagctttgtgctgttttttgtgatgagtggtcttggcagccgtgctgtgggtagcagctggcgcctgagtggtgcttgctgcatcagcagcgaaagcggcagaagagagacccatagcagcggcaacgaccagagctaa

SEQ ID NO: 265753 - DNA, 282 bp, Klebsiella pneumoniae
gtgcagttctgcgagattctcacacgccagcgtcggcccaaagtcggtatagcgctcacggataatattgagcgcatattgtgcaaggccatcaggccagtggttattgctgagttttcctcgacggcggttagccataccaggcgggccagattcacggtaacgcaacagaaggcgtcggcactggcggtcggaaatacccagacgctgcgcggccatctgagtagtcagccgccggtcaacaacgtcttgaatgattttgagtcggttgacttcatctaa

SEQ ID NO: 265754 - DNA, 396 bp, Klebsiella pneumoniae
atggcactgactgacgctaaaatccgcgcagccaaaccggatgaaaaaccttataagctggccgacagcggcaacatgtttttactcgttcaccctaatggctcccgctactggcgattgcgctatcgtcatctcggtaaagaaaaaacactggcgcttagtcagtatcccgaagtttcactatctgcagcgcgtgataaacgcgatgaggccagaaaactcatatctgacggtattgacccgagtgaacaacggagaacgaaaaaaggtgcatcggaggccgtaaacacttttgagctcgttgcccgtcaatggcataaaagcaataaaaaatggtccgaagctcatagcgagaaggtgctcaaagtcttgagggtcacgtatttccctatatag

SEQ ID NO: 265755 - DNA, 525 bp, Klebsiella pneumoniae
atgcgctatgctgcccagtcaggcattatcagctataaccctgccgtggatatggccggtgctttaacgacggtgaaacgccagcaccgccctgctcttgccctgagtcgtatttcagaactccttgaatgtcttgatgcatacaaaggccagcctcttacaagactggcgacaaaactcaccctgcttatcttcatccgttccagtgaacttcgttttgccagatggtcagagatcgacttcaagaaagccatgtggaccattcctcaagagcggaaacctattgaaggggttaagtactcgcaccgtggctccaaaatgcgtacagagcatctggtcccgctctccagacaagcgctggatatactgaagcagatccacgccatcagtgaagaatatgaattgattttcactggcgaccacaatccctggaaacctatgagtgaaaatactgtgaataacgcattgcggttgatgggctacgtggattggcccctatatttccagacactttttatcgcttaa

SEQ ID NO: 265756 - DNA, 279 bp, Klebsiella pneumoniae
atggggccagtctactacgatacaaaagtcgatgtctgtggtcacggcttcagagcaatggcctgcagttcattgattgaatctagtctatggtccagggatgctgttgaacgccagatgagccatcaggaacgtaatggtgtccgggctacctatattcataaagcagagttcttagacgaacgcaaattgatgctgcagtggtgggctgattttctcgatgcaaatagtgaaaatccggtctcacctttcgattacgccagacaacaacacttataa

SEQ ID NO: 265757 - DNA, 288 bp, Klebsiella pneumoniae
atgttaaaaattaccggtttagacaagctacaaaaagagttgaaagtggcccagttggcactgagtgagttggatggaaatttaggtactgtacattttgacccccaagatccagccagtattgaaaatgcaattcaaaaaataaatcaaatagttgacgaacgtgtctctcaatactcatccaattcgattattggtcaattggccgagcaaatgaagcaagcatatcgtgaaaatttgatccaaaaagccacagagttcagaattaaaaataacgaggaaaattga

SEQ ID NO: 265758 - DNA, 894 bp, Klebsiella pneumoniae
atgtcaaaagatatatttgcagatattaataatgtcgttctggacttacaggcttcacaggcacaaacctatgaacgtcctttaaaaaagcttgctcaacttctaaaacatcctgatcttgagccttacaataaagacttagttgcagatcttgacttagagagttttcttgaaaagagcgcacaatctgcgagttcaatggtcggaagtgcaactcttgactggccagaagatcccagaaaagagctaggcctaacactacttttaatctggaaattaggtgcagatcctagctatgccgtccacttcagtattaattttttctattctggtaaaaaaatcatcagcaatatccatgcgctcaccggtcagttaatcattccctttattcgggactacaaaaactacattcaatcgaagggaattccccagaccatgttaactccccctctatctaagaaagtatttattgttcatggtcacgatgagggttcccgtgaaaaagtggctcgctttctggaacgccttggtctggaagcaattatattgcatgaacaggctaatcggggacgaactgttattgagaaagttattgaatacggcaatgtgggatttgcggttgtcctacttaccccggatgatgaagggtgtgtaaaaggtggtacgcttgaacccagagcacgccaaaatgtgcttctggagttaggtttttttattggtcaccttggacgggataaagtctgcgcccttaaaaaaggagcagtagaaatacccagtgatttcgccggtattgtttgggaaccgatggatgataataatggatggaagcaatctctttctcgtgaactcgaggctgctggtcatgtaatcgactggaacaaagtgatgcgttaa

SEQ ID NO: 265759 - DNA, 756 bp, Klebsiella pneumoniae
atgatgatctcatatcaggaacttgttcgcaccttccctagtcgccttcggttaggagcgcgttgggaaccacttggtgagcacctggagtactcgttgcggctttctagtcctgccgatcatgaaacggtaaaatcctgtatagcttttcgggcaaaagaaattctggtagagaatgttaaactttattttgaagcgtctggacacggtattcgttaccagcaaagaattgagttggtaaatctggaccaatctgtcctgattgtttacttagatcaaattcctcggcaggagcttgtggaggcttctgagcgcggtatattcttttcaattaccgaaatgcagttccttcaatgcatcattacgttagccggggggcaacaacagcaaccctttgattcaataaggtcccacctgacatataactggttgcttaatgacaaatgggtgcgacgttggggagagttatggaactgtaatgccattgagcatgcgaaaaccgaaatgaagtcttactggcgttggcgattgggagaatttaaacatttttccctttacagtgccgggctcgggtcttatccctggaatggaatattacgcaaaagcctgtgcaagcttttgatcaacaatcatattattacattacagttctggctggcggtacattctgggcggtatgttcttggagatggaaaactgaagcttaatcagcgacgaattagaaaagtcaagcccagcaaagcttcgaacctttga

SEQ ID NO: 265760 - DNA, 498 bp, Klebsiella pneumoniae
atgaagggtattgggactgtacttaaggcaggatacctcaaattagatcacagtatgaaggcctactcaattcacaaagaaaattctcttttgtttaccggtcattttgccgatcttgatcctcatggctggggttctctttacgaaaaatttactggtcagatatttgaagcagagggttatgaagttgaatacttaggactgactgcagggtttaatgatggcggcatcgaccttattctgcgaaaaggaaatgacactatttttgttcagtgcaaacattcttttaaatcttcactatctcgcaactccattgagaatatcctgtataaagcaggaaattatataagccgtaatatgcccacgggtcaagtacatctgtggttagttgtacctgatgtaaaacggataaaatggaaacggtattttttacgacacaacactacacagaataaagttaagcttgctattattgaaatccgtatgctatctgcttaa

SEQ ID NO: 265761 - DNA, 3108 bp, Klebsiella pneumoniae
atgaacgtattacccattgggtcactggttgtctctgagcaatttgaaggcataggtaaagttgtcactgtcgatagtgatacaaataacgccacggttgctttttttgagtcaccggcgcagcctttcgcacggcaaacagatgtttctttagaacaactcatccccacgataccgcacgaagagacggtaatttattgcattgaaccacaaagcaaacgatgggccagagccagatttggcggtccgcgccccaaaggggattttctcgtaatctttcgcgaagatgatagtacgactttgccaatcgacgaaatttttgttctgaacaaagcaccagataccccagtaaaccctgctgatttccttgccctacaagctaatgatgctccgttctttttccctcaccgccaagcctttattgaaacttacatccagcaacgtgctgcctgccgagcgatggcatccatttccagtagtgccgttgaacttgagccccaccagttggcggtggtacgtcgtgtgcttcaggataaaaatcctaagtatattctagccgatgaggttgggctggggaaaaccatcgaagccggcatgatcgtccgtgaacacgcgttagaaactactggccacgtcagcatgcttattgcggttccagcaccgcttgttaaccagtggcgggaagaactgggtgaacgctttcaactgaaacaacttattattgatgcctcgtcaggcctcgcgggtttgcgacaaaatgaagtcacagaaggcatattgatttgcagccattctgatgcctgtaccttgattgaacagggattctcaccttcgcttatcgtggtcgatgaggttcaccagattgctccctggccgtggtcaggagacaaagatgaaagttataacttcagcctgatcgctcagggttgctggaaagcccactacgttctgttactcaccgggacacctctgcatgggcacgaaaggaacttcctgtcaatgttacactgtattaatcccgaagcctaccaagtggatgaaccccatctgcgagactttaccgaactggtaaaaaatcgtgaaaacctcggcgggatcttctcggggttagtgcctaccgtctcgaacgtcagcttacgccgtaatctggaaacactgcagcagcagttcccggaagatacgattctgatgacgctctgccaacaactcatcccacttattgggacgttttcaccaaataccccggagcgtgaagaagggatccgagatattcgccggcacctaggggaaaactatcgcattcatcatcgtatgttacgtaaccgccgtcaggtttcactcagcttcgatgaaacgaaaaacctcaacctgaaccttctgtttccagggctcaatggagccgtggagtgccgctggcattgcgatgggttagcgttagacgagttgattgatgagtatcgttccttatctttactgccacagaatacgcagtgggcaatgaatgaagactcgtacctcttatggatcgacgatctcctgtcaagtccactctgcgtcatgcaacgcgctaaagtgcatttgggtgaattggaacgcacccaggaagaacgagacctattagaacacattgtttctactgcaaaaaatgaacttcagatcattgataacaagctagccatcaccctgaatgagtggctgcaaaagaatcccacaggaaaagccatcgtcttctgcgatcgtccggatctagcccggcacctagcaataaaactcgagttgctgctggagtatccgcaggaacgttatcagtcgggtcaccccctggtgtgcctgaaacccggaagccccattcgggtcctgatttgtgataaaagcggcgaagatggtctgaatctccatggaggtctgcgactggccgttcactacggtttaccgcgctcttgtagtcgcattgaacagcgccttggtcgtctgaacaggtacagtgcaaacctgaaaggtgtaaaacccgttcagagtctgatcctgaaaaaccacgccgatcttggattacgcaatatatgggccagcattctgaaagacagcattggcgtatttaataacactatagccagcctccaattcgtcctcgataattatctggaaaaggcgtggcgaaatgtctaccaagaagggccggtggcccttgaacgtattgccagcgaattccctggcgaacagggcattctggccaatgaaacgaacaaaattaacatgcaggaaaagttgcttgcgatggatgacgagattgccgaggcggcgatttttgcgcaacagatcagcgctgacgatcatcttgcggtagcgcaatgtaatgcgctgaccaactggatcacacgtgcgttgcgttttcgcgctaccggcaccgcagaaaaaggtatcaagtttcagttcgaactatctgatcgcagtacagggacactggttgattttaaaacctttctcaccacctgcatgctcagtttcgataaagaaggaggcaacccaccgtcaacgcatctgatgagcgctgaacgcattccatctatcgacgggacaaccgtttatccattgcggtacgggcagccatttgtagatacgatctggcaactgttaaacttagatgctcgaggcagttctatggcgatactgcgtgtgatccccgggcaactgaaggaacccagttacttcttccagtctacctggctcgtcacccatcaccagacgcaggatacctactcacaacgccgcacagcagacgaactgtcccccccacgtattatgcaacattggctttcctctgaaggtaaaccagtgactaatccgcaggtactggaacttctcaatggtgaatatgccaaccacgaaacatcgcagaaattctatgcagatatgaatctgcgccctaaactctggcaagaaattgaagagcttatctcaccgaactcttggaaagagatggtggaacgaatctatgccagtgaccgggaacaacagcaaaccgccctcggtgagcaggcacacctccagttaatggccgtcaaaggcgtggtggtgtgcagcaaaaatctactggaggaaatcgcctga

SEQ ID NO: 265762 - DNA, 2481 bp, Klebsiella pneumoniae
atggaagaagaatggtcacgcctacagcaggcgctaaccacctgttttagccaaggggtcacatttaaggatggcatcgaaaatcagtttctgaacagactgattcagatcatcactgatgcttcggcagggcatggtgatatttttgccggctacgccgatgcattacgtgcggctcatgtgagcggtattagtgagccgtggctccccttgccgccggaactgaccgacgttccggcacctgagtggggcatgacaaagtcgcctgcaacgcaacaaattcaactggttgaagaagcagacctggcgctgaccagagccacttatctgcgtaaaatccgaaggaacttgctgcgcccggagaccgatcccgcgctgaagcgcctattacccgaggagccctggctgactcattatcagggatttggtcaacaggccgctattcggacgctactgacgtctgatgataactgtacgttgctggtgaacctccccaccagttgcggtaaaagccttctcacccaactccaggtgctcagcgcaccgacaaacaccctcacgctagtgatcgtccctaccgtcgctctcgctattgagcaggctgacgacatgcaaaaactgcttcgtggtgccgaccaagatcatggtgggagttatgcctgggtcggaggacaagatcagcccgcacgtcaggcgattaaggaaagaatcaaagcaggaacacagcgtgtactcttctgttccccggaggccgttcgctcttctctggttcctgtgctgtttgagctttccagactgaatatgattggcgcgatcgtcatcgacgaagcgcatttgatcgatcaatggggcgcggaattccgccctgactttcagctgattgcccctatgattcgctcactgaaagcccagggaaaatgccgttttcgtacactgctactttcggcgacgtacagcaaaagtactcggaacattctgatcgatcagttccatgatgaaaatagcgaactgattgaagtgtcagctaatttcctacgcccagagccggaatattttgtgcatcatgaggcaaatgaaaacacgcatcgtcagcgggtcgaacaactactgatgaccttaccccgcccgctgattttgtattgcaccacacgcacagatgcggaaatgtggtctgtccggctgcacgaactaggttactggcgaaccggcatattccacggacaaattgacacaaacaatcgcaagaaattgatttctaaatggaaaaatgaccaactcgatatcatggtcgccacctcagcctttggggtaggaatgaataaaaaggatattcgcagcatcatacatgctgccattccggaaagtatcgaccgttattaccaggactgcgggcgcgccgggcgtgacggtagatcctgccaagtgcaccttgtatggcataaggcgcaaatgaaaacggcaaaatcactggccgttgagacgctgattggcgtagaaaaaggctttgcccgctggaaagcgatgtttgatgatcgcaaagaaagtccgatcgctgactacatgatttcactaaacatcaagcccgttcatattgatcaccagggcgataaaaatgaagcttggaaccgtcggacattgctgttaatgcaaagggccaaactcatcaaactggtctttgatgatccgaaaattcctgacacccttcgagataatctggatgacgacagcacgcaactaagtgaatggttcgaaagctactacaaccacattcatatccgtcactgtgacgatgcgcattattcagaatcgcactggaacactcatgtggagaagatccgtcagtccgagttgaataaccgccgggcagcctttacggtaatggaaatgtggttggaggatcccggcaaatcgctgtgtaaaattctgcagaaattctatgaatatcaaaaccatcctcccgagttaacctgtggaggttgtccggggtgtcgccacaaagggaaaggggcattttcccccactgtgggcacagatgtacaaattatacattccgagccaaagaaaaaagcactcttcgtaggcaccgaaaagaaagtgtattacaacgaaaacatgaagttgcattcgttgttaacggaacttcgtgtaacgttgcggtcactgatcacctctggcgaatatgtgtttattcgtgcagacaggcaagtgttcctccagttagagaacaacctggactcgctttcgcacttctggagcgcacagaaaatgacagcgcctgcatcggatggaccagagatcgtgatcatccctaacaccgccgatgcgttcccgaatctacccgtgacgcgttttgagcgaattattattgcacctgagcatctcgccgatcctcagttcccacatcgtacatggtgcgaaagcgcaggtaatgcgctgtcgctggacacttttatcaggcaactacaacatgtcaataattaa

SEQ ID NO: 265763 - DNA, 876 bp, Klebsiella pneumoniae
atgtcaataattaataacgcaggtgctgggagcgtcctagtactccttcctctaattgaacgcattctacaaagcgcacaggaaccgttgtctcaggacactctactcgcccgttatcgccctgataacttgccagctaacgataacgcgtgggggaaattcacagagaacttgagtttctggtgcaaccagggactatggccgatgcgcgacggaatgatgttaccgcttgaagaaaacgcacgtccactggcgcatcgcctgcttgcctgtgcgattgattcttgtcgcgaaaaaggcgttaccaatgggaatgaatgcgaaccgttatggcgggtgctgagttgtctgttgagccttcagcagcattcgccaggaggtcaagaaccgctctccccgccaatcatcacaaagaaaatacacaaatggctaccgggtgaaaaggtaaacgaaaacaccgcgaagttagtaagagactttggccgttttctaggttttctcgagctaatgccggacggaaattatgtcaccgaccctacccgggccattcaatgttttctgccaataatctttggcaacacacgcactcttcccgccaaaatattcatggcaaacatggcggaggtcatgccgatgatggacggcgggcagttcagaaactccgttcatgatgtgatgcagcaggaaaaagactggatctctccggaaggtgacaatatctgcaccagcacatccattgcgctacaacgacttgaaatcagtaagcgcattattctcaccaccggcagtgatgatgaagacgcctcctcactccagttacccgacggcaaaattcgacgggttagccaaatcacgctgagggaggatgcacaatga

SEQ ID NO: 265764 - DNA, 3207 bp, Klebsiella pneumoniae
atgagcatgatggaatactggccgtccagggaaaacatcgttcaatgcattcgcaatgaagcggaagaattagaggatcatgtgcttctggccgtgcatgagccgatgctactgacccgacgcgacgtcaatgaaaatcatgaaatattgcgtgacgaagatctgttccagcaattactcattacggagcgggccatccctttaattggccgttcgggaatgggaaaatcgcatctggtgcgatggttagactgcaggttcaacatgtacctgacggaaaacggtcagcgtgcacaatgggaaattgttcgtattcccaaaaactccagtctgcgacaggtacttttacgcatcctgaaaaatctgacgggagaatttttcgacaacgcacgcacgcgtgttaatgaagtgacggaacaatatcctgcgaaagatctggcagacctgctgttgaccatgatggcccatcagttgcaggacatgcaaaaagcagtgatggaggaaggtaaaacactgcaggcacaaggtaaagacattccatcagaccgactcgcctatatggaaaccatcattgaagaggtagagaacggtatctgcgatctgatcacagaccctaacttcaaacagaatctactgaagcctgagcactgcattttcaaactggccagtcggatgagtaatggtctggaggaaggagaagaaaatcatgataaatatgaacttctaccggaagacctctattttgtttttgagcctgacgatttatccgcgcgtgcacgtcgctacctgaatcattctcaattgcacgagtcagaccaggtagaagcgcgtgctcgtgcggcgcgcgtgctcaatgaagccatgcatgcctcgctgaagtcactcttcaaacgcctgttcaccttcaatgggggttcttttcaggaacttttccaggaaatccgcaaggagtttctgcgactgaatcgtcgcttggtgattctggtggaagatatggcggcgatctccgccatcgaagatgtcctgatcgacagcctgatcgaagaagcggcgcctggcggcgtgcaaaccctttgtccggtccactcagtgattgcagtcaccgacaattatcccggctataaacgccgccaggaaacgttaatcacgcgtgctggctacgagtgggtcatcgagaacgtcgataaagacaataacgaagatcgtattgtctcgctctgtggtcgctatctgaacgccgcacgctttggatcagaggagttaaaaaacagtcctgagcaaggtaagccccagtggccacctgtctggcacagtgatgagatccccaatgcactagaagattttggttattctgccaataagaaattcccgctcttcccgtataaccgcaatgccattttggcattggcggataagcattgccgcgacagcagcggcgagttgatttttaacccgcgtacaatcattaaccgcatcctgttagatattctgcgcgattgcagaatagaagcggaaaaaacacagttcccgccagcaaatttcgctggaattcatgccgttcccgagatcgaagacaagatttcacagatagttgtcaaccgggttggcagttcggtgacgcttgccgccatctggggatatggcattgattcatttgatgaactacgcgaaaaactgccgggcagcgttgcgagtgcctttggcctcgatgaactagcagcgcaactgaatggcaaaggtcccaccatggagtcggcggaaccagcaacaaagaacgcacacgaaacggcgggcaaaacaggcagtacgccggcgggtaaaaagattgacaatccggaattcaaaccgaaagaagaggcaaaatacactgccaaatccgaactaccctttatcagggcggtccgtgcatgggtgaatgacaatgtcattctgccgcaggatgttgcccgtgatttgcgtgcggcactgaacgcctgttatgaaattcatgcacagccagagttgttcggtatgtcttctcggccaccgctgaaagaaggtcgttttacgttgatttcactgccaaaagcggcgtctgacccctcaagcattattacgaacttttactctgagcaggacctgaccgatccttcccgacgggtagatgtgtataacgctgcggtagccctgttacgtatccagtattacgccggtttaaagcaaggctttaattatccagaggcgcaggaagactacactcgctatcaaaacttcatccagtggtgggtgccgcaggctacggaaagcgccattaatcacttccgggcgcgtaacttacaggatgcgcttaaaaagcatctgcaaaaagctctgctgcttggcctggtgacgggtaaagaagaaccggcggagatcgtcaataccctatgcctcacccagaaaggtgtcgggagaaccgaagggaaaagtaccggtcgaacgctgacgacctctccttccgagatctgtttcagagggattgaggcgaccctgcatccgcacgccagcgccagagtcgccgaagccagggcgcaggcgctcgtaggatgggatgatgccagaaaagcgtggcttgaacaggttgccatcactgagcaaggctcaggcttgggcagcagtcgtgcgctggatgccgatgtaatatattccgcgctgaaaacagtgttaaaacagccgcttggtgcggaaattgaacgtgcggcgctctccgtcaaacaggaacttgccagcacgctaaaaaatgttcatctctttgccaacattaaagatagcgacgatttcctcagccaactgaacgactggcagacgtttattgagactgtgcggaccgagcactatcccacaggcagcgctcagtacaaaccatcttcgtggctgctgggtgaaattgaagccctcagaaccgacgccgaggagagtctggcgactttaattgcgttactttccattgaaaaacagaaagatagtgcgaaattgtggctggagatctgtcgacttgacggtgactacgtttcaagaatcagcagcgtacttgcgcaatggcaactggtacaacccaagatcgcgttcacactccagcagatgaacgccaaaggggatatccagcaactgactcttgctctgaataaagtgaatgaccgtctgaaaacacttgtgagcgatatcatcgcctctggagccgatcaatga

SEQ ID NO: 265765 - DNA, 849 bp, Klebsiella pneumoniae; identical to SEQ ID NO: 100179

SEQ ID NO: 265766 - DNA, 4437 bp, Klebsiella pneumoniae
atgtctacggctgatttgtcccacttgcaccaggcgctggacctgctcgaagagcgggaagcggaactgctggtctggggggatacggatggcgcatttacccatgccgatatcatctcactctttacccggcacctgccctacgaagatgcagagtcgttactggcagaactgcagaatgctgccatgctcttcagcgtcccgaccagcaaaggggggacgcgctaccgcacgcgtatggcggaatcggtctacctgttccgccaccagcgtcaatggttccgcgatcaaccgcttcagcgagcccggatgcttgtcgccgactaccgtttcgtccgtcgcccgcgcaactatccgaagcgggaacttccggcgcaaacggtgctgagcaaatgggtcgacgtcccgtggatgaacgagattaaacgcaaggcgctttcccgactgatcggcgacttttccattgccggctttcaggaacgctcaaccgaacgtattttgcgcgcctggcactttcatagtcatcatgctcacgcgaaagaagccaccgggaccattgtctgtgccggtacggggagtggtaaaacgctggcgttctatctcccggcactcacctcgctcctcaatgatattcagcgcgacaacgcacagcgggtcaggacgctggcactgtatccgcgtaaagaactgcttaaagatcagttcatggaaacctggggcaaatgtcgtgaactcgacagtcaggccctagcactggcaggacgcaagatccgtattggttcttttttcggtgacaccccgttcaaccatcaatacgcaacgaaagataaagacaaggatatgccctttgatttactccgttgcaccacgccgaaatgtccggggcaaatgcactggaaagcagaagatatcaaagcgaaaagagagattcttcgttgtagccactgcgatcacagcgtagacagtgacgaagtgatcctaacccgcgtctcgctgatgaaaaacccgcctgacatcctgtttactaccaccgaaatgctcaatcagcacctcgggaataaccaaacgaatcacctatttggcgttggcatcggcgtaacaccgccgccggtagtcctgctggatgaagtacacacctatgtggggaataccggtgcgcagacagcctatctgctgcgacgctggatacaacttgcacgcagtcgcccccattttgtcgggctgtcggcaacgctaagtgacgccgaacgtttcttcgccgatctggtaggcgcgcataaaaaacatgtggctcttatcgaaccgaagctccacgaaatggaagatgaaggggctgaatatctgctggcattacgcggtgatccggtctcgcaaaccgccctgttgtctactactatccagaccagcatgctcgcccggcgtattctggatacgaaaaggaaaaaatcacgcgggacatgggggcaaaaaaccttcgtcttcaccgacgatctggatatcaataaccgactttatcatcaactgtgtgacgccgaaggctggcggttacgtggtcaaaacttatacgttgcgaaaccgccgctggccgctcagcgtctggaaacaccgcaaaacagccatacgctgactctggcaggacagaactggcgtatcgcgcaggatattggtcacccacttgacgaaaatgaccgggccatcgttgcccgaacgtccagtcaggacgtcggggtcgatcctagagcggaagtggtaattgcaaccgcgtcgctggaggtgggctttaacgacccctcagttggcatggttattcagcataaagcgccacgtaacgttgcctcctatttgcagcgtaaagggcgtgccggtcgttcaagaactatgcgtccgtggatggtcgcagtcctgtccgaatttggccgcgaccgcgtcgtttatcaacgctatgaagagctcattaatccagagataaaaggacagtcgttgccgatgggcaacattcatatccagaaaatgcaggcggcaatggcgacacttgactggctgagcatgaagatccccggaagtaatatctggtcattgctgaataaaccgcagacaaagcgagagtctcttgaccatcttgatcgtatgttccacctgattaccgccgtgatcgaacaacatgcgtggcagcaggagttggaaaagtatctgttctacgcgctgcgcatcactgacgagcaacttcagcgtgtactgtggtcgccgccccgttcgatcatgatggagttgctgccgacattaaaacgacaactcaccacccaatggtcgcggatgggccaaccggaggcagaccgttcgacgggacgttccccgctgccggcctttattccttcagcgctattcagtgaactcaatctgccggaactggagatccatctcgagcggaagttcaagaaacgtgaacatttgccctttattcagggtctgaaagagtttgcgccggggcgcatttccaagcgctatgccgtttactccgacaatgaagcagactggcttatcccgaacaactttgttccggcgatgaattgcgtttcggatgttgattttgaaattgagcaggctttcggcgatacctggcagcccgagtgtatcattgagtatgaaggtcagccccctattagggtcattcgcccgatgcaggtgcttacgcgcgcgctgcgattcgagcaaaatctcaccgagaaaagcaactcgcaactgtactggcatacccggtttaacccagacgatcaggccgatccgctccccattcctgccggcccgtggacggacaccctccgctccattacgttctttacccaccagaacatgacacctctcgacgtcacgcgttacgccacccacgcaacagcctcattacgcaataaaaccaagcaacaggcgcatgtgaacttcaggtgggtcgacaatggcgagcctgtcggggttggcgtgcggcagtgggtggatggcgcccggctcagatttacgctgccgcccactctgctgcaacgcctccggcatgacccggccattcagcgcgcactgcgaacgctctatttccagcatcggatcaaacatgaaccacgcttcgaatatgacacgttcaccgctgactggatctacgagtgctacctagcggcggttacgcgggaattggccacacagtcgtctctggcagactctatcgcggaattaaaaaccccggacggccgacgtcgactgactgatatcgcggacacactcttccaggcagagaatatctttgaaaatagcgaggatggtgaagacgacgccgaaagccaggaactgcagcaacatttgcgcaacctgtttaaagagaccgacattctggaaatggtggacaggcacagcgcgatcctgactcaggatctcagtgatgatgtcgattttcaggactggctacagcatctgctgacaacgacccttgccggagcggtcaaacaaaccagccacctgttgctgccggatgtcgatgaacgcggtctggtggtggataccgaactcaacgacgaagtactgaacatctggctgaccgaatcagaacccggcggctgtggcatcattacccgtctggaagacgtttttcatcaggatccggtctccgtactgaatctgtttatgcgtagttttgccgccagcgattacgagcagatcgactacgacctgttcgaaatgctttcgcggctcccctcttccagcgagctccaggaggccttaaatgcgatacgtaaggccagcagccatccgcagcgccgtgaggctaacgcccacctcagagcgctgttgaaggcgcagggatttgcactcagtcacagttttatgtcggtgctgcacacacgggtactacgtccgggcagccaggcatcacatgatgcgcagatgcttgcatatctcaacgcatggcgggaactggaagacaaagccggatacgaaatcgctctgaatatttttgcccatacccaagcgacgcaagaactgcctgacgccagtgtgattaaagtttttgagcgcttttgcaaaattcagggaatgctctggcagcgcggcaatgccatccgtcagtcggttctcagctattacaatccgtttaagtccggtaacaacctgactgaacgactgctgctaagctcactgtttcaacagacggcgtgcagcatcagcatcagcgagaacgactggttagcgcagttacatcacgccattacccaacacggctttgcagaactgcatatcccgcgcgaggcccgccatcgtattgtggaagtgatctctctggtgcaggtgaccccgattgagtactttggtttgcatctttatccccgcgaatccgccgtggattatcaggatggcaatctagtgttacgtattgaactggccgaagcgctgctgtaa

SEQ ID NO: 265767 - DNA, 531 bp, Klebsiella pneumoniae; identical to SEQ ID NO: 100181

SEQ ID NO: 265768 - DNA, 2166 bp, Klebsiella pneumoniae
atgactgatactcctcaatgggtgcgtgacttctttggcaacggaaatttactgaagctggacaggttgctagaaaacgttgaaaacgcctaccctgcggacttaaaaaccgtcttactgccgctctacgagagcgcgactgacgctcagtggccgatcattctgccctggtgcgatgctcatcgctgggtattttttgccgcggcagaaacggatcgcaccacgctggagctcagcaatgtgttgaatgccaggctggggtctgccgatgttattgccgatagaagggtgactttcgtccccgcgcagggagcgacatcgctgtctgaaacggctctgctgacgcactgtccggccggatttatccggatcgaattactgcccacaaagcagaaagataaaccagcaaaagagcgggtcttcgccgcgctcaaagacgttatcgccctgtttcgtgataggccatcaatcgtacgcacggtcaaacgtccctttgggcggatcttgagtgatttcattctggcgaatagccaaaaagacgaagccacaagcgacgctttactacaggaactgaagaacaacggcgcgctttcgcgacgcaaccttatgctgcttgaactccagcaggcgggtaagttagagaagtgggacacgctgctgaatcacgattcgcttgctgatttggttcggggacgcattcccacaactctgatgcggatgctgctgaaagcataccagcagcgcttttttacacccgacatccacgggtatccgcaggcctccccggcggatcttcgcccgcaatgtctggcgctacaccctctgtttacgcagatgccttttttatcccaggatgaggctgactttgcggcgtggaaaacctgggccaccggcgtgatgcttattggcgaagtcgacctgctcaacgcgttaccagaacgcctaaaaaccgactggttgagtggattgcacacctgggccagtcggccgttctacgttgtgagtccgtcagcagcgacagcgacggcgtcgctcccggatacgctgcaacagcttgccgcatatctgcaaacctccctgaccgcaacgcaagaggagattaccggctacgcacaaacgctccacacgcttgatcagcagttgatagagcaggcgatggcggtaccactgctgaaaacactcatcgaggagatccgccatctgaccaatccgcaaatcgtgggctgggatatctgtttctcccgactatgtcagtcagaagtcgacagcaacagcctggtgcaactggtcgcgctggaaagtgaaaactggcccgccgactcgttccatgaagcgacgatgctccagttactatcaagtcaggttccaccagacgcgttcccgatcctgcgtaacgtgatgcctgcctttattgaatggcttgaacgtcatcaactcagtctgagtagcacgacgtggctgaagtggctggatgttcttgcgatggagcaaagcgtcagtcaggcggacattaagctggccgcgatggcgacggaccggttcctacaaggctccgttagccaggaagcttatcaacagtccggtgccatgctggaattgatcgtagaacgagctagttctttccgcaacctgtctgcattgtgcgagttaatcgaactcttccttgatgctccggtgcaggatctggcgacactcacctcgctttggctcagagttcagtcttttgtaggcggaatatgggcacgactggatccgactactcgtaccgtcatgcgcaacttggcgacaggagtgctaggggaaggtgcagagagcgtatttccggctgaaaaggatagcggtacggcagatgcagaagatgagttgccagacttatccggagccagagtagcgatttatagcctgacagaaggtgcggcgagacgcgcgaaacagatgctagaaacgctgttcgccgggatcagagtagagatctgccatgcgcacacggcaaccgataagctagttaatcaagcgaaacaggctgattacttcatcttttcagcaggcagcgcaactcatcaggccttctacgcggtctcagcgcagcgcagagatttaatttatccgacaggtaaaggtgcggggtcaatgctgaacgcatttattgcgcatgttcagaagtag

SEQ ID NO: 265769 - DNA, 234 bp, Klebsiella pneumoniae
atgaaaactttcgatacccaacttgcgatgagtattgtatcgcactcaacgggggggtttagttatgacacactcgctagggccttgatttccaaggataaaaatgaaaattctgacgtcctacttgaatcatgtcgaaatttttgtctctctctagaggaaaaaggtattctgaggcgatgccaaaagtgttctcattctcaagatgagtatttcgagtatattcctcactag

SEQ ID NO: 265770 - DNA, 2856 bp, Klebsiella pneumoniae
atggaaaagacatacaacccacaagatatcgaacagccgctttacgagcactgggaaaagcagggctatttcaaaccgaatggtgatgaaagccaggagagcttctgcatcatgatcccgccgccgaacgtcaccggcagtttgcatatgggtcatgccttccagcaaaccatcatggataccatgatccgctaccagcgcatgcagggcaaaaacaccctgtggcaggccggtaccgaccacgcgggtatcgctacccagatggtggttgagcgtaagattgccgctgaagaagggaaaacccgccacgactacggccgcgacgcctttatcgacaaaatctggcagtggaaagcggaatctggcggcaccattacccgtcagatgcgccgtctcggtaactccgtggactgggagcgcgagcgcttcaccatggacgaggggctttccaatgccgtgaaagaagtctttgttcgcctgtacaaagaagacctgatctaccgcggcaaacgcctggttaactgggacccgaaactgcgcaccgccatttccgacctcgaagtggaaaaccgcgaatcgaaaggttctatgtggcacatccgctacccgctggccgatggcgcgaaaaccgctgacggtaaagattacctggtggtcgccaccactcgtccggaaacgctgctgggcgataccggcgtggccgtcaacccggaagatccgcgctacaaagatctgatcggcaaattcgtggtgctgccgctggttaaccgtcgcatcccgatcgtgggcgacgagcacgccgacatggaaaaaggcaccggctgcgtgaagatcaccccggcgcacgactttaacgactacgaagtgggtcgtcgtcatcagctgccgatgatcaacatcctcacctttgacggcgacattcgcgaaagcgcggaagtgtacgacaccaagggcaatgaatccgacgtctactccagcgagatcccggcggagttccagaaactggagcgcttcgcggcgcgtaaagccgtcgttgcggcggttgacgccctcggcctgctggaagagatcaaaccgcacgacctgaccgtcccttacggcgaccgcggcggcgtggttatcgaaccgatgctgaccgaccagtggtacgtgcgagcggacgtgctggccaagccggcagtggaagccgttgagaatggcgacatccagttcgtaccgaagcagtatgaaaacatgtacttctcctggatgcgcgatattcaggactggtgtatttcccgtcagctgtggtggggtcaccgcatcccggcatggtatgacaacgacggcaacgtctacgtcggccgtagcgaagacgaagtgcgtcaggaaaacaacctgagcgccgacgttgccctgcgtcaggacgaagacgttctggatacctggttctcctccgcgctgtggaccttctccactctcggctggccggaaaacaccgacgccctgcgtcagttccacccgaccagcgtgatggtgtccggcttcgacatcatcttcttctggatcgcccgcatgatcatgatgaccatgcacttcatcaaagatgaaaacggcaagccgcaggtaccgtttaagaccgtctacatgaccggtctgatccgcgatgacgaaggccagaagatgtccaagtccaagggtaacgttatcgacccgctggatatggttgacggcatcaccctgccggaactgctggagaaacgtaccggcaacatgatgcagccgcagctggcggaaaaaatccgcaagcgtaccgagaaacagttcccgaacggcatcgagccgcacggcaccgacgccctgcgcttcaccctggcggcgctggcctctaccggccgcgacatcaactgggatatgaagcgtctggaaggttaccgtaacttctgtaacaagctgtggaacgccagccgcttcgtgctgatgaacaccgaagatcaggattgcggtttcaacggcggcgagagggtgctctccctggccgaccgctggatcctcgcggaattcaaccacaccgtgaaagcgtaccgcgaagcgctggataacttccgcttcgatatcgccgccggcatcctgtatgagttcacctggaaccagttctgcgactggtacctcgaactgaccaagccggtgatgaacggtggcagcgaagcggaactgcgcggcactcgccatacgctggtgaccgtgctggaaggtctgctgcgcttggcgcatccgatcattccgttcatcaccgagaccatctggcagcgcgtgaaagcgatctgcggtatcaccgccgacaccatcatgctgcagccgttcccgcagtacgatgcctctcaggtggatgacgcggcgctggccgacaccgaatggctgaagcaggcgatcgtcgccgtgcgtaacatccgagcggaaatgaacatcgctccgggcaaaccgctggaactgctgctgcgcggctgcagcaaagaggccgagcgtcgtgtgaacgacaaccgcagcttcctgctgaacctggcgcgtctggaaagcattaccgtgctgcctgccgatgataaaggtccggtctccgtgaccaagattgtcgatggcgccgaactgctgatcccgatggcgggcctcatcaacaaagaagatgagctggcgcgtctggcgaaagaagtggctaaaatcgaaggtgaaattggccgcatcgaaagcaagctgtccaacgaaggctttgtcgcccgcgcgccggaagcagtaatcgctaaagagcgcgagaagctggaaggctacgcggaagcgaaagcgaagctgattgaacagcaggcggtgattgccgcgctgtaa

SEQ ID NO: 265771 - DNA, 252 bp, Klebsiella pneumoniae
atgcagaccgaaataggtccccataatgcagaaaatggagaaggtgacgtagcacagcagcttgtgcggcaggcggacggtgacttgcatcagggggataaacagtcggggtttgctcatcaaccacgcgatgaccaaaaatacgcacatctgctgaagcagcagcaacaccagatcaaactcgtacatacccgcaaaccacacattcctgaaagcgcgtaccataccctgactggcgaaaactttctttga

SEQ ID NO: 265772 - DNA, 1014 bp, Klebsiella pneumoniae
atgatttttcatgtcgttggtggggaactggagatccccgtgctgctcagtgaaatatcaccgcctgaacacgtcgattttttcctggaacggattaaatctgcattaagcggtaacatgttccgttttacggaattgtccagtaccgagcgtattctgtgcctcatcaggaacaatgccgataccgacgcgagctgcttcaccgaacagtccacctttctggcaaacgattttcagtctcaccaccacacaaaaaatgccagtatgggggtattttttctttttgagcttcacaccctcaacgatgaaaaactgtttgccctcattaaatatgataacgaggatgtggtacgttacgtgctggatgcggagggagacgagtttcaggttcccagactcgaacgtttccgcgaaagcttcgtcaagaaagctgaagccatgcagaaaattgctctggtccgcctgacggaagattctcagggagggcgggttgtcgtacgggatcgcagtaaacgaaccaatatctccgtttattttgagcgttttttacaggtacagcgcgtcaacagtacaaccgatctcagcgacaaactggttgccgcactcaaggatgtcttcaataagcatcgagacctgttaccggacgacatcagacgcagcggtattaacaagatttatgaaacgttacatcacggggcgcaggattttaacaccgatgaacccctttccctgctgaaccaaatttttggaccaatggaagaagatcatccattggtcaaatcctttacccgaaaaataaaagacctgggaatttcaggtgaatctttccggatcacctctaagaacattcctaagccacggaaaagaaaactggaaactctggaagatgttattgttatctacgatgaggataatgcaccggatatccaaacgatggaagacgggcgaaaacgtatagtgatagtgactgcagggctggtgacagatgacatcgatactggaaaaaatcggtaa

SEQ ID NO: 265773 - DNA, 276 bp, Klebsiella pneumoniae
atgacatcgatactggaaaaaatcggtaaggcaattgactgctcacgctgcgcatctgatctggtgctcacggaagatcagcaggcaaccactcggaaactgttcatttccggaaccatggataatgacgcccttcagttatggggggaagtaatagattctgacgccgaaaacctccggatcagctttgttgatgaaagccgggatgatatccaccccgcgcagggtgtccccggtcagaagcattttatcaccataatcagcgatgaaatctaa

SEQ ID NO: 265774 - DNA, 156 bp, Klebsiella pneumoniae
gtggacggcctgaagggcttcccggatgcgataaacagcgtctatccgcagacccatatccagctgtgtatcatccatatggtgcgcaacagcctgaaatatgtggcttggaaggactacaaggccgtcaccagcggcctgaaaacggtgtattag

SEQ ID NO: 265775 - DNA, 477 bp, Klebsiella pneumoniae
gtgttatatgacgacggtgagattgaactgagcacgccacgtgatcgcgaaaacaccttcgaacctcagttgatcaagaaaaaccagacgcggatcacgcagatggacagccagattttatccctctacgccaaaggcatgactacccgcgaaatcgtcgccaccttcaaagagatgtatgacgccgatgtgtcacccacactgatatctaaggtcaccgacgctgtaaaagagcaggttactgagtggcaaaaccggcagctggatgcgctctatcccattgtttatatggactgtattgtcgtaaaagtccgtcagaatggcagcgtgataaacaaagctgtcttcctggcgctgggtatcaacaccgaaggtcagaaagaattactgggtatattgctggccgaaaacgaaggggcaaagttctggctgagtgtgctcactgagcttaaaaatcgcggccttcaggacacctga

SEQ ID NO: 265776 - DNA, 195 bp, Klebsiella pneumoniae
atggacgaaaagaaactcaaggcactcgcagccgaactggctaaaggccttaaaactgaagccgatctcaatgcgttttcccgcatgctgacgaagttaaccgtcgaaacggctctcaatgcagagttgactgaccatttcgggcacgagaaaaatgcccctaaatcaggctctaatacccgaaatggttactag

SEQ ID NO: 265777 - DNA, 1038 bp, Klebsiella pneumoniae
atgccaatcatagcagtaattcctgatgaagaacgacgactgatgcgtaaagaagcccaactgactcgtgataaaaaccatgccagacgactcattgccatactgatgctgcatcagggaatgaccgttaccgacgtcgccagactactttgtgctgctcgctcatccgtcggaagatggataaattggtttactttacatggtgttgacggactaaaaagcttcaaacccggacgcgcgcctcgctggccggtcgcagatatcctgcacatcctgccgtttctggtgcaacgttctccacaggattttggctggcttcgctcccgctggagcaccgagctgctggcgctcatcgtcaaccgactttttaatgtgacgcttcatcccgccaccttgcaccgatacctgaaacaggcgggtattgtctggcgcagagccacgccgacgctgaaaatcaaagacccgcactatgatgaaaaacaccttgccattgagcaggcgttggctcagaagcagacggaacatcctgtgttttatcaggatgaagtcgatatcgacctgaacccgaaaatcggcgcggactggatgttgaaagggcaacagaagcgcattgcaacgcagggacaaaaccagaagcattatctggccggcgcacggcattcaggtacagggcgagttcactccgtcactggcagcagcaagagttctgatttatttatcaatctgttagaaacgttgcggcacacatatcggcgagcgaaaagtattacgctggtagcagataactacatcatccacaaaagccgcaaagtagagcgctggctggagaaaaacaagaaattccggttgttgttcgtgccgacgtattcgccgtggctgaatccaatagagcgattgtggttgtcgttacacgaaaccataacgcgaaatcatcagtgccagtacatgtggcagttactggaacgggtaaatcagtttataaatgccgcctcgccgttccccggcaatcaacacgggctggctaaagtggagcggtaa

SEQ ID NO: 265778 - DNA, 762 bp, Klebsiella pneumoniae
atgaacaatatagaaacagattttatgcgagatgttggcacaaaatttatttatcctgtatatcagccaatagtaaatggccatcgcagaatagtcggttttgaaatgctgattaggtggtgtgttaatggtgttgagaaacaacctcaggactttttaccctattttaatgaaaaaaaactatggcttgcacttacagccgtgatgttagaaacagcagcaaagaaagtaaattattatggtggcaagatctatttttctatcaatatcccagccgttttgctgggtgatgagcaactgtatgaattgcttgatatagcaaagcgattgttggttaaagatgattggtatgactgtttggtcctggaaattccagaaaatatttgccttgaaagtaaggtgcttgagagtattaatcatttgtactctcaaggatggcgtctggagttggatgattgcttttctgtgagcagtggcaccttcccgataaaaacagtgcgctttagcggttataaattagaccgttctatcattgcaacatttttggccgatagctatgaggccagtttaatccgcgcattgaattatttttgtgtattaacgggcagccgttgtacggcggagggtgtggatgaccaccagaaattttcaatgttagctaaattaggtattgataactttcagggatatgaaatctcgaaaccagtaccggatgcagaattagatgacttagtacgattccattgctatcaacagttttag

SEQ ID NO: 265779 - DNA, 9333 bp, Klebsiella pneumoniae
atgaataagatttatagtgtagtctggaattctgctcttggaatatggacggtcgcgtctgaattgacgagagggaagaagaaaagcaactcccggaagactctcgcagcaatgacggccatgacattgctaagcatgccacatctggcatctgcgaccattaccactacgggtacacgtaatatttctgctgattattcgctgattcagccagggacaacggataacgtctacaacgatagattcctctatagtaatgatacccttttcggaacattaacgatctctggcgctttaccgacgatagagcacggcgtagcgggtgttgtagacaccacgaccattgccgagttattagatcaagataaaattacgctgacctcaacggtcaatggcgttcaaaccaatattaccgctgccgatttggataattattattataatagtattggcacgcttccctcacaaaacgttcagtcatcactcatcgatcccgcaacagtaagctcggcccctatcttggtttacgataccactgcgcttaacaattatctgacaccgaccctgataggaagcatggtgttagatacgtacaatgccacagtttctaaaatttataataattttggcatcgtcgaagccagtaacggtgcgacagtgaatctgaatattggcgatgatagtaaaaacgcccgggatgtagccaataccattagtctgctggctaaaaatagttcgctattaaagagcagtggctccctcagtgcagtaaactggatttctgataactatatttcatttggtgtcgcacccgttgtcccgccggaagaatttaaaggttcgcaggcgacgagtcagttcggtacaacattaactgttgatacttatggatatgatgaaagcggtaatgcaatacaaaccggcaccaagacgttcactattactaacacccaagaacttggcgcatttaatgattggttgctggggcaatccgctgacgcagtgactaacgtggatggtgagaaggtgagccagcttcaactgaagctggatgccgagaaaggtacggcgtcagtccagactgttcaagattggtattcaggcatgatccagcaggttttggcctccaatacgacggatgccggaacggttgactgggattataaagtctggacggatagcttatcccataccaataacgccacgctggcgaataccgaactccatgcgatttacgcggatggtcttttggcaacagggacattggccgcgggctcaatactggcggttgatggcagtattgatggcgcgatgaaaggccaagatggcgcggtaattactaaccagggttcccttaacgtattacggacatccacagggcaggcgctggcaatcggtatgcaggcggaaaatgcggtggcaacaaacaccggaacgatcaactccggcctgtttattgataaagatggtcgacagacggtgaacagttacggcgctgtcggtatgcagggcaccggaaccagcattattactaacaatggcaccatcaaccaagcgataacgaccaataattatggcgccgccgccgctgccaacccctgggcagagacgacaacttcgtcgacgccaaccaccctggccgtcggcatgcaattgtcagataagtcaagtggtgtcaacaataagaccatcaacgttgttgatggtaatctcggcagcgcatcctttggcaaaggctcggcgtatggcgttcaggttagcggcgcagccaccttcgacaacagtgcgaatggcaccatttatttagggcttaagggctcagataccagccaggatgtcaagatggacggtggctcaagtttgagcgcgggtatctatgccgaggggagcggcgctgtgactaacgcagggaatattacccttggttcgctggtgcgtaatgcggcaggtatgctgattaccggggcaaccggtaatgtcgtgaacagcgggaagatttcggttaccgggaatacatcagggctgtcaaattacggcattcaggtacgtaatagcggcgccaataacaatcaaaaaatcgagaacgatggtcagattgttgttacaggcagcaacaatatcggtattcaggcgctggcaaatagtgacaatacgaaagtgaccaccagtgacaccgggagcatcgatgttaccgggacaggtggcgtagccaaccgtaattatgcgctttgggtagaaggttcaggaaataatcaggcggtcgcggatatttcttctgctattaccctgaatagtgtcggggatattggcgttcatgtgcgtaataatgcgattgctaatattgatgccaagggtagccccgtcttcaaaaacggcgatcagatcggttattacttatacggcaacggggcaacagccaatattggcaagacgattatcgatgataatggccagactaacaccactattttccgcgtggcgcaaggcgcgcaatttttggggaatacgcaagatccagaaactggggtcacctctgatattcagcttacactgaatggcgagggttctgtcggtgtactgggtaccggatctggcaccgtggttgacaccggtgaggcgagtttcaacgtcgcaggaaccggcgcctcggcgattattattgagggcggcgccatcggtaccattgaccagcaaacggcgattaacctcagtggcgaaaattccaccgccggaaccgttgatggtcaggcgcatgatatcaaaggggctaatttagggagcgccgttaataccaccctgacctcgaatgcaactattacgtctgatgcgggggataattcggtcatcgcctatgtggcgaaaaatctgggtaatcttgttctcgacactctggcggttgtggatctggtaagtaccgatagcatcggtgttgatgtgcagcaaggcggggagtttaccaacaattccgccaatgttttgcatgtcagtgatggtattggtgtgcgggtatctggcgccaatacacaagttaataaggtgggcaaaattcaggttgatgatggcactgccggtattttcctgaccaacggtgcacaattaactgttaacggtgacggcagtggttccgatgcaattaccagtaatggcaccgctgacggcattcgcctcgatactggggcaaaatcgcttacggcgaaaaatgtcaccatcagcgcgttggggagcggcgctggcattcagaatgatgccaacagatcgaacatcaccctcaataacgtcaccatcaatgccactgatggcccaggcattcgtacaagtgtcgcgttaaacgtgaaagatggggcgaataatgtcctgaacgtctcgggcgacggcactggttttgcctttgagacgcgagatggtggcgccgttaccggtgatttgaatattggcaccgggtataccgtcaatgttacgggtagcgacggtagcgggattcgcgccaatacagacgggaaggtgaccacggccgccgatattaacgtaaataatgcggcgggcagttcggcgatcatcgccaaaaatgtcagcgcattaagcaataccggcaaaattatttccgccagcaccagcgccccggtgattgatgcgagtggcgacagcaataaaacgatcaccaataccggcactattcaggccaccaacaacaccgcggttgctattgaatccggcaatggcaatgacaccattgatatcagtggcggcaccaccagtggtgtgattaacaccggtggcggaaccgataccttcaactggaatagcggcactttcgccggtgaggtgaatttcgccggaaccaatagcaataatcaagccaatattggtgatgtgtcattagcgaatacgcgccatattacgacggcatccggtgcaggcaatgcgctcacctttactaatacccacggcgataacgcgaaaattggcacgctggccagtgatgatctgactactggcaccaatatcggcaccggttggggcacgctgaccattaccgggccacaggccgatatgcggattgtcgatagcctgcaactggccagtaaaaatattgccgttaataatggcgccacgctgcgttctggcgaccgcggtgacccgaccagtaccgccgcttctattggcaactacaatgtcaccacccaaggcgcaaatagcaaggttatctttgataccaccggcgatgacacgctggcgcaaatttatagcggcgtgattagcggcgatggcaactttgagcgcgccaccgggggaacgacaattttcaccgccaacaatacctatagtggttccaccaccattgatcagggtggcactttgcagttaggcgcaggcggcaccaccggtgaagtcaatccggattcgcagatcattgataatggtattttgaagattttccgttctgataaagtgctgattaatggcgtgatctctggtattggcgcattagagcaaatcggtagcggaattacccgactgacaggaaacaatacctataaaggcgcgacgaccgttagcaacgggacgttgctggtcaatggcgaccagtcgcaagccaccggcagcactattgtcagtggtacggcgacgttagggggtactggcattgtcggcggcgatgtccagatgaatggtccctccaccctcagtgcgggcgatgagggtgtcggcacgctcaccatcaatggtaatttacaacttggcagtaatagcacctcggcattcgaactcggccaggcctatacgccaggcggtagcctcaatgatcttatcaatgtcagaggcgatctgttgctcgacggcacactggatgtgatgacctcgccaaacggcacctttggccctggcgtgtatcgtatttataactacggcggaacgctgaccaacaataccttagacttgggggatatgccgcagtcgcaggataaaagcaacattttcgttcagacctcgattgataagcaggtcaatttggtcaacgctaacggcgtgacgttgcaattctgggatggtgcagcagtcggcgaaagccatggcgcatcaggcattgaaggcaataataagatcgatggcggtgatggcaaatggatggcgattggcgatgcgggcgatgataactggacgacggcgaccggcgtaggcaatgcgccatgggcgcagaaatcgtttgctgtgttcacggcaacgccaggtacggtgatggtggacgccgccgccggtgcggtcaccttctctggtgcgcaatttgacgccgatggttacctgattaaaggcgatgctctgaacgcatatgccacgacagaaggtgcaacctatgccgggcaaacccccggcaccggtgagttgctactgcgcgttggcgctggtgcggcagggcaagactatagcgcgaccattgcgtccgttatccgtgaagccagcacggcagacaagttaacgctggtcaaaaccgatttaggccggttgattctgagtggcgataatgaatatcgcggcggcacccgcattgatggcggcacgctgcaaatttcttctgacagcaacctcgggcaaagcggcaccggcctggctattaacaacgggtcagtcttgcaactgggcgcagatttgagcaccgatcgcacgattaccttgggtgcgtctgatagcgcggaagtctttgacctgaattcgcaccactttactccaggtggggatattaccggcgatggcaaactgaaaatcaccagcagttccagtgatgcagtcagcacgctgacccttgacagggcaaacagttaccagggcgaaacggaaattgccggtaccagcgagagcaataatgtcaccgtcaatgccagtaaaaccggtgcttttggcagcaatgaaagcagcactgttagcgtcaataacggagcgacgcttaatgtgaacggcatcggcaccagtctggcctcgctgaccatgaacattgctgacagcttgttgaccttggctgataacgtcactgccgccagcgctaagatcaatctgacaggtagtgcgcaggcgatattccagcagaacgccactggtggtaatgcgacgataaatgttggcgaacaaagtctccttgcgctgacagaaaatgccagcggcggtaatgccgaagtgactaacagcggtttgatgacctttgctgaccagacgatggcggaaaatgccgttgtcacgaacttggctggcgccaatgtcgatatcagtggtgtcgatagcgtcaccgccattggctcgttgtccggcgcaggggatgttgagcttgcgaataagcagcttgcgctgggacatctcggccgtgatgacctcatcagcggcattatcggcggcgataacggtagcctggtgaaaacgggcggcggcacgttgacattaaccggagataacacctataccggcgtcaccaatgtagaacagggcgtgttgctggtgaatggcgatcagtcggcggctaccggcctggtgaccgtgaactccggggcgacattaggcggggacgggattatcggcggcgccgtcaatgtgctggacaacggccatatcacggcaggtgctgatcttgatagcgtcggcaaactgaccaccggggcgttgacgctgagcgataacgcgcaactggattatcagtttggtcaggcgtataccccgggcggcccgctcaacgatgtgatcgatgttaatggcgatcttacgctggacggtaagctgaatattgtcacgtcgccgggcggcagttttgatgttggcgtctatcgcgtcatcaattacagcggcgcattaaccaacaatatcatggatatcggttccgcgccggaagccacagacagcctgtatgtgcaaacgtcggtgaaaaaccaggtcaacctggtcaaccatgctgggctgacgctgcgtttctgggatggagctggcggtgaagatggcgtactgaaaaacaacaacgtcatcgatggcggtgatggtatctggcaatccagccgagggaacgataactggaccaccgacgaaaccacgccagaaggcgcgctgaatgcgccctttaccgatgccgcctttgcggtcttcgaaggcgcggcaggtaacgttaccgttgataatagtaaaggcgatgtgatcatcagcggcgcacaattcgccagcgatggctatcgtgttggtggcgaggcgatcaccaccaatacggctgacacgctgattcgcgtgggtgatggcacggtggatggcgcgagttatatcgccaccatcgacagcgtcattcgcggcagcgggggaatcaataagagtgatctcgggacattgatcctcactggcgacaatacctacaccggtggcacaactatcacggccggtacgctgcaagtggcgggcgataacaatcttggcgccatagataccggtattacctttaatggcggtaccctgaaatatggcgatgcgttcaatacggcgcgtcaggtcactctggaatcggcgggtgggacgtttgataccaacggctatgatgttgctctgctaacagctgtcgaaggtagtggtcaactgagcaaaactggcctgggaacattaacgctgacccaggataacacatacactggcggtacggttattgaacagggggtattgcagcttggtaatggcgataagacaggtaatgttcagggtaatatcgttgataatggcattctcgatattaatcgctccaatacgctgacaataaatggtgatatcagtggtacaggccaattgcagcagattggcagtggtacgacggtattggcgggtaacaacagctacagcggcgcgacactgattgccagcggggtgttgcaagctggcggcaataataccctgagcgcagcgtccaatcacagtgttgcggcgggcgccacattggatactcaagggtataaccaaactgtcgccgggttgaccaatagcggtaatgtctcgctcaccagtcagaacgcaggttctgcattaacggttaaaggtaactacagtggtgaaaacgggacgttgaaaatagcagccaaacagaataccagcggcgtgggtactgcggatcgtctggttattgatggcggccatgccagcggcagtacgttactggatgttgatggttctggcttgggtgcggcgaccgtgggcaatggtatcgaagtggtgacggccctgaatggcgccaccactacagcgcaaacgtcacgggatgccttccatcttgcctccacaattatggcggcgggcgcgtttgattatcaactgtatgcaggagatgcgcaaggtcagggcgataactggtatctgagaagccaataccgtccggaagcgatgctgttctctggcttgccgagcgtggtgcgtcagggggatatcagcctgttaggcaatatgcatcagcgtatgggggatgatatcaaaccgggtattgatgaggataatcgcgcctgggccagaatgatcggctattccgggaaaaccaagctggatgatgccgctggcacgaaaaccgattcgcatacaatgggtatccaggtcggtacggatctgtatgccaataaaaactggaaagcggggatgtataccagcattctggacatcgacagtaacgtaactggttcgaagaccggcagtgcgggtaaaggcggcgacattgatgacaacgcgttttacgtcggcggctatacgacatggttctctggcaacggtatgtatgttgataatgtcctgcaatatggtcgccataactcccgtttatcggcatctggaaatactaattcatatactgtcaacggcaatacactggcggcctctacggaagtgggcaaagcattccagttaggtgccagcgcctggagtctggagccacaggcgcaattgatttatcaatatagcgactttgatgacagtacaatcgatggcgtgacaaagaccaaggtggacctgaaaccgggcaattcgtttaccgcgcgtctgggggttcgtctggttggcgattatgataccaaccatggcaaaatccagccttatggccgggttaacttgtggcagggactggggtcgaaagacaaagcgcattttaccaatgcggtgacggccactacgcttgactcctcgcagcagtactccagtactgaagtggctgccgggatgacctggactgtcgccagagatgtacaggtttacggtgagttggggactcaattcagtaatgggggtgataaatcccgggtctccgcgccaatcaatgcgtcgattggatttaaaaagatgttttaa

SEQ ID NO: 265780 - DNA, 576 bp, Klebsiella pneumoniae
atgccaaaaattattttttggggagagtctgtatttacttttttaggtttgaaaagtattctttctgatttttatcctatattcgatgtggttcatgtgcctctgtctaataaaggttttatttattcatttatggaattcaaaaattctgattttgtaattgcatcacccgatgaaaatagtcttttgcactatgtaaaagtaatgcgtgaaatgccggttaataaaaataacgttatgatttttgcagaagagaagattcataagttgttcgaaatcatgtgtggtagaagattttattttgttaactctgattctgcattgtcggtgatctttgaatcaatatcttcttttctgaatggtcattctgtgattactaataatcacagaaataaattatctgaaacggaatttcaaataattttgttgatggccaaaggctggagtctgacaaagatagcgtcttttactaaccgtagcgtaaaaacagtgagtgcacataagatcaatattattaaaaaattgaaattaacggatggccaatttaaattgcttgtttctaaaggagaattttag

SEQ ID NO: 265781 - DNA, 162 bp, Klebsiella pneumoniae
atgttccagggtgcctatttagcgataatgccatgttatcgtctaaagtgtgtccatttttacattgaaaaagccatgaaccggatttttactttaattccttacttgcagagttataatacgctgccgttctatttagcaaacttaggtattgctggataa

SEQ ID NO: 265782 - DNA, 288 bp, Klebsiella pneumoniae
atgaggctggcccgcaggcagggcatcagcttcctgatacggatccacggcgcgaggttctggcaggctaaacatcaggcctcgcagcgcaaaccgctgccgcgaggcggtcagccacggcgccagctgccggcgccattgcgcgatccccccgtcgataagccgctgccccagacgcagcaggaagtcgtggcgggtatctgctgcgatctggtgcatcccctgctcacgcagcgtgggcagcatctgcacaagctgacgggcgacatcgtcctcggcggcgcgtaa

SEQ ID NO: 265783 - DNA, 279 bp, Klebsiella pneumoniae
atgatggtccagaccaaagcgccggtaccagggagcgcccttctgcccatcgtgcacgagacggccggcttcgttgcgcagggcatgcagagccgtcagttgatagtcagaaacagaggggtgcgctaccaggtcgcgggcttttcccgctaccgaagcaatctggttgtaattgagagcgaaggagagcagcagtcccgccgcccacaggccgaggatggccatcagaccacacgccagtccccgttcccacgccattcccacgtgatgcccgcgtaa

SEQ ID NO: 265784 - DNA, 960 bp, Klebsiella pneumoniae
atgattaatgaattgcgctctatgacgacatttgtccggacagttgagctgggaagcctgagtaaagccgcagatgctcagcagatatcaccccaggcggcgagcaaggccttaaaacaactggaaacgcatctgggggtgaggttgttccaccgcaccactcgaaatatgtcattaacggaggagggacaacgtttctttgaagcggcaaagcctgcattaatggggctgcaacaggcgctggcgacggtgcaacagacccgcgaggagtttgccggaccgttacgtatcgtcggtccccgttcagttgttcagcagattattaagcccgtgctgattgaatacagccgcctctacccggaagttcagcccgatgtgcaacttgatgacgggataactaactgggttgagaagcgagtggatgtcggttttcgtatcagcgtttcaccacaggaagggctgattgcccgtcgcttgttccccctacagttgatcatttgtgcttcgccagcctatttgcgtaaatatggcgtaccgaaaacgctgcacgatctcagtgcccatcgttgtagcgtgtttcgccatgccgcaaccgggcgcctgatcccctggacagtgaagtccggggacaatgtgcaggatcatcatgttaaccctgccatgtcgaccaatgatgagatgctggagttacatgctgtattgatgggcgaggtcattgcgcaggtggccgggccgacggcggcgcaatacatacggcctggtcagcttattccattgttgacagataacatcgctgatattcacagtttatttttatattacggaagccgtatcgcgcaaccactgagggttcgtcgattcattgacctcacaatagaacgtctgggtaatatgaataacttaaatttatcaacagaggaactaaacaaagctcatattcaaggtttgcctgtatattaa

SEQ ID NO: 265785 - DNA, 1149 bp, Klebsiella pneumoniae
atggataacttcagtttttataatccgacccgtattgagtttggctcagacaaagaaaagcttattggccagattctggctgaacataacgtcaaaaatgtcctgctggcttacggcagcgagcgcatcaaacgcgatggcttgtttgcgacgattagccagaacctgactcagcatgggatccgctatgttgagtttggcggcatcgtcagtaacccgttactctcaaaggtccgggaaggtattcaggtagcgcgggagcatcaggttgatgcggtgttgagcgtgggcggcggttcggtgcttgatagcgccaaatccattgcggcaggtaccttgtatgatggggatgtctgggatctatttattggcaaagggcagatcaatgcggcattaccggtgttttcgattatgacgcttgcggcaaccgggagcgaaatgaacagcggcgctgtcatcaccaatgacgtcacccgggagaagtttgctcttcactctgtacatacctttccgaaggtctctgtcgtcaatccggcgctaatgcagtccgtttcccgtgattatctggtctattccgccgccgacattatcgcccattcgattgaaggctatttcaccgcagcggtacaaccaaaaatccagtcgcgtctcgttgagacagtgattgccacggtgctggagacaacagaaatgttgttaaaagatccgggagattacaacgcccgtgccgaatttgcctgggcgtccacgctggcgctaaatgggctaacttatgccgggacctcgggcttcagctaccctaaccacatgattgaacactcactttcggcgttgtttaacgtcccgcacggggcgggattgtcggtgatcatgcctgcgtggatgaagtggtatcacagccaaaacccgacacagtttgcgcgctttgcccggacgctatttggtaaaggaaccgcagaagaaggcattgccgcgctcgaagcgtggttcgataaaattggcacaccggcccgtctgtcacagttaggcattacagaggtcgatatgccagccatactggaaaatctgaaaggaaatacccgctggtttggcctggcggagacctatactcaggaaacactgaccaccattcttaagctggcgttataa

SEQ ID NO: 265786 - DNA, 828 bp, Klebsiella pneumoniae
atgaaagaagtcattgttgttattggcagtggggccattgcccaagcaattgcgcgaagagtgggtgtgggtaagcatattttgctggcagatatcaaatctgaaaatacccaggaagctgaaaacatcctgtcccgcgccggtttcacggtcagtacagcgattgtcgatattgcttcccgaaaatccgtacaggatctagtcgagatagcgacccggcatggcgaaattaaaggagtcatcaacacggcaggcttatcaccttcgcaggccaaagctcaggatattctgcgtgtggatttgtatgggacagcggtggtgtttgaagagttcggtaaagtcattgcaccggggggctccgccgtggtgattggctctcagtccagccatcgcctgaaaatagatgcgctttcacaaacacaggctgatgagttagcgaccctgtcaccagaggcattgttggagcttccgctggttaaaggaattgatgacagcctgtacgcctatcagatctctaaacgtgggaatgcgctgcgggtaatggctgaggcagtaaaatgggggaaaagaggggcccgtatcaactgtatcagcgcagggatcgttttcactcctctggcatatgatgaactcactagtattgagcgtggcgatttttaccgaaatatgcttgagaaatcacccgcagggcgtggcggcacgccggatgaaattgcggcgttagccgaatttctgttcgggcctgcggggacatatatcagcggcagcgatattctgatggatggtggtgttacggcctcttataaatatggggagctcagaccttaa

SEQ ID NO: 265787 - DNA, 282 bp, Klebsiella pneumoniae
gtgcagttctgcgagtttctcacacgccagcgtcggccgaaagtcgttatagcgctcgcggataatattgagcgcatactgtgcaaggccatcaggccagtggttattgctgggttttcctcgacggcggttagccataccaggcgggccagattcacggtaacgcaacagaaggcgtcggcacaggcggtcggaaatacccagacgctgcgcggccatctgattagtcagccgccggtcaacaacgtcttgaatgattttgagtcggttgacttcatctaa

SEQ ID NO: 265788 - DNA, 324 bp, Klebsiella pneumoniae
atgtgtgatgcgaccggtctgtcgcaacgtcgtgcctgcaggcttacaggtttgtccctgtcgacctgccgctatgaggctcagcgtccggcggctgatgcgcatttatcagggcgcatcactgagctggcactggagcgcaggcgttttggctaccgccgcatctggcagttactgcgccgtgaaggccttcatgttaatcacaagcgcgtgtaccgcctttatcatctgagcgggctgggcgtaaaacgcaggcgacgtcgtaaagggctggcaacagaacgtctgccgctgctccgtccggcggcgcccaacctgacctga

SEQ ID NO: 265789 - DNA, 486 bp, Klebsiella pneumoniae
atggacgcactggccaccgggcgcaggatcaagtgcctgacctgtgtggacgacttcacgaaggagtgtctgacaattaccatcgcattcgggatttcaggcgttcaggtcacgcgtattctggacagcattgcactgtttcgaggctatccggcgacaataagaactgaccaggggccggagttcacttgccgcgcactggatcaatgggcttttgagcatggtgttgagttgcgcttaatccagccgggcaagccaacgcagaacggatttattgagagctttaacggacgatttcgcgatgaatgtctgaatgagcactggttcagcgatatcgttcatgcaaggaaaatcattaataactggcggcaggattataacgagtgtcgtccacattcagcactgaattatcagacgccatcagagtttgcagcacggtggcggaatggaaaatgtgaaggtaaacaaaccgacattactaactaa

SEQ ID NO: 265790 - DNA, 672 bp, Klebsiella pneumoniae
ttgctctataagtttctccgcgagcgcattttcgctgtctttcatcgtgccgaaggctgctgccgtcagcagatggctggtcagctccatctggcagaccattttaacctgtgggtagagtgccgggtttccgccatgcgtctggcgggggaaggcgatatcgttctctggtgtgtccggtgtgcgccagaacacaccatcaatggccagcagggtcaggccgcaccagtgtggatgcggcgtggcgttatgccagagctgtgctgtctgcgagaatacgcggcggacggcttcgcttcccagacgctgacgggcctggatcaccgcgctgggggcgacgaagggacgactgcccggcagcatgatgtccagacggttgacgatctgatgaaggggttctttacgttcaagcgccatgccgacaatgcaccagaccatcatttccagcggcaggcgacgcttgcgcagggtgacggtaccggcttcggccagacagcgggaaatgagttccgggtccagatagtcgcccagagaagtcagtgggttacgcagagaatcgtaacgggataccagatcaagagcctgtccaatgtgcataaaaaaatccggaaacgggtgagcatttccggattcttacacagccactggatcgatcaactgatccttaactga

SEQ ID NO: 265791 - DNA, 1023 bp, Klebsiella pneumoniae
atgaatattaaacgtattggtctcgacctggctaaaaatatcttccagatacatgccgtggatcaccatgaacacgttgtcctgcgtaaaaccctgcgccgggaccgcatgaccgcctttttctctcagctctctccctgtcttatcgggattgaagcctgtggcgccgcccactactgggcccgcgagctgacccgtatgggacataccgtgcatatcatcccgcctcagcgggtcaagccctatcttaaagggcagaagaatgacgccaacgatgcggaagctatctgcgaggctatcagccgtcccggaatgcgctttgtggccatgaagacagaacggcagcagacgttgcaggcagagcaccgcgtccgggcccggctcatccgcgcccggacagccctgagtaatgagatacggggcctgctgggtgagttcggtctggtactgccggtgggaataaggcagctacgtaaggcattaccggagatactgtcgcaacaggagctgtgggatgaccgctttatccgcctgctgagcgaactggcggaagagctgcagatgctggatgagcgggtcgcccgccatgacaggcggcttgagcagtcggcacgggatgatgtccggataaaaaggctgctggcgatagagggtatggggccggtggtggccagtgcgctggtggcggcggtcggcgatggcagacagttcaaaagtggtcgggagatggcggcgtatctgggtctggtcccgcggcagcactccagtggcgggaaagcgcggctggggtctatcagcaaacggggagacagttacctgcggacgctgataatccacggtgcgcgtgcggtgctgaacgcgtgtcagaataaaaccgacagacgcagccagtggctgaaggcgttatcggaaaggcgaaaccggaatatcgcgacggtggcgctggcgaacaagaatgcgcgaatagcatgggcgatactgagccgcgaagaagattaccatgggttacaggccgtcggttaa

SEQ ID NO: 265792 - DNA, 1779 bp, Klebsiella pneumoniae; identical to SEQ ID NO: 181973

SEQ ID NO: 265793 - DNA, 591 bp, Klebsiella pneumoniae; identical to SEQ ID NO: 214976

SEQ ID NO: 265794 - DNA, 990 bp, Klebsiella pneumoniae
atggccagctttgagtctgcctatgtggctttatctcgcatgaaacagcatgttcaggtctacaccgacaaccgtgagggctggataaaggccatccagcattcacctgagaaagcgacggcgcacgatattctggaaccccgtaacgaccgggcggtgaaaagcgcagatctgctgttcggtcgggcaaggccactggatgaaaccgccgcgggccgggcagccctgcagcagtccggtctggcacagggaagttcaccaggaaaattcatttctccggggaaaaagtaccctcagccgcatgtggcgctgccggcatttgataaaaacgggaaagccgccggtatctggctcagcccactgaccgatcgggacggacggcttgaggctatcggcggggagggacgaattatgggcaatgaagacgcccggttcgtggcgctgcagaacagccgcaacggtgaaagcctgctggccgggaatatgggggagggcgtcagaatggcccgcgacaatcccgataccggggtggtggtgcgtctggccggtgatgaccgcccctggaaccccggggccatgaccggtgggcgggtatgggctgaaccggcgccggtggctccggtaccgcaggccggggctgacattatcctcccgccagaggttctggcgcagcgggcggcagaagaacagcagcgccgggaaatggaaaaacaggcggaacagactgcccgggaagtggccggggaggcgcgtaaagccggcgagccggcggaccgggtgaaagaggttatcggggacgtcattcgcggactggagcgtgaccggccgggtacggagaaaacgacgctaccggatgatcctcagttccggcgccaggaggcggcgattcagcaggtggcctcagaaagtctgcagcgtgaacgtctgcaggctgtggagcgggacatggtgcgcgaccttaaccgcgagaaaaccctcgggggcgactga

SEQ ID NO: 265795 - DNA, 228 bp, Klebsiella pneumoniae; identical to SEQ ID NO: 215004

SEQ ID NO: 265796 - DNA, 195 bp, Klebsiella pneumoniae; identical to SEQ ID NO: 215000

SEQ ID NO: 265797 - DNA, 195 bp, Klebsiella pneumoniae; identical to SEQ ID NO: 230213

SEQ ID NO: 265798 - DNA, 129 bp, Klebsiella pneumoniae
atgagccatcaactcaccttcgccgatagtgaattcagcactaagcgccgtcagacccgaaacagcttgggaagaaatgacctgcttattcgcaccttcctaagcagtggcataataaaaggcatataa

SEQ ID NO: 265799 - DNA, 870 bp, Klebsiella pneumoniae
gtgaaaactttaaaccgtcgtgatttccccggcgcgcagtaccctgaccgtatcatccagtttggggaaggtaacttcctgcgcgcattcgttgactggcagatcgacctgctcaacgagcataccgacctgaatgcgggcatcgtggtcgtgcggcctatcgccacagattttccgccttcgctgaacacccaggatggcctgtacacgactattattcgcggcctgaacgagcagggcgaagcggtcagcgatgcgcgtcttatccgctcggtcaaccgggagatcagcgcttacgcagacttcgacgcttttttacgcctggcgcataacccggagatgcggtttgtcttctccaacaccaccgaggcgggcatcagctaccatgccggggatcggtttgacgacgcgccgccggtcagttatccggcgaaactgacccgtctgttgtttgagcgttaccagcatttcgccggtgcggccgacaagggatgggtgattattccctgcgagctgatcgattataacggcgaggcgctgcaggcgctggtgctgcgctatgctagcgaatgggaactgccgcaggcatttatcacctggctgacctcagcgaataccttctgttcgacgctggtggatcgcattgtgaccggctatccgcgtgatgaagtggcggctctcgaggcgcagaccggctataaagatgctttccttgataccgctgagcatttctacctgttcgttatccagggacctgcctcgctggaggccgagctgcgtctcgataaactgccgctgaatgtgcgcattgtggacgatattaagccgtataaggggtctgacgctcagtggaacgaaaactcacgttaa

SEQ ID NO: 265800 - DNA, 2754 bp, Klebsiella pneumoniae; identical to SEQ ID NO: 153771

SEQ ID NO: 265801 - DNA, 1440 bp, Klebsiella pneumoniae
atggagcgggtgcatcagcggaatataatccgtcagaaaaaactggagggaaaaattgaaggtcatgccagttttgcactgggggaggcgaaggccgaaacggccctgtacctgccggacaggttaggtgtcagccttttattttcggcgaaaaaagtgactccacagacaccggatggtgtctgtaatatgggagcgctgcgttttgccatgaaactggtattgtcaggtagcgttggtgccagtgctgcaattgaattaggggtgacagcagactggagtggagaaatgggaaagggctatggcattaaaggccgtcctgcaaccctgactgctccaccgttgccaggacagcagcaggtgaatttaaagacctcaacaatacctgaagcacaggggggaggtgaaattggtgtttttgttggtgctcaggcgggaggtaatatcagtggtgccattgagtggtttgagccgcatcctgatgatacgccagtagctataggtgttgagaaagataacaaaccccttgtcaataaagagaagaagtttgccgcgatagccaaactggaagcggggatgacggtgcaggcaggcgctgggggaagtggggttttttatatcacctatattcagggacgttttcgtatttactgtaaagcggctttatgttggggagtgggagccaaaggggaagtcggttttgaagttgatggcagcagttttgcggcttttatgaagagttttatgtttatgctaaggaatgtggattatcagaagcttgagcagatgatggcaggagatgccttccgttctttatgtgcaattcctattattatggcggcacaagggatacaggcgggtgaggccatgctaaagaatatgggaataatattacgacgaattgaaaccgatcttgaagatgaaaataagcgcgttcatctgatgaatagtattttgtcaaaccccgaccagcttaaatatacccctccggaaacaaaaggggcagtgattgccacattaattgatcagaactgggtggactggcttgaccctcgcaatcagaataatgatttttttttttccgttaacagctggaagctcggtcctctaaagaggcgaaaacaagcggtgtttatggcattgaagtgggtacaaagtcaggcagattataacaatatcatgcagcatttgacgttgtcgccaggggagaagaaaggcaataaagaactgaatgaaaaagatgtgattaagtttttaggcattggagaacgaaaattgtttttctataccaattatggcgaaaagctcaccttattgcataataaccttccggtttccgttggcccggatgaaccatttagacctattccggatatcctgatgtcagaatatcttgccatggttgacgagcagcatccaactaatacaatgattgcttga

SEQ ID NO: 265802 - DNA, 999 bp, Klebsiella pneumoniae
atgaatagaactgaagctttaaaaaaaatccagattgaagtcgaagagttcgtcacttatgcagataacgagcaattaataatcaacaatgactgtttaactgtattaaaaaagatcccaaacaacacagtctctttgatacttactgatccaccatatcatgcgacacagaagaaaaatatttatggcgatactcaatttaaaaaagatgatgaatatataaattggatggaagaaatctccattgaatggagaagaatattaaaaccaaatggttcactttattgcttctgtgactcatcaatgtctgcacgattagaagtcatgctatctaaaaggtttaacatattaaatcatattgtgtggaccaagccaaaccaacctggctttgatggctggaaagggaaaatgaataaagaatcattacgtcagtggtatgggcattcagaaagaattatcttttgcgagcctgcaaaagatgggaatttacatcgctcttcttttggcgagttattaaagaaaaagagaacagaagcgggtcttagcggaaataagctaaccgaattaacaggtgcttatggaaaagttaatcatggcggagctgtgtctaactgggagacaggaagaaacataccaagtcgcgaacaatacaaaaaaataaaagaagcgatattgagcactggaaaagtggactttatgcctgaatatgaagatgcaatacgaccttttattatatcgaaaaatgtagaatacactgacgtttggaatttcgaatctgtcaggccatataagggaaagcatccagcagaaaaaccccaagatatgttaaatcatattataatggctagctcttatgaagaagacatagttttggattgtttttctggctctggcagcacggcattagccgcgaaaaggaataggcggaagtgcatatctatcgatatagatatgcactggacggattatacagaaaaaagattaaatgagcttttttaa

SEQ ID NO: 265803 - DNA, 987 bp, Klebsiella pneumoniae
atggctaggaatgttaaactcccacatctgttgtcacgtaaaatatataaaacaggtcaaactcgcggggctgatgatgatgttatttaccagaatagagtttcacgaaatagtactgttttaattccttttgaactaatattatctgaaggtaatagggatgtgttaagaaaggactatgataatggttatattgttctaattccgcctgattatttgtttggggagaggcgtaacgaaactctctctattatgaatgattgtgagttaattttaggtgttaattgcttggttttttatagccaaaggtaccagtatgtcgattataatccaagggattttggtcttaggtctacccagccaatgaatcgaactggggatcttggtggcgattatgtttgcaggatttctggaacaacttctgaaaatatgggtagaatatcctttgggtataatattactacatctaaaggtgccgggattagggtgtttgaatatgctgataaagaagttatagaaaaagctcgtattcaacttgaggcgatatattggttgtgccatgattcattagatgccgctatagaatatggaatgccaccagaagatgcggaagaaagaaaaaggttggctcttgaggcagcaaatcaacaggggctattaaatgaaattgatttaataagtaatagaattattgatgttgataaagacactgtttgtccattgtgtttagcaaaaatatcagctaaaggttttttttcaaaggtagagcaacaagagtttaggcgagtacatgatcttacaattaccgagattaatctcttccatatcaatgagttaaggtatggtcattttaatcataagccgtataatttagggtggggtcatcatcattgcaatgtggtagtaaaagattccggcatagaaaatacattagaatggatgcatgaagttttggttagaaatgaaaggcttaatagagcgccataa

SEQ ID NO: 265804 - DNA, 762 bp, Klebsiella pneumoniae; identical to SEQ ID NO: 209768

SEQ ID NO: 265805 - DNA, 3006 bp, Klebsiella pneumoniae; identical to SEQ ID NO: 152274

SEQ ID NO: 265806 - DNA, 432 bp, Klebsiella pneumoniae
atgagaaaagtaaaaacagatcatattccgatagaggaataccgaaatgaatatcgtaaactatgctctgataatattccgtggattaagattcaaaaatttaagtctgcccataccgaacttcgcagactggataaaaagagagaatctcttattgaattgtttattgatgaacttaacccgataagcagttcaacagcacgaacagcagcaaaatcatcaggtaattttgatgtactgcatgagagaatgctttattccaaaacactttcagaaaaaagtgatgaagaaattgttgccttggtcgtaaaacagcgtacagaagccgctctggagtttcagcgttctattgaacagagccttgagcaactctcccgcatttcgtcagagttcaaaccatcaagtcagatacgcaggaaaatgcctctgtaa

SEQ ID NO: 265807 - DNA, 228 bp, Klebsiella pneumoniae; identical to SEQ ID NO: 215004

SEQ ID NO: 265808 - DNA, 432 bp, Klebsiella pneumoniae; identical to SEQ ID NO: 214517

SEQ ID NO: 265809 - DNA, 195 bp, Klebsiella pneumoniae
gtggcgcccacggacgaccagctcaacggcctgaacttcgccggtgtcgtcacgctgaatagacccggtaaagcgcagctgcacgccgtccaccgtggctttgcccatctgtttaaacagaagcgcctcagtgccgccgatggtcatttccgtatccagcgcgccatcatccagccccagatcaataccgactga

SEQ ID NO: 265810 - DNA, 267 bp, Klebsiella pneumoniae
atgcacaccgctttttcttccccgtcttcagcccctgccgcgccgctgatgccggtctctgacaccgttcaggagcgttttattcgcctgcccgaagtgatgcatctgtgcgggttatcccgctccacgatttacgacctcatcagccgggaggctttcccgaaacaaatctccctcggcgggaaaaacgtggcgtgggcgcagtcggaaatcaccgggtggatggctgaccgtatcgctgaacgcaaccggggctatgacgcatga

SEQ ID NO: 265811 - DNA, 195 bp, Klebsiella pneumoniae; identical to SEQ ID NO: 215000

SEQ ID NO: 265812 - DNA, 195 bp, Klebsiella pneumoniae; identical to SEQ ID NO: 223626

SEQ ID NO: 265813 - DNA, 195 bp, Klebsiella pneumoniae
atggctaactcaattcctaacaacggacgcgccgtgatgatgcgcaatcgccgcaccggcgccgcctggctggtcagcttcgactatcgcgacggcagctactggcatgagccgcagggcaatctgcgccacatccgccggccatacgcttcacgcagcattgagccgaacctggtaccagccgggacgcattaa

SEQ ID NO: 265814 - DNA, 141 bp, Klebsiella pneumoniae
atgaaaaagcccgcagcgcgttcctgcgagcacttgatcgtcttaagctggattatctggatttataccttatccatcagccttactctgatgtacacggtgcatggcgcaccatggaagagttatatgatgaaggcctga

SEQ ID NO: 265815 - DNA, 234 bp, Klebsiella pneumoniae
atgaaatttactaccctcaataatggcgttcagatgcctatactcgggtttggcgtctatcagatgcaggacttgaaagaatgtcaggaagccgttcttggtgctcttcagacgggttatcgtcttattgatactgctgctgcttatgagaatgaaaccgccgttggcgcggccattcagcaaagcgggatcgcgcgagatgaattgtttatcactaccaaattatgggtatag

SEQ ID NO: 265816 - DNA, 423 bp, Klebsiella pneumoniae; identical to SEQ ID NO: 221934

SEQ ID NO: 265817 - DNA, 1626 bp, Klebsiella pneumoniae
atgacattacacaaaaaaaatcacatcacccgaacactcctggctgtcagtatgctggctatgagcggcggggcgctggcggcgcaggtgccgccgggcacccagctggcggaaaagcaggagctggtcagaaataacggcagtgaaccggcgtcactcgatccgcataaagtcgagagcgatgttgaattcaatatcattagcgatctctttgaagggctggttaacgtgtcgccagcgggggcgatccagccgcgactggcggaacgctgggaaaacaaagacaacctgttatggaccttccatttacgccccggtctgacctggtccgacggcacggccattacagcgcaggatatcgtctggagctggcaacggctggtctcgccggcaacagcctccccctacgcgagctaccctggcaatatgcatatcgccaacgcccgcgagattgccctcgggcaaaagggacccgagacgttgggggtgaaagcgctgaacgacaccacgctgcaggtcactctgacccagccgaatgccgccttcctggcgatgctggcgcacccttcgctggtaccgatcgacaaagtgctggtggagcggtatgccgataaatggacccgaccagagcatatcgtcaccagcggcccgtataagctgtcccaatgggtggtgaatgagcggctggtggctgaacgtaatgcaaagtactgggataatgcgcataccgttattaataaagtgacttacctgccaatctcttcggaggccgctgatgtcaaccgctacaaagcaggggagattgatattgtctatacggtgccgatcaatcagttcgcgcagttgcagaaaaccatgggcgaccagctggacgtttcgccgcagctggcgacctattactacgaattcaatactacccggccgccgtttaacgacgcccgtgtgcgtcgcgcgctgaatatggcgcttgataaagatatcattgccggaaaagtgcttggccagggccagcgcccggcctggctgatcggtcagccggatatcggcggcgtgacgctgcataacccggactacgcaagctggccgcgtgagaaacggattgccgaggcgaaaaaactgctggcgcaggcggggtatgatgaaagccatccgctggtctttaccctgctctataacacctctgagtcgcaccagcgtatcgccattgccgccagctctatgtggaagaaaaacctcggcgtcgaggcgaagctacagaaccaggagtggaagacgatgctggataccatgcatacgcataacttcgacgccgtccgctacgcgtggattgccgactacgacgatgccgccaccttcctcaatactttccgtaccggggatagcgagaacaccagtcagtacagcaaccctgcttacgatgaggccctgcgcaatgcggcgaaagcctccgacgtggcgacccggggcaaatactatcagcaggcggaagatctgctggcgcaggatgttcccgccattccggtctatcactatgtgcgtacccatttagtgaaacccagggtgggcggtttcacgccggataagctggggtattactacaccaaagacatgtacattaaaaaatag

SEQ ID NO: 265818 - DNA, 432 bp, Klebsiella pneumoniae
atgactgataaccgtaagtgctcgttttatatctatccggggcgcaacgcggcggaccgggtggcagacggattcctggaaaagctaccgcagaaagagcgcggccgcgcgatgcgtgccatgatgctctgtggtgccgcgctgatgaaacaggacgaacgtctgccgtttctgatcgctgagtttctgacggacagcacctcgatgcaggatatccagcggattatcagcagcacgctgccgcagcaggaaaatggcggaatgacacgcctgttagaggcgtttctgcaggcctccggaggtgtgactgtggcaccgcctgcaggcggcgctgtgcaggagaatggtaacgttgagaacgctgcgccggaagataaaaacctgaaagaaactcggaagaacgtccagcacctgttcccggatgatgaataa

SEQ ID NO: 265819 - DNA, 336 bp, Klebsiella pneumoniae
atgaagacctggcttgttggactgagcatcgatatcgatggcgtcgaaatgctggtacatcacctgctcacagcgacagacctggaacaggcagaatccggcatcatggaaatggggcgcacctggtggccatccctgaagcgggaggatgaccggcaccgatgggaatatccgcagggtgtggtctggtttaacagcattgtcctgctcgatgacgcggaaaacagcatcctgcgcggccttaaatttctcgacgtgtgggtgatttctggcacaccagatgccccggtcatcatggatgagtacggaaacgactggcgggatatcacacgctga

SEQ ID NO: 265820 - DNA, 411 bp, Klebsiella pneumoniae
atgctgtacggcacccgcaaagaactgaataaaaaactcaaacgcatgtttggtaacgaagaacgttacgccctgctggtctggacgaagcaggacgtgatggcgcaggtggaaaatatgaaggaggccgaagccgacaccctgcttgagcttatcggacgcgcggggacgggagagcataccgaagacggcgtgtcgttccgcaccgttcaggcgctgtatgccgggatttgtgtcaataccccgcgcgtgagtgtccccgtcgatacgctggcgcgtatcacggatatcgcagaccgggccgttagtggggaagacgcgaagggatggtccctgaccctggaccattacccgagcgtggccgacgcaaaggcggaaatcgcctggctgaaaaaagagatcgccgcataa

SEQ ID NO: 265821 - DNA, 765 bp, Klebsiella pneumoniae
atgaaaaacgacaccctcaatgcccttgttctgcgccacggcgaccggatgctacaggatgcgggctggcccccatgcgtcagtatgatgcagattaccccggaaaagatgcccggctggcttgtcgccaccggctcccttgatgccgggcaaattctggcgctggtcacgcgcctctgcgagccgctgacgttcggaaaggccgcgctgctgaccgccagcgcccgacggctggcgggcacacctgcccggctgcatttgttcccggcacaggcatatctgcaccccgggcggctggcagactgtcaggttatccggctgccctacgcgcaggagtggctgacggcggcggaatgtgacgacctgctggcctttctgaaagcctccgtagaccagatagcggaaatcattcgccgggatgcaaagcgcattgccgccgcgatggttccgtctgccgccccgcgcctgatggacaggcggatcggtgactggcggttgctggccgacgagtacgaccatgacaacgggctggacgacagcgagaccgacaggctggatcaggtccttgatgccatcctggtgcgcgatgcgcgtttctgcccggtcctgctgacgctggttaacgagcgggaggaaaacattgagggcgcaggcgttatcactgatctgctgcgttttccgggcgatccggttcgccgctggtttgaccgccgcgtattacgggacgtggtgagagaggcccgcgccgtcaacactcaggcgtga

SEQ ID NO: 265822 - DNA, 432 bp, Klebsiella pneumoniae
atgttacatatgtccactcacccgatggtttcccctgccagccgtgacgcgcgtttttccttcctgccagcgctgtttggcgccgattacgtgaatgctgaagcctgtatttatgcctatgccgcgaaatatatccgtgattacaacggcggcgaatggacgtttaaccagctaccggacggcgcgggctaccttgcgccggatgaagaccgtgtgaccgtgtttaacgcagataacggttttgagggcgaaatgtccggcgatgcggcggggatcaccatcactgcgctggtactcaatcaccgaagctggatgcacgaccatcatgacgagcgcgacgcctgtcgccactacatccgccgctatgagcagctcatgagcattgtcgccacccaccgcgaaagccgcgccatttatcgcgcgcttgactga

SEQ ID NO: 265823 - DNA, 399 bp, Klebsiella pneumoniae
atgatgtacggaaccgtcagtgaaatttgcattgcgttgctgaaaacgcacgaaaacaacgaaaaaatcgccgtcatcacctggacggaggaggacgtgcgcgaggcgggcgcagagtacaatcccaccgtcgccgaggcggcgcgtgtccttcaggctatcggagaagccgattgggatatcctgtatcgctacggcatcggccaggattttgtttcgggggaaatgcgtgagattgccgcagaacgtgcgccgcgtcagattgccattcccgaaaacgaactccgcctcctgctgccgctgataaaaaggggcctgtgcgactacgacgacatatcgggggcggccacagccgcagtggatacccttgaacttgtgctgacgtccccgtctgcatag

SEQ ID NO: 265824 - DNA, 228 bp, Klebsiella pneumoniae
atgcagactcaggcgatgcgaacttatcagattacctttaccggacgcgacgcaaaaggcgttatcccgatgtttacccgtgtacaggccatgaccgggaagggggcgattaaggcgtttattgaacgctacagacccgtgcagggctggcttttaggcgaccccgaagacattaccgacaaagtgcagaaggaggcagacgaagccgggtacgaaccgcagaaatga

SEQ ID NO: 265825 - DNA, 231 bp, Klebsiella pneumoniae
atgctcaacattattgtttcaccttccccggaggctgtaaagccccgccgtcatccccgcatcccccgcgcggatattcccgcgccggagattgaccccacgctcagggcattcgggcggcatatcgtcaggagcctgcgcaaggggcgcggcgtccatattcccgcgatgaaaaacgccgctttcggccaggtgctccgcaccctcgaactgacacgcgcatttaactaa

SEQ ID NO: 265826 - DNA, 2004 bp, Klebsiella pneumoniae
atgtcagtaaccgatggtaaagcaaaagcaccgaaaaaagcgagcactaaaaaaatcactcaggcgcaggaagatgccctgaaagccgcccttgaggccgcaaccattgaatacattccgctgtccgctctcgttaaatccccgctgaacgtgcgtactatcccgtattccgtggacagtgtgcgcggtctggccgactccattgaggcgctcggactgctgcagaacctgattgttcacagccttgatgatggtcagtccggcgtggccgcaggtggccgccgactgactgccctgcagttgctggcgcaggaaggccgtctcgcggccagtcatactgtcatggtgaagcgcgtctcagacgacattgccgcccttgcctctgtcgcggagaacgagcagcgcgccgccatgcatcccgccgagcagatcaccggtttccgtacgctggcagagcagggcaaaacccccgcgcagattggcgatgcgctgggcttcggctcccgtcacgtacagcgcatgctgaagctggcaaatctcgccccgtccctgatggagaagctcgcgcaggacgaactgacggtggagcagtgtcaggcgctctgcctcgaggacgatcatgtccgtcaggccgaaatccttgaaaccgttaaagccagctggtcgaatgcccccgcgcacctgattaaacgcgcgattaccgaaaccgaaatgcgcaccgacagcacaaaatttctgtttatcgggcgtgaagcctatgaagcggcagggggctacgtgcgtgaagacctgttcagtcaggaggacggggacggcaccgcagacagcgtactggttgagcgtctggtgcaggagaagctggagcgtatcgggcaggacattcagcagcaggaaggctgggcatggagtcgcgggcgtgcagcccgcatctggtattacggcgacgacgcgaccgaatttgtgcagcctgacgttcccgatccggtgtacaccccggagcagcagaagcgcctcgatgaactccgtgagcagtgggacggctacgactcccgttgtgacgagacggacgcgctggaagctgagatcgacgccatcggacaggccgcagaagtcagcgcgtggactgacgaaatgaagtccggcgcgggggtgatggtcagtctgtacgaagggcgggtgtacgtgcagcgcggtgtgcgcctgaaagcggatatgccggaagagaccgcaaccagcagcgtcacggtgccgttcacctcgcgtcagaccgatgccgctgaggggatcagcgttccgctgctcacgaaaatgtcctccgagcgtacgctggcagtacaggcggcgctgatgcagcagcccgaaaaggcggtggcgctgatggcctggcgtatgtgtacctgcgtcttttcgggctgtctgaccacgacgcatccgttccgtatcagcctgaccgtgtctcacggcagcctgacggaaaatgccccgtccggtcaggagggcgcagcgtttaacatcctgatgaccgaaaaagcgcggctgaaagccctgctgccggacggatgggagaaggacttcaccaccttcttcacccttgacggtggcgttctgatgtcgctcatcgctttttgcaccgcctgttccgtggacggggtacagacccgcgataacggacacacctcgcgcagccccctcgatgcggtggaggcggcaatcggcttccatctgcgtgactggtggcagccgacgaaggacaactactttggcagcctgaaacatccgcagattgtcgcatccctgaaagatgcggggctgacgggcgcggcgggtgacgcggagaaaatgaagaagggcgatgcagcagggcatgcggagcacttcatgcagcatacccgctgggttccggcctggctgaaagggcctgagccagcggctgagtccacggcagacgagagcgtctcagctaccgataacaccgatggtaacaccccggcacacgccgcctga

SEQ ID NO: 265827 - DNA, 432 bp, Klebsiella pneumoniae
atgcacacgatcatgactaccgatgttctgaaaaccctttcagccgacgaactggaagactaccgcgccgccggtgaagattatcgccgcgaactgacccacgccgtgatgcgtgacctgtcctgccctgaaaactgggacatgaacggcgagtaccgcagcgagttcggcgggttctttccggtgcaaatccgctttaccccttcccacggtaacttccatctggcggtgtgcagccccggcgcggtcagtccggtatggatggtggtgttcgttcctgccagcggtcgcccgttttccgtcattcgtaccctgagcggctaccagccagcgcttgtcagccacaccgtcagcctgaccgcgcgtctcgatgcggacggatacagtcaggccagcattatcagcattctggccgcggggggcgcgtcatga

SEQ ID NO: 265828 - DNA, 171 bp, Klebsiella pneumoniae
atgatcccttcacgtctttctctggttcccttcagccctgcgcaacgcgccgcgatggaggccatcgcggaggttgagcgcaggcggtcgcgcggcgcggtgttcacaccgtatccgtatacccgccggaatatcatcgccgatatgttccgccgtctgggtgtggaatga

SEQ ID NO: 265829 - DNA, 789 bp, Klebsiella pneumoniae
atgaacacacagaacgtcaacgccaaaaccgtcaccagagaatctaacgaaagatgggggaaaagtgtgctgacttcgcttgaaacattgcagatgaaagccagtaaagctctgtttgtttttcagcgtcagccggataaagacgccttgtttatatccgcgagtcagctgtacgccgaacttatcaacgaaatggtcggggttcctgccgtggaagaaatacagcagcgggtggatgaactggctgaatttttacaggtgatgttgcaactgtccgggcgcgaatcagagcagaacgcatcccgaacgccgaaaataccggaatatcgtcagagtattatcgatggtgaaaagcggcttcaatttattcccgcatttttctgcacgccattagcggacaatatggctgctgactggttgcgtcagtattcaaattatgatggtggtttctggaattactgggttattccgcagggtattggcggaagtgtggaaccgaaccgaattatctttaccacctcccgaaccggatatatcgcccctgaaggagagcagcgctaccacctgattattcccggtaattattttgacgcagaagttagcgcagatgccgccggaattgttgcgacgctgatgatacttaacaggctatcctgtcaggtgtcagatatggggccggaatatgtccgcatctgtaggcgtctggtttcacggcaggatgcactgaaggattatctaagcattattcagcatcccgaacggcatttaatctggcgggctattgattaa

SEQ ID NO: 265830 - DNA, 219 bp, Klebsiella pneumoniae
atgcatgcctttatttttctggtgctgatgacaccgagtagtggcggtggaatttgggatattactcccatgcctaatacagatgtctgcataaaaatgctacgggtactcgaagcacgtggaggcagaggttacggaagtaatacgggagagtgcattgaagttaaaacccgcgagcctttgaacagcgtgatggaaacattgagtgagggtgggtaa

SEQ ID NO: 265831 - DNA, 630 bp, Klebsiella pneumoniae
atgagtgaaactaaaaatttaaaagaatcgaataaaactactatatatgcagttataactgtactctgcgttgttatatttttaattcagttaggcatcgaaggatatgttaatatcaagaatatttatgcggggctcggtatctctggaggggtatccgtcatatcgttgttattagttaatatcattcctcaaaacttcaaacatattctggtcttttggcgggttaaacgagtattgccaggaaatagagttattgaactttgtcgtaaagatgaacgtctgaacatgaatgatttacaaaacaaatggcctgagctttttctgcatgatatgccagagcaagataggaataccttttggtataaaaatatttataagcaaactgattcaagtgctcaggtgattgatgctcataaaaattttcttttatttagagatttatgtagcgcaaccttagttatgtttttatgtgctggtttattgaaatttatttcaattgatggcttgcatataaaatggattgtgcttgcctttcttttcataatgacctttattttctcagttatttcaagacattatggtaataggatggttacaagtgcagtggctgtcggtgctgatagttag

SEQ ID NO: 265832 - DNA, 369 bp, Klebsiella pneumoniae; identical to SEQ ID NO: 242929

SEQ ID NO: 265833 - DNA, 381 bp, Klebsiella pneumoniae; identical to SEQ ID NO: 234463

SEQ ID NO: 265834 - DNA, 411 bp, Klebsiella pneumoniae
atgactgactcaatgaaatatctatggctgcttttgcgcgaggattcgtcatatatttttatgttgatgctgattgttggttctgccgtaatcgtgtctgccttttttcagagagcaatcacatcctggtggggtaaaaccctcagtgtgatactgtgtatggtgagtatgattactacagcaacaggagttcttgatcctgagtcaacatataaacaaattataaacaggaaagaaaatatcatttatacgcttagaaattgcagagtctccgcatttgaagcgcagcaggcagggtttctggctaaagcaaaagatgcctggtcttgcccggatggcgtaacacggtatatggatgtgagatacagagataaggcagagattaataaacttagtacggaaggtaagtaa

SEQ ID NO: 265835 - DNA, 294 bp, Klebsiella pneumoniae
gtggcgcacgtcttcggtgaacgcactctggccacactggagcgtcttctgagcctgctgtcggcctttgaggtcgtggtatggatgacggatggctggccgctgtatgaatcccgcctgaagggaaagctgcacgttatcagcaagcgttacactcagcgcattgagcgacataacctgaatctgagacaacatctggcaaggctgggacggaagtccctgtcgttctccaaatcggtggagctgcatgacaaagtcatcgggcactatctgaacataaaacactatcagtaa

SEQ ID NO: 265836 - DNA, 228 bp, Klebsiella pneumoniae
atgctgcaggtggaagcgaactgctcctggcaccgcctgttcgttgacccgctcagccgggcgatgtactcctccaaaggcccggattttgagtacatgcaagcgcgccggcaggagggggtcgatatccacgatgcggtatacggactggcgtgccgcaactttaaagacgaaatggcagagcttgaatcccgaataccggtgaatgacatcgaggataaacagtga

SEQ ID NO: 265837 - DNA, 228 bp, Klebsiella pneumoniae
atgctgcaggtggaagcgaactgctcctggcaccgcctgttcgtcgacccgctcagccgggcgatgtactcctcaaaaggcccggattttgagtacatgaaagcgcgccgggaagagggggtcgatatccacgatgcggtgtacggcctcgcgtgtcgcaactttaaagaagaaatggctgagcttgaatcccgaataccggtgaatgacatggaggataaacagtga

SEQ ID NO: 265838 - DNA, 234 bp, Klebsiella pneumoniae; identical to SEQ ID NO: 265815

SEQ ID NO: 265839 - DNA, 171 bp, Klebsiella pneumoniae
atgcgcggtaaaagcgtgatgctcctggccgggttagtctctctcgcgcaggcgaacgaacttaacctctattcggtgaataccggttccggtaatgactccaacttattgatagtgttttatgttcagataatgcccgatgactttgtcatgcagctccaccgattttga

SEQ ID NO: 265840 - DNA, 444 bp, Klebsiella pneumoniae
gtggttcagccgctactgacggaaacgcttgcgctggtggtgagccgtgcgcatccgctggcaggagagcgcgacttgcaactgcaggctctcgacgcccagccgctaattttactgagcagcgagtttgctacccgcgagcagattgatcgtcattgccgccttcatcggctcgaaccagacgtgcggatggaggccaactccatcggggccgttctgtcggttattcgaagcacaacgttagcaacgctgctgccggcggcgatcgccgggcagtttgatgatgtggtggcgattgggctaagacctgcgctgctgcagcgcacggcctgtttattgcagcggcagggcgcctggcagagcgccgcagcgcgcgaattcatcaccctggcccgagagaacgcgatagcgattgagcaggaaaaccgccagtcccttgcctga

SEQ ID NO: 265841 - DNA, 423 bp, Klebsiella pneumoniae; identical to SEQ ID NO: 221934

SEQ ID NO: 265842 - DNA, 159 bp, Klebsiella pneumoniae
atgatgcgcaatcgccgcaccggcgccgcctggctggtcagcttcgactatcgcgacggcagctactggcatgagccgcagggtaatctgcgccacatccgccggccatacgcttcacgcagcattgagccgaacctggttccagccgggacgcattaa

SEQ ID NO: 265843 - DNA, 219 bp, Klebsiella pneumoniae; identical to SEQ ID NO: 246685

SEQ ID NO: 265844 - DNA, 525 bp, Klebsiella pneumoniae
gtgtggtgtatttatcaaatgagtattgatgtcgaaacacttgtgaagcaattaggtaaaccttatcaggatatttatgatcaaggtttaattccctacaaaacaaaaccaacgggtactgttagtgatgatattgccaggttgactatgaggcgagaaggaatatttttatcttttatcaataaccgggaaaaaaatcttgaagaagtgactttgcggttagaagatgaaaataaaacggattggttatttcctaatccgctgccatttggtcttgaacctgtaatgacccagaaatgggtaagggacaaacttggccatccaatgatttacactgatgcgcagataatcatgactatttatgttggtgtgaaggaattttatactttgccggctcctcatcaatatatcgttgctgcatttacctataacaaagatttttttgtacaaaaagtcacattttattcaattgagcgagccaaagaaatacaagccgcgttagagaaaaaacggttgggtgggtaa

SEQ ID NO: 265845 - DNA, 1260 bp, Klebsiella pneumoniae; identical to SEQ ID NO: 209629

SEQ ID NO: 265846 - DNA, 1536 bp, Klebsiella pneumoniae; identical to SEQ ID NO: 213864

SEQ ID NO: 265847 - DNA, 282 bp, Klebsiella pneumoniae
gtgattaataaaatacaagcggctgaaaatgtaactgataacacttcaaaaaaattaaaaaatgaaaagcaacatagtggtggaagattgcagcgagtgtcattaacggaaaagcgatttcttgatgggagcgaaggaaagtattatgtgttgcaagagaacaaatacgttctcaacgtaaggctgagcagattaaaaatgaaagaaataaagaaaggtttgaagcagagtttgaatggaaaaaaccagtgtcatttcgtcgttaaagcatccattcattaa

SEQ ID NO: 265848 - DNA, 990 bp, Klebsiella pneumoniae
atggccagctttgagtctgcctatgtggctttatctcgcatgaaacagcatgttcaggtctacaccgacagccgtgagggctggataaaggccatccagcattcacctgagaaagcgacggcgcacgatattctggaaccccgtaacgaccgggcggtgaaaagcgcagatctgctgttcggtcgggcaaggccactggatgaaaccgccgcgggccgggcagccctgcagcagtccggtctggcacagggaagttcaccaggaaaattcatttctccggggaaaaagtaccctcagccgcatgtggcgctgccggcatttgataaaaacgggaaagccgccggtatctggctcagcccactgaccgatcgggacggacggcttgaggctatcggcggggagggacgaattatgggcaatgaagacgcccggttcgtggcgctgcagaacagccgcaacggtgaaagcctgctggccgggaatatgggggagggcgtcagaatggcccgcgacaatcccgataccggggtggtggtgcgtctggccggtgatgaccgcccctggaaccccggggccatgaccggcgggcgggtatgggctgaaccggcgccggtggctccggtaccgcaggccggggctgacattatcctcccgccagaggttctggcgcagcgggcggcagaagaacagcagcgccgggaaatggaaaaacaggcggaacagactgcccgggaagtggccggggaggcgcgtaaagccggcgagccggcggaccgggtgaaagaggttatcggggacgtcattcgcggactggagcgtgaccggccgggtacggagaaaacgacgctaccggatgatcctcagttccggcgccaggaggcggcgattcagcaggtggcctcagaaagtctgcagcgtgaacgtctgcaggctgtggagcgggacatggtgcgcgacctgaaccgcgagaaaaccctcgggggcgactga

SEQ ID NO: 265849 - DNA, 288 bp, Klebsiella pneumoniae
atggaaaaacaggcggaacagactgcccgggaagtggccggggaggcgcgtaaagccggcgagccggcggaccgggtgaaagaggttatcggggacgtcattcgcggactggagcgtgaccggccgggtacggagaaaacgacgctaccggatgatcctcagttccggcgccaggaggcggcgattcagcaggtggcctcagaaagtctgcagcgtgaacgtctgcaggctgtggagcgggacatggtgcgcgacctgaaccgcgagaaaaccctcgggggcgactga

SEQ ID NO: 265850 - DNA, 288 bp, Klebsiella pneumoniae; identical to SEQ ID NO: 265849

SEQ ID NO: 265851 - DNA, 390 bp, Klebsiella pneumoniae
atgagcatcgatatctcggtgatttggtttgtcatcattgtcttcgccacgctgatgtatatcgtgatggatggtttcgatttaggtattgggatgctgttcagcgtggtgcatgatggcgaagagcgcgatgtgatggtcaacagcgtcgcccccgtctgggatggtaacgaaacctggctggtgctcggcggggcagggctattcggcgcctttccgctggcctatgcggtgatcaccgatgcgctggttatcccgctgacggcgatgctcatcggcctgatttttcgcggcgtggcctttgaatttcgttttaaagcggttccctcgcatcgcatcttctgggactatgcctttgccggcggctcgctgttggcgaccttcagctag

SEQ ID NO: 265852 - DNA, 429 bp, Klebsiella pneumoniae
atgcggattaaccttcggggcgcctggacggggctgccgatcctgctcgcaatggggctgtcgggaggcggcgtggcgctctggcgcgatctgcgcccgccgcaggcggcggtaacccgtgatgcggcgttgcaaacgcagtggcggcggatcatggcgctgcgcatccccggcgaggaaaatcccggggcgcgcatcgacacgcagtcattttcgcccatagccattccgctctccggagcgaagcttatcgcctggcgtccgcagggaagcggcggcgagatagagctgaccctgtcctggtcaacggtacccgcgcttttttcctggctggcgcgctgcgggatgaatccgcgttcgttttcgctgggccgtgaggcgcagacgctccgcctgcgactgctgctggaggcggaagatgagcggtaa

SEQ ID NO: 265853 - DNA, 138 bp, Klebsiella pneumoniae; identical to SEQ ID NO: 41172

SEQ ID NO: 265854 - DNA, 648 bp, Klebsiella pneumoniae; identical to SEQ ID NO: 230658

SEQ ID NO: 265855 - DNA, 594 bp, Klebsiella pneumoniae
atgcaagaaaccatgacgagaatagaactgtctggagtcctgggtaaaacctttgggaaggttcattatcgtttaataaagaacatcaatgaagccggagaggcattatctgcgacgatccctggatttgaaaggttcatgatatccagtgaggagcgtggattgacctatgcagtatttaaagggaataagaatatcgggcatgatgatttaggattccctgtaagtggcgaaattatccgcatagtccctgttatcattggcagtaagaaggcaggaattctccaaacaatccttggtgcagttattgttgcggcaagtgttgcctatggttttttcacagaggattgggctaatgccgcgtatggtattcaagctggcggcgccatgatgctcggcggcgtcgttcagatgctctccccacagccagctggcctggcacgaaaagaatccgctgacaataaagcgtcctacgcctttgggggcgtgacgaacactgcctctcagggatacccggtccctttgctttatggcaaacggcgaattggcggagccattatatctgcaggtatttacgtagaagaccagcaataa

SEQ ID NO: 265856 - DNA, 828 bp, Klebsiella pneumoniae
atgaatgagccaatcactgagcagttatacaataaagttgtaaatttcgttaataaaatggatgggagtgtgcgctttgattatatttctaagtccttgcgcattcctcctgacactcttgatgaaattgtggacaggatgattgctgatggagtcgttgttaatacaggaacggtaggtgaatatttaccagtaaaacacgcatcttccaaaaatactgataaagataatcgatgctgtacatctcaaaaaaacaatgatagtagtggactaaaatttattgttgggagagtagcattagttatagccataatattttttattataacctgcttttatgcttacagagcaccgatatcatttgtttttctaatcccagccataatggctgcatttgtttttacaaaccaaaatcatggtggagaaggtttcctagggttgagttcaatctctgcatgtttaatctttttgctccttactaatgcgcagactccaatatttggagaagaatatgaattaagaaagcagagggatgaaattaaaaatgaagttactaggaaatcaaaggaagaagatcagcaacagctaaatgatatccttaacgccagagagcatataaaagggatgctaaaagacccctcctcagctaaattttctggtgaattcattgggaaaaatggtgctatctgtggccatgtcaacgctaaaaatagttttggtggttacactggggagtctcgttacatattttctgtcaatttttctgcaatagatgaaggcaccacctcctttaataaggagtgggagagacagtgttatcttaattga

SEQ ID NO: 265857 - DNA, 462 bp, Klebsiella pneumoniae
atggctgataaaacttcacctgaatatgcgatgttgccagcgggcaccattgtgaaatacggggagcctggcgctgccacgtcagcgctgaaaccgctgattaactgtaaagcgctgggtgcaatggggcagacggggggctttgtcgactgcaccacgttactggataagcagaaacagtccatcagcgatctgcctgacgggcctgaaaagtcgctgggctttattgatgatccaggcaataccgattttgccgcgctgctgaacgcagcagaggcccgcaagaccatccagttatacgtcgaattacccaacaagcgaacagcgacgatgctccttgcgctgtccgggtggcagatgaatgaaatcgccgctccggcgaatgaggtcatccagatcactgttcagggtaagcagaacaagatcacctggggaaccgtcgctgataccagcggcgcctga

SEQ ID NO: 265858 - DNA, 390 bp, Klebsiella pneumoniae
atgatagagctggcgattaagggtgcgctggagcgcatcaccggcatgaatgcgtatccgcttttactgccggacacggtccaggaaggtgcgacctttcagcgtatctctgacccggaaatggtctcgggaatgttgcgaacggggatcgtctctgcccgtatccaggtgaatctgtaccgtctcgatgattacacctcactgctgcagctggataaaaaaatctggacggaactgaagtccgtcgttcatggccagctggaaggtatcccggttcagtatgtggagcgaggcggtatccatcaggataaaaaccagctgacgaatcgtcgcattcagtatcgcctgacccgcgatttcatcattcactacgtggaggactcctcgtga

SEQ ID NO: 265859 - DNA, 195 bp, Klebsiella pneumoniae
atgcggggagtgattatgtacttaaattattatttgttaatcgggtttctgctctggctttttttgtttattgccgggcgagtccactgcacgaatgttgtcgaccatatattagcgagtttgtttattactgcgctctggcctgtcgtatttataaaaatggcatactgcatactggtgagtaaacatgagtaa

SEQ ID NO: 265860 - DNA, 2709 bp, Klebsiella pneumoniae
atggcgctatttttcatgacggcaatttttattacgggtaataatatgacaaacatccctgagtcctcatcatgggaagataatattcttcttattgaaagagttgagcctgtttccggcggacttaatggcgtggcaaatcgcccgttaattagtctggctaatcgcacgcgttatctgaaagaaaaatatgataaggccatcgaaaataacgaattaagccttaagttactgggtgattacaaagatggcccatggacgctgacaagttataaccagcttatttctttcaacggaacattatggcggctgtcttctgatgtggtcatcggttctggatataccacatcaggaaccacaggggagacatgggcagaaacagataaagaaaactttgtcgattttggtcagagtcagttacgaactgagctgggcaccatttttatgccagccgcttcaggagatgctgagacggatgtgcaattgctacaggctgcgttaaatgtcggcggcaagattagctacaatctccccggcgagtatttgtacggcacccatagcgtgattaaatccggtacgtcatttcatactgccgctggtgtgaactggaaacaggtagcaggtaaggttaacccgttcctagtcaatgaggcattttcagcgtcgcgttatgctgtaaccagcatgacgaaaaacactactgcgattaacatctaccttgatggttcggatatcaaaagcgccaactacattacggtggtctgcgaaaatcatccgttcgtacgtggggattgggcggcatttcatggtgcgaaagagttcggctacgacgggattatgcgggttatttcagtcgttgacgcgaacacctttattgctgaaagccattcgacgatgactgctgattcagccacagtcaataccgatttctggaacgggctgttttgttttaaagcagacacgaatattgaggtcgatattcaggggcggatagatggcaactggcggggaaactccacggcatcaacgacggattttgacgagcgcgtcaaatttatgggcatgtcgttctggggagtcaataatctcaccatcaggcttaatgacgcgtttaatatccgaaaatatgccgtgctgctggctaacattcgaaacgtccatgtaccgcgtattaatttttataacttctccgatggcctgcatattcaaccgccgtttgtcggtattagtgtaggcacacttgccggggctacgggtgatgacctgctggcgctgacgaacggtgactatgaggcgtaccagctcagtcgggggcatgggtacagtatctatgttgaccacctgatgccacagaacgccctgacggcattaaaagcggccggtgcaccgggttataagttctgggatattgatattggctctatttccggttcaacgcgtctgcaaattatctctgccatccgtgacggcattctttcctacaccgatattggacgcctccgcattcgctcgtgctcttgtgtgtcgcagacgaaagatgatttctatctcaacaccgaccaaatggagagcttcatcattgatgactacgaggtgtgctcgctaaacagcggcacctggtgcatcacgatggggaatcgttacggcatcaccggtaacatcaaacacatcggtattaaaaacatccgctataaagagggagttcctcttaaatctattgcgtacgttggctataactgcagcgtcagatttatggacctgcattttgccaacgccgcgccactcaatggtgcacaggctgttgtgcatacggagagggcagcaacccagagcggggatgcgggcgagtctgccggtggctttattgatacccttaaaatctcgggtaaatttaccttcccgaatgccggtatcggtcggcttatctggatgcgggcgaagtggaacagaatactgctgaataatctggtcgttgagggtggtgagcgcatcatccatgagaacctggttacgggcaataagggtaaggtgttctgcaacaatgttcacgttaagggtgcaagcggtttctgcaacacttataacgaaatcgaggcctatcacgcatccacgctgctggaaacgaccgatatgccatattggacgcgtgacgcatcagcagtagtcaagatttatggcgctgttcagacgctgaatggtaccggggtctgccgtattggtgccgggaagtattacgctaaggggcttgacgttccggtaaacctcactgattacccgcccactggaaatcatggtgatgtcgttttcaacacaaacgcaacggggaataccatcgggcgctaccagtacaacagcgcaaacagtacatgggagcttcagaaccgcgagaacatcagccagtcgccttctgacacctcagcgacgatttataaccctgtctggaatcgtggcttcaattgggttcaaacgttgacacaggacgtacaatttactgccagcgctgcaaacctcaccacgcttaaccgcggggataaaatccgcctgtatctcactcaggatgctaccggcggacgggcagtaacgttcagcaccgcctacaaattcccggttgcctgggtgagcggtggcaccgcaggccagcacaccatcggtgagtttgtctacgacggacagttcctggttctggaacgggctaacgtctggtattga

SEQ ID NO: 265861 - DNA, 597 bp, Klebsiella pneumoniae
atgagtaacagcctgttaccgccggggtcgtctgcgctggagcacaggctggcgcaagcctgttcaggtatcagtgatttaaacgtgccgctgcgtgacctgtggaacccgtggaaatgcccggcaaagtttctgccgtatctggcctgggctttctccgttgaccgatgggaggagacctggacagaaaccgctaagcggcaggcggtcagcgatgcgttctggatacatcaacgtaagggtaccgtagctgctgttcgccgggtgattgaagcgttgggctacagcatggctctccgggaatggtgggaagtcgccgaccctgccgggacattcaggttagaagtaaatttaaacaaccacggtatttctgaaacgatgattaaagaacttgagaggatcatcggagatacgaaaccggtaagcagacatatggcgcaattaaatatcgccgaagaaataagaggtgatgtttttataggttcggctctatgtatgggggatgtgatcaatatttaccccaatgactacgaacctgaatacgacattacctacaatggcgctatttttcatgacggcaatttttattacgggtaa

SEQ ID NO: 265862 - DNA, 531 bp, Klebsiella pneumoniae
atgacattcctattaaggaagttttcatacccaaaatgggagaaaaacaaaggattatctccagatgagttttcagctgattcaattactggctgtacgcgcacaactgcgaataagctttcagtttggagatcagaaaccactgattttaaatctgattatgtagaaaaacttattgttgctttagctacgacgatgccgtcacctgctactatagatcttgtttggttgaaagaagaatggttttttgaacatggaattacattggaagataatccaggtgatactaaatatgaaagtgtgaataatcttcatagcgacattgcaaatctaaatcataggcgtctagctatggtaggttcacatatgcttgaacaattagagggggcaggtaattatctcagggttagtaaaagagaactgatttcacttgtggttaagtggatggaaaaagaaggtgagtttactatagaggatttggaggaaaaatggcaggaacagttgaataaattattcaacctattgcgctag

SEQ ID NO: 265863 - DNA, 648 bp, Klebsiella pneumoniae
atggcaggttatagcgattatatatttaatatagcggcaaaggttatcagcaatgctgtgcctattaatgagtttaatgtaataactaatcgtttttttaacaatctccatgatgaatttaaaacgtcgcgttttcatgtgcatgattcagcctcaagtaatatgattgctgagtctggtaacgttggaaggattaattcacaaagtagtgagatagccttcgatatacaagtgcagcgttgtttaaaaaacgcgttgctatatcttaagtctgaaaactatattgaaggcgagataactaaaactcaaatttatcttgaatctttgtctgaaaaaaacaaatcattatttttagaagtctttcaacgtgtctgggtttcaatctattactcaccagagtatcttcgaaattttttatacatagccgcatctatggactatgaattgatgaaggatcgcgcagatgtccttatattaggatgttctgcacatgaagatgttttagttcaggaggcagctattagggctttcgaatcttgggaaaatccagagcatgcttcacatttgcgtgcaatgagaaagtttaatgaaaaatggattgaagattatagacaaagtactataaattttttggagagtctaaaatga

SEQ ID NO: 265864 - DNA, 696 bp, Klebsiella pneumoniae
atgaatcaggttcatgagtcacatcaaattaatcttttcacaaccaatgaagaaatatcgcctagtcctgctataatttttccagttctacaggagttaagcggatttagcctcatcccaacatttggacaggaagtaaatgctttatctggtgagatgaaacagatattgattatgacaaatccagagcaaacttatcgtattgaatttgcaagccatgcaatcgttataaatgctatgtctacaaatcatgatgaatttgttgagaaatctgtaaatgttatcagtgcaatgttaaagatatttcccaataagaaatttaatagaattgcattattaaatgcacagatttttactgcttctttggataaatatcaacagttgtatgataaattattcacatacaatgaagtttctccttttgagtgggataacagaattgcgcttcgtaaaaatattgaatttaataatgaggcaataaatagcatcaatactatcagtcgcaaagaagttgctgttatgaatcataattcaggcaagccatttgatgcgataatgtttgaaatcgactctaatacgttgccaacaaataccgattatagatttgattttaatcaggcgattcaagtgttgcgtaatttgaatgataataacagaaattcactgagtgtactgcgtcgttatattgagttatag

SEQ ID NO: 265865 - DNA, 780 bp, Klebsiella pneumoniae
atgaacgcactctctgttttctcgtttcaggaaaaccaccccgtgcgggtggttctggttaatggtgaaccctggtttgttgctgctgatgtctgcaaagcgctcgatatcgctgataaccgtgctgcagtgcgtaaattggatgatgatgaaaagggtgggtactcattacccacccctggtggggtgcagtctgtaggtattgttaacgagtccggtttatacactctgatcctccgctgccgcgatgcggtgaagcagggaacgacggcctggcggttccgcaagtgggtcaccaacgaggttctgccagctattcggaaaagcggtgaatacagctacgtcgaacccgcgccaaaaagcgccggtgaaccattggactggcggcaaaaggaagaattacgcggcctgataaacgatatagcccaaagttttcggtaccacaacgcatggaaaagtggtgtatggctggcgctacgtcgcgcctgcaggaatccatcccccaatccgattacggttgacgatctcccggccatcactgccgagttgcgccggatattaacgtcggcagaaaccgcgctggacaatatgcggacctacgagcgggaatttttgcgtgaggtggttcgtggggcgcgtcggagtgtgtcgcgagaggaattatcaatcatcgaccttggctcagaggtggagaaggtgctgccagcgcatttcgagctggccatcaataaactggaggccttatccacaaaattagaggctcctgccgtctcttcctga

SEQ ID NO: 265866 - DNA, 780 bp, Klebsiella pneumoniae; identical to SEQ ID NO: 265865

SEQ ID NO: 265867 - DNA, 2544 bp, Klebsiella pneumoniae
atgagcaaagtcagaatcgctattatcggtaacggcatggttggccatcgctttatcgaagagcttctcgataaggcgcctgccggacagttcgacattaccgtgttctgtgaagaaccgcgtatcgcctacgaccgcgtccacctgtcgtcttatttctcccatcacactgcggaagaactgtcgctggtacgcgaaggtttctatgagaaacacggcgtcaaggtgctggtcggcgaacgggcgatcaccatcaaccgccaggagaaagtgatccactccagcgccgggcgtaccgtgttctacgacaagctgattatggcgaccggctcatacccgtggatcccgccgattaaaggcgcggaaacccaggattgcttcgtctatcgcactattgaagatcttaacgccatcgaatcctgcgcccgccgcagcaaacgcggcgcggtagtcggcggcggcctgctcggcctggaagcggccggcgcgttgaaaaacctcggcgtggaaacccatgttatcgaattcgcgccgatgctgatggccgaacagctcgaccagatgggcggcgagcagttgcggcgcaaaatcgaaagcatgggcgtgaaagttcacaccagcaaaaacaccaaagagattgttcagcagggcaccgaggcgcgcaaaaccatgcacttcgccgacggtagcgagctgcaggtcgatttcatcgtcttctcaaccgggatccgcccgcgcgataagctggccacccagtgcgggctggcggtcgcccagcgcggcggcatcatggtcaacgatagctgccagacctccgatccggatatctatgccatcggggaatgcgccagctggaacaaccgtgtctacggtctggtcgcccccggctataaaatggcccaggtggccgtcgaccatctcctcggcagtgaaaatagcttcaccggcgccgacctcagcgccaagctgaagctgttgggtgtggacgtgggcgggatcggcgatgcccacggccgcacgccgggcgcccgtagctacgtctatctcgacgaaagcaaagaagtttataagcgcctgatcgtcagcgccgacaacaaaacgctgctcggcgcggtactggtcggcgacaccagcgactacggcaatctgctgcagctggtgctcaacgccatcgagctgccggaaaacccggattcgctgatcctcccggcccacgccggcagcggcaagccgtccatcggcgtggataaactgccggacagcgcgcagatctgttcctgcttcgacgtcagcaaaggcgacctgatcgccgctatcaataaaggctgccacaccgtggcggcgctgaaagcggaaaccaaagccgggaccggctgcgggggctgtattccgctggtcactcaggtgctcaacgccgagctggcgaaacagggcatcgaggtcaacaacaatctgtgcgaacacttcgcctactctcgccaggaactgttccacctgatccgcgtggaaggcatcaaaaccttcgacgagctgctggaaaaacacggtcagggctacggctgtgaagtctgtaagccgaccgtcggttccctgctggcctcctgctggaatgagtacatcctcaagccgcagcacacgccgctgcaggacagcaacgacaacttcctcgccaacattcagaaagatggaacctattcggtgatcccgcgctcagctggcggcgaaatcacgccggaagggctggtcgccgtgggccgcatcgcgcgtgaattcaatctgtacaccaaaatcaccggctctcagcgcatcggcctgtttggcgcgcagaaagacgacctgccggagatctggcggcagctaattgaagcgggattcgaaaccggccacgcctacgccaaagcgttgcgaatggcgaaaacatgcgtcggcagcacctggtgccgctacggcgttggcgacagcgtcggcttcggcgtggaactggaaaaccgctacaaaggcatccgcaccccgcacaaaatgaagttcggcgtctccggctgtacccgtgaatgcgcggaagcgcagggtaaagacgttgggatcatcgccaccgagaaaggctggaacctgtacgtttgcggtaacggcgggatgaaaccgcgccacgccgatctactggccgcggacctcgatcgcgagacgctgatcaaatatctcgaccgctttatgatgttctacatccgcaccgccgataagctgacccgcactgccccgtggctggacaatatggaaggcggtatcgactatctgcgcagcgtcatcatcgatgacaagctcggtctgaacgaccatctggaagaagagctggctcgcctgcgcgccgccttcgcctgcgagtggaccgagaccgtcaacaatccggcggcgcagacccgcttcaaacactttatcaacagcgaccagcgcgacccgaacgttcaggtggtgccggaacgtgaccagcaccgcccggccacgccgtatgagcgtatcccggttactctggtggaggaaaaagcatga

SEQ ID NO: 265868 - DNA, 495 bp, Klebsiella pneumoniae
atgaatacgcagatcgtcagggacggcgccgttggcgcgcagccagacctggcgcaccggttcggcgatatggcctttcattgggttatgaaactccaccggacggatctccagcggtttatcgcagaggaatttgtctttcacctgcggcggcaggagatgcgccagcttgcgagcgatatcggtttccgaaggcaggccgtcaggggagggggcggccggcattgctttctgatgctcatagccattctctggcgcctggaaggaggcggtcatatagaaaatcggcttcccgttctggatggcggctacccgacgggcgctgaagctgttgccgtcgcgcagcacctccacatcgtaaacgatcggcttctggctatcgccggggcgaagaaagtagctgtgaaacgaatgaaccagacgctcaacgggcacggtctcttttgccgcatacagcgcctgacccactacctggccgccaaaaacctgacgtaa

SEQ ID NO: 265869 - DNA, 1488 bp, Klebsiella pneumoniae
atgaacttacctgaggaaaaaatagctaaacgagcactgaaagccattgaatttatttgtcgacagctctcgcgctttgcaaaaatgacacccgttgagcttgtggcttacttacgaaagaatcccaaagatgccttttgtaatattccccatccgaaaggaaatggacatatccattgtggttctcttgcctggaacaagctgaatgagcttgtagacctcactatcgaattggatcacggtcttgggcgacgagtaggccgcaaactcgcaaaggaagccgtaataaatgcttttgttaaaagaatattacaggaggcacgtggagttgatcaggaaaccgcaatgctgcttcttaaagacgctttaacgattttgagagaaaagcttgttgttatcgaacactacctaccgtgtgtgcttttccctggggatacacctactgaattcagcgttggtcctgtcacattcgtccgtcgctccaagttcttcgatgaaaaaaaatcagtactaaaacatagtattcatgttaacacgaaggcgcatattcagtgcgtaaaggaagcgattgctcaaggtttcccacaagaacgcacgcacactaaagataaatcaagacaactagtgcgtaaattacagtcccgagcagtcaaagcctacaaagactatccatggattgcttgtgtgaaagtgagtgattgtgatgaagcaatctctaaagaacgagcgatccaagctacagagatggcgcttcacatcatccgtatcctcttgggagctaaaccgacaagggaaattaggctagcatggtcacgcagcggagctctgcgctcggcacatttgcacgctgatgtacatggtgtgattcacgcaagtctctgcgctgattctttagaaccggttagtgtaataaactggcatgaagcattgataagggcaaatttagaattagacatcctcggttctgctttgatacccatagtcaatccagtagaaactactcaccttcaccagcgccttattgacgctatcaattggttcggggacgcggttacagatccaaatatacattcgagtatagtgaaatacgtttctgcaattgagcggttgttcttcggtaaattcgaagcagggcggacaaaattgtttgccggtcgggttagggatgtgttgaaagcattcagttgtgatgaaggggatcgtgtttattctcaagctctggaactatacaaaactcgttcgactttggtacatggagaacaatttcgtaccgaagatgaatcctttaacattattaatcttgcatcagagttaagtaggatatgccttctatgctctgcacagctttactccatgatgctacaagcattcgaaaatcctgatagtgcaaaattagaagaaatcatgaagcgcataaacgatgaagggttgaattggctggcagaggctgcagcattaggcagtgcaaaaaactccccactcagctaa

SEQ ID NO: 265870 - DNA, 435 bp, Klebsiella pneumoniae; identical to SEQ ID NO: 10324

SEQ ID NO: 265871 - DNA, 834 bp, Klebsiella pneumoniae; identical to SEQ ID NO: 139224

SEQ ID NO: 265872 - DNA, 423 bp, Klebsiella pneumoniae; identical to SEQ ID NO: 10327

SEQ ID NO: 265873 - DNA, 168 bp, Klebsiella pneumoniae
atgcagcatcagcagaacggcatgccgggtcagttcacggccctgatgatatgcctcaatacgttcaagcagttcaggcagccgctccagtggcagggcaggatagtgccgtctgacaggaggtgtggtcacgccgccaagatttgctgccgggttcgtatcgattaa

SEQ ID NO: 265874 - DNA, 183 bp, Klebsiella pneumoniae; identical to SEQ ID NO: 211003

SEQ ID NO: 265875 - DNA, 1626 bp, Klebsiella pneumoniae; identical to SEQ ID NO: 211004

SEQ ID NO: 265876 - DNA, 996 bp, Klebsiella pneumoniae; identical to SEQ ID NO: 211005

SEQ ID NO: 265877 - DNA, 447 bp, Klebsiella pneumoniae; identical to SEQ ID NO: 211006

SEQ ID NO: 265878 - DNA, 504 bp, Klebsiella pneumoniae; identical to SEQ ID NO: 211007

SEQ ID NO: 265879 - DNA, 1134 bp, Klebsiella pneumoniae; identical to SEQ ID NO: 212189

SEQ ID NO: 265880 - DNA, 1014 bp, Klebsiella pneumoniae; identical to SEQ ID NO: 212188

SEQ ID NO: 265881 - DNA, 2235 bp, Klebsiella pneumoniae; identical to SEQ ID NO: 212187

SEQ ID NO: 265882 - DNA, 528 bp, Klebsiella pneumoniae; identical to SEQ ID NO: 212186

SEQ ID NO: 265883 - DNA, 1014 bp, Klebsiella pneumoniae; identical to SEQ ID NO: 212185

SEQ ID NO: 265884 - DNA, 1443 bp, Klebsiella pneumoniae; identical to SEQ ID NO: 212184

SEQ ID NO: 265885 - DNA, 309 bp, Klebsiella pneumoniae; identical to SEQ ID NO: 138899

SEQ ID NO: 265886 - DNA, 471 bp, Klebsiella pneumoniae; identical to SEQ ID NO: 212181

SEQ ID NO: 265887 - DNA, 411 bp, Klebsiella pneumoniae; identical to SEQ ID NO: 139558

SEQ ID NO: 265888 - DNA, 768 bp, Klebsiella pneumoniae; identical to SEQ ID NO: 212179

SEQ ID NO: 265889 - DNA, 543 bp, Klebsiella pneumoniae; identical to SEQ ID NO: 212178

SEQ ID NO: 265890 - DNA, 1710 bp, Klebsiella pneumoniae; identical to SEQ ID NO: 212177

SEQ ID NO: 265891 - DNA, 924 bp, Klebsiella pneumoniae; identical to SEQ ID NO: 212176

SEQ ID NO: 265892 - DNA, 1827 bp, Klebsiella pneumoniae; identical to SEQ ID NO: 212175

SEQ ID NO: 265893 - DNA, 609 bp, Klebsiella pneumoniae; identical to SEQ ID NO: 212174

SEQ ID NO: 265894 - DNA, 450 bp, Klebsiella pneumoniae; identical to SEQ ID NO: 137934

SEQ ID NO: 265895 - DNA, 345 bp, Klebsiella pneumoniae; identical to SEQ ID NO: 212172

SEQ ID NO: 265896 - DNA, 873 bp, Klebsiella pneumoniae; identical to SEQ ID NO: 212171

SEQ ID NO: 265897 - DNA, 273 bp, Klebsiella pneumoniae; identical to SEQ ID NO: 212170

SEQ ID NO: 265898 - DNA, 1122 bp, Klebsiella pneumoniae; identical to SEQ ID NO: 212169

SEQ ID NO: 265899 - DNA, 1011 bp, Klebsiella pneumoniae; identical to SEQ ID NO: 212168

SEQ ID NO: 265900 - DNA, 1401 bp, Klebsiella pneumoniae; identical to SEQ ID NO: 212166

SEQ ID NO: 265901 - DNA, 2193 bp, Klebsiella pneumoniae; identical to SEQ ID NO: 212165

SEQ ID NO: 265902 - DNA, 1338 bp, Klebsiella pneumoniae; identical to SEQ ID NO: 212164

SEQ ID NO: 265903 - DNA, 1272 bp, Klebsiella pneumoniae
atgaacattcagttaatgaatgtggccgtggacatcatcgagcagcggctggcgccgctggcgaacgttctgacgcgcaacaaccacattacggcgatgcgcgatagctttgcgctggctatgccctttgtgattgttggcagcctgttagttcccattttgtttccgcccgtttccatcgacggcgcctcgcgtttcggccaggtctatttgctgctgcggcctatcctgctgccgacctttcagctaaccattggcctggtggcgctgattgttgccttcggcgccagcgccagtctcgccaagcagtaccgtctgccggaacggctctgcggtttaaccgggtgtctggcttttctgctgtttatcggctttcgcgagactgcggtgagcaatgtttatctcggcggtatggggatatttaccgccctgatatccagcacctattccattgagataattcgctttttttacaaaaaaggctggtgtattcgcttgcctgatgaagtgccgctgatgacccgcaatggctttcaactgctgatcccgctgctggtggtgatgctgtcgataagcgtgatgaatgccatactgctgcagaccaccggacgcatcgtaccggagttgatcagcgaagcggtgcggccgctggtgctggcgtccgacacgctgatggcggtacttatctctttatttatctgtaacttactctggtttatcggtatccacggcgcgctgatcatcaccgggatcatgaaccccttctggatgacctatctgtttgaaaatcagcaggcgctggcggcgggttcgccaacgctgccgcatatttatctgcaggggttctgggatttttacctgctgatcggcggtattggctccactttgcctctggtgctgatggcgatgcgcagccgctcgcggcagctgaaaagcgtggccaagattggcctgctgccgtcgctgtttaatatcaacgagccgatactgtttggttttccggtgatcatgaacccggtttttttactgccgtttctctttgttccgctgataaatgcctgtatcgcatggtatttaactcagctgggtatcctcgaccgcgcggtggcgatgctgccatggtcgatgccttccccgctgggggcggcatggtcggcgaacggcagctggaaaaatttgtgcatgagcctgttcgcgatgtttaacgcctggatgctctatcgccccttcttcaaagtgtacgaacgtcagctcgcggaaaccgaacgctga

SEQ ID NO: 265904 - DNA, 315 bp, Klebsiella pneumoniae; identical to SEQ ID NO: 212162

SEQ ID NO: 265905 - DNA, 1323 bp, Klebsiella pneumoniae; identical to SEQ ID NO: 212161

SEQ ID NO: 265906 - DNA, 315 bp, Klebsiella pneumoniae; identical to SEQ ID NO: 212160

SEQ ID NO: 265907 - DNA, 915 bp, Klebsiella pneumoniae; identical to SEQ ID NO: 212159

SEQ ID NO: 265908 - DNA, 963 bp, Klebsiella pneumoniae; identical to SEQ ID NO: 212158

SEQ ID NO: 265909 - DNA, 918 bp, Klebsiella pneumoniae; identical to SEQ ID NO: 212157

SEQ ID NO: 265910 - DNA, 822 bp, Klebsiella pneumoniae; identical to SEQ ID NO: 212156

SEQ ID NO: 265911 - DNA, 849 bp, Klebsiella pneumoniae; identical to SEQ ID NO: 212155

SEQ ID NO: 265912 - DNA, 855 bp, Klebsiella pneumoniae; identical to SEQ ID NO: 212154

SEQ ID NO: 265913 - DNA, 342 bp, Klebsiella pneumoniae; identical to SEQ ID NO: 212153

SEQ ID NO: 265914 - DNA, 888 bp, Klebsiella pneumoniae; identical to SEQ ID NO: 212152

SEQ ID NO: 265915 - DNA, 942 bp, Klebsiella pneumoniae; identical to SEQ ID NO: 212151

SEQ ID NO: 265916 - DNA, 1710 bp, Klebsiella pneumoniae; identical to SEQ ID NO: 212150

SEQ ID NO: 265917 - DNA, 294 bp, Klebsiella pneumoniae; identical to SEQ ID NO: 212149

SEQ ID NO: 265918 - DNA, 2364 bp, Klebsiella pneumoniae
atgtacaaatcgactccgtcagcagcatggtgtaaaaaacgcctgctggtgacctctttgtttgcagcaatttatcagacttctgccatcgcagcagatacttccgccgttagcggcgaggcggtggatgacacctcggaacaaatgaccgtcaccgcccccgcgccggtgcagaaagccggtagcgaacacagcatcagcgcccgggagctggagaataaaggcgctaacgatttcggctcaatcatgcgctatgagccgctcatcagcgccaccgggggcagcggcggctccggcaacggcaaaagcggcttcgaccgcggaggttacaccggctacaacattcgcggtatggagagcaaccgcgtcggtatcgacgtggacggtatcgcgcaacccaacgccaccggccgcggctacgtcggccgcgccgggctcaacaccttcggcatcggccgcgattatatcgacccgtatatgtacggcagcgtggatatccagtccggcgccacctcgacggaaacggccaacagcgctatcggggggaatgtctccttccgcccgaaatcagcggatgattacctgcgcccgggcaagaccagcgccttcggctaccgcagcggttacgactctgcggatcgcagctggcacaacggggtgaccgtcgccggcggcgatgagttcctgcgcgggattttggtctatagccgccgtgacggccaggaaaccgaaaacaacagcggcaccgtcgacgcctacccggcgaactggcactccgatgcttttctggcctccgggatctggcagcctaacgatgagcacaagctgaccagcaccttcgactattaccataaaaccaaccacacccactacgatacctgggactccagcggcaacagcaccatcggcaccgccaaccagaccagccagacccggcgctggggcctgagcctgaaggatgactggacgccgatgaacgactacctcgacagcgtctccacaaaaatctactaccagcataccgaagcccatgactggacttatatgccggacagcgtcacccgcagaatgcagacggtgaactctaactacgataccgacacctggggcctgcaggccgcgctggcgaaaaccctgggccgccacgatctgagcgccggtttcaacgccagcaccagcaaaacccagcggccgttcagccagtcgccgatccccagcgtttacagcgagatcatgcagccggaggcagacagccgcagctacaccctcggcggctttgtccaggataagatcaacttcgatctcgacagccacaacttcgccgttattcccggcgtgcgcgtggtgcatcaatcgactaagccggaaaatctgtccgatctcgccgccaacagcagcgtgctgagcgaatcgtcggtggcgaatctgtacggcaaaaacagcgatacccaggttctgccgtcgttgaccttccagtacgacctcaccccgcgcctgatgacctacctgcagtaccagcgcggggcgcagttccccaacgccagccagctgtatggctcctggaacctcggctccagctacgccggcagccagcagtatgccctgatcggcaataccgatctgaagacggaaaccagcgataatctcgagtgggggctgaaaggggaagttaccgaaggcatcaccctgcgcacggcgctgttctacaacagctataagaactttatcgcctatacccgctatacccgcgccaacaatccgggccagttcacgaatgtgccgtcgaacatctacaccatttatcaggcggaaaaccgcgataaagcctatatctacggcggtgagattagcaccaaatttaactttggcacctggtttgagcaggtggacggcctgagcgccaccctcgccctcggctatagcgaagggaaatcgaaatccagctacagcggcgataaatacgtcgacctcgacagcgtggcgccgatgaaagccatcgtcggcgtggcgtgggacgatccggcgaaacgctacggcaccgccctgacggcgacctttgtcaaagggaaacaggcgaccgccaccaaccgcgaaagctacagcaacagcggatccgccatcaccgatgccagcagcgactatatgcgcgtgccgggctacggcatgctggactggaccgcgtactggcaggtggcgaaaaacgtgcgcctcaatggcggggtctacaacctcaccgatcgtaaatactgggattacctgagcagccgcaatatcgagaccggcaccaaccaggacgccaacgataaagcgctggcggtgatgccgggccgcacctggcagctgggcgtcaacgtcgacttctga

SEQ ID NO: 265919 - DNA, 1032 bp, Klebsiella pneumoniae; identical to SEQ ID NO: 212147

SEQ ID NO: 265920 - DNA, 819 bp, Klebsiella pneumoniae; identical to SEQ ID NO: 212146

SEQ ID NO: 265921 - DNA, 996 bp, Klebsiella pneumoniae; identical to SEQ ID NO: 212145

SEQ ID NO: 265922 - DNA, 780 bp, Klebsiella pneumoniae; identical to SEQ ID NO: 212144

SEQ ID NO: 265923 - DNA, 507 bp, Klebsiella pneumoniae
atgataatagagggaagaagaagcatggctattccaggtaatatgtggatatacgacgacggtggggcactaatcaaaggtggttgtgatgttgcagacagggagttcagcatcgaatttaaagggtttcatcacaatctctccattcccactgataatgccactggcaagcctaccggcactcgtcagcactcaccaatgatcatcgttaaagaattcgactattccagtccatacctctacaaagcagtagctactggtcagaacctgaaatctgctgaaatcaaatggtataaaatcagcgatgctggtcaagaagtggaatacttcaatatgctacttgaaggcgtccgaatcgtatcaatatctcctacaatggcttccccagaagacaagaacaacaaccatcttgaatctgtcgaacttagatatgagaagatcacctggaaacattgtgacggaaatataattttcaccgatgcctggaatgaaagacaaacagcataa

SEQ ID NO: 265924 - DNA, 333 bp, Klebsiella pneumoniae; identical to SEQ ID NO: 212142

SEQ ID NO: 265925 - DNA, 2562 bp, Klebsiella pneumoniae; identical to SEQ ID NO: 212141

SEQ ID NO: 265926 - DNA, 237 bp, Klebsiella pneumoniae; identical to SEQ ID NO: 212139

SEQ ID NO: 265927 - DNA, 1428 bp, Klebsiella pneumoniae; identical to SEQ ID NO: 212138

SEQ ID NO: 265928 - DNA, 408 bp, Klebsiella pneumoniae; identical to SEQ ID NO: 212136

SEQ ID NO: 265929 - DNA, 888 bp, Klebsiella pneumoniae; identical to SEQ ID NO: 212135

SEQ ID NO: 265930 - DNA, 1203 bp, Klebsiella pneumoniae; identical to SEQ ID NO: 212134

SEQ ID NO: 265931 - DNA, 378 bp, Klebsiella pneumoniae; identical to SEQ ID NO: 212133

SEQ ID NO: 265932 - DNA, 993 bp, Klebsiella pneumoniae; identical to SEQ ID NO: 212132

SEQ ID NO: 265933 - DNA, 1137 bp, Klebsiella pneumoniae; identical to SEQ ID NO: 212131

SEQ ID NO: 265934 - DNA, 627 bp, Klebsiella pneumoniae; identical to SEQ ID NO: 239801

SEQ ID NO: 265935 - DNA, 762 bp, Klebsiella pneumoniae; identical to SEQ ID NO: 212129

SEQ ID NO: 265936 - DNA, 1050 bp, Klebsiella pneumoniae; identical to SEQ ID NO: 212128

SEQ ID NO: 265937 - DNA, 480 bp, Klebsiella pneumoniae; identical to SEQ ID NO: 138865

SEQ ID NO: 265938 - DNA, 711 bp, Klebsiella pneumoniae; identical to SEQ ID NO: 212126

SEQ ID NO: 265939 - DNA, 318 bp, Klebsiella pneumoniae; identical to SEQ ID NO: 212125

SEQ ID NO: 265940 - DNA, 327 bp, Klebsiella pneumoniae; identical to SEQ ID NO: 139427

SEQ ID NO: 265941 - DNA, 606 bp, Klebsiella pneumoniae; identical to SEQ ID NO: 212123

SEQ ID NO: 265942 - DNA, 1428 bp, Klebsiella pneumoniae; identical to SEQ ID NO: 212122

SEQ ID NO: 265943 - DNA, 909 bp, Klebsiella pneumoniae; identical to SEQ ID NO: 212121

SEQ ID NO: 265944 - DNA, 1416 bp, Klebsiella pneumoniae; identical to SEQ ID NO: 212120

SEQ ID NO: 265945 - DNA, 1047 bp, Klebsiella pneumoniae; identical to SEQ ID NO: 212119

SEQ ID NO: 265946 - DNA, 735 bp, Klebsiella pneumoniae; identical to SEQ ID NO: 212118

SEQ ID NO: 265947 - DNA, 1713 bp, Klebsiella pneumoniae; identical to SEQ ID NO: 212117

SEQ ID NO: 265948 - DNA, 1800 bp, Klebsiella pneumoniae; identical to SEQ ID NO: 212116

SEQ ID NO: 265949 - DNA, 366 bp, Klebsiella pneumoniae; identical to SEQ ID NO: 212115

SEQ ID NO: 265950 - DNA, 672 bp, Klebsiella pneumoniae; identical to SEQ ID NO: 212114

SEQ ID NO: 265951 - DNA, 1110 bp, Klebsiella pneumoniae; identical to SEQ ID NO: 212113

SEQ ID NO: 265952 - DNA, 1299 bp, Klebsiella pneumoniae; identical to SEQ ID NO: 212112

SEQ ID NO: 265953 - DNA, 1638 bp, Klebsiella pneumoniae; identical to SEQ ID NO: 212111

SEQ ID NO: 265954 - DNA, 792 bp, Klebsiella pneumoniae; identical to SEQ ID NO: 212110

SEQ ID NO: 265955 - DNA, 2238 bp, Klebsiella pneumoniae; identical to SEQ ID NO: 212109

SEQ ID NO: 265956 - DNA, 1305 bp, Klebsiella pneumoniae; identical to SEQ ID NO: 212108

SEQ ID NO: 265957 - DNA, 2751 bp, Klebsiella pneumoniae; identical to SEQ ID NO: 212107

SEQ ID NO: 265958 - DNA, 1140 bp, Klebsiella pneumoniae; identical to SEQ ID NO: 212106

SEQ ID NO: 265959 - DNA, 1341 bp, Klebsiella pneumoniae; identical to SEQ ID NO: 212105

SEQ ID NO: 265960 - DNA, 1341 bp, Klebsiella pneumoniae; identical to SEQ ID NO: 212104

SEQ ID NO: 265961 - DNA, 1353 bp, Klebsiella pneumoniae; identical to SEQ ID NO: 212103

SEQ ID NO: 265962 - DNA, 444 bp, Klebsiella pneumoniae; identical to SEQ ID NO: 212102

SEQ ID NO: 265963 - DNA, 795 bp, Klebsiella pneumoniae; identical to SEQ ID NO: 212101

SEQ ID NO: 265964 - DNA, 330 bp, Klebsiella pneumoniae; identical to SEQ ID NO: 212100

SEQ ID NO: 265965 - DNA, 546 bp, Klebsiella pneumoniae; identical to SEQ ID NO: 212099

SEQ ID NO: 265966 - DNA, 846 bp, Klebsiella pneumoniae; identical to SEQ ID NO: 212098

SEQ ID NO: 265967 - DNA, 1368 bp, Klebsiella pneumoniae; identical to SEQ ID NO: 212097

SEQ ID NO: 265968 - DNA, 1290 bp, Klebsiella pneumoniae; identical to SEQ ID NO: 212096

SEQ ID NO: 265969 - DNA, 1368 bp, Klebsiella pneumoniae; identical to SEQ ID NO: 212095

SEQ ID NO: 265970 - DNA, 1224 bp, Klebsiella pneumoniae; identical to SEQ ID NO: 212093

SEQ ID NO: 265971 - DNA, 879 bp, Klebsiella pneumoniae; identical to SEQ ID NO: 212091

SEQ ID NO: 265972 - DNA, 1023 bp, Klebsiella pneumoniae; identical to SEQ ID NO: 212089

SEQ ID NO: 265973 - DNA, 1398 bp, Klebsiella pneumoniae; identical to SEQ ID NO: 212087

SEQ ID NO: 265974 - DNA, 1173 bp, Klebsiella pneumoniae; identical to SEQ ID NO: 212086

SEQ ID NO: 265975 - DNA, 1944 bp, Klebsiella pneumoniae; identical to SEQ ID NO: 212085

SEQ ID NO: 265976 - DNA, 756 bp, Klebsiella pneumoniae; identical to SEQ ID NO: 212084

SEQ ID NO: 265977 - DNA, 1149 bp, Klebsiella pneumoniae; identical to SEQ ID NO: 212083

SEQ ID NO: 265978 - DNA, 648 bp, Klebsiella pneumoniae; identical to SEQ ID NO: 212082

SEQ ID NO: 265979 - DNA, 1311 bp, Klebsiella pneumoniae; identical to SEQ ID NO: 212081

SEQ ID NO: 265980 - DNA, 1776 bp, Klebsiella pneumoniae; identical to SEQ ID NO: 212080

SEQ ID NO: 265981 - DNA, 1419 bp, Klebsiella pneumoniae; identical to SEQ ID NO: 212079

SEQ ID NO: 265982 - DNA, 423 bp, Klebsiella pneumoniae; identical to SEQ ID NO: 212078

SEQ ID NO: 265983 - DNA, 711 bp, Klebsiella pneumoniae; identical to SEQ ID NO: 212077

SEQ ID NO: 265984 - DNA, 1101 bp, Klebsiella pneumoniae; identical to SEQ ID NO: 212076

SEQ ID NO: 265985 - DNA, 396 bp, Klebsiella pneumoniae; identical to SEQ ID NO: 136058

SEQ ID NO: 265986 - DNA, 825 bp, Klebsiella pneumoniae; identical to SEQ ID NO: 212074

SEQ ID NO: 265987 - DNA, 231 bp, Klebsiella pneumoniae; identical to SEQ ID NO: 136056

SEQ ID NO: 265988 - DNA, 1206 bp, Klebsiella pneumoniae; identical to SEQ ID NO: 212072

SEQ ID NO: 265989 - DNA, 432 bp, Klebsiella pneumoniae; identical to SEQ ID NO: 212071

SEQ ID NO: 265990 - DNA, 822 bp, Klebsiella pneumoniae; identical to SEQ ID NO: 212070

SEQ ID NO: 265991 - DNA, 1098 bp, Klebsiella pneumoniae; identical to SEQ ID NO: 212069

SEQ ID NO: 265992 - DNA, 1224 bp, Klebsiella pneumoniae
ttggcgagcgatgtcgcgaccgtgttggcggcacagctccagcgcgtcgatatccgggcgccatttggctttcaggctcagcgacatctcaaagccggcatcctgcaggcgggtggacaggcggtctaccgcgccgccgctccagccgtgcgagccaaaggcgctggcgcgtttattgcgaaaacgcagcccggtcatctcttccaccagcccggcgattttcggcatcatcacgttgttcatggtggacgtgccgacaagtacgcctttcgagcggaaaacattggtgaggatgtcgtttttgtcgctgcgggcgacgttaaagattttcaccgctacccgtgggtcaacctcggtgatcccctgggcaatggcgtccgccatcatgcgggtattattggacatggtgtcgtaaaagatggtgatgcgatcttcctgataatccgccgcccactcgaggtatttctcgacgatttgcgtcgggttatcgcgccagaccacgccgtgggaggtggcaatcatctccaccggcaggttgaagccgaggatttcagtaattttcggcgtcaccaggcggctgaagggcgtcaggatgttggcgtagtagcgctggcactgttcgtacagttcagtctggtccacttcatcgttgaacagatgttcgtcgcaatagtgctggccgaaggcgtcgttgctgaacagcaccgcgtcgccggtcaggtaggtcatcatgctgtccggccagtgcagcatcggcgtttccacgaagatcagctgtttaccgttaccgatgtcgagagtatcgccggttttcaccacgtggaagttccactccggatgatgatggtggccgttgatcgagtcgatggcgttggcggtgcagtagatcggcgtatccgggatctgcatcatcagttcggtcagcgcgccggcatggtcctcttcggcgtggttaatgacgatatagtcgaggtcggcgaggtcgatttcgcggcgcaggttctgtacgaactcgcggctgaatttatgatcgacggtatcgatcagcacgtttttctcttcgcggatgagatagctgttgtagctgctgccgcgcagcgttttatattcggtgccgtggaaatcacgcacttcccagtcacgttggccaacccaaagaatgttatttttcaccacaatagacatagcaacctcaatcaatacagtgtgtttaaactcagttga

SEQ ID NO: 265993 - DNA, 516 bp, Klebsiella pneumoniae; identical to SEQ ID NO: 223624

SEQ ID NO: 265994 - DNA, 225 bp, Klebsiella pneumoniae
gtgctgcgtaaaccgcaatccggcgcactgcgcggtacgcggctgcaggcggtgatggagatggacgtggcctcaatgatgaccgtgatcccccgcatctccacgccaacgctgaccccgcaggaaatggcggacctcgacccggcagacctggccgcgatgtcgatcgaggtggtcctttttttgttgccgaagtcggcgtttgccgatttgccgacagcctga

SEQ ID NO: 265995 - DNA, 258 bp, Klebsiella pneumoniae
atgaataaatatgttgtttatactgctctgtttggtgattatgatgatcttattgaacccaaaaacattgattataaatgtgattttatatgttttactaatcaggaaaacataacttcagataaatggaaaatcatttatgttaaagatgtcaacgacactgttttaaaaaatcgagaatataagtttctgccacatctttttctctcgcaatatgatgcaagtagatccagtaactctaatagaaaaatatattga

SEQ ID NO: 265996 - DNA, 204 bp, Klebsiella pneumoniae
atgcagctcgataaggcccggcagcagccagccgccttccccatccagcgcctgcggcagccggctctggctttcggcgaaggcgaggatgcgaccgtcatggacttccagcgaaccgtggaccacctcgtcgtcgagaaccagttttacgttattgataatcatgctgtcattcccatagagtgcagtcggtcggcgacctga

SEQ ID NO: 265997 - DNA, 543 bp, Klebsiella pneumoniae
  misc_feature (527)..(536): n is a, c, g, or t
atggcacttaaagccttccccagagttaaagtaagaaaagattataatggtaaggttgtggcaataaaaaagaagctatcaggttatgatgacgcttcttttataacgatgatgtacgatcattttcaaaccattttaaaaccagaacttgggatttcttctaatttcccatggtgttgcttcttagcattaaaatggaaattatcggaaccgcttaaacgaaatgtatctccaatgaataaaagagatttcatcgatattgttaataggatatataatcttcagaatgaggtttctggtttttttgatgataagaaggtactgcttagtctcaggcgtatgatcattaatcaacagctgtatcaagctcctatgaaactagagttaaatacactagcaagacaatactattggtattgtaattatgatggtggctattttgataaggttttccaggaaacgcatggaataacattggaatcttattataaaataagtgcttattttgcaatgatgtcatgtattgnnnnnnnnnnatggtaa

SEQ ID NO: 265998 - DNA, 336 bp, Klebsiella pneumoniae
  misc_feature (223)..(232): n is a, c, g, or t
atgtctcaattcttttttaaccagcgcgccagcctcgtcaacgatgtgattgagggtaccattatcgccagcccgtggaataacctcgcccgtctggagagcgacccggcgatccgggtggtggtccgtcgcgatctgaataaaaacaacgtggcggtgatctccggcggcggcgccggccatgaaccggcgcacgtcggctttattggtaaaggcatgctgnnnnnnnnnnagcccgccactttatgcaccagaatggtcccggcgatgccgcgcggctgtttgttatccggcagcgaaatatcgtcgccgacgatcagcatctccacgttgtag

SEQ ID NO: 265999 - DNA, 510 bp, Klebsiella pneumoniae
atgtatgccaacctcgtcttcagcccgggcatcgatgcgttctatgcccagtgcgcccgcgtcggcgtcgactcggtgctggtggccgacgtgccggtggaagagtccgccccgttccgccaggcggcgatgcgccataacatcgcaccgattttcatctgcccgcccaatgcggatgacgatttactgcgccagattgcctcttatggccgcggctacacctatctgctgtcgcgcgccggagtgacgggtgcggaaaatcgcgccgcgctgccgctgcaccacctggtggagaagctggcggaatatcacgccgcgccgccgctgcagggctttggtatctccgcgccggagcaggtgagcgccgccattgacgccggagccgccggggctatctccggttccgccatcgtcaaaatcatcgaacgccacctcgatgagccgcagaccatgctcgacgagctgaaagccttcgtccagagcctgaaggcagcgaccaaaaccgcctga

SEQ ID NO: 266000 - DNA, 429 bp, Klebsiella pneumoniae
  misc_feature (27)..(36): n is a, c, g, or t
atggtcggatgcttctggcggatcgcnnnnnnnnnncagcatctcaaagcactgcgccggggtcactcccgcggcgaaggcgcgcagggccgcgccctggatggtcgggccgtccgccagcgggtcggagaaagggatccccagttcaagggcatcagcgccgccttcgatcagcgcatcgataattttcagcgactgctccggtcccggatcgccaagggtgacaaaggggacgaaggcgccttcctggcgatttttcagttgggcaaacagcgtctcatagcgttccatcagatttcccctcgcgctttcaggatgtcatgtacggtgaaaatgtctttgtcgccgcggccggagagattaaccaccagcagctgctctttttccgggttctcgcgcatcatcttcagcgcgtgggccagagcgtga

SEQ ID NO: 266001 - DNA, 543 bp, Klebsiella pneumoniae
atgccgataaagtgtggaaccacgctgccgtcgacctggccgcagatgcctttgaccgtgcgctcgccgacgctctctttatcggcgatcagaatgtcgcaggtggaggtgccgatgactttcaccagcgcgttaggctgcgcgccggcgccaacggcgcccatgtggcagtcgaaggcgccgccggagatggccacactctgcgacagacccaggcgctgggcccactctgcgctcagcgtgccgaccggcacatcggccgtccaggtatcggtgaacagcggccaggccagatgctggttgatgatgggatcaagctcatcgaagaagctggccggcggcagaccgccccagctctcatgccacagcgatttatgtccggcgctgcagcggccgcggcgcagatcctgcggacgcgtagtaccggagagcagggcgggcacccagtcgcaaagctctacccacgaggcggctgcctgggcgacagcgctatcttcgcgggtgacgtggaggattttggcccagaaccattcgctggagtag

SEQ ID NO: 266002 - DNA, 903 bp, Klebsiella pneumoniae; identical to SEQ ID NO: 213538

SEQ ID NO: 266003 - DNA, 1188 bp, Klebsiella pneumoniae
atggcgcgcggcggcggtccagaagcattcggaaatgacgataagctccggtttctgccacgcctgaatcagtcggttggtgtcctgatgatgagtaaagttggcgccgccggcccaccagataaagcgaatatcgggaaagcgccgcgccatgccgttgtgctgatactccgcccccggattctccagcgcctcgacaattcgtgcgaccgggatcttctccaccgcgtccacgcctccggccacgctcccctgcatcgagcccagcaccgccgcgcggcgggtcgggttgccgccgttggcaaaatgataggaaagaccaaacccgccaccgggggtgccgatctgtcccagcatggcggccagagtgaccagcatccagtgtttctgctcgccatactgctgacgctgcatgccccagccggccatcagcatagtggtattttcgtggaaaagttgcgccagttcgcggattttatctgctttaacgccgcagatcgctgctgcccactcagcggttttcgctacgccgtcgctttcgccggtcagatagcgggcaaaaatatcgtagccgctggtgcagcgggtaagaaacgcatcatcctgccagtcattttccaccagcgtatgggcgatccccagcatcagcgcgacgtcggtgcccatatgcggcgcgatccactccatcgaatcgccaaagaaatcgacggtttccgatcgcatcggatcgatgcagatcagccgcttaccgctctggcgcagccgatcaaaccacgggatcccttgctcgtcggaggcattccaggcaattttcagcgtgttcagcgggttggcgctccacagcaccaccacttcgctgtgctcgagcaccagcggccaactggtctgctgctgatacacctcattgccgccaacgacataaggcatgatcgcctgcgccgcgccggtggagtaatcgccaagatggccggtatagccgcccgccaggctcatatagcgctgcagcagcgtcgccgccttatgcaatacgccgttagagcgccagccgtaggagccggcaaaaatggaggccggaccgtagctgtcgcggatccgccgatgctgggcatcgatcagatccagcgcctgctcccagctcacccgcacgaattcatcctgaccgcggaccccctggggcttgtccggtga

SEQ ID NO: 266004 - DNA, 651 bp, Klebsiella pneumoniae
gtgaagccggtgcgcgatcaccacgggctggcggtggactttgtcattgaaggcgactatccgcagtacggcaacaacgacgatcgggtcgatgccatcgcctgcgacctggtggagcgctttatgcgcaaaattcaggcgctccccacctggcgtcaggcggtgccgacccagtcgatcctgaccattacctccaacgtggtatacggccaaaaaaccggcaacaccccggacggacgtcgggcggggacgccgttcgctccgggggccaatccgatgcatggccgcgaccggaaaggggcggtggcgtcgctgacctcggtggcgaaactgccgtttacctacgccaaagatggcatctcgtacaccttctccatcgtgccggcggcgctcggcaaagccccgtcagcgcaggaaaacaacctggtgggcctgctggacggctacttccaccacgaggagacggtggaggggggacagcatctcaacgtcaatgtgctgaaccgggaaaagctgctcgatgcgatagaacacccggagcagtatccgaatctgacgatccgcgtctccggctatgcggtccgctttaacgcgctgacccgcgaacagcagcaggatgtgatctcccgaacgttcaccagccaactctga

SEQ ID NO: 266005 - DNA, 507 bp, Klebsiella pneumoniae
atgcagtatttgggtaaagtgattggcgtggcagtggctttgctgatgggtggtgggttctggggcgtggtgcttggctttctggtcggccatatgtttgaccgggcgcgcagccgccggttaaatctcttcgccaatcagcaggagcgtcagtcgctcttcttttccaccaccttcgaagtgatggggcacctgaccaaatccaagggccgcgttaccgaagcggatattcatgtcgccaatgtgctaatggatcgcatgaacctgcatggcgcctcgcgcaccgcggcgcagcaggcgtttcgcgacggtaaggccgacaactatcccctgcgcgagaaaatgcgtcagctgcgcagcgtctgctttggccgtttcgatctgattcggatgtttctggaaattcagctgatggcgaactgcatcctaacgaacgggaagtgctgttcgtcattgccgacgagctcggcatctcccgcgcccagttcgatcaattcctgcggatga

SEQ ID NO: 266006 - DNA, 903 bp, Klebsiella pneumoniae
atgggtatcgaattatcggtgatctggttcgtgattatcgtctttgccacgctgatgtacatcgtcatggatggctttgatctgggcatcggcctgctgttcagcacggtgcggggcggcggggatcgcgacgtaatggtcaacagcgtcgcgccggtatgggatggcaatgaaacctggctggtgctcggcggcgccggcctgtttggcgcctttcccctcgcctacgcggtgatcatcgacgccctgtcgatccccctgaccctgatgctgatcggcctgatttttcgcggcgtcgcctttgagtttcgcttccaggctacgccgtcgcaccggccattctgggatcgcgccttttttggcggctccctgctggcaaccttcagccagggcgtggtggtcgggtcggtgatcaacggtttcaccgtcagcggtcgcgccttcagcggcggcatgtttgactggctgaccccgttcagcctgttctgcggactcggactatgcgtggcctatgcgctgctcggcgccacctggctggtgatgaaaagtgaaggcgcgctgcagcagagaatgcgcagcgcatcgcggcagttgccggtgccgctgctggtgatcctcgttagcggctggctgtggcgcacgctgcatcagcgcgaccgccatgtttcgcccttcacgctgacgctgggcctggtctttctcggcttcagcggactggggatcagcatctggccgcatattatcccgccggccatcacgctgtggcaggctgccgctcccccgcaaagccagggctttatgctggtgggcgccctgctgattattccggtcattcttggctacacctgctggagctattacgtgttccgcggcaaagttcagcccggggagggatatcactga

SEQ ID NO: 266007 - DNA, 309 bp, Klebsiella pneumoniae
ttgtccgaggtcgccaatatccgggaacggttcatcaagcgggtactgcgaaaagtcatggtgttcgaaatagcgcccgagataattcagcgcatcctcgatggagaccaacgccgcggtggtctggtactgccgctccgcgtcctcggcgtcatccccgacgatgacgctgacgccctggaaaatatgcagttggtccggactgcgatgatatgcggcgagttggcttttgacatcccgataaaatgcctgcgcctcggccagcgagtcctgatgagtaaaaatggcatcggcgtggcgcgcggctaa

SEQ ID NO: 266008 - DNA, 1275 bp, Klebsiella pneumoniae
atgatagtccttgatcataaacggctgccgaaacagcgcgctgagcccgctggctgcggcggagagcaggccgttgccctggccctgcaggcgtcgggtttcgccgtggtgacgcagcgttgcctgcagggaaagctggccatcctgctggctggcgctctgataatcgagcagcgtcagcgccggctgcgcctgcagcccgtagcgcgtgcggaacagctgccacagcgcatggtgggtcatctctttgccgtcgctatcggtggcctgctgaacgtgctggctgaagtcctgctgcagcccgcggggcagtttcagaccatgattttgttcgataagccaggcgctgccgctcttccccgactggctgttgacgcggatcaccgcctcatagctgcagcctatatcctgcgggtcaatgggcaggtagggcatctgccacggatcgccaggctgacgggcatcaaacccttttttgatcgcatcctgatgggagccggagaaggcggtgtaagccagacttcccgcccacgggtggcgcgggtgaacggggatctggttgcagttttccaccacctccaccacccggttcatctgctcgaagcgaagctcagggtcgatgccctggctgtagaggttcatcgccaaagtcaccagacagacgttgccggtgcgttcgccgttgccaaacaggcagccttctacccgatcggcgccggccatcaccgccagctcggcgctggcgacgccggtgccgcgatcgttatgcgggtgcacgctgatgcagacctcgctgcggcgggagaagtggcggcaaaaatactcgatctgatcggcatagacgttgggggtgttgacttccaccgtcgccggcagattgacgatcatcggtcgctcggcgcagggctgccagacatccgccaccgcttcgcaaatctcaagcgcaaactcgggctcggtgaagcagaaggtttcaggcgaatattcatattgccagcgggtctccggctgctgttcgcactgctgacggataagccgggtggcgcgggtcgcgagggcgatcacctcggccttgtccatgccgaaaaccagctcgcggaacagcggcgcggtggcattgtagaggtggacggtagcccggcgggcgccgcgcagcgcctcaaaggtgcgcaggatcagcgggtctcgcgcctgggtcagcacctggatggtgacatcctccgggatgcgctgttcgtcaatcagctggcggacaaagttgaaatcggtttgtga

SEQ ID NO: 266009 - DNA, 276 bp, Klebsiella pneumoniae
  misc_feature (140)..(149): n is a, c, g, or t
atgatgctgcgggttttccagaaggcggcccccagcaccaggaagccggtcagcgtcggcgccaggcgatgggcatcggcgaggatctccggcacgctggagaccaccaacagcgcgcaaatcgaggcgatgccaatggnnnnnnnnnnggccgcggcgggcaggacgggcgtggccgacgcgcaaacgcagaggaagatagcgaaagagatagttgacgccgccgactatcaccccgagcagaaggacttcactgttcatccggcatccccttga

SEQ ID NO: 266010 - DNA, 672 bp, Klebsiella pneumoniae
atgatggcgctggcgcagcagcccctccatgccgtaggcgtactgcggctcggtgatctcgcgcgcgtaggtcgggctcaccgccgtaatatggtcggcgtagtagaggccggccttgagaaacgagatctgcccgttaaactcgaggccatgcatgttatagaacgaccacggcagctcaatgtcattcatatgccaggagtaaaacatcccctggtacgccaggttgtgcacggtaaacaccgatttagccgggcgtccgcgcgccgccaggtaggccggcgtcaggccggcgtgccagtcatgggcatgcaccacatccgggcgccagaacggatccagtccgctggccatttcacttcccacccagcccagcagcgcaaagcgcaggacgttgtcgggataagcgtgctggttggtatcgtggtaagggctccccggacggtcatagagatgcggggcgtctatcaagtagatccccacgccgttaaagtggccgtacagcagcgtgatccgcccggcgaaggtatcccggcgggtcaccacctgggcatccaccacgccgcgacggatatcgggaaacgccggcaacagcacgcgcgtatcgataccctccgcgatttgcgccgccggcagtgcgccgatgacgtccgccagaccgcccgtctttaa

SEQ ID NO: 266011 - DNA, 177 bp, Klebsiella pneumoniae
atgagtatttatatagccgtaacgataatcaatttttttatgtttatcgtaaacgccaattttagctacagctatatcaggattaaaaggacgaatgtcatcaaacgtattttcagaaagattgacaccgttattgttaatcaatatacgtttacctgtatcgacacggatggatag

SEQ ID NO: 266012 - DNA, 717 bp, Klebsiella pneumoniae
  misc_feature (668)..(677): n is a, c, g, or t
atgctacgtatcgctaaagaagccctgacgtttgacgacgtcctcctcgttcccgctcattctaccgttctgccgaatactgccgatctcagcactcagctgacgaaaaccattcgtctgaatattcctatgctctccgcagccatggataccgtaacggaagcgcgtctggctattgccctggcacaggaaggcggcatcggctttattcacaaaaacatgtccatcgagcgccaggcggaagaagttcgtcgcgtgaagaaacatgagtccggcgtggtcaccgacccgcagaccgttctgccaaccaccaccctgcgtgaagtgaaagagctgaccgagcgcaacggtttcgccggctacccggtggttaccgaagaaaacgagctggttggcatcatcaccggccgcgacgtgcgtttcgtcaccgatctgaaccagccggtcagcgtctacatgacgccgaaagagcgtctggtcaccgttcgtgaaggcgaaagccgtgaagtggtcttcgctaagatgcacgaaaaacgcgttgagaaagcgctggtcgtggatgagagcttccacctgcgcggcatgatcaccgtcaaagacttccagaaagcagaacgtaaaccgaacgcctgtaaagatgagcagggccgtctgcgcgtaggcgcggnnnnnnnnnnccgtgcgaggagtcgatcagcagaacgtcaacgcctgtaa

SEQ ID NO: 266013 - DNA, 324 bp, Klebsiella pneumoniae
atgggcaatatgacgctgtttatcgccggtatcgccatcctgtcgctgggaacctatctgatgcgtctcggcggcgcgaagctcggcaatcggctggcattttccgagcgctcgcaggcgctgctttccgatgcggcgacggtgctgcttttttccgtcgccctggccaccactttctatgagggcgcacatttcgccggtatggcgcgcgttctgggcgttgctttcgctgtgttcctcgcctggcgcaaggtcccgctgatcggcgtgattatcgccgccgccgtggtgaccgcgctgctgcgcctggcgggtatgccctag

SEQ ID NO: 266014 - DNA, 264 bp, Klebsiella pneumoniae
atgcggatgcgaaatgcggtcggcgccgggctgggtgagcagcaaatagatgtcccgacgcgcgccgggcggacaggcggccagcaaaatggcctgatagttcgcctgctctgccaccactttggtcccctcgccgcggcggatcacctgcgttttgttcacctgcggctcaagcagcctggcaaatggaatatccagcgctacgcagagcgaccacagcgtttccagactcgggttgccgttgccggactccagttgcgatag

SEQ ID NO: 266015 - DNA, 216 bp, Klebsiella pneumoniae
gtgatcaatattctcgacccgcaggtgattgtgctgggcggcggtctgtccaacgtcagccagatctatcgcgatctgcctgccgccatcgtgccgtggatcttctccgacacctgccgcacgcagatcaaaccggcccgtttcggcgacgccagcggcgtgcgcggcgcggcctggctgccccggcttcccggcgccgcgcaagggccgcggtag

SEQ ID NO: 266016 - DNA, 654 bp, Klebsiella pneumoniae
gtgcagcagtccgccgcgcaggccgctggctttagcctgcgttggatcgaaggcgtgcagcaaaaaatcccgccatttgagaccgataatcaacgcaatcaccagcgcgatcgccgtcgtttgcccaatatcgcggagggatattcccagcatatcgccgaacagaatatggtcgagatgaacatcggactggatcgctacgtacagcaccagtccggcgccaaacatgccggagaagacaatccccatgatggtatcgcgcttgagtcggctgttatcgtcgagaaaaccggtcgtcacggcgcacagcagaccggcgataaacgcgccgatggcgaaggggatgccgataatgtaggccagcaccacgcccggaaagaccgcgtggctcatggcgtcgcccatcagcgcccagcctttgagcaccagaaacaccgacagcagcgcgcagggaatggcgacgacgatcgatatcgctatcgcattgaccataaaaggaaactggaacggggccaggaacaggttcagcatgcggcctccctggcgcggcggcggctggccagcaggccgtgcttcggcgcgaagataaaggtgatgaggaacagcagcgtttgcgcgaccacgataatgccgccggtggcgccgtcgagatag

SEQ ID NO: 266017 - DNA, 333 bp, Klebsiella pneumoniae
gtgcgcggcgacgcgctgtcgctggtgattatcgataagctaccgttcacctcgccggacgatccgctgctaaaagcgcggatggaagattgccggctgcgcggcggcgatcccttcgatgaagtgcagctcccggatgcggtgatcaccctcaagcagggggtggggcgtctgatccgcgatatcgacgaccgcggggtgctggtgatctgcgacaaccggctggtgatgcgcccctacggcgcggtgttcctggccagtctgccgccggcgccgcgaacccgcgatatccgtcgggcggtgcgctttctcgccgtaccgccggcaaggtaa

SEQ ID NO: 266018 - DNA, 1689 bp, Klebsiella pneumoniae
gtgaagctgtcggctaactggatggccgccgccggccacccgggtgaagacgctggcctgtatgaggcggtgaaagcggtgggcgaagagctgtgcccggcgctgggcctgaccattccggtcggtaaagactcgatgtcgatgaaaacccgctggcaggaaggcagcgagcagcgcgagatgacctccccgctgtcgctggtcatctctgccttcgcccgtgtcgaagatgtccgtcataccgtcacgccgcagctttcgacggaagataacgccctgctgctgatcgacctcggtaaagggcacaacgcgctgggcgcgacggcgctggcgcaggtctatcgccagctcggcgacaagccggctgacgtgcgcgatgtcgcgcaactgaaaggcttctggaatgcgatgcaggccctggtggcgcagcgtaaactgctggcctaccacgaccgctccgacggcggtctgctggtcacgctggcggaaatggcctttaccggccactgcggcgtggaagcggatatcgccgcgctgggcgacgaccatctggccgcgctgttcaacgaagagctgggggcggtgattcaggtccgcgccgcagaccgtgaggcggtggaagccattctggcggttaacggcctggcggactgcgtgcattacctcggtaaagcggttgagggcgatcgcttcgtgctgaccgccggcggtcagacggtgttcagcgaaagccgcaccacgctgcgcatgtggtgggcggaaaccacctggcagatgcagcgtctgcgcgacaacccggcctgcgccgatcaggagcatgaggcgaaagccaatgatgccgacccgggcctcaatgtgaagctctcgtttgatattaacgacgacgtcgccgccccgtacattgccaccggcgcgcggccgaaagtggccgtcctgcgcgagcagggggtgaactcccacgttgaaatggcggccgccttccatcgtgccggctttgacgccatcgacgtgcatatgagcgacctgctggccggccggaccggtctgggcgatttccatgccctggtagcctgcggcggcttctcctacggcgacgtgttgggcgcgggcgagggctgggcgaagtcgattctgttcaacgagcgcgtgcgcgatgagttcgcgaccttcttccatcgtccgcagacgctggcgctcggcgtgtgcaacggctgtcagatgatgtccaacctgcgcgagctgatcccgggcagcgacctgtggccgcgctttgtgcgcaaccagtctgaccgctttgaagcgcgctttagcctggtggaagtgacgcaaagcccatccctgctgctggaaggcatggttggctcacggatgccgattgcggtctcccacggcgaaggtcaggtggaagtgcgcgacagcgcgcatctggctcagcttgagagcaaaggtctggtggcgctgcgcttcgtggataacttcggcaaagtgaccgaaacctatccggcgaacccgaacggttccccgaacggtatcaccgcggtgaccagcgaaagcgggcgcgcgaccatcatgatgccgcacccggaacgcgtcttccgcaccgtaagcaactcctggcacccggagaactggggcgaggatagcccgtggatgcgtatcttccgtaacgcgcgtaaacagctgggttaa

SEQ ID NO: 266019 - DNA, 705 bp, Klebsiella pneumoniae; identical to SEQ ID NO: 211564

SEQ ID NO: 266020 - DNA, 822 bp, Klebsiella pneumoniae
atgggtgcggatggtcaggttcgggcgaccgcgcgcctggtcgagatagccgcgggcggtgctggcgcgacggccctgcggcgtcacggtgcggtccatcgggccaaagccttcctgctggtagccgttgagatcgtcggtacgcggatagcccgcctgcaccccggcttcaaccatcgcctcgaagagcggattattgcccggcttcggcgtcgtcacgctcaccgggccatcgccgccgtggtagtcgttaggcccgatatcgcgggtttccgctttccggtagtagggcaggcagtcgagatagctccagtgttccagacccggctctttggcccagttgtccagatccatcgcgttaccgcgaatgtagcacatgccgttgatcagcgaggagccgccgagccctttgccgcgtccgcactccatgcggcgattgttcatgtacggctccggttcggtttcgtaggcccagttgtagcgcttgccctgcagcggataagccagcgcggcgggcatctgggtgcggaaatcgaaccggtagtcagggccgccggcttccagcagcaggacggtggtgtttggatcttcagtcagtcgtgttgccagaacgttgccggcggagccggcaccaataatgatgtagtcaaattgcaaaaaaacctcccggttaaaatatggactggaatttacccatctcaacctggatggacttcacctgggtgtaactctgcagcgtcatcacgccgttctcgcggccaatgccggagtgtttgtagccgccaaccggcatttccgccggggattccccccagctgttga

SEQ ID NO: 266021 - DNA, 543 bp, Klebsiella pneumoniae
  misc_feature (494)..(503): n is a, c, g, or t
atgaagagaggggcgatgaaaaacatttcactggcgatgctggccagacagattggcgtcggcgtggccaccgttgaccgggtgctgaacgagcgcggcggcgtatcgccgcagaccacgcgcaaagtgctgcaggcggcgcgcgaggcggggctgaagcggatcctgccggaggagcaccgctttccctggcagattgaggtctttctcagcagcaatgactcgttcttctttccgcagctggcgcaggattttgccgccgtggcggatagcctcggctatcgccgtctgaccttgcaccgcacctttgtcccggagtcgcagccaacgacgctggcccggcgcattgcgcgcagctgccagcagcgtcaagggatcatcgtcttcggcaatgaccatcccgcggtgcacgacgcgctgcaccgctgccgggaggctggcgtcccggcgatcaccctggcgacggacctgcccggcgccgaccgactctgccnnnnnnnnnngggatcaatcagctacaggctggccgcacggcggggttaa

SEQ ID NO: 266022 - DNA, 384 bp, Klebsiella pneumoniae
gtgctgatcgtgccgccagctcgccctctggccgaaaaagaggaagtggcgtttgcggcggtgctcaacgagccgttggtcgccctctatcagaccagtgcgctacagcagcatatcgaacagcacgcagctgaactcggccaggcgctaaacgttcgggtcaggatgagccattttgcagggctttgcgagatggtggcgcacggcgccggcggggcgatcctgccgcgcgttattgccgagcgttaccggcagcgctattcgtttgccgtcatcgggttacaggaccgctgggcgcagcgccgtttgtgcctgtgctaccaggatgacgccagcctgtcgccagcgatgcgccgcttactggaatggcttcgtcagccttga

SEQ ID NO: 266023 - DNA, 690 bp, Klebsiella pneumoniae
atgatcgcgctgaaaatccccagccccagcgcgacgccgagcagggccggcgtcaacgacggcaccgattcacccgccggcttcatggcggcgaaagccaccagcgacgcggtcgccagctgcaccaccgtcacccggcggacatcgacttttccggcccaggcgctgataaggataatctccgccgcgatcgccaccgcgcttgccagagtgatcatctcccccacgccaagcgccagcagattattttccggcccggccagcagaattaaaccaataaaggccagcacaatccccacgcaggacatcacccccggcatacgtcccagacacagccactgcagcagcggcaccagcggtacatacatcgcggtgataaaggcagatttactgctggagatggtctgtagtccccaggtctgcaggccataccccagcgcaatcgccacgccaatcgctaccccggccttcacttccagccacgtcagaccgcgcagagtgcgcagcgaaagcaggcccaccgccagcgcggcggtcgcaaaacgcaaaccgacaaaaaacagcggcccgctaaggctcaccgcgtactgtacggcaaggaacgtccctccccagaacatggtgatcatgataaggagcgcttcctggcggctaacggagaattttaacgaagacataagacagccatga

SEQ ID NO: 266024 - DNA, 459 bp, Klebsiella pneumoniae
atggagagcgcggagcagatccgtcgggcgaccatcaatgatatcggcggtattcttgagctgataagcccgctcgagcagcagggcattctggtacgccgttcccgcgaacagctggagatggagatcgacaaattcaccattattcagcgcgataacaccaccatcgcctgcgccgccctctatcctttcccggaagagaagatcggcgaaatggcctgcgtggcggtgcatccggattaccggagctcgtcgcggggagaggtgctgctggagcgtattgccgctcaggccaggcagatgggactgagcaaactgttcgtgttaaccacccgcagcatccactggttccaggagcgcggcttcacgccggtggatatcgacctgctgccggagagtaaaaagcagatgtataactatcagcgccggtcgaaggtgctgatggccgacctcgcttaa

SEQ ID NO: 266025 - DNA, 915 bp, Klebsiella pneumoniae
  misc_feature (773)..(782): n is a, c, g, or t
atggtgaaggaacgtcgcactgaactggtagaaggattccgccattctgttccctatattaatgcccatcggggaaaaacgtttgtcatcatgctgggcggcgaagccattgagcatgaaaatttctcaaatattgtcaatgacataggattattgcatagcctgggcattcgcctggtggtggtctatggcgcccgcccgcagattgacgctaacctcgccgagcaccatcacgagccggtctatcacaagcagacgcgagtgactgacgccaaaacgctggagctggttaagcaggcggcggggatgctgcagctggagatcaccgcccgtctgtcgatgagcctcaacaacaccccgctgcagggggcccatatcaacgttgtcagcggcaactttatcattgcccagccgctgggcgtcgatgacggcgtcgattattgccacagcggacgcattcgccgcattgacgaagaggcgattcatcgtcagctcgacagcggcgccattgtgctgatggggccggtcgcggtgtcggtcaccggcgagagctttaacctgacttcggaagagatagctacccagctggccatcaagctgaaggcggagaaaatgatcggcttctgttcgtcgcaaggggtttacaaccaggccggggaaattgtctccgaactgttccctaatgaggcgcaagcccgcgtcgaagagctggaagcagacgaagactataactccggcaccgtgcgcttcctgcgcggggcggtgaaggcctnnnnnnnnnngcgtacggcgctgccacctgatcagctatcaggaaaatggcgcgctgctgcaggagctgttttcacgcgacggcatcggcacccagatcgtcatggagagcgcggagcagatccgtcgggcgaccatcaatga

SEQ ID NO: 266026 - DNA, 765 bp, Klebsiella pneumoniae
atgcgccctggcgaaggtaagcggaaaggtgaaaacgtggctgttgcacaatgtcccgcctcgtgcggagaacttatccagggctggatcctcggcagcgaaaagctggtctcctgtccggtggactggtacagcaccgtcgaggtcgagaccggagtaccgcgaaaagacgagcggccgctgtcgcgggcgatggtcgaccagctgctggcccactggggctaccccccagcgctgagccagcagatccgcatcaccctgcactcaacgatcccagtggccaaagggatggccagcagcaccgccgatatcgctgccaccgccgtcgccaccgcccatcatctgggccatctactggatgagccgacgctggcgcgcctgtgcgtcgcgctggagcctaccgacagcaccctgtttcgccagctgacgctgttcgaccataataccgccgccacgcaaatcgcctgtccccctccgccggcgctcgacctgcagctgctgggcgaagcagcaaccatcagcgccattgccagccagcagctgttgcctaagccggggtttgacgcgctgctggacctggtggaaagcgcagggctctatggtctcaacgtggcgcacagcggcagcgtcgtcggcctgctgctggaccgccgtcggcatgacgtcgaatttctgcaatggcggctggcagacagcgacatcgccgcccactggccgcagcagcatctgttggcgatggtgcccgggggcgtcatcctgcagtag

SEQ ID NO: 266027 - DNA, 738 bp, Klebsiella pneumoniae
gtggtgcgcaaaaagctgaccagcggtccggcgctgccgggtaagctagcggactgtaccgcccaggatctgaaccgtaccgagctgttcctcgtcgaaggggattcggcgggcggctcagccaagcaggcgcgcgatcgcgaatatcaggcgatcatgccgctgaagggcaagatccttaatacctgggaagtctcttccgatgaagtgttagcttcgcaagaagtgcacgacatttcggtggcgattggtattgacccggatagcgatgatttaagccagctgcgctacggtaaaatttgtattctggcggatgcggactccgatggtctgcacattgccaccctgctgtgcgcgctgttcgtaagacatttccgtaccctcgtgaaagaggggcacgtctatgtggcgctaccgccgctgtaccgtatcgacctcggtaaagaggtttactacgcgctgacggaagaagaaaaaaccggcgtgctggagcagctaaagcgcaagaagggcaagccaaacgtccagcgctttaaagggctcggtgagatgaacccgatgcagctgcgcgaaaccacccttgacccgaatacccgccgcctggtgcagctggtgataagcgatgaggacgagcagcagaccacggcgataatggatatgctgctggccaaaaagcgttcggaagatcgtcgcaactggctgcaggagaagggcgatatggcggatctggaagtgtaa

SEQ ID NO: 266028 - DNA, 372 bp, Klebsiella pneumoniae
atgtccgttgggcaggtggcccgggaagttgtaggggccaaagaccgccatcacgccgtgcggtttgtggcgcagcagcgctttaccgtccggcagcgtcgactcatgaaagcccgtccgctggtgataggcttcgatggagatcgcggccttgccgatcatcgcctgcacttcggtgcgggtctcccacagcggcttgctggtctcgcgggaaatcagggtcgccagcgcctctttatgcgtctccagcagcgcagcaaaacgctgtacgacgtcaatacgctcggccagcggccggtgcgaccagggataaaacgccgcgcgcgccgcggcgcaggccgcctggacgtcgtcagcccccgcgccgactga

SEQ ID NO: 266029 - DNA, 363 bp, Klebsiella pneumoniae
  misc_feature (14)..(23): n is a, c, g, or t
gtgagatatagatnnnnnnnnnntcccaataccgccccggcgcgggcgatcctcgagaaagagggtttcagctggcgcggctcggtggatattttcgatgccggtccggtgctggaggcggacaccgatcagatccgcgccgtgcgcgacagccagcgcctgcctgtccggcagctgatgggcgacctgccggcgccgaccctcgtcgccaacggtcaattcgacaactttcgggcgctgctggtggcccacgaagagcaggtctcgcttgacagcgccgcgctggacgcgctgcaggtcagtgaaaccgaccgcgtttatacggtaaccctgaatccagaggacaacagatcatggcggtaa

SEQ ID NO: 266030 - DNA, 186 bp, Klebsiella pneumoniae
atgggtgtagccgccgctgccggtatcggtgccccagcacagggaatcctgcatctccggtttgtgcagcgcatcgtacagctgagcgacggaggccgcggcattacggaaggccggatgcgtggtgacgtctttcacgcgctcgccgtagatataaatttcgcggccatcctgcaggctttttaa

SEQ ID NO: 266031 - DNA, 990 bp, Klebsiella pneumoniae
atgaagcctatcttctctcaggcgcgcaaagagccgaagcgcgtggtgctggcggaaggggaggagactcgggtgctgcacgccacccaggagctggtgtctctgggactggccaaaccgattctggtggggcgcccgagcgtgattgaaatgcgcatccagaagctgggcctgcagatcaaggccggcgttgactttgagatcgtcaataatgaatccgacccgcggtttaaagagtactggagcgagtactaccagctgatgaagcgccgcggcattacccaggagcaggcgcagcgggcggtgattagcaacaccacggtgattggcgccatcatggtgcatcgcggtgaagcggatgcgatgatctgcgggactattggcgagtaccacgatcactaccgcgtggtgcagccgctgtttggctatcgcgacggcgtcagcaccgccggggcgatgaatgcgctgctgctgccgagcggcaacacctttatcgccgatacctatgtcaatcacgatccgtcgccggaagagctggcggagatcaccctgatggcggcggaaagcgtgcgacgctttggtattgaaccgcgcgtggcgttgctgtcgcactccaactttggctctgccgactgtccgtcagccagcaaaatgcgtaaaaccctggagctggtgaaggcccgcgccccggagctgatgatcgatggcgaaatgcatggcgacgccgcgctggtggaaagcatccgcaacgatcgcatgccggacagcccgctgaagggggcggccaatattctggtgatgccgaatatggaagccgcccggatcagctataacctgctgcgcgtctccagttcggaaggggtgaccgtcgggccggtgctgatgggggtggcgaagccggtgcatatcctgacgccgatcgcctccgtacgtcggatcgttaatatggtggcgctggcggttgttgaagcgcaaaccgaaccgctgtaa

SEQ ID NO: 266032 - DNA, 600 bp, Klebsiella pneumoniae
  misc_feature (506)..(515): n is a, c, g, or t
atgaataaaacccgtcaacaagagttaacccgctggttaaaacagcaaagcattatctcccgtcgctggttgatgatttcccgcctgcttggcgtggcgagcggtctgctgatcgtggcgcaggcctggttcctggcgcggatcctgcaccggatggtgatggagaatattccagcgaccgccctgctgctgccgctcacgctgctggtgctgatctttgtactacgcgcctgggtggtctggctgcgtgagcgggtcggctttcaggccgggcagcatattcgctatgaaattcgccgccaggttcttgaccgcctccagcaggcaggcccggcgtggatccagggcaaaccggccggcagctgggcaacgcttattcttgagcaaatcgacgacatgcacgactattatgcccgctacctgccccagatgacgctggcggcctgcgtaccgctgctgatcgttattactatttttccgattaactgggccgccgcgctaatccnnnnnnnnnncccgcctcagcggccacttcctcgaccgcctgcgcggcatggaaaccctgcgtatttttcatcgcggtcaggcagaaaccgataa

SEQ ID NO: 266033 - DNA, 618 bp, Klebsiella pneumoniae
  misc_feature (379)..(388): n is a, c, g, or t
atgcaggttgggctgaacaccctgctgcgccagggcaaacccgatcgcctgctgatcgaacccaccggtttgggccacccaaagcagatcctcgatatcctcaccgcggcggtgtatgagccctggatcgatctgcgcgccacgctgtgcatcctcgatccccgccagctgctggatgaaagagccgtcagcaacgacaacttccgcgatcagctggccgcggcggacatcattgtggcgaataaaagtgatcgggaaaccgccgaaagcgcccgggcgctggccgactggtggcagcgctggggcggcgagcgtcgcaaggtgtcggcaatccagggcaatatcgatctgaccctgctcgatgagccacgacggaacnnnnnnnnnnacggaacaccgccccgctgccggcgagcgcggagcacgcccaccgccatcccccctcttccggcctcgccgcgctcagcctggcggaacaccagcgctggcgccgccatctcaacaatggccagggctatcagggctgcggctggatcttcgacgcggagacggtttttgacaccatcggcctgctcgaatgggccaggctggcgccagtggggcgcgttaaaggcgtga

SEQ ID NO: 266034 - DNA, 1806 bp, Klebsiella pneumoniae; identical to SEQ ID NO: 209666

SEQ ID NO: 266035 - DNA, 225 bp, Klebsiella pneumoniae
atgatatcgcttatcgccgtgctcaaggcgaaaccgggccaaaactatgccctgtttcagctgcgcgacgcgccggacaccttctatatgcgcgaggcgtggcagggacaggacgccctcgatgcccatgtcgcgatgccctattttcaggcgtttatgacgcagatggagtctctgctggctgagccgctgcggctggactttctgacgccggttgagccttag

SEQ ID NO: 266036 - DNA, 240 bp, Klebsiella pneumoniae
atgaacaaaatcattgaaaatgattttagtcgtatcgatctgaatctgttgacagtcttgatggtgctgtaccgcgaagggagcgtcacccgcaccgcagaggtactgcatcttggccagccggctatcagcggggcgctgaaacggctgcgcgagatgtttgacgacccgctgttcgtccgcagcgccagaggcatgctgctcgcatcggcctcagcgactggagcgagcactggctga

SEQ ID NO: 266037 - DNA, 345 bp, Klebsiella pneumoniae
atggtcgatctcgccgatgtctatatgaccttttttctgcccaccgaacaggcaggtctgctggcgctcggcagcgaagcgcgcttggtccttgatgccgcgccggatctggtgatcccggccaatatcagctttgtcgccagcgtcgcccagttcacgccgaaaacggtcgagaccagcgacgagcgcctgaagctaatgttccgcgtcaaagcgcgtatcccgccggagctgctggcgcaacacctggagtatgtcaaaaccggcctgcccggtatggcttacgtacggctggataaacaacaaccctggcctgaagccctggcggtgaggttgccgcaatga

SEQ ID NO: 266038 - DNA, 471 bp, Klebsiella pneumoniae
atgggcgttatcttccagcggcgcgcggcttttgacgaagctttgtctggcgcacatcagccgggtgatcttcagctgcggggccatggtttcgaccagaaacagcggatgggtggccaggtcgcccagcacatagctggggccgacgaagcggggatcgacccgccagcgggtactggcgttttcctgttccaccggctgggcgtgaaaaccgtgggcaaactgcatattaacgatacggatatcgcccagcagcccgtcggcgatcatctgccgggcctgcaggatcagctggtggccggcatagccgtaggtcaccccgatgatcttgcgccgccgctggctgagcgccaccagctcgtcagcttcctcgctgctgaagcacagcggcttttcgcacaccacgtgcagcccggcctccagcgcggcccggcacatggcatagtgggtgttatttggcgtggcaactga

SEQ ID NO: 266039 - DNA, 741 bp, Klebsiella pneumoniae
atggcggatgccgctggccatcaccgcgagggtgacgtcaaaggcgttcaggctgtcgccgaagcccgcggtcagattgagcatcgaaccattggccagcagatagacggttttgtcggccatgcggtaggcgttgatatacggcatcacctcttcctgggggtactggcgcaggtaatcgccgtcgatctcttccgccacgtggccgacgttaaggataaatactcccgctttcgtccggtccagcgcctggcgattaaccacgtttttaccgcctgtcgccgtggccaccacgtccgccgaggcgatagcctcctggaggtccaccacgtgccagccgtcgtaggccgcctgcagacggcgggcaggatcgatctccgccaccatcacctgaccgccaaaagcttttgccgctgccgcgacgccctggccgaccaggccgtagccgatcaccagcacttttttctcatgcagggtgaggtgagtggtctggaagaaggtgtgccaggcagtgagaccgaccatatggcggttgtgcagcccctctttgaccggcagatcgtcccagttaaagatcggatagcctggctgaatatcccccagccgattgacgcccgagccggtggcttccagacccgccacgatgttcccaaactcgccgcgctggtggagcagggtggtgatatcggcgcccatctcgcacaggtgagtgggctgccaggcaatcgctttttcccatga

SEQ ID NO: 266040 - DNA, 300 bp, Klebsiella pneumoniae
atggatgcgacgctctggcagcacctggcggcgagcctgacgcggatcgttatcgccctgttggcggcagtgcttattggcgtaccggtggggatcgccatggggctcaactcgacggtgcgcgggatcctcgacccgctgatcgaactctatcgtccggtgccgccgctggcctacttaccgctgatggtgatctggtttggcatcggtgaaacctcgaagatcctgctgatctgcaggtgcggattcgcgctgcccgttcgcttggcgccagccgggcgcaggtgctgtggctggtga

SEQ ID NO: 266041 - DNA, 369 bp, Klebsiella pneumoniae
atgcagcataacttctcggtgttccgcgaaggcgatgcgatgcacaaaggtctggagcaactgaaagtgatccgcgagcgcctgaaaaacgcccgtatcgacgatacctccagcgagttcaacacccagcgcgttgagtgcctggagctggataacctgatggaaaccgcctacgcgaccgccgtatccgctaacttccgtaccgagagccgtggcgcccacagccgcttcgacttcccggatcgtgatgatgaaaactggctgtgccattccctgtacctgccagagtcggaatccatgacgcgtcgtagcgtcaatatggaaccgaaactgcgtccggcattcccgccgaagattcgtacttactaa

SEQ ID NO: 266042 - DNA, 1374 bp, Klebsiella pneumoniae
  misc_feature (1237)..(1246): n is a, c, g, or t
atgaaattgccagtcagagagtttgatgctgttgtcatcggtgccggcggcgcaggtatgcgcgcggcgctgcaaatttcccagagcggacagacttgtgcactgctctccaaagtgttccctacccgttcccataccgtatccgcgcagggtggcatcaccgtcgcgctcggtaactcccatgaagataactgggaatggcatatgtacgacaccgtaaaagggtcggactatatcggcgaccaggacgccatcgaatacatgtgtaagaccggcccggaagcgattcttgagctggagcacatgggactgccgttctctcgtcttgacgatggccgtatttatcagcgcccgtttggcggccagtcgaagaacttcggcggcgaacaggcggcgcgtaccgcggcggcggctgaccgtaccggtcacgccctgctgcacactctgtatcagcagaacctgaaaaaccacaccactatcttctccgaatggtacgccctcgatctggtgaaaaaccaggacggcgcggtagtcggttgtaccgccctgtgcatcgagaccggcgaagtggtctactttaaagcccgcgccaccgtgctggcgaccggcggcgcaggccgtatctatcagtccaccaccaacgcccacatcaatacgggtgacggcgtcgggatggccatccgcgccggcgtgccggtgcaggatatggaaatgtggcagttccacccgaccggtatcgccggggctggggttctggttaccgaaggttgccgcggcgaaggcggttacctgctgaacaaacacggcgaacgctttatggagcgttatgccccgaacgctaaagacctggcgggccgtgacgtggtggcgcgttccatcatgatcgaaatccgcgaaggccgcggttgcgacggtccgtggggcccgcacgcgaaactgaaactggatcacctcggtaaagaggttctggaatctcgtctgccgggtatccttgaactttcccgtacctttgcccacgtcgatccggtgaaagagccgatcccggttatcccaacctgtcactacatgatgggcggtatcccgaccaaagtcaccggccaggcgttgaccgtgaatgagaagggcgaagacgtggtgatcccgggcctgttcgcggtaggcgaaatcgcctgcgtatcggtccacggcgccaaccgtctgggcggcaactcgctgctcgacctggtggtcttcggcnnnnnnnnnnggccgcgcggcgggcctgcatctgcaggaatccattgccgagcagggcacgctgcgcgacgccagcgaatccgatatcgaaggctcgctggatcgcctcaaccgctggaacaacacccgctctggtga

SEQ ID NO: 266043 - DNA, 798 bp, Klebsiella pneumoniae; identical to SEQ ID NO: 213206

SEQ ID NO: 266044 - DNA, 360 bp, Klebsiella pneumoniae
atgggtacgcagcgccatatcgacggccatgccggtgcccatgttgtcgcccagcacttcgacgattttacccaccgctttggtgcggcgggttggtcgctgggtcagctcgaccacgaccacgtagcccatccgcgcgcccattatctcttccggcgggatcaggatatcgaagctcaggcggctgtcgtccgggacgacaaagccgacgccagcgtcggtgaagtaacggccaactatctggctggttttcggcacgaggacgcggacgatgcgcgcttcgcggcggcccttacggtccgcgcccagcggctgagccagcacctggtcgccgtgaatacaggttttcatctgttctga

SEQ ID NO: 266045 - DNA, 594 bp, Klebsiella pneumoniae
gtggacgctgacgtccccaccctgcaaacccagctgcacgccctggcccagcggctgcgggataacactacccgccagggtgagatccgccagcagctcaggcaggacgcagagagccgtcaacagcagcaggcgctggggcagcagattgcagaggcggcgcagctggcggacgactggggctatctcaattcgctgatcggctccagcaccggcgaccggttccgcaaattcgcccaggggctgacgctggataatctggtctggctggcaaaccagcagctcaaccgcctgcatggccgctatctgctacagcgcaaggccagcctggcgctggccctggcgctgtcagacctggtgagccataagacgcggattgactccctgtttcttgatgaaggcttcggcaccctcgacagcgaaacgctggacacggcgctggacgccctggatgcccttaacgccagcggtaagattatcggggtgatcagccacgtggaggcgatgaaagaccgcattccggtgcagatcaaagtgaagaagattaacggcctgggctatagccggctggacaaagcgtttgcggtggagtga

SEQ ID NO: 266046 - DNA, 753 bp, Klebsiella pneumoniae
  misc_feature (500)..(509): n is a, c, g, or t
atgcgcctccttcacacctccgactggcacctgggccagaatttttacagcaaaagccgcgcggccgaacacgacgcttttcttacctggctactggaccgcgcgcaggagcatgaagtcgacgccattatcgtggctggcgatatttttgataccggctcgccgccgagctacgcccgcgaactgtataaccgtttcgtcgtccagttgcagcagaccggctgtcgcctggtggtgctggcgggcaaccacgactcggtggcgatgctcaatgaatcccgcgatatcctcgcctttttacacaccaccgtggtggcgaacgccggctacgcgccgattgagctgccgctgcgcgacggcacgccgggcgccatcttctgtccggtgccgtttttacgcccgcgcgagctggtgaccagccaggccggtcactccggtcgggaaaaacagcagctgctgctgcacgccatcagcgactattatcaggagcagtatcagcnnnnnnnnnnaggcctgcgcgctgcgcggcgatcggccgctgcccatcattgccagcggccatctgaccaccgtcggcgccagcaaaagcgatgccgtccgcgacatttacatcggcacactggatgcctttccggcgcaacacttcccccctgccgactacattgcgctgggccatattcaccgggcgcagatggtcggcggctgcgagcatatccgctacagcggctcgccgctgccgctgagcttcgatga

SEQ ID NO: 266047 - DNA, 456 bp, Klebsiella pneumoniae
  misc_feature (321)..(330): n is a, c, g, or t
atgggcaaactgagactgacaacggcgcaggcgctggtgaagttcctcgataaccagtacctggaagtggatggcgtagagctgaagttcgtgaaaggcattttcgcgattttcggccatggcaacgtcctggggctggggcaggcgctggagcaggacagcggcgatatgcgcgtctatcaggggcgcaacgagcaggggatggcccacgcggccaccggttttgcccgccaggccctgcgccggcagattatcgcctgcacctcctccatcggtccaggggcggccaacatgatcaccgccgccggcaccgccagcgcnnnnnnnnnnatggaggaggtgcaggcgataatctgccgccgccggcaccgccagcgccaaccgcattccgctgctgctgctgccgggcgatgtcttcgccacccgccagccggatccggtgctccagcagattga

SEQ ID NO: 266048 - DNA, 522 bp, Klebsiella pneumoniae
  misc_feature (508)..(517): n is a, c, g, or t
atgtttcatctcgataccttatcgacgctcgttgccgcaacgctcgtgctgttactcggcagaaaactcgtacaaaccgttcccttccttaagaaatacactattcctgaacccgttgccggcggtctgctggtggcgctggcgctgctggcgctgaaaaaaagcatggatatcgaaattgatttcgatatgagtctgaaagatccgctgatgctggcgttcttcgccaccatcggtcttaacgccaacctcgccagcctgcgggccggcggcaaggtgctgggcactttcctgatcgtggtggttggcctgctgctgctgcagaacgccctcggtatcggcatggcgacgctgctggggctggatccgctaatgggtctgctggccgggtcgattaccttatccggcggccacggcaccggggcggcgtggagtaagctgttcgttgagcgctacggttttgccaacgccaccgaggtggcgatggcctgcgcgactttcggcctgnnnnnnnnnncctga

SEQ ID NO: 266049 - DNA, 513 bp, Klebsiella pneumoniae
  misc_feature (348)..(357): n is a, c, g, or t
atgcgcaagctctcactaagtttactcacgctgtccctcggcgttgcgctgctgccgttagcgcaggcggcgacgacgcctgcccaggagcatctgctggagcaggtccgcctcggcgaggccagcaatcgtgaagacctggtgcgccagtcgctgtaccgtctggagctgattgatcccaacaacccggagctgattgccgcgcggatgcgctatctgctgcgtcagggggatgccgccggggcgcaaaaagagctggaacgactgacgaagctggcgccggactccccggagctgaaggcgtcgcgcaatgagatgaaaagcaacaccggcgagggccgccaggcnnnnnnnnnncgcgactgctgggcgtggccgggaaggtcgatgaagccatcgccgcctatgaaaaactgtacggcggggtgccggatgacgttgacgtcgccattgaatactggacgctggtggcgcgcctgccgtcccgccatagcgaaggcgtcagccagttga

SEQ ID NO: 266050 - DNA, 687 bp, Klebsiella pneumoniae
atgctgagtaatgacctgctgatcgtcaccggcgcgctggtgggctcttccggcgccatcctctcttacattatgtgtaaggcgatgaaccgctcctttatcagcgtgatcgccgggggcttcggcaccgatggttcctcaagcggcggcgatgaagaagtgggcgagcatcgcgagattagcgccgaagagacggcggagatgctgaaaaactcgcactcggtgatcatcaccccgggctacggtatggcggtggctcaggcgcagtatccggtagcagaaattaccgagaagctgcgggcgcggggtatcaaagtacgctttggtattcatccggtggccgggcgcctcccggggcatatgaacgtcctgctggcggaagccaaagtgccttacgacatcgtgctggagatggatgagatcaacgacgatttcagcgacaccgacaccgtgctggtgatcggcgccaacgataccgtcaacccggcggcgcaggacgatccgaagagcccgatcgccggcatgccggtgctcgaggtgtggaaagcgcagaatgtggtggtctttaagcgttcaatgaacaccggttacgccggcgtacagaacccgctgttctttaaagagaacactcatatgctgtttggcgatgctaaagccagcgtcgatgcgatcctgaaagcgctgtaa

SEQ ID NO: 266051 - DNA, 444 bp, Klebsiella pneumoniae
  misc_feature (336)..(345): n is a, c, g, or t
atgagcacgaatcgccttgagatgcataacattagcctggccttctccggctttcaggcgctgaacaaggtggactttaccctccatggcgggtcggtgcatgccctgaccggggccaacggcgcgggtaagtcgacgctgatggccgtgctgtgcggcacccacgcccactatgagggcgaagtgacgatcaacaacctgccggtcaccattcgttcgccgcgggatgctaaacagctggggatccacctggtgcagcaggaggtggacgtggcgctggtgccgggcctgagcattgcggaaaacattatgctggacaggctggcggagccgggnnnnnnnnnnggagccgggcatgaccttccgctggtcgcgggttcggcagctggcgcgcgaggcgctggcgcagctggacgtggcgctggacgtccggcgctccattga

SEQ ID NO: 266052 - DNA, 1071 bp, Klebsiella pneumoniae; identical to SEQ ID NO: 214148

SEQ ID NO: 266053 - DNA, 1170 bp, Klebsiella pneumoniae
atgtcgctgatcgagttgctcatcgccccgttgcccagcgcctgcgatatgggcgtgctgccgaacctgttcccgggttatcaggaggtcaccgaccccgccgtgcgggagaaattcgccgccgcctggggtgtcgacccggcgctgatggatgaccaggtcggcacccgcatcaccgaggtgccgcataaagcgctgactggcgagatcaaagcctactacatcatgggtgaagatccgctgcagactgaagccgacctcggcctggtgcgcaaaggcatcgaggcgctggactttgtggtggtgcaggacatcttcatgaccaaaacggcggaaattgccgatgtcctgctgccggccacctcctggggcgagcacggcggcgtattcacctgcgccgaccgtgggttccagcggtttgaacaggcgatccctccggcggggaatgtgaagcgcgactgggagatcattagcctgctggccagcgaaatgggttatccgatgcactatgagaacaaccagcagatctgggacgagatgcgcgaactctgcccgctgttctacggcgtgacctgggagaaaatgggcgatatgggccatgtccagtggccatgcccgaccctcgaccaccccggcacgccgtggctgtataaagacaaccgcttcgataccccatcgggcaaaggacagctgttcgccaccgcctggcgcgcgccggcggagcgcccggatgacgagtggccgctggtgctctgcaccgtgcgggaagtcgggcattattcctgccgctcgatgaccggcaactgcgccgcgctgcagtcgctggccgacgagccgggacgggtgcagatgaatcccgcggatgcgcaacgactggggatcgccgacaaacagctggtgtgggtcagctcccggcgcgggaaggtgatctcccgcgccgacctcagcgatcgcatcaatccgggggcggtctatatgacctatcagtggtgggtgggcgcctgcaatgagctgacccaggataacctcgatccgatctccaaaacgccggaaaccaaatactgtgcggtgaaagtggaagcgattgccgaccagcaatgggcggagcgctatgcctggacggcctacagcgacatgaaagcgcgactgaaagccgctgccgacgtctga

SEQ ID NO: 266054 - DNA, 708 bp, Klebsiella pneumoniae
atggtttcaatcgcccccgcggccgccgctttctccttcggcgctgccgccataatcgcggaactggaggccagcagcgcgctggccacgctaaagcccagcagcgtcatcagcccccaggccagccactgctgggtactgaaatcggtcaacgccaggccgagaaagctgaaggcgctgagcagcatcccgccggtcgccacctcgcgcagcccaagccgcgacaccagcaggccggcaatcgggccgctgaagccgctggccaccattaccggcagcataaatatccccgcctcgaacggcgttttctggtgcacaaactgcagctcctgggccatcagcagctcaaaaccgaccagggtaatcagggccgtcatcgccatcatcaccccgcttaagattatgcgatgggtgaacaggcgcatatccaccatcgggcgggccgccgacagctgcttgcggataaaccaggttaacatcgccgccccgccgagcgccaccagcgcggtgagccacagcgccagctggcccttcagcgccgatttcgcgctaaacaccagcatcaggatcgcggcaatcaaaacgagcgcctgcagtagattgagcggctgttcgcggcgcgcgggctggcgcggcaccactttcgcgttaatcgcgataaccaccagcacgatcggcacattgatcaggaacaccgacccccagtag

SEQ ID NO: 266055 - DNA, 1518 bp, Klebsiella pneumoniae; identical to SEQ ID NO: 211771

SEQ ID NO: 266056 - DNA, 600 bp, Klebsiella pneumoniae
gtgccagccaaaggccagcgcgatcgcggtcatcaccagcaggcacaggacctgggtgccggtgctgtcagagcgaacaaaaatcaccatcaggatgaaggaaaccaccagcgccgccaggttcagcttatggcgattgggcagcatcagcggcctggaggaaattttgccgcgcagtttaccaaacgccaccaccgaaccggtgaaggtcaccgcgccgatgaagatcccgaggaacacttcggtcaaatgaatattgaccagaatttgctccataccggtttcatgctgcaggtagctgttgaaacccaccagcaccgctgccagacccacgaagctgtgcaggatagccaccagctccggcatttcggtcatctcgaccttcttcgccagacgaataccgatcgccccgccgatcaccatcgcaagaataatccagccgacgttgccggcgtccggccccaggatggtagcgatcagggcaatggccatcccggcgatgccgaaatagttgccctgctgcgacgtttcgtgtttcgacaggcccgccaggctgaaaataaacaggattgcagcaacaatgtatgcagccgttactaa

SEQ ID NO: 266057 - DNA, 807 bp, Klebsiella pneumoniae
atgcagcggcttcgacggggtttcgccgtcggtgcctatccagaaataggcccccggacaggcctccagcatgcaggcaaaatcttcggaggccatcgacggcgcctgattccagcgcaccgcttgcgcgccgagagtggcggcagccacctcgcgcacctgctgcgcctgcagcgcatggtttttggtcaccggataacccgggaaccagctaatctcgccctgcacatcggacacctgcggctgggtcgccacatagcgctcgataagctcccgcacgcgggcgcgaacgcgattgctcagacagcggaaggtaccgcgcagcaccacggtgtccggcaggacgttgatcgcctcgccgccgtttatctgggtgatgctgaccaccgcggaatcctgcggcgacaagcggcgggaaggaatggtctgcagcgccattatcagctgcgccgccgcgacgatcggatcggccccgctctccggcatcgccgcatgacagctctttccgcgcagggtgatctcgaaggcgtccagcgaggccatcatcgcgccatcgctgagcgccacttcgccaagagggatccccggccagttatgcagcgcgtagatggcgtccatcgggaagcgctcaaacaacccctcttcaaccattttgcgcgcgccgccgaggttctcttccgccggctgaaagacaaagtggacggtgccgctgaaatggcgggtctgcgccagatgggcggcggccgccagcagcatcgcggtatggccatcgtggccgcaggcgtgcatcaccccgggacggcgtga

SEQ ID NO: 266058 - DNA, 204 bp, Klebsiella pneumoniae; identical to SEQ ID NO: 209625

SEQ ID NO: 266059 - DNA, 861 bp, Klebsiella pneumoniae
gtgctcgactttcacccgcaccacgtcgcccggcttaacgcgggtttcgccgttcaggtacaccgcgccgtcgatttccggagcgtcggccatgctgcggccaatggcgccttcttcatcaacttcatctaccagcaccaggatttcgcgccccactttctcctgcagacgctcggcagagatctgctgctgcagctgcataaagcggttccagcgctcttctttcacctcttccggcacctggtccgccagctcgttggcggtagcgccttcaaccgggctgtacttgaagcagccgacgcggtcgagacgcgcctctttcaggaagtcgagcagcatctggaaatcttcttccgtttcgcccgggaagcccacaataaaagtggagcgcagggtcagatccgggcaaatttcacgccactgcttaatgcgcgccagctgacggtccgcagaacctggacgcttcatcagcttcagaatacgcgggctggcgtgctgcagcggaatatcgaggtacggcagaatcttgccttccgccatcagcgggatcacatcgtcaacgtgcgggtacggatagacatagtgcaggcgcacccagatgccgagcttcgccagctcttcgcacagactgaccatgctggtcttcaccggcataccgttgtggaagccggtgcggtgcttgacgtcgacgccgtaggcggaggtgtcctgcgaaatcaccagcagctctttcacgccggcgtcagcgaggcgtttggcttcggccagcacttcgccaatcggacggctcaccagatcgccacgcatggacgggatgatgcagaaggtgcagcgatggttgcagccttcagagatttttaa

SEQ ID NO: 266060 - DNA, 351 bp, Klebsiella pneumoniae
gtggcgcggcgtcagcttaaccccctgttccggcaccaggctcaggaacgggttgtgcttcggcttcggcgtataatggtggacatgctccagcacctgctcatagctgtgcggaccggtgatctccagcaccttcggatgcacttcgcggatctgatcctctttcgcgccgagacagccggtgacgattaccttgccgttctctttcaacgcttcgccgatcgcttccagcgattcctgcacagcgctatcaataaagccgcaggtgttaacgatcaccatatcggcgttgtcgtaggtcggtacgacgtcataaccttcggtgcgcagttcggtcaggatacgctctga

SEQ ID NO: 266061 - DNA, 612 bp, Klebsiella pneumoniae
atgctcccgcagcgcggtaacgttgttcagcgacagatagctggaggtgttgctcccgccattgcgcatctggttgttatagacgccgaggttatagctcaggttgctgctgagggtattgacgctggactgaccgatgtcttcgctgcgcgagcgcagcacggtgcccagcgcctcgcgcttgaccaccagctgcagcaggagctggcgcaggctaagatccagctgggcgctgtcggtcaggggaatggtgagcgcctcgctgaacggggcgttggccaggccgatcagctgctgacgggtctgttcactgacgctggcgttaccttcactgtcctccagccggatctgccggacgcgcagctggccgccgtccagccagataaaggcgctgccgatccgctgatcgtccttgatgccctggctgccggcaagatgaatatagagcgggatgctcatgccgtcctgcagcgcctggctgaaggcctgcggaataatcaccccgccaatctgctgcgcgcctggggcagccgcgctggcgtcgggctgaacgaacaaaaatatcatgccgaaggcaagccgcgttttcagtcctggggaaatccgtcgtag

SEQ ID NO: 266062 - DNA, 570 bp, Klebsiella pneumoniae
atggttgttaatccgcgcattcgccagcagcgtgccgtcttctgcacgaatacggccggagacggtgaccatctgcttcacctctggctcaatcaccgcgacgttgcccggataaagggtcagatgactcttgcgcccgctgacgatgtcgtagctgtcgagcgagtttttgctgttctgcagctccacctcatagcgaccatagggagagagcggcaggtagttacgcttgccgctgagcgggaagatccgcccgttaaccctggcgctgatctgaccatcgtcctccagcccggtgttgaagatcaccccagcgttgccgtcggttcgtccgctggcggcgatatttttgccctgccagccgacgctgccgctggcggtgaggttggtgttgacgtagccgtccgccgcgctgttgacgttcagcgtgccgctggcgtagcgggcgtcgaactgggcatacgcgccgccgctgagggttttgtcatccccggtatcgccggagatggctcgcgacagattggcgccgatggtgcgaatagtgccttcatcaaactgcttgcgcgctga

SEQ ID NO: 266063 - DNA, 495 bp, Klebsiella pneumoniae
gtgccggtggagaacgaagttgagcaccatcgggtagtcgcgcgctttcacggctttggccatggtcagcttctgctggaaggcttttttgttgccggccagcgcggcgttgagcacttcatcgctggcctggaagctaatctggatatggtccagcccggcctcgctgaaggcgtccagtttgctctccgtcagccctatcccggaggtgatcaggttggtatagaacccgaggtcgcgcgcggcgcggatcagctccggcagatctttacgggtcagcggctcgccgccggaaaagcccagctgaacgctgcccatcgcccgcgcctggcgaaagacctcgatccattgttcggtggtcagctccttatcctgccgggcgaagtccagcggattggaacagtagggacactgcagcgggcagcggtaggtcagctccgccagcagccacagcggcggattgacggtgggtttactctggttcacggcaggtga

SEQ ID NO: 266064 - DNA, 246 bp, Klebsiella pneumoniae
gtggccgctatcgaactgctgctgcaggccccgaagggcgggcacatctataatctatgtgcgccccgccatccggcgcgcggcctcttttatccgcagatggcccgcgagctcggtctgccgccgccggtgttcagcgacagcccggacggcggccagggcaagattgtagatggcaatcgtatctgcaatgagctggggtttgagtaccagtaccccgatccgctggtgatgccgatggagtga

SEQ ID NO: 266065 - DNA, 195 bp, Klebsiella pneumoniae
gtgctgattgccgcctgtcagcgctgtccggcgcacgtcgtgctggtgaccaacgaggtggggatgggcattgtgccggagaaccgcctggcgcggcattttcgcgatattgccgggcgggttaatcagcgcctggcggccgcggcggatgcggtctggctggtggtctccggcatcggcgtcaaaatcaaataa

SEQ ID NO: 266066 - DNA, 519 bp, Klebsiella pneumoniae
gtggcgcggtttcgccagcacggtgacggtcagctcgcccagcggcttgttcagggcgcgggcgatattgtgcaggttctcttccagcggcagattgagatcgatagcgcctttagcgcccgggccgacgatcagcttttccatatacatatccggcgcgttgaggaagcagcccttatcgacgagctgccgccaggccgaactccggtgctggcccatcgccgtcatgcgggtgccttcgatgggatcgacggcgatatctaccgcatcgcccttgccggtacccactttttcgccgatataaagcatcggcgcttcatcgatttcgccctcgccgatgacgatggtgccgtcgatattgacgaggttaagcataatgcgcatggcgttaaccgctgcgccgtcggcggtattcttatcgccgcggcccagccatttatagcccgccagcgcggcggcttcggtgacacgcgaaaattcgatggccagttctcgtttcataatccactcgttgtgtag

SEQ ID NO: 266067 - DNA, 1065 bp, Klebsiella pneumoniae
atggcgctcggccgtccgccagacgacggcgtcgacccgaggaataccctgccctgccagactgatctgcagctgatcgccaaccccaatatccagcatctgccagcgggacacagagccaacgttaacccgctgcacgcgtttatcatccagccgctggggctcaagctcggccaccacgttgagtctgccgctgcggccggtactgaaacggatcgcccgtacctgcatcacccgcgatgccggaggatatttccaggcagccagccactcgccctttccgggcgaccagactcgccctggcggctcgcgtccttcgcgcacaatcacaccgtcgctgacgaagggcagcggcgagcgataccagcgctggcgccactgcgccacctgctcgatgctcgacaccgggtgggtatattgcccgctgtacttaaaccccgcctgcgtcagcagctgctgtcgacggcgcatatccgacgggccgtctggccaggcccagataaaaacgtccagttgactgagcgccgccgccgcgtcggctcgcatcatcaacccggcgactttcgcccgcgcgttcatccccccagcctgctgctgaacatggccgccccggcgcagaaacagctccccctgcagtacgctgtcggccagttcaccggtcatcactttctccagcgctgggatctgccgggctcgggcggtccatgcctcaccgcgcagaccatcgccgcggctaatggcctgaaccagacgcccctggcgataaacgagagtcaccgccacgccgtccactttaggctgtatccacaggtcggatttatttttcatccagcgggcaacgctgtcctcatccgccagcttgcgcacgccggtatgggccaccggatgacgcgcatcgccggtgggcggaggcagatcgtcatcctcaggcgtcgcgcccggaaagcattgtcgccactgcgccaggcgcagggtgagctggtcgtaaacgtcatcgctcactccgctggcgccctgccgccagtaagcctctttccaggcgacaatttgctgatgaaggcgtga

SEQ ID NO: 266068 - DNA, 570 bp, Klebsiella pneumoniae
atgctgcagctgggtcatcgctgcctggcgctgcgcttcgcgatcgactggcgcatgttgggtcgcgctcagtccgccggaaacgttggtctgatggaagcgctgagctaccgtattatcgggatacggtgtgtgtccgcgataggcaggattgtgctgccagttaacgtggtttcccggcaggttttctcctgttatatgattgaaattatttacattaatattgatgttatcgccattatgcgagtaatcgccgtggcggtagtcgtcatcgtgatggtgatggtcatcatcatcccagtcgatactgctgaacagcgcccaggtggtggccacgccgaggctgtacccgaagcctttgacgaagctatcggtaaactgctccccgggagggggcggcagatagaccggcggataggcgctgttcggccaggtaccatagacggtggaggggttatagctgggaacatagaccacctgtggattggtcggctctattttaatgacctgcgtgggcgcaggcgccgctgtgtgggcggttgcggttgctgccgtgctgctgctggctga

SEQ ID NO: 266069 - DNA, 579 bp, Klebsiella pneumoniae
gtggtcgcggcgctcctgctggtagctgtcgagcagcgtctctcccgctttaccgttgaccaccagcgccagcttccacgccaggttgaaggcgtcgcgcatgccgctgttatatccctgcccctgccagaccggcatgatgtgcgccgcatcgccggccagcagcacgcggtcgatgcgaaagcgctcggcaaggcgggcgttatgcgtatagacccgctggcggatcagctcgacgcggtccgggtccggcagcactttgctcagcagacggcgcatattgtgcggctcgctgagctgggcttcggtttctccgggaatcaccataaattcaaagcggcgcacgccgtggggcagcgcggcggaaacgtagggtcgcaccgggtcgcagcacaggtaaacgtgcggggtggccagcgggtcgttagcgatatcgatgacgatccactgattcggcgcggttttaccttcgaaggggatgttcagcgtacggcgaataaagctggcgccgccgtcgcaggccaccagccagtccgcgcgcaccgtctcccgctcgccgtccggtcctttaagatttaa

SEQ ID NO: 266070 - DNA, 477 bp, Klebsiella pneumoniae
atggcgctgggcggagagccactcctccagcagcggcgactcctgggggacgatctgcaggctgacctccgggtagcgagcgagaaacggcggcaacagcagcggcagaaaggactgggaaaacaccggcagacaggcgatcgacagctcgccctggcggaactcgcgcaggctctcggcggcgctgacgatacggtccaggccataccaggagcgctgaacctcctcaaacaaacgcaggccctgcaccgtcggctgcaggcgaccgcgggtccgctcaaacagctgcaggccgagcaccttctcaaagcgcgccagctcgcggctgaccgtgggttgcgaggtgtgcagcatccgcgccgcttcggtcaggttgccggtggtcatcaccgcgtgaaagatttcgatatgacgcaaattgacggctggcatgcggtctccgtgaggctcggctggaaccatatcatttttgcatag

SEQ ID NO: 266071 - DNA, 222 bp, Klebsiella pneumoniae
  misc_feature (180)..(189): n is a, c, g, or t
atgaaccactctgtctcctctatgaatacttccctcagcggtaaagtcgccgcgatcaccggcgcggcgtccggtatcggcctcgagtgcgcgaggaccctgctgggagctggcgcaaaagtggtactgatcgaccgcgaaggcgtacaggttattctcgacgattacctgctggaaggnnnnnnnnnnccctgctgggagctggcgcaaaagtggtactga

SEQ ID NO: 266072 - DNA, 225 bp, Klebsiella pneumoniae
atggcagccgggggcaaggtgcgcgctaattgtcagctcatcaccgccgacgatgccgccgggcgggtgaagcagatagaggtgacaggtctcttcttccgggtaaaacgggcgctggacggtcagcgggccgacgtgttgggcgctggcgagaacggtcttgccgccggcctggtgaaagcggagatccagcgtagcctgccagccttttttgagtggtggtaa

SEQ ID NO: 266073 - DNA, 765 bp, Klebsiella pneumoniae
atggccgcgatggttgaggccggcgagctggcgcatttaacgccggagcgggtgtggaaagagacggaaagcgcattaactactcgcaacccgcaggtctttttccagacgctgcgcgactgtcaggccctcaaggtgctgttcccggagattgacgccctgtacggcgtgccggccccggcgaaatggcatccggaaatcgacaccggcctgcacaccctgatgaccgtcacgatggccgcgatgctgtcgccggatgtcgacgtacgtttcgccaccctgtgccatgacctcggcaaagggctgacgccgaaggcgctctggccgcgtcaccacggccatggtccggcgggagtcaagctggtggagcagctctgcgcgcgtctgcgggtgccgaacgatatccgcgatctcgcgaaactggtggcggagtaccatgacctaatccacaccctgccaattctgcagccgaaaacccttgtcaaactcttcgacagcattgacgcgtggcgcaaaccgcagcgcgtgcagcagatcgcgctcaccagcgaagccgacgtccgcggacgcaccggtttcgaggccagcgattacccgcaggggcgcctgctgctggaggcctgggaagtggcgcagtcggtctccactaaagaggtcgtggcggcgggctttaaaggggcggaaattcgcgaggagctgacgcggcggagaattgcggcggtagcgcagtggaaggaacagcgttgcccccagccgcaaggctga

SEQ ID NO: 266074 - DNA, 483 bp, Klebsiella pneumoniae
  misc_feature (358)..(367): n is a, c, g, or t
gtgaagagttatctggtcggtggcgcggtgcgtgacgcgctgctagggctgccggtcaaagaccgagactgggtggtggtgggcgccaccccgcaacagatgctagacgcgggctatcaacaggtaggccgcgattttcccgtgttcctccatccgcaaagccgggaagagtatgccctggcccgcaccgagcgcaaatccggcgcgggctataccggttttacctgctatgccgccccggacgtcaccctcgaagccgatctgctgcgccgcgacctgacggtcaacgccctcgcccaggatgccgacggcgcaattatcgacccctacggcggacagaacgatctccgtcagcgcnnnnnnnnnngcgccatgtctctcccgcgtttagtgaagatccgctgcgcgtgctgcgcgtcgcgcgctttgccgcccgctacgcccacctcggttttcgcattgccgaagagactcaggccctga

SEQ ID NO: 266075 - DNA, 330 bp, Klebsiella pneumoniae
atgcactttctgcgcggcttgttcagagataagcccgccgagaaacggctgcggctcggcgtcccacgccgccgggatcagccgctggctcaccgtcaccagccgggagaggaaggcatcgcccgcctcgccgcgccggaccagcagacggcgggcgcaggtgcagcgctggccggcggtaataaaggcggactggatggtcagatgcaccgcggcatccacgtccctcggatcgtcgacgatcagcgggttattgccgcccatctccagcgcgaggatcttctgcggctgcccggccagctggcgatgcagatgaaaaccggtggttga

SEQ ID NO: 266076 - DNA, 1182 bp, Klebsiella pneumoniae
  misc_feature (1138)..(1147): n is a, c, g, or t
gtggtgctggctaccggcgtgcagcccgacagccgtctggcggcgcagtccggcgtgctgtgccagcgggggatcgtggtcgaccgtcagatggcctcctcgctgccggggatcagcgccatcggcgaatgttgcgaaattgacggccagacctgggggctggtggctccctgcctgcgtcaggccgaggtgctggcggatcgcctgtgcggcgcccccggcgagggctttgtctggcaggacgccgggacccgcctgaaggtcaccggcattgaactctttagcgctggcgagcagcaggccggcgaacaggatgacatttataccagctgggaccccatcgaccgccactatcgccgcctgctgctgcgcgatggccgcctgcgcggcgtgctgctgatgggcgactgcaccgccgccgccgcgctcaccgcgcgcctggaaagcgatgagcctgccaccgtggactggctttttgacccctcttcaacgcagccgcaggctgcaggaataatgacgatgacgaaacctgtattagtgctggtgggacatggcatggtcggccaccattttctcgaacaatgcgtgagccgcaatctgcatcagcaatatcgaatcgtggtgtttggcgaagagcgttaccccgcctacgaccgggtacacctctccgagtattttgccggacgcagcgccgagtcgctgtcgctggcggccggggatttctttattgaacacggtattgaactccgcctcggcgaggcggtggcgaccatcgaccgcgacgcacggctggtacgggacgccgaggggcatgaaatccactgggataaactggtgctggcgaccggctcgtatccctttgttccgccaatccccggtaacgatctcgcggggtgctttgtctaccgcactcttgacgatctcgaccgtatcgccgcccatgccgccgcggcgaagagcggggtggttatcggcggcgggctgctcgggctggaggcggccaacgccctgaaacagctggggctggagacgcaggtggtggagtttgccccgaacctgatggccgtccagctggataacggcggggcggcgatgctccgggagaagatcgtcgccctcggcgtgggggtgcataccnnnnnnnnnnggaattcacatcgacggccagtgccgtacctctga

SEQ ID NO: 266077 - DNA, 2055 bp, Klebsiella pneumoniae
gtgctggcgataggcgaatgcgccctgtgggacaataaaatttacggtctggtggcgccgggctatcagatggcgcgcatcgccgcggccactctcgcaggagaggacgcctgctttagcggcgccgacatgagcaccaaactgaagctgctgggggtcgacgtggcctcgtttggcgatgcgcaggggcgcacgccgggctgtcagagctatcaatggaccgacggtccgcagcagatttacaaaaaaatcgtcgtcagtcaggacggcaaagccctgcttggcggcgtgctggtgggggatgccagcgactatgccacgctgctgcagatgatgctgaaccgcatggcgctgccgccgcgtccggagagtctgatcctgcccgcgctggagggagccgcgccgaaggcgctcggcgtcgcggcgctgccggacagcgcgccgatctgctcctgccataacgtcagcaaaggcgatatctgccaggcggtgaacaatggggcgggggatatgtcggcgataaaaagctgcaccagagcggctaccggctgcggcggctgcagcgcgctggtgaaacaggtgatggagtatcagctggcggagcagggcgtcgaagtgaaaaaagacgtctgcgaacatttcccgtggtcgcgccaggagatctaccacctggtgcgggttaaccatatccataccttcgagcagttgattagccgctacggccaggggcacggctgcgatgtctgcaaaccgctggtggcctcggtgctggcctcctgctggaacgagtacctgctgaagccggcgcacctgccgctgcaggataccaacgaccgctatttcgccaatatccagaaggacgggagctattcggtggtgccgcggatggcggcaggggaagtgacgccggacggactgatcgccatcgggcagatcgccaaacgttaccagctctacagcaaagtgaccggcggccagcgcatcgacctgtttggcgcgcggctggaacagctgccggctatctggcgcgagctggccgacgccgggtttgaaaccggccacgcctacggcaagtcgctgcgcacggtgaaatcctgcgtcggctcaacctggtgtcgctacggcgtgcaagactccaccgggctcgcggtacggctcgagcatcgctataaagggctacgcgccccgcacaaaatcaagatggcggtctccggctgcacccgcgaatgcgctgaagcccaggggaaagatatcggggtgattgccaccgacaaaggctggaatctgtacgtctgcggcaacggcgggatgaaaccgcgtcacgccgacctgtttgccagcgatctcgacgaagcgacgctgatccgcagcatcgatcgtctgctgatgttctatatccgtaccgccgatcgcctgcagcgaaccagcacctggatggataacctggagggcggcgtcgcctatctgcggcaggtggtgctggaggatagtcttggcattggcgaggagctggagcaggagatggcccggatcgtcgacagctaccagtgcgagtggcagaccaccctcaacgatccgcagcgtctggcgctgttccgctccttcgttaatagcgaccagcccgacgaggctgtgcagcgccgcgatctgcgcggtcagccgcagccgctgctgactgagacgttgcccgaaggcgaactcccatcccgaccgtggcaggcggtatgcgaccttgacgccattccggcgcaggcggggatcggcgcccgcttaggggagcggcagattgccctgttccgcttcggcgagcgggtctacgccctcgacaaccgcgagccgggcagcacggccaacgtgctgtcgcgtgggctgttaggggacgtcggcggcgagccggtggtgatctccccgctgtacaaacagcggatacgcctgcgcgacggctggccgtgcgacggcagtgaacaggcggtacgcgcctggccggtgaaagtggaaaacggcaaagtgtgggtgggcaaccagcagctgctggcccgcgcggaggcctcctga

SEQ ID NO: 266078 - DNA, 1824 bp, Klebsiella pneumoniae
gtgagtttcattatcgaaatcgtcgcgcacctggccggcgtaatagtgcaggaagtcaacggcttcgcgcacttcagcgatggcgttgctgaaggttttacccgcctcgcgcaccaggatccccatcagggtcggcatttggctttccatcagcaccgcggcgcgctcaagaatggcggcgcgctcctgcggcggagtggcgaaccagatcggcgcattgttgatagcgctggtcagcgcctgctgcacttcagcgtcgctggcttcgcggacgtagccgacgatatctttcggctctgccgggttaaccaccggctgcatctcgccttcggccaccggctgctccagcatcggcaatgcctgccatttatgcagcgcgctgttgagcagggaagaggagagggaggccagacggtgctcgttcgccagatcgagaccggcggagttgctccggccgctgccgtagagatcgcgcggcagcgggattttcggatgcggcaggccggcctggccttcctgctgcgccagtttttctaccgcgctgaccgggtcggccaccagctcgtccagcggcagggtattgtccgcgatacggttgacgaaagaggtattggcgccgttctccagcagacgacgcaccagatacgccagcagcgtctcgtgggtgcccaccggggcgtagatgcggcacggccggttcagtttgccgtcggcgaccttgcccaccacctgctcgtacagcggttcgcccatgccgtgcaggcactggaactcatactggcccgggtagtagttctggcccgccagctggtagatagccgccagagtatgagcgttatgggtggcgaactgcgggtaaatcaggttcggcaccgccagcagcttcttcgcgcaggcgaggtaggagacgtcggtgtaaaccttgcgggtgtataccggatagccttcgagaccttccatctgcgcgcgtttaatttcgctatcccagtaggcgcctttcaccagacggatcatcaggcgacggcggctgcgggtggcgaggtcaatcaggtaatcaatgacaaacggacagcgcttctggtaggcctgaatcacgaagccaatcccgttccagccggccagttccggctcgaagcacagtttttccagcaggtcgagggagatctccagacggtctgcctcttcggcgtcaatattgatgccgatgtcatactggcgcgccagcagggtcagcgatttcagccgcgggtaaagctcttccatcacccggtcatactgcgcgcggctgtagcgcgggtgcagcgcggagagcttaatggagatacccggaccttcataaatgccgcggccgttggaggctttgccgatggcatggatcgcctgctgataagaaaccatataggcctgggcgtcagcggcggtcagggcggcttcgccgagcatatcgtaggagtagcggaaccctttttcttccagcttgcgggcgttggccagcgcttcggcgatggtttccccggtgacgaactgctcgcccatcaggcgcatcgccatatccacgcctttgcggatcagcggttcgccgctcttgccgatgatgcggttcagggagcgggagaggctggtctcgttatgggtcgacaccagttttccggtgaacagcagcccccaggtggcggcgttgacgaacagcgacgggctgcggccgatgtgcgactgccagttgccgttgctgattttgtcgcggatcagcgcatcgcgggtggctttatccggaatacgcagcagggcttccgccaggcacatcagcgccaccccttcctgtga

SEQ ID NO: 266079 - DNA, 315 bp, Klebsiella pneumoniae
atgaaagcggcggcgaacaggcgatgctataacgactcgatggccgccggcgcgatgggggtgctgaatgacaatggcatcgacgttccgcgggagatttcgctgattggcttcgacgatgtcctgatttcgcgctatgtccgcccgcggttgactaccgtccgctatccgatcgtcacgatggcgacccaggcggccgagctggctttagccctggcggagcagcggccggcgccggagatcacccatctgttcagcccgacgctggtccgtcgtcactcggtggtcgccccgcaggaaggcgataagtcatag

SEQ ID NO: 266080 - DNA, 2160 bp, Klebsiella pneumoniae; identical to SEQ ID NO: 213550

SEQ ID NO: 266081 - DNA, 597 bp, Klebsiella pneumoniae
  misc_feature (585)..(594): n is a, c, g, or t
atgttcgcgcattgtgatgtgaacgccttctatgccagctgtcagaccgccttccggccagacctgaaggggcggccggtggtggtgctgtcgaataacgacggctgcgtgatcgcccgctcggcggaggcgaagccgtttgtgaaaatgggcgaaccctactttaagcagaaggctgcgtttcttcgccacggcgtcgtggcgtttagcagtaattatgagctgtatgccgacatgtccagccgggtgatggccaccctggaagagctcaccccgcgctgcgaaatttacagtatcgatgaggccttttgcgatgtcagcggtgtgcgtcattgcagagatctgaccgattttggccgcgaaatccgcgccacggtactgcagcgtacccatctgacgctgggcgttggcatcgcccagaccaaaaccctggcgaagctggccaaccacgcggcgaagcagtggccgcggcagacgggcggggtagtggacttgtcctgcccgcagcggcagcgaaagctgatggcgctgctgccggtgagcgaggtctggggcatcgggcggcggatcggcaaaaagcttgannnnnnnnnntga

SEQ ID NO: 266082 - DNA, 540 bp, Klebsiella pneumoniae
atggcgcagcatctgcgcccccgcgccaagacgatagaccagccgggcaatctctctcccctgctcttcggcgggtcgtttcagcagttgctgcagctgacgccatgcgcggtcgagatggcggttctgtcctttcacctccgcacactccgcggccagcagctccatcgccgccggctgcttgctcagcacccgcatcacatcgaggcacataatattgccggagccctcccagatgctgttgaccggcatctcacggtagaggcgcgggagttcgctctcctcgcaatagccgatgccgcccagcacttccatcgcctcggcgacaaacgggataccggccttacagatggcaaacttggccgcaggcgtaaacaggcgcgcccaggcgctttcccgggcatcatcccgacggtcccaggcccgcgccaggcgaaacagaaacgcggtctgcccctccagacggagcgccatttgccccagcagctggcgcatcatcggctgttcgaccaggtttttgccaaacgcctgacgctgtag

SEQ ID NO: 266083 - DNA, 531 bp, Klebsiella pneumoniae
gtgcggatcgtaacggtcgctcagcagtggcgacagccagtcgcgaaagggcgcgggcagggcgtgctgcagcaggggcgtcgcggcgaaggtcatggtaatcggacacaacgtcccggcctccacctgggcatggagcagaaagcgggcggcgcgggcgacaaacgcgccttcgcgggcatcctcctgccaggcgaggttatgtacccgattcgcgcacagcccctgcatcagcaggtgccaggcgggatgaaagcgcacgtcgtccagccgggcgccggtggcgtcatagcgcagcagctccggcggattgctgttggccaggcgtcccagctccagcgattcggctgtccccagctgctggccaatgctggcgagcagatcgccatcccagccggcgccttcgcggaccactgcttcacgcagagcggtatcggacagaaacagattgctgttattcagcggggtgggttgattaaaaacggtgtgcgtttgccagtgcatcgtgtctccctccatcaatggcgatag

SEQ ID NO: 266084 - DNA, 372 bp, Klebsiella pneumoniae
atgttattacgttgcctgctccctctggcgctgctgcccctggccgccgtcgccagcgccgcctgtaccctcaccgacccgacgctgaccctgcagagctatcgggtggatgcgcagaaagagcgcattgcgatgtactggcaggatcggcacggcaaagcctggggttccctgcgttcgctgctggcgggtatcgatggcgacggccgggtgcagatggcgatgaacggcggcatttacgataaggcctacgcgccgccccggcggcgtattcctggtggaaaacggccgggcgaaaatcgtgccgctgccggcgtacaaaccctctcccgccatccgctatgcggtgcagtccggcccgatgctgattga

SEQ ID NO: 266085 - DNA, 924 bp, Klebsiella pneumoniae; identical to SEQ ID NO: 211388

SEQ ID NO: 266086 - DNA, 510 bp, Klebsiella pneumoniae
  misc_feature (282)..(291): n is a, c, g, or t
gtgctgtgcgccgttgacgatcaggacattttccgcgtccggcgcaaagtgctggcaggtcaaatggcggacgataatgtcccgctcggcgagccgccctgcatgaggctgatagcgcagatgcgagtcaatatcgcccgccatcgccagctgcctgagcgcctcgcgcagcgcatcgccctgctccggcagcgaagggtagttgaaattgagatccacgacatcggcggcgaccacctgctgatcgaccccgtgccccggaggcagcgagaggtcgcgcannnnnnnnnncacgaaggtgccgcggccggtttcgccgctgaccagccccatctcttccagttcacggtagacgcgcgtggcggtggccagcgagatgcgctccccggcggcaagggtacggtgcgtcggcagacggctgccggcgggcagctgcccgctgcggatcgcctgcgcatatcggtcgacaacggctttatatcgggctttcatcgtgaaatgtatctatga

SEQ ID NO: 266087 - DNA, 204 bp, Klebsiella pneumoniae
atgggtcggttcggcgaacaggcagtgaacgtggtcgccgaaggccagcttcaggccaaatgccacgccgccggggccgccgccgacgccgcacggcagatagacgaacagcgggtgatcggcatcgaccacgcgccctgctttggcaaactgcgccttcaggcgctcgccggctacggcatagccgaggaacagcgtgcgtga

SEQ ID NO: 266088 - DNA, 942 bp, Klebsiella pneumoniae; identical to SEQ ID NO: 212359

SEQ ID NO: 266089 - DNA, 210 bp, Klebsiella pneumoniae
atgctcggctggcaacagcgggcgcagggtcggcgggcgctgctgcggctgcgggatcgacagctggccatgctgcagcagatgcagaatggtctccagctgcgtctggctaagggcatgcagcgccgtttgcccataatgctgacgaatataatcgctcaccgcctggcggttattgccctgaccgagcagatcgctgagctgcgctaa

SEQ ID NO: 266090 - DNA, 414 bp, Klebsiella pneumoniae; identical to SEQ ID NO: 138053

SEQ ID NO: 266091 - DNA, 1143 bp, Klebsiella pneumoniae; identical to SEQ ID NO: 212723

SEQ ID NO: 266092 - DNA, 222 bp, Klebsiella pneumoniae
ttgcaaaacatcctcagcgaaacgccggggatccgtctgcgagcgctgagctgggatgccgcgggcaatcgtctgcagctggatatcgccgcggtcacttcccgggcgctggagcagtttacccagcgggcgcagccgcggtttcgcgtccggccgggcgacatgatcacgaaaccggatggcattgagggacaactgacgctggaggaaaacgatggctaa

SEQ ID NO: 266093 - DNA, 486 bp, Klebsiella pneumoniae; identical to SEQ ID NO: 213191

SEQ ID NO: 266094 - DNA, 219 bp, Klebsiella pneumoniae
gtggcgctgactctccgtcaggactctcatcagctgagcctcagcggccaggggactctgtcgcccgatggccgctatctgtttcgcggcacgctacagccccggcaggggatgccgccgctgctggcgctgctggtcacgcgcccgacagcgaataacgccccgggcccgacgccgtggcagctgcagggaaaatggttaccacaggagcaaaaatga

SEQ ID NO: 266095 - DNA, 198 bp, Klebsiella pneumoniae
atggctctgttgaagcagcgtatatttgttttttcgccaatgttccccgtcgatcaggtcggcgtcgagtgcccggtatttagtgatatcaggcagcgtcagctggccattcaggcgatcaggaatctgttgatagaggaaccactcataacgatcgatcaggatattcccttcaccatccagcaggaattcacgtga

SEQ ID NO: 266096 - DNA, 264 bp, Klebsiella pneumoniae
atggacctcatcgagaaacagcatcccgccgtttgccgcctcaaacgcccccgctttatcgctctgcgcaccggtaaacgcgcctttgacgtagccaaacaggttggcggccagcagctccggattactcgcatactgcgcgcagttaaagctcacaaagggggcatcgggcgccagcagcccctgggcgatggcgaactcatgcatcagctcagccatatagcttttgccggtcccgctgtcgccggtaataagcagcggtag

SEQ ID NO: 266097 - DNA, 309 bp, Klebsiella pneumoniae
  misc_feature (197)..(206): n is a, c, g, or t
atgagtcagttcccaaaccgcgccgcgctgtggctgaacaaactggcgcccgacgtgccgctgatgagcggcctgtgcccttccgtccaggtggcagacggccagattaatggcgaaaacgtgcgttttatcgccgtggtcccggatgctaacaaccactacccgcgcgccgccggcggcgaagtcggcctgctggnnnnnnnnnnagccaggcctatggccgccgcgaagaagctttcggcattcaccaggcgctggccggggcggctggcgcttatgccaaagcccgtttggccggccacccggtaa

SEQ ID NO: 266098 - DNA, 1005 bp, Klebsiella pneumoniae
atggaaaacattgcgcttattggtatcgatctgggtaagaactctttccatattcattgtcaggatcatcgtgggaaggccgtttaccgtaaaaaattcacccgaccaaagctaatcgaatttctggcgacatgcccggcaacaaccatcgcgatggaagcctgtggcggttctcactttatggcacgcaagctggaagagttagggcattttccaaagctgatatcaccgcaatttgtccgcccattcgttaaaagcaacaaaaatgacttcgttgatgctgaagctatctgtgaagcagcatcacgtccatctatgcgtttcgtgcagcccagaaccgaatctcagcaggcaatgcgagctctgcatcgtgtccgtgaatccctggttcaggataaggtgaaaacaactaatcagatgcatgcttttctgctggaatttggtatcagcgttccgcgaggtgctgccgttattagtcgactgagtacccttcttgaggacagtagtttgcctctttatctcagccagttactgctgaaattacaacagcattatcactatcttgttgagcagattaaagatctggaatctcagttgaaacgaaagttggacgaagatgaggttggacagcgcttgctgagtattccctgcgttggaacgctgactgccagtactatttcaactgagattggcgacgggaagcagtacgccagcagccgtgactttgcggcggcaacagggctggtaccccgacagtacagcacgggaggtcggacgacattgttagggattagcaagcggggcaacaaaaagatccgaactttgttggttcagtgtgccagggtattcattcaaaaactggaacaccagtctggcaagttggccgactgggtcagggagttgttgtgtcggaaaagcaactttgtcgtcacctgtgctctggcaaacaagctggccagaatagcctgggcactgacggcgcgacagcaaacttacgaagcataa

SEQ ID NO: 266099 - DNA, 1005 bp, Klebsiella pneumoniae; identical to SEQ ID NO: 9478

SEQ ID NO: 266100 - DNA, 1173 bp, Klebsiella pneumoniae; identical to SEQ ID NO: 212086

SEQ ID NO: 266101 - DNA, 906 bp, Klebsiella pneumoniae
gtgattgccccgtcccgccgcctgatagccagctgtctgctgctaatggccgccagcctgctgatttccctgctcgggctggcgcaaggcccggtgcccctgacgattgaccaggtgttctcggcgctgttcggcgatgcgccgcgcaacgtcgcgatggtggtgaacgaatggcggctgccgcgggtgttaatggcgctgctcatcggcgccgcgctcggcgtcagcggcgccattttccagttcggccagaacctgacggcgatcgccctggcggcgatggccggcggggtgctgacctcgctggtggtctggctgctggcctggcgcaacgggatcgaaaccttccgcctgatcattatcggcatcggcgtgcgcgccatgctggtggcattcaacacctggctgctgctgcgcgcctcgctggagaccgccctttctgcgggcctgtggaacgccggatcgcttaacggcctgacctggggtaaaacctggccgtcggcgccgctgatcctgttgatgctggtgggcagcgccctgctggttcgccggatgcggctgctggagatgggcgacgataccgcctgcgcgctgggggtgcaggtcgagcgttcgcgcctgctgctgatgctggtggcggtggtgctcaccgccgcctcgacggcgctggccgggccgatctcatttatcgcgctggtggcgccgcatatcgcccgccgcctgagcggcacggcccgctggggactgacccagtcggccctgtgcggcgcgctgctgctggcgctggccgattacggcgcccaacggctgtttatgccgtggcagctgccggttggcgtgttaaccgtcagcctcggcggtatttaccttattgcattgttgattcaggagtcccgcaaaaaatga

SEQ ID NO: 266102 - DNA, 693 bp, Klebsiella pneumoniae
atgcatggcgtagatcgctttcgccagccggggatcgcgcaggacctgtacccagccggtggcgttgccgcacccgcacgctacccagccgcggacaatcagcgcggccaccacgtccgccagccgggcgaggatcccggcatagcctgcctggcgggtgagggattcccgctccatcgccgccagcagcggctggatctccggccaggtattaagcaggctgctgacccgcatcacctcgggcatggccttcaccagcggctgcatgccgccgagctcaaagtccatacaaccgctgaaaatgacggcgcgctccgggcagtcaggctggtcgccagcgttgatacaacttaccgtgctgcacaccgtttcgctgggcagctgcgccacattgaccaccgtggcctgcggatccgagagcagggcgtgcccgtcgccgttgggaataaacagcgcatcgccgctctcgagggtgaactgttccccgcgggccatgcgcagcagcaccggcccgcggctgatgaaatggaactgggctttacccgccacggcgctaaagccgacgccgaacgggcgtgcggtttcgatgcgccggtagttaacgccggagaggcgcataccgcgcaacagttcgctggtcaggtcgatggcaggctggctcatggcaattccggacgaataatcaataactga

SEQ ID NO: 266103 - DNA, 210 bp, Klebsiella pneumoniae
atggcgagccagacgatcggcgaagccgctgcgatcccaccagcggcgcttgctttggcggccaatgacgattttgccgaggttatgttcgcgggcgtaatggaggaccgctttctcttccgacgggtcggagagggtggcggtttcggcccccagctcctgggccagacgcagcgcggcgagaatagcccgccgccggccttccggtag

SEQ ID NO: 266104 - DNA, 225 bp, Klebsiella pneumoniae
gtgcagctgggcggggagaacctcgcggccggtctgaacggccagagcctgttcctgttcgccggcgaccagaaagatgcggatgccatctacgccaacccgctgctggcgcatctcccggcggtcgcaggcaaacgcgtctacccgctgggcaccgagaccttccgccttgactactacagcgctctgctggtgctccagcgtctctccagcctgttcggctaa

SEQ ID NO: 266105 - DNA, 921 bp, Klebsiella pneumoniae
atggctggcgggggtttccacgaacagcagacgggtttgcgccggcacctgcaggccaatcgccgcggcgattttgcccgcatcgcggccgacccagtcgcggctgaccgtgcctttgccgcgctcgtcgatatttttcagcagcagcggctggagctgttcggcctgcgccgccgtgagtttcaccgcctgctggccttccatcaggcgcatcagttcgtcggcgacgctatcgaccacgatcagcaccttctcgtcggcgcagataatgttgttatcaaacgaggcgcctttgacgatcgcctgcgcggcgcgcggcagatcggcggtctcatccaccaccaccggcgggttgccggccccggcggcgatcaggcgtttgttggtatgtttgcgcgccgcctcgaccaccgcttcgccgccggtcaccaccagcaggccgatgccagggtacttaaacagccgctgggcggtgtcgatatccgggttcgccacggtcaccagcaggttggccgggccgccggcggccactaccgcctggttaagcagggtaattgccctttgcgagacctttttcgccgccggatggggggcgaagaccacgctgttgccggcggctatctggctaatggcgttgttgatcaccgtcgccgccggattggtggacggcgtcaccgaggccaccacgccccagggcgcattttcaatcagcgtcaggccgttatcgccggtgagcacctgcggagtcagacactccacgcccggcgtgccgcgcgcctgcgccacgtttttggcaaacttatcttcaacgcgtcccatgccggtctccgtcaccgcaagctccgccagttcacgggcatacttttcacccgcctcacgaatggcctgaatcacctgctgacgcatcgccacccgctttaa

SEQ ID NO: 266106 - DNA, 1086 bp, Klebsiella pneumoniae
  misc_feature (584)..(593): n is a, c, g, or t
  misc_feature (997)..(1006): n is a, c, g, or t
atgcagaccgaagtggctgaggtgggcgagccggtggcggaaggtcgcggcggttcgtcgacgatgccgcataagcgcaatccggtggcctgcgcggcgatcctgaccgccgcccagcgtacgccggggctgatggcgacgctctacgccagccaactccagcagcatgagcgggcgctgggcggctggcaggcggagtgggagaccctgccggagctaattaccctggtgggcggggcgttggcgcaaagcgaggcgctggtgcgcgacatgcaggttttcccgcagaaaatgcgcgccgatctcgatatcacccacgggctgattatggctgaggcggtgactctggcgctggcggaattcattggcaaagccgaggcgcatcatcacatcgaagcgctgtgccgccaggcgctggaccgtcactacccgctggtcgatctgctcgcggctgacccacaggtcagtcagtatctctctcgtgaacgcttaaccacgctgctggacccggcaacggcgaccggcagcgccgaacgctttgtgcgccaggtgctggcgcgttatcaggagcaacgtgatgaatnnnnnnnnnngccggttatcgtcctctccaattcgctgggcaccacccgggcgatgtggcagccgcagatcgaggcgttaaccgcccatttccgggtgctgcgctacgacacgcacggccacggtaaaacgacaaaaaatggcaaagtgaccctcgcccagttgggggaggatgtgattgcgctgctcgatcacctgaatatcgaccgcgcctggttctgcgggatctcgatgggcggtctgaccggcctgtggctgggacgctttgcgccggagcgttttcatggtctggcggtcgccaacaccgcggcgcgcattggcgatcaggccagctggctgtcgcgggcgcgggccgtacgtcaggaggggatggcggtggtggccgccggagcggcagaccgctggtttacccacnnnnnnnnnngaggcgctggccgccgccgacctgcggggcgaagtggggcagatcccgctgccgacgctaatcatcgctggggaaagtga

SEQ ID NO: 266107 - DNA, 189 bp, Klebsiella pneumoniae
ttgcagagcgacgactggggactggccttcagccgcagcggctggccaaacccgctggggatcctcccgcgctcggagatccagaacgtcagctaccgtctgcgccagcagcaggagatcaccctgacgctggcgaacagcggggagataacccgcctgtttttactcaccccgggaggcggccagtga

SEQ ID NO: 266108 - DNA, 924 bp, Klebsiella pneumoniae; identical to SEQ ID NO: 210799

SEQ ID NO: 266109 - DNA, 864 bp, Klebsiella pneumoniae; identical to SEQ ID NO: 139298

SEQ ID NO: 266110 - DNA, 312 bp, Klebsiella pneumoniae
atgaatataacgggagccaccgcgagactgcgactcgcgggcgatgcagagcagatagcgatcccgttcggccgggctgccggtcagggagtactgacggatcagcccgcagggaagatggagatcgatatgggcgccgggcgtccacgccggcagcggttgcccctcggcgctcaccagactaacggccagatttttagcgccctggcgccacaggccatcgaccaccaccgggagtatgtcgcgcatatgacctccactcataccagaaagaaatcgccaaagcccatcttcttcagcccgcgccggtag

SEQ ID NO: 266111 - DNA, 867 bp, Klebsiella pneumoniae
gtggtagtcgcccgcgacgtctgcccgcaccgcggggtgccgctgaccctgggatttcatgaagaggaaggtatcgtctgcccctatcatggcctgcgctttggcgaggatggccgctgcaaccgtatcccctccagtccggggcaacccattccggccaaactgcatctcaccagcttcgccgtggaggagcgctacgggctgatctggacctgcctggcctgcgatccggacaatccgccgccgttaccgaccatgccgcactgggacgacgccggctttcagcaaatcaactgcccggccttcgaggtaaagggatttgccggccgccaggtcgaaggctttctcgatgtcgcccacttcgcgtggatccacaccgacaccttcgccgatccggacaaccagcaggtgccggactataccccgcaggagacgccgttcggctttgttgccgactactggagctcggtgggcaattacccggccagctctgatttccgcgcgccggaagggttccagtggctgcgtcactttgaaatgcatctgccgttcaccgctacgctgaccatccattttcccgccgacgccaggctggtgatcatgaacgccgcctcgccggtgtcgtcccgggtgacgcggatgtttgcccctattgcccgcaacttcgatctgcacgtgccggtggaagacgtacatgcgttcaacctgcgggtatttgaagaggaccgcctgatggtcgagacccagcgtccggaacggttgccgctggatctgaccctggaggcgcatattccggcggaccgcagctctatcgcctaccggcgcgggctgaagaagatgggctttggcgatttctttctggtatga

SEQ ID NO: 266112 - DNA, 534 bp, Klebsiella pneumoniae
gtgcccggtcagcgaggcctgaacggcgatctgggcggtttcgccatcgcggatttcgcccaccaacactacgtccggatcctggcgcaggatggcacgcaggccgcgggcgaaggtcatctcgactttggcgttgacctgggtctggcctatgccctccagctcatactccaccggatcttcaatggtcatgatgttgcgctcccgggcgtcgaggcggctgagggcggcgtagagcgtcgtgcttttcccggagccggtcggaccggtgaccaggatgatgccgtgcgggcgggcgatcagcgcatcgacccgatcgagcagggcgggcggcatgcccagcgtcagcagatccaggttgacgctgtttttgtccagcagacgcaggacgacgcgttcgccgtggctggagggcagggtggagacgcgcacgtcgattgctcgcccgccgatgcgcagcgccatgcggccatcctgagggacccgcttttcggcaatgtccagactggccatcaccttgatgcgcgaaattaa

SEQ ID NO: 266113 - DNA, 345 bp, Klebsiella pneumoniae
gtgctggcgctgggggataaggtggcgctgggccttggcgttaatctcgtccagacgcggctgctgggcctgctggcgattgcgctgctctgcggcgcggcggtggcggtggccgggccgatcggcttcgtcgggctggtggtgccgcacgtggtgcgccgtctggtgacggaagatatccgcctggcgctgcccctggccgcgccggtgggagcgctggcgctggtgctggcggatatcgccgcccggacactggtcgcgccgcaggagctggcgaccggggcgatgaccgccctggtgggcgcgccgttgtttatctttatcgccgcgaggttttttaaatga

SEQ ID NO: 266114 - DNA, 453 bp, Klebsiella pneumoniae
atggcgggcgccaaagcgcgccatctccagcgagtcggcgatacagccgccggtctcttccgccagctgttgaatttcaggatcggtgtagtaatgcgccaccatcacggcatcgcgctcgcgcagcaggcgcttgattttttcgcggtaaaactgcttttcgtcgacggtcagcggctgcggtttagcagggaaaggataaatcgccgtttcaggatcaaacattacgctcatcatgcaatctcgttttactggcttaactctacaaccgtcagtatggcctgtcggcggcttaacacggtcatggtgttttatatgctaaacaagatagccgattacgagctaaaagtcgtgatgaattttgtacatcagacccttttcccggggacggtgctgcgcatctgcccgaacgaccggttcgtatcctgtgcaggcacggtaagcgcagcgtga

SEQ ID NO: 266115 - DNA, 393 bp, Klebsiella pneumoniae
gtgagcgacgacctcgcctgccgcgtggatcgccatgcgctgccgtcgctgctggagacggtgcgccaggagggcaatgaaatcatgattttcgtcggcaatcgcggctgcgtgcagatctttaccggcgccctggaaaagctggcccccatgcgcggctggctgaatatcttcaatactacttttaccctgcatctgcgcgaagagagcgtcgatgaagtgtgggtgacccgcaagccgacttcggacggacacgtcaccagcgtcgaactgttcgctaaagacggcacccagattgcccagctctacggccagcgcagcgaggggcaccccgagcagacgcaatggcgccagcaggtagaccgcctgacccgtgaagggcagcccgcatga

SEQ ID NO: 266116 - DNA, 444 bp, Klebsiella pneumoniae
gtgcgcctgagcgatgacgcccgggcgctgattgccgccctggagcgcgtcggcgaaaccaaatgcatctgccgcaacgagtatgccgtgcatgagcaggtgggccagttcacgcaccatcacctcagcggccacgccgggctggtgctgaacccgcgtgcgctcgacctgcgtctgttcctcagccagtgggccagcgccttccatctgaacgataatggccgtcagagcatccagtttttcgaccaccacggcgacgccctgctgaaagtctatgcgaccacgcagaccgacatggcggcctgggagaccctgatcgcggaatatcgggtggcggcgccggcaccgctgaccctgcgcccgctggagccggtgaaatatgccgataccgccgacggcgccgccctggagaacgaccccgccagcaggccttccgtctggtga

SEQ ID NO: 266117 - DNA, 408 bp, Klebsiella pneumoniae; identical to SEQ ID NO: 212982

SEQ ID NO: 266118 - DNA, 489 bp, Klebsiella pneumoniae
gtggcgctgcgcagcgacgacatcgacgccacccatgaccagttgcgtcgcacaggggtgacagtgtcaccgattgtcgatggccagcgcaacgatccgcagggcaatatcatccgctggcggatcttcaccatcgatggcgacactgccgggctggtctatccctttgtgctgcagtgggaagaagacgacgccacccggctgacgcggctgcgcgcccagaggctggacgcgccgcatccgctgggcgacattacgcttgagcaggcggtgttcgaggtggtcaatccgcaggcggtgcgcgatcgctggcaggcgctgctgggctttccgccactgggggagcagggactggacgtgggcggccagcaatttatcttccgtgaaggggctgccaaccagctgaccgaactggtgttccgcgtcgccaacccggcgcttaaggggcagcgctttcgtgtcggcaacggcgtgtatcgctttacataa

SEQ ID NO: 266119 - DNA, 501 bp, Klebsiella pneumoniae
atgaaagaggctattaacactgacccaatgattggtattattggtcctgtatattatgacattaatgatgggaggtattcaagatttccagtcatgcataataaacttctggtcagaagagaagtgttttctgataatgaaggcataaaagatgcaatgtgtattataacatcgggcgcattatgtagaagttacagagtgtgtgtgtatccgaaagttgttattcaacatgctcttggtaacaggaagaaaaaatttggtttttcgccaacgaattatccatactatagaaagtactatgtgacgagaaatcgtctacatgtatggaagaaatattttaaatattaccctgcatttattgcttatgatttttctgcgtttttgttagatctattcagggttgtttttcttgagaaggataaatttataaagattaagtcgatttttcttggtgtgaaagattttcttcatggcagatatggaaagatgaataatatataa

SEQ ID NO: 266120 - DNA, 195 bp, Klebsiella pneumoniae
ttgtcgatgggagagctaggggcgacggtgatgatgtatccgccgggctggacgacgctgccggtgaccattttcagcctcaccgatcgcggcaatatcgccgatggctcggcgctgaccattgtgctggtgggcgtcacgctgctgttgatgatgaagcttgagcgtatcgcccgccgattaagccagagataa

SEQ ID NO: 266121 - DNA, 243 bp, Klebsiella pneumoniae
gtgaacgaggcgacgcgctttgtcacccataccgaagccggacaggtgatctccctgtttccgatgcaggccggtatgccaaacattgactggctgcagcagcatatttcgctggacgccgatctggggcgcctggagcaggcgatcgcggcggtggagccaggcagcggcggcgtcttctggcagccgtacctcaatggcgaacgtgcgccgttttacagcccggacgcgcgggccggctga

SEQ ID NO: 266122 - DNA, 186 bp, Klebsiella pneumoniae
gtgccgcaggcgaatattctggctcccggctattcgaaaggccacgttgaggactgcctgcaggagcggtttggcagcgagaagacgctgttgcaggggatatttgttaactcgacgatatccctggaaggggttgtgcgctggctgtcgcaggtgggtctgaccggcgatcctggccgcccttaa

SEQ ID NO: 266123 - DNA, 1140 bp, Klebsiella pneumoniae; identical to SEQ ID NO: 111107

SEQ ID NO: 266124 - DNA, 405 bp, Klebsiella pneumoniae; identical to SEQ ID NO: 104066

SEQ ID NO: 266125 - DNA, 318 bp, Klebsiella pneumoniae; identical to SEQ ID NO: 226781

SEQ ID NO: 266126 - DNA, 348 bp, Klebsiella pneumoniae; identical to SEQ ID NO: 248286

SEQ ID NO: 266127 - DNA, 390 bp, Klebsiella pneumoniae
atgcccggttcagtcggtattgatctggggctggatgatggcgcgctggatacggaaatgaccatcggcggcactgaggcgcttctgtttaaacagatgggcaaagccacggtggacggcgtgcagctgcgctttaccgggtctattcagcgtgacgacaccggcgaagttcaggccgttgagctggtcgtccgtgggcgccacaaagaggtggattccggcgagtggaaaaccggcgagagcaattccaccaaggtcagcagcgttaactgttacgcgaagctgaccattaacggtgaagtgctctatgaggtcgatgcgatcaacatgattgaagttgttgatggtgttgacctgatggaagaacaccgtaacgccatcggtctgtaa

SEQ ID NO: 266128 - DNA, 390 bp, Klebsiella pneumoniae
atgcccggttcagtcggtatcgatctggggctggatgatggcgcactggacacggaaatgaccatcggcggcactgaggcactgctgtttaaacagatgggcaaggccacggtggacggggtgcagatgcgcttcaccggctctatccagcgcgatgacaccggcgaggtgcaggccgttgagctggttgtacgcggacgccacaaagaggtggattccggcgagtggaaaaccggcgagagcaataccaccaaagtcagcagcgttaacagctatgcgaagctgaccattaacggcgaggtgctgtacgaggtcgatgtgatcaacatgattgaaattgttgatggcgttgacctgatggaagagcaccgcaacgccatcggcctttaa

SEQ ID NO: 266129 - DNA, 216 bp, Klebsiella pneumoniae
atgtgtaaacacatcatcaaatacgaatatcgtgacggcgtaaaacttgcaaggcatgaagtagaaacctggtgtgggcatgcgccacaattttcagattggttgtttcaggatgcccagcacgccatattgagtatagagcaagagtcccgcattcaaccatgcaagcggtgcattaaggctattatcaatgccgcagagaagggggtgcagtga

SEQ ID NO: 266130 - DNA, 204 bp, Klebsiella pneumoniae
atgcacaccattgaagaaattggcaagcgcgcagcattgctgaagtggaagcgtcagtttggcccgtttgagaaatgcccggtctgctacgggcttctttcttcctgccaactatgcagcggaaacggaaaggtgattcaggaggatatcgactcctggaataacccaatcgccaagatgagaagggaggcgaatggtgcctaa

SEQ ID NO: 266131 - DNA, 210 bp, Klebsiella pneumoniae; identical to SEQ ID NO: 214998

SEQ ID NO: 266132 - DNA, 195 bp, Klebsiella pneumoniae; identical to SEQ ID NO: 223626

SEQ ID NO: 266133 - DNA, 195 bp, Klebsiella pneumoniae; identical to SEQ ID NO: 230213

SEQ ID NO: 266134 - DNA, 303 bp, Klebsiella pneumoniae
atgagcgaagatattgaaaaaatcagaaaaatgaaattggcaaataatcatattgacactattgtcgatacatctttcactatacccgttaaaatgggagctgataccttttgcacaattcattttattaaacattctatgtccctttatgaagattcaaatgatggaatttttaaaggtaatattacattagataaagaaattgttgcctctataacattgaccagagcacacgcagaagaattatcagaaataataaataatcaattgattgcatttgataaacaaaactcccaaggctag

SEQ ID NO: 266135 - DNA, 384 bp, Klebsiella pneumoniae
atggtgatggtacaatactctgaacatttttcctttatcatggaaaacctttccgagaaggaacaggaattattaggttcattaactttgtatattgaagctaatggatttgaaggactccccgggaggaataaatcgtctaatgatttcccccgctcatttttaggaaagaaaagaatgatagaggaggattttgtcttaaaaaacaaattatggcattatcatgtcgggtatctatgctacagaacaataaataaacgaggtgattggacctccgattttgttgttcactatcaaaatttgtctgaagaagaaattaggttcgtacattactcctcacacaagcctgtattcagaaatccattaccgtcctacttaacgtaa

SEQ ID NO: 266136 - DNA, 204 bp, Klebsiella pneumoniae
atgtcaaatgaggatgattttttcgcagaaatgcacctacagatagcgcaggtcatcgggatagcggttatgcagctgctggttgagaggcgcgatccatcaagagaggcgctgatagagatgattccggtgttgtgccagggagaccagataaacctagctgtagagttggtgatggatattcttattttgtctaaagattaa

SEQ ID NO: 266137 - DNA, 432 bp, Klebsiella pneumoniae
atgaaccacgaacaaatccgcagagataccacagcggagctcacgcacatcatcaaattatcgcttgcacagtggcaccgggaaggcggcaaatcagcagggcctgaaggccctgtgatcgcgttcggtaagcgcattatgcgcggcggtgtgatgatgatagtggggcattccatacgcggacacgaatgggccaccccagcctattacgctgatgtggcccgcagcctgcgcaaagacaaaacgggcaaggtatacgccagccactgccagatagaacgggaaacattcacctgccagctgttcgcacgaattatggggctgacgcaaactgcttatcgtgggttgcctgacgtggctcctgagtggcaaacaatcagcgagaatgagcagcgccagatcgttgagtttattagcagctgtatggcgtga

SEQ ID NO: 266138 - DNA, 288 bp, Klebsiella pneumoniae
atgaccgatcaagagttcgaaacgatgatgttcaatgagtccagccagaccgcaacgctgctcaccgctcgcggcgtcaccgatctggataccatgctgggcgagggctacgccgccgcaaaccctgccgttctggcgcagtggatggcggtcgctggctcccagttcctgcacatgcagcaaatgcacgccgccaacggtctggcaactcaaatcgagcgactgggcaccatggctgacgctatcgaggccagcgccgcagcggcgcacgctgggagagttcaatga

SEQ ID NO: 266139 - DNA, 1206 bp, Klebsiella pneumoniae
atgagcgagagcaaagacgaatacctgttgtggcccggcgtgtttgatgaggcgctggcacgcgtacagcctgccccctcgtacatggagtgggtgcagcaggtacggcagatcgcctgctgggctaacattctgaggctgggcgatgcgcaggctatctgcgagcgctggagcgcgtcaggtgttaatgcagccacagctgatgcggggcttattcgctctgctctccgccctcagtcactcgaaaaactcagcccatttgcgatggctggcgcgttccttgccgcgtcaggggtgacggctgaaattcgcgccggacgctttggctcctaccagccaaccgccgcagacctcgccaaacgtgaggcccagcgccgggaaatggaggaggctcaccgcgtagcgctggaggctaccaacaaagaacggcagaaagctgctatgcaggccaaccagatttataacaaggccagtctcgatccggctttgtctccttactggcaggcaaaatgcagtgcggcagcactgcccctaccgctcccggatgacgtaaaggccgcaaactggcgcaccttcgagaaaggggcatcggcgcagggtatttactggaaccatagcctgatcatcccgctctactgcatcactgaggagctaaagcttgggatgcggactattgagatcatctgtgggcgtccaaacccggaaactgagctttcattcatgggcgctaagcgcggcctgaaaggtgcgcaacgtggagggtgcttctacccgttagacatcgacaaggcccgccatggctcacctctggtcatctgtgagggcttttcctccggcatggcgctgtctgccgccatggggcacgctctgcccgtattctgcgccatgagctgcaataacttcgccgccgttattgatgaattgcgcattgtttaccaggactgtccgatctacatcgtgggtgatgtgggagtgggtgaggagatagcgcagggcatcgctgaggccaatacttcacgccgtccgcctgtgtatgccgtaccgctctcccgcgtcttatttgaagacggcaacgatccctttgacctgctggcccgtcatggcgtggacaattctcgcgccctcctccgctcattgttccgtgaagcccgccaaggtcgtgacggtactctgtccgggccgagctcatcggatgcccagtattaa

SEQ ID NO: 266140 - DNA, 486 bp, Klebsiella pneumoniae
atggattccataaaacccgaaaaactccagcttgtcggtgccgtcgaggcttacccggatttgatgcccggcattctgtttgttacctgccctgatacagcaaaatcatgcgtcagcgtgagcacctgccagcgcttgcacgaagaaaccaccacccgaaaggcagacccggaggcttgcgccagaccctgctcacgatgcgctacaggcgtgattttgtggcgcggtgaatcttcacggctaccccccgtaaatgtcgatcattgcccacgttgcggaaggacggcggggcggcttgtagggaagacaaacggcaaccgggctacaccatggggcatatgctgcgtcagttgctggaatcgtgtcgcagagaacaaaaaaggggttggggctcgtgggaatccgatcatgcagccgccgcttaggggtttgacgctcaaccgaacggtttcacacgttaagagctttttgtctgataaatcataa

SEQ ID NO: 266141 - DNA, 558 bp, Klebsiella pneumoniae; identical to SEQ ID NO: 25303

SEQ ID NO: 266142 - DNA, 414 bp, Klebsiella pneumoniae
atgaaagagaatgatattgctggcatcctgacctcgacacggacgattgcgctggtcggagccagcgacaagcctgaccgtccgagctaccgggtcatgaagtatctgctggatcaggggtatcacgttatcccggtttcgccgaaggtggcgggcaagacgctgctgggacaacaggggtatgcgacgctcgccgacgttccggaaaaggtcgacatggttgatgtcttccgtaattcagaagcggcgtggggcgtagcgcaggaggcgatagccatcggcgcgaaaacgctatggctgcagctgggggtgatcaatgagcaggctgcggtgctggccagggaagccggattgagcgtagtgatggatcgctgcccggccattgaactaccgcgactagggttggcgaaataa

SEQ ID NO: 266143 - DNA, 1770 bp, Klebsiella pneumoniae
atggatgatttaaccctgcgctattacgaagcagagatgcgctacctgcgtgaagccggtaaagagtttgcccgggctcatccggatcgtgcagcgatgcttaatctggataaacccggcgcccgcgatccttatgtggaacgcctgttcgaaggctttgccttcctgatgggccgtttgcgtgaaaagctggatgatgatctgccggaactgactgaagggctggtgagtctgctgtggccgcactatatgcggactatcccgtcactggccattgtcgagttctcccctgactggcgtagtctgcgtcaggccgagatgctggcggaaggcttctccgttttgtcacggcctgtaggaccgcataacaccgcctgtcagtaccggacaacccgcgatgtgtctctacaaccgctgcaacttgcggaggctcgcctccatacagaaaccgatggccggtcagctatccgtctgcgcttcgaatgccctgaaaaagtggactggcgtaaagccgggatcgataaagtcgccatttttcttaacgcagagagtccagttagctcagcgctgcatctggcattgacccggcgtgtacatgccatgtatgcccggcacgcagggacgcatactgaacgtcatcagtttaatggttggtgcaaacccatgggctttgacgacaatgatggcctgtggaagaaagccgatactgccttcagtggttaccagcttctgctggagtatttcagcttccgtcagaaatttatgtttgttgagctgcgcggtctcgacaccatcgggctcactgcggccagcacctggtttgaaatcgacattgtgctcagtgaagcatggtcatccgatctgccttttgagacagaaaacttccggctgcactgtgcgccggtcatcaatctctttaccctggaagccgacccgctgacgcttaacccgctggaaaacgaatacctgctcaggccgctgcgtcttcaggatggacacaccgagatttatagcgtcgataacatccatggcgcggtgaagaatggcaaacacccctatgtgccattcaccagcttccgccaccggggcggtatgatgcgccacgatgcccctgagcgttatttccatacccgcgtgaaacgcggtccctctggcctgtatgacacctggttaattctcgggggacgctcgttcgaactggagcagctgtccgataaaccggagtccctctcgatgcgaataaccgggaccaacggtcagcttccacgtaaggcactggaaagtaccctgctggacagggtggtcaaaacaggcaaagtgcccgtcagagtactgaacgtcacagcaccgacgatgccactatatcccccggcaaacgatcgttttcactggcgggtgatgagccacctcggctcaaactttctgagcatgatggacaatccggaggtactgcggggcacgctggcgctgtatgactggaccgacgatgaaatgaaccgccgtcggcttgaagcaatcgtcgccgtgaagcacaccctgatccgtcgttttgagaagggttttatgctccggggcgtggacattgaggtcacgctgaatatggacaatttttcaggcgagggcgacgtgaatctcttcggggaaatgctgcaccggttcttcgcgctctatgccgatattcacctctttaaccagctcacgctggtgctgcaaccgacagggaaacgactgagatggcgcgagaatcacagccagcacgtaccgggctga

SEQ ID NO: 266144 - DNA, 456 bp, Klebsiella pneumoniae
gtgaatgaagaaggcctgatatacgacaatgaactcgctaccgtcgttaatggtcaagctgatgatgtgctgctccttgagtcggaagccatggaaaagggcgacacggatggtcccgaagcggcgcttacctggctccagtcccgaccggggatagacacaccacgccatcgctggctgatacgcctgctaatggcccgggtggcagagcaatatggacgaaacgatatggcgcttcatctgcttggcgaactaactacctgtgcgccacagctgacgctgggagactgggaacccgatctgttgtttgaagtccaggcccgccgactgaagctgttacgtatgaaagctggtcgcagcgaatctgataaagcccgtttgatgcctgagatggagtccttacttgccggacttattgccattgacccggcccgtgccatggtgctttgccagtaa

SEQ ID NO: 266145 - DNA, 618 bp, Klebsiella pneumoniae; identical to SEQ ID NO: 238269

SEQ ID NO: 266146 - DNA, 603 bp, Klebsiella pneumoniae
gtggtgaaggggattctggaacagttgtataaagcggcacaggatgaaacgcgcaccactcacgcgctgaacaagtataactataaacggctgctggaattgatagacagtaaccaggacgggtattaccaggagcaggagtatcttcaggcggtacataatatctcttaccgcgaccgcctgtaccgtgtaattgcaaaacacgccagtgaatggtactacggcaaggatgactcattgtggaaaacctatctggatacgttaactacggatgcgccattgtggaagacgtatctggaaacgtttctggataagatgacatggatgaaggcggtgtctgaaaagggcgttgcgctggggccggagccgtggcatatgcatcctatagtatttttaaattctataaaaaaaggtaaatccaaaattacacgagagatgctcaggagaatttggtctgacccaggaaatgtttctgactctgttcttgatgttgttgcagaagaattttcgaataaatttgaagtttgtaatattaatactaaaaatagactgtatcacttttttgctcaaatatatcaagaagtaggcccactttcaatttga

SEQ ID NO: 266147 - DNA, 1110 bp, Klebsiella pneumoniae
atggttgctcgctccaatcttgtgaatttagatgcgctgattaagcgtgctgatttggctttaaagatccaagatcattcatcatatgaaacgcttaacagcattcctgcaagagaattgaaatcgggaagtggaatcgctgccttacttcgaaaacctgatttccaacgagaaaccaatcattgggggccagaacaagttgtatcgctactcgaatgttatatcaacggagatttaataccctctgtcattttgtggcgatcttctaccaatctcttcgtgattgatggggggcatcggctgagtgctttacgtgcatgggtcgaagatgattatggggatggtcatgtatcccaccagctgtttgggcacgatattcctcgtgaacagcgccgagcagctgagagaactagaaaacttgtaaaggatcgggtcggtagctgggaatattatcagaaactacttgcagacgatgcttctttaactgaagagcagcagagaagaattagtgtattaacttctcgtggaatctctgttcagtgggttgtaggtgatgttgataaagctgaaacatcattcttcaatatcaacatgaaggggacaccactagatgctattgaggaaatgctcctcaaaaatcgtaaaaagagcataccaatagcaacacgtgcgattatccgtgcgggcagaggccatcggtattggtcggaatttgatcaaagcattgcgcagcaacttgaggaaaaatctgcaaagttacatcgaatgctttttgaacctgaagttgatcgtccgatcaaaacacttgatcttccattgggaggatcaagaggtgttaggactgcaatccaagtattaaaagatttcttactgattactgattgcagtcagaatggagtgctgaagaagattgaggattatcccgatgatgtatcaggcgcagatacattaagaattctttctaaagctacaacattgagcaacaggattactggtaacggtgatggtagtttggggcttcatcctgcgatctatttttatggtccaacaggaatacattccacaccgatgtttttgggtacagttttactgacctgcccccagagttag

SEQ ID NO: 266148 - DNA, 1125 bp, Klebsiella pneumoniae
gtgaaactggactttgaccgcaacagtaccgaacagggctatgcgtatctgtggctgcggctggcgaaaccgtatgccggtgatacatacggcttccactcaccgcttctcgacggaacggaagtggccgtcgtatttgacggtggagacccggatcgtccctacatcgcttatgccctgcatgattcagagcatccggaccatgttaccagagacaatcatacgcggaacgtgtggcgcacaccggcgaacaataagctgcggatggaggataagcgccaggaagagcatatcaagctcgccaccgaatacggcaaaagccagctcaatatgggccatctggttaacgcacagcgtgagcagcgcggcgctggttttgagctgcgaacggatgagtttggcgcggtccgcgcagccaaaggcctctacctgacggcggatgaacaggcaaaagcgcaggggcctgtgcttgaaatggcccctgccatcaaccagattaaccaggccaacagccagatgcaggccctgaacagcgccgccgaagcggccggggccctgatctgcgacatcaatacccagataaattttgtggccgacaaaatcagggacctccagtcggcggtgctgctgggtagcgcgccgcagggagtggcactgacctcaggcgaacaccttcagctcagcagtacccgcaacaccatgatcaatgccggtcagcatcttgatatcggtgcgatgaaaaatgtttctgtaacggttgaaaaagccctgggtatgtttgtgcataaaggcggggcgaagctggtcgccaatcaggggaatattgatattcaggcgcagcacaacacgatggggcttctggcaaagcagcaggtgacgataaccagctgcgaggacgggattaccatcagcacgccggagacactgacgctgaacggcggcggatcttacctgaggctgagtaagaacggggttgagcatggttctgagggaatgatggtgatgaaggtagtgagctatctggtgccaggaagtggcagcagtctgccactggagacaccggactttaaaacgacggacgtgaaggtcataacaaaaaattccgccaaatggacaagtgaataa

SEQ ID NO: 266149 - DNA, 582 bp, Klebsiella pneumoniae
atgtatcagtcaccgcgtggcctgaaaaaactgaacgtcatcgatgagggctggaagctccttgatttcaaaaatgaaaaagtgggtcagttcatcgagaaaggctaccgtaccgcgcgtcgacataccggcgcatacatcaccatcacgcaaaatatcgtggacttcgactccccgaccgcctccagcgctgcacgcgctgcctgggggaactcatcgtacaaggccattctgaaacagtcagcgaaggaatttgccaagtataaccagctgtacccggatcagttcagcaagctggagaaagacatgattaacggcttcggttcggccaaagagcagtggttctcctcttttatgctgcaggtggaagcgaactgctcctggcaccgcctgttcgtcgacccgctcagccgggcgatgtactcctcgaaaggcccggattttgagtacatgaaagcacgccggcaggagggggtcgatatccacgatgcggtgtacggcctcgcgtgtcgcaactttaaagacgaaatggctgagcttgaatcccgaataccggtgaatgacatggaggataaacagtga

SEQ ID NO: 266150 - DNA, 198 bp, Klebsiella pneumoniae
atgaatatctatcttgagccaggcaccagcaatgtgtttgttctctccccggaatctccgggggaagggtacgaatacattggtgaggtcagtgatgatatatcactgacctctgtcattcctggtgcgatttatgaggttattggtgcctttagtcaggaactgctatcaaccggttttgaaatatccataagataa

SEQ ID NO: 266151 - DNA, 981 bp, Klebsiella pneumoniae
atgagccatcaactcaccttcgccgatagtgaattcagcactaagcgccgtcagacccgaaaagagattttcctctcccgcatggagcagattctgccatggcaaaacatggtggaagtcatcgagccgttttatcccaaggcgggcaatggccgacggccctatccgctggagaccatgctgcgtattcactgcatgcagcattggtacaacctgagcgacggtgccatggaagatgccctgtacgaaatcgcctccatgcgcctgtttgcccgattatccctggatagcgccctgccggatcgcaccaccatcatgaatttccgccacctgctcgagcagcatcaactggcccgtcaattgttcaagaccatcaatcgctggctggccgaagcaggcgtcatgatgacccaaggcactttggtggatgccaccatcattgaggcacccagctctaccaagaacaaagagcagcaacgcgatccggagatgcatcagaccaagaaaggcaataagtggcactttggcatgaaggcccacattggtgtcgatgccaagagtggcctgacccacagcctagtcaccaccgcggccaacgagcatgacctcaatcagctgggtaatctgcttcatggagaggagcaatttgtctcagccgatgccggctaccaaggagcgccacagcgcgaggagctggccgaggtggatgtggactggctgatcgccgagcgtcccggcaaggtaaaaaccttgaagcagcatccgcgcaagaacaaaacggccatcaacatcgaatacatgaaagccagcatccgtgccagggtggagcacccgtttcgcatcatcaagcggcagttcggcttcgtgaaagccagatacaaagggctgctgaaaaacgataaccaactggcgatgttattcaccctggccaacctgtttcgggtggaccaaatgatacgtcagtgggagagatctcagtaa

SEQ ID NO: 266152 - DNA, 465 bp, Klebsiella pneumoniae; identical to SEQ ID NO: 210888

SEQ ID NO: 266153 - DNA, 186 bp, Klebsiella pneumoniae; identical to SEQ ID NO: 210889

SEQ ID NO: 266154 - DNA, 363 bp, Klebsiella pneumoniae; identical to SEQ ID NO: 210890

SEQ ID NO: 266155 - DNA, 528 bp, Klebsiella pneumoniae; identical to SEQ ID NO: 210891

SEQ ID NO: 266156 - DNA, 276 bp, Klebsiella pneumoniae; identical to SEQ ID NO: 135271

SEQ ID NO: 266157 - DNA, 1119 bp, Klebsiella pneumoniae
atgaaatcacgcgcagcagtggccttcggccccggtcagccgttaaaaatcgttgagatcgacgtcgcgccgccgaaaaaaggcgaagttctggtgaaaatcacccacaccggggtgtgtcataccgatgccttcaccctctccggtgacgatccggaaggtgtcttcccggcggtgctgggccatgagggcggcgggattgtcgtggaagtaggcgagggcgtcaccagccttaagccgggcgatcacgtcattccgctgtataccgccgaatgtggcgagtgcaaattctgtaagtcgggtaaaaccaacctctgtcaggcggtgcgtgccacccagggtaaaggactgatgccggacggcaccactcgtttctcgtacaatggcgaaccgatctatcactatatgggcaccagcactttcagcgaatatacggtttgcgccgagatttcgctggcgaaagtcaatccgcaggcgcctttggataaagtgtgcctgctgggctgcggcgtaaccaccggtatcggcgcggtgcataacacggcgaaggtcaaggctggggatagcgtcgcggtctttggtctgggcggcattggtctggcggtgatccagggcgcggtgcaggcgcaggccgggcgcattctggcggttgataccaacccggataaattcactctcgctaaagagatgggcgcgaccgattttatcaatccgaacgactacgataagccgattcaggatgtgattgttgagctgaccgacggcggggtggatttcagcttcgagtgcatcggcaatgtaaatgtgatgcgcgcggcgctggagtgctgccataaaggctggggtgagagcgtgatcatcggtgtagccggcgccgggcaggagatcaagacccgtccgttccagctggtgaccggccgcgggtggcgcggttccgccttcggcggcgtaaaagggcgcagtcagctgccgggcatggtggaagacgccatggcgggtaaaattcgcctcgatccgtttattacccatcgcctgccgctggagcagattaacgaggcctttgatctgatgcatgaaggtaaatcgattcgcaccgtgatccactttggcgaccagtaa

SEQ ID NO: 266158 - DNA, 2373 bp, Klebsiella pneumoniae; identical to SEQ ID NO: 210894

SEQ ID NO: 266159 - DNA, 924 bp, Klebsiella pneumoniae; identical to SEQ ID NO: 210895

SEQ ID NO: 266160 - DNA, 621 bp, Klebsiella pneumoniae; identical to SEQ ID NO: 210896

SEQ ID NO: 266161 - DNA, 741 bp, Klebsiella pneumoniae; identical to SEQ ID NO: 210897

SEQ ID NO: 266162 - DNA, 1506 bp, Klebsiella pneumoniae; identical to SEQ ID NO: 210899

SEQ ID NO: 266163 - DNA, 1089 bp, Klebsiella pneumoniae; identical to SEQ ID NO: 210900

SEQ ID NO: 266164 - DNA, 1845 bp, Klebsiella pneumoniae; identical to SEQ ID NO: 210901

SEQ ID NO: 266165 - DNA, 579 bp, Klebsiella pneumoniae; identical to SEQ ID NO: 210902

SEQ ID NO: 266166 - DNA, 1005 bp, Klebsiella pneumoniae; identical to SEQ ID NO: 210904

SEQ ID NO: 266167 - DNA, 597 bp, Klebsiella pneumoniae; identical to SEQ ID NO: 210905

SEQ ID NO: 266168 - DNA, 669 bp, Klebsiella pneumoniae; identical to SEQ ID NO: 210906

SEQ ID NO: 266169 - DNA, 897 bp, Klebsiella pneumoniae; identical to SEQ ID NO: 210907

SEQ ID NO: 266170 - DNA, 870 bp, Klebsiella pneumoniae; identical to SEQ ID NO: 210908

SEQ ID NO: 266171 - DNA, 1167 bp, Klebsiella pneumoniae; identical to SEQ ID NO: 210909

SEQ ID NO: 266172 - DNA, 570 bp, Klebsiella pneumoniae; identical to SEQ ID NO: 135289

SEQ ID NO: 266173 - DNA, 1962 bp, Klebsiella pneumoniae; identical to SEQ ID NO: 210911

SEQ ID NO: 266174 - DNA, 231 bp, Klebsiella pneumoniae; identical to SEQ ID NO: 210912

SEQ ID NO: 266175 - DNA, 285 bp, Klebsiella pneumoniae; identical to SEQ ID NO: 210913

SEQ ID NO: 266176 - DNA, 126 bp, Klebsiella pneumoniae; identical to SEQ ID NO: 135293

SEQ ID NO: 266177 - DNA, 1011 bp, Klebsiella pneumoniae; identical to SEQ ID NO: 210915

SEQ ID NO: 266178 - DNA, 1398 bp, Klebsiella pneumoniae; identical to SEQ ID NO: 210916

SEQ ID NO: 266179 - DNA, 1413 bp, Klebsiella pneumoniae; identical to SEQ ID NO: 210917

SEQ ID NO: 266180 - DNA, 1146 bp, Klebsiella pneumoniae; identical to SEQ ID NO: 210918

SEQ ID NO: 266181 - DNA, 1014 bp, Klebsiella pneumoniae; identical to SEQ ID NO: 210919

SEQ ID NO: 266182 - DNA, 930 bp, Klebsiella pneumoniae; identical to SEQ ID NO: 210920

SEQ ID NO: 266183 - DNA, 807 bp, Klebsiella pneumoniae; identical to SEQ ID NO: 210921

SEQ ID NO: 266184 - DNA, 1428 bp, Klebsiella pneumoniae; identical to SEQ ID NO: 210922

SEQ ID NO: 266185 - DNA, 123 bp, Klebsiella pneumoniae; identical to SEQ ID NO: 210923

SEQ ID NO: 266186 - DNA, 174 bp, Klebsiella pneumoniae; identical to SEQ ID NO: 138629

SEQ ID NO: 266187 - DNA, 750 bp, Klebsiella pneumoniae; identical to SEQ ID NO: 210925

SEQ ID NO: 266188 - DNA, 1434 bp, Klebsiella pneumoniae; identical to SEQ ID NO: 210926

SEQ ID NO: 266189 - DNA, 1599 bp, Klebsiella pneumoniae; identical to SEQ ID NO: 210927

SEQ ID NO: 266190 - DNA, 234 bp, Klebsiella pneumoniae; identical to SEQ ID NO: 210928

SEQ ID NO: 266191 - DNA, 450 bp, Klebsiella pneumoniae
atgaacgcgtcgctcactctcgcctgcctgatcgccgccggcgttggcctggtagtgcagaacactctgatggtgcgcatcacccaggcggcgtcgacaatccttatcgctatgctgctcaattcgctggtcgggatcgttatcttcgtgacgatgttactgctgcgccagggcgtcgccggctttcaggagctggccctgagcgtgaagtggtggacgctgatccccggcctgctggggtcctttttcgtcttcgccagcatcagcggttatcaaaacgttggcgcggcgacgaccattgcggtactggtggccagccagctggtgggcgggttgattatggatttagttcgcgcccacggcgtgccggtgcgggcgctgatcggaccgttatgcggggcggtgatgctggtggtgggcgcctggctggtggccagacgccagttctga

SEQ ID NO: 266192 - DNA, 519 bp, Klebsiella pneumoniae; identical to SEQ ID NO: 210930

SEQ ID NO: 266193 - DNA, 582 bp, Klebsiella pneumoniae; identical to SEQ ID NO: 210931

SEQ ID NO: 266194 - DNA, 1038 bp, Klebsiella pneumoniae; identical to SEQ ID NO: 210932

SEQ ID NO: 266195 - DNA, 936 bp, Klebsiella pneumoniae; identical to SEQ ID NO: 210933

SEQ ID NO: 266196 - DNA, 300 bp, Klebsiella pneumoniae; identical to SEQ ID NO: 210934

SEQ ID NO: 266197 - DNA, 1737 bp, Klebsiella pneumoniae; identical to SEQ ID NO: 210935

SEQ ID NO: 266198 - DNA, 2106 bp, Klebsiella pneumoniae; identical to SEQ ID NO: 210936

SEQ ID NO: 266199 - DNA, 1062 bp, Klebsiella pneumoniae; identical to SEQ ID NO: 210937

SEQ ID NO: 266200 - DNA, 222 bp, Klebsiella pneumoniae; identical to SEQ ID NO: 135506

SEQ ID NO: 266201 - DNA, 1455 bp, Klebsiella pneumoniae; identical to SEQ ID NO: 210939

SEQ ID NO: 266202 - DNA, 888 bp, Klebsiella pneumoniae; identical to SEQ ID NO: 210940

SEQ ID NO: 266203 - DNA, 552 bp, Klebsiella pneumoniae; identical to SEQ ID NO: 210941

SEQ ID NO: 266204 - DNA, 1008 bp, Klebsiella pneumoniae; identical to SEQ ID NO: 210942

SEQ ID NO: 266205 - DNA, 1122 bp, Klebsiella pneumoniae; identical to SEQ ID NO: 210943

SEQ ID NO: 266206 - DNA, 1314 bp, Klebsiella pneumoniae; identical to SEQ ID NO: 210944

SEQ ID NO: 266207 - DNA, 933 bp, Klebsiella pneumoniae; identical to SEQ ID NO: 210945

SEQ ID NO: 266208 - DNA, 510 bp, Klebsiella pneumoniae; identical to SEQ ID NO: 210946

SEQ ID NO: 266209 - DNA, 927 bp, Klebsiella pneumoniae; identical to SEQ ID NO: 210947

SEQ ID NO: 266210 - DNA, 780 bp, Klebsiella pneumoniae; identical to SEQ ID NO: 210948

SEQ ID NO: 266211 - DNA, 879 bp, Klebsiella pneumoniae; identical to SEQ ID NO: 210949

SEQ ID NO: 266212 - DNA, 618 bp, Klebsiella pneumoniae; identical to SEQ ID NO: 210950

SEQ ID NO: 266213 - DNA, 228 bp, Klebsiella pneumoniae; identical to SEQ ID NO: 210951

SEQ ID NO: 266214 - DNA, 1617 bp, Klebsiella pneumoniae; identical to SEQ ID NO: 210952

SEQ ID NO: 266215 - DNA, 1383 bp, Klebsiella pneumoniae; identical to SEQ ID NO: 210953

SEQ ID NO: 266216 - DNA, 1569 bp, Klebsiella pneumoniae; identical to SEQ ID NO: 210954

SEQ ID NO: 266217 - DNA, 825 bp, Klebsiella pneumoniae; identical to SEQ ID NO: 210955

SEQ ID NO: 266218 - DNA, 582 bp, Klebsiella pneumoniae; identical to SEQ ID NO: 210956

SEQ ID NO: 266219 - DNA, 702 bp, Klebsiella pneumoniae; identical to SEQ ID NO: 210957

SEQ ID NO: 266220 - DNA, 969 bp, Klebsiella pneumoniae; identical to SEQ ID NO: 210958

SEQ ID NO: 266221 - DNA, 1656 bp, Klebsiella pneumoniae; identical to SEQ ID NO: 210959

SEQ ID NO: 266222 - DNA, 846 bp, Klebsiella pneumoniae; identical to SEQ ID NO: 210960

SEQ ID NO: 266223 - DNA, 681 bp, Klebsiella pneumoniae; identical to SEQ ID NO: 210961

SEQ ID NO: 266224 - DNA, 696 bp, Klebsiella pneumoniae; identical to SEQ ID NO: 210962

SEQ ID NO: 266225 - DNA, 1545 bp, Klebsiella pneumoniae; identical to SEQ ID NO: 210963

SEQ ID NO: 266226 - DNA, 3741 bp, Klebsiella pneumoniae; identical to SEQ ID NO: 210964

SEQ ID NO: 266227 - DNA, 1383 bp, Klebsiella pneumoniae; identical to SEQ ID NO: 210965

SEQ ID NO: 266228 - DNA, 537 bp, Klebsiella pneumoniae; identical to SEQ ID NO: 210966

SEQ ID NO: 266229 - DNA, 1500 bp, Klebsiella pneumoniae; identical to SEQ ID NO: 210967

SEQ ID NO: 266230 - DNA, 798 bp, Klebsiella pneumoniae; identical to SEQ ID NO: 210968

SEQ ID NO: 266231 - DNA, 1119 bp, Klebsiella pneumoniae
atgactgccaccgtagagcaaatcgagagctggattgtggatgtcccgaccatccggccgcataaattgtcgatgaccaccatgggctgccagtcgctggtgattgtgcgccttacccgttccgacggcatctgcggcatcggcgaagccaccaccatcggcggcttgagctatggcgttgagagccccgaggccatcttgtcagcgatcacccattatctgacgccgctgttgaaagggcagccggccgataacctgaatgcgctgaccgcccgcatgaacggcgccattaaaggcaacacctttgcgaagtccgccatcgaaaccgcgctgctcgacgcccagggcaaagccttaggtctgccggtatcagccctgctcggcggcgcgctgcaaacggcgttgccggtgctgtggaccttagccagcggcgataccgcgaaagatatcgctgaaggagaaaaactgttggccgaaggccgccaccgggcgttcaaactgaagatcggcgcgcgtgaactcgccaccgacctgcgtcatacccgcgccatcgttgaagcgttaggcgaccgcgccagcatccgtgtcgacgtcaaccaggcctgggacgccgccaccggcgcaaaaggctgccgcgaactggcggcgatgggcgtcgatcttatcgaacagccggtcagcgcccatgataatgccgccctggtgcggttaagccagcaaattgaaaccgcgatcctcgcggatgaagcggtcgcgaccgcttacgatggttatcagctggcgcagcagggctttaccggcgcttacgcgctgaaaatcgccaaagccggggggccgaacagcgtgctggcgctggcccgcgtcgcgcaggcggcagggattggcctgtacggcggcaccatgctggaaggcaccgtagggaccgtggcttctctgcacgcctggtcgacgctgccgctgcagtggggtaccgagatgttcggcccgctgttgctgaaagacgatattgtcagcgtgccgctcacctttgccgacggtcaggtggcgctgccgcaaacgccgggccttggcgtcgagctggatgaagacaaactgcatttttatacccgccagccgtag

SEQ ID NO: 266232 - DNA, 291 bp, Klebsiella pneumoniae; identical to SEQ ID NO: 137544

SEQ ID NO: 266233 - DNA, 927 bp, Klebsiella pneumoniae; identical to SEQ ID NO: 210971

SEQ ID NO: 266234 - DNA, 1383 bp, Klebsiella pneumoniae; identical to SEQ ID NO: 210972

SEQ ID NO: 266235 - DNA, 486 bp, Klebsiella pneumoniae; identical to SEQ ID NO: 210973

SEQ ID NO: 266236 - DNA, 1017 bp, Klebsiella pneumoniae
atgaccttcaatattgctcttaattttgaggacggcgtaacccgctttattcagtgccatgccggagagaaagtcctggatgccgcctatcgccagagggtgaatctgccgatggactgctcggacggcgtttgcggtacctgcaaatgccactgcgccagcggtgagtacgacctgggcgaagattatctcgacgaggcattaagcgacgacgaagcgcagaatcgccaggtgctgacctgccagatggtcccgaccagcgactgcgtgatcgatgtgccggtggccgccgcgcagtgtaaaaccgcgctgaccaacaccggggcgcaggtacgacaggtgaatttactgtccgataccgccatcgaactggtggtcgccctcgatgagccgctggccttcctgccggggcagtacgtcaacattcaggtgccgggcacgcctcatgtccgcgcctactcattcagctcgcaaccggggtccctcgaagggcgttttctgatccgtaacgtgcctggcgggatgatgagccagtggttaacccagcgggcgcggcccggcgatcgtcttaccctcagcggcccgatgggcagcttctatctgcgccacggcgaacgtccgctgctgatgctggcgggcggtaccggcctggcgccgctgctctccatgctccataccctgcagacacagggcagccagcgtccggtgatgctgctgtacggtgttactcgtgactgcgatctggtgaaaaccgacgcgctggatacctttattcaacagttgacggggtatcgttggctaccggtggtggccgatgaaaacagcacttgcccgcagcgcggctttgtcaccgaccatctcgacgacgcgatgctgaacaacggcgacgtggacatctatctctgcggcccgccgccgatggttaacgcggttgccacggcgttgcgcgaccgcgggatcaccccggcggggttctggtatgagaaatttatcgccagccagagcgcggcggcataa

SEQ ID NO: 266237 - DNA, 774 bp, Klebsiella pneumoniae; identical to SEQ ID NO: 210975

SEQ ID NO: 266238 - DNA, 879 bp, Klebsiella pneumoniae; identical to SEQ ID NO: 210976

SEQ ID NO: 266239 - DNA, 588 bp, Klebsiella pneumoniae; identical to SEQ ID NO: 210977

SEQ ID NO: 266240 - DNA, 2412 bp, Klebsiella pneumoniae; identical to SEQ ID NO: 210978

SEQ ID NO: 266241 - DNA, 885 bp, Klebsiella pneumoniae; identical to SEQ ID NO: 210979

SEQ ID NO: 266242 - DNA, 657 bp, Klebsiella pneumoniae; identical to SEQ ID NO: 210980

SEQ ID NO: 266243 - DNA, 441 bp, Klebsiella pneumoniae; identical to SEQ ID NO: 136857

SEQ ID NO: 266244 - DNA, 1155 bp, Klebsiella pneumoniae; identical to SEQ ID NO: 210983

SEQ ID NO: 266245 - DNA, 1092 bp, Klebsiella pneumoniae; identical to SEQ ID NO: 210984

SEQ ID NO: 266246 - DNA, 987 bp, Klebsiella pneumoniae; identical to SEQ ID NO: 210985

SEQ ID NO: 266247 - DNA, 1617 bp, Klebsiella pneumoniae; identical to SEQ ID NO: 210986

SEQ ID NO: 266248 - DNA, 849 bp, Klebsiella pneumoniae; identical to SEQ ID NO: 210987

SEQ ID NO: 266249 - DNA, 945 bp, Klebsiella pneumoniae; identical to SEQ ID NO: 210988

SEQ ID NO: 266250 - DNA, 1623 bp, Klebsiella pneumoniae; identical to SEQ ID NO: 210989

SEQ ID NO: 266251 - DNA, 1011 bp, Klebsiella pneumoniae; identical to SEQ ID NO: 210990

SEQ ID NO: 266252 - DNA, 600 bp, Klebsiella pneumoniae; identical to SEQ ID NO: 136847

SEQ ID NO: 266253 - DNA, 954 bp, Klebsiella pneumoniae
atgcctgatacccccttaatccaacagattcgtaccgcctcgcggttaatggtgcgcgagctgggctttatgagcaccacgctggccgccacccattattcaccttcggcggtgcaaaccctgcttgaggtatcgatgaggggggagatgacggccgcgcagctggtcacgttgctgggactggaaaaatcaagcgtcagccggatggtctctcgtctgctggcggctggtgagctggaggagcgtccttgcgcggaggatgcgcgcgcgaaatcactcgccctgacggcaaaggggcacgatacggtggcgaaaattaacgcctggggtacccgtcaggtggtggaggcgttagaccatctggatgagacgcagcagcaaactgtcgccactggactggcggcctatgcccgggcgctggcgcagtgtcgggatagcgcgctcgcggatacggctccgcaaatttcgctgatgaccggctaccagccggggatgatcggccggatagcccagatgcacggggagtattacgcccgtcatcatgactttggcgctttttttgaaggcaaggtcgccagcggcgtagcggaatttgccacccggctctcctccccggccaaccagatctggctggcgatccgcgaagggaaaatcgtcggctcgctggctatcgatggcgaggacctcggccagcaggaggcgcatttgcgctggttcattctcgatgacagctgccggggaaccggcattggcaggcggctcctcagcgaggcgatggctttctgcgatagtcgccagtttagcgcggtgcagctgtggacctttaaagggttggacgcggcccgcaaactgtatgaatcctttggtttcacgttaatccgagaatggcagggggagcagtggggaaaggtaatgaccgagcagcagtttacccggtccggaaacaccggctaa

SEQ ID NO: 266254 - DNA, 543 bp, Klebsiella pneumoniae
atgcaaatacccaccgggcgccgctgccgcgtgggaatcggcccaccttgccaggcgctgctgccgtgtggaaatccgcccatcttgccgggcgccgctgccgtgtggaaatccgcccatcttgccgggcgccgctgccgcgtgggaatcggcccaccttgccgggcgccgctgccgtgtggaaatccgcccatcttgccgggcgccgctgccgcgtggaaatccgcccatcttgccgggcgccgctgccgcgtgggaatcggcccaccttgccaggcgccgctgccacgtgggaatcggcccatcttgccgggcgccgctgccgcgtgggaatcggcccaccttgccgggcgccgctgccgtgtggaaatcggcccaccttgccaggcgccgctgccgtgtgggaatgcacccaccttcctgacggaaattaaaaaaacctgtcaaatgacaggctcaaaggtgctggtttatgtcagacgggattttgcttatcgagtattgagaacaaaaacttccctgaatcatcaatacggtacttag

SEQ ID NO: 266255 - DNA, 741 bp, Klebsiella pneumoniae
atgaaaaaaattaacccgttatttatttcaggctgtctgctgttggtcgcccccgcgatgtcagcgacccttagcggaacgctggcgccgacagtggttcccctgaccaatggcggtcaggcaaatattgccgtgagtaacaccgatccgaatctgttcacagtacctggagatcgcatcacggcgataaacagcctggacggcggtctgacaaaccaggagcagaccgacagcggcggcgccattctggcgaccgtcagtaaaaaaccattcaccttcattgtggaaaccgaacgcggactgaacttctccattcgtgccgtgccccgtgcgggctcaggccggacaattcagctggtcagcgagctggcgggtacccccggtccggcaaaagcctgggaggagtcgaacccctatgaatcgttactggtttcgctgaatcgcgccgtgcgccagggcagcgtacccgatgagtatcagtctgtccccgtcacttctgaagtgctgcaggtgccggctggtctgcgcgccactgccgatcgggtctgggtcggtcatcacctgaaagttgtccgttacagtctggacaatgtctccctgtcggcccgtatggttcgtgaaagcgatttctggcagcccggaacacgtgccgtcatgttcagtaccccggcaggcctgctgactgccggtggtcgcatgcagatctgggtcacgacgtcagatgaaggagtggagcgctga

SEQ ID NO: 266256 - DNA, 879 bp, Klebsiella pneumoniae; identical to SEQ ID NO: 52347

SEQ ID NO: 266257 - DNA, 228 bp, Klebsiella pneumoniae; identical to SEQ ID NO: 215004

SEQ ID NO: 266258 - DNA, 348 bp, Klebsiella pneumoniae; identical to SEQ ID NO: 248286

SEQ ID NO: 266259 - DNA, 219 bp, Klebsiella pneumoniae; identical to SEQ ID NO: 222344

SEQ ID NO: 266260 - DNA, 534 bp, Klebsiella pneumoniae; identical to SEQ ID NO: 214926

SEQ ID NO: 266261 - DNA, 192 bp, Klebsiella pneumoniae
gtgatcctgttcaagagaatatttgtatatctctggattaatgcctgcaccatcaataacaatcgtctgttgttcttcgagtccaaccaacttagccagtttttttctgtctcgatcatgttcaaacataaatatacagcgcttattgttggctatatatttatatgcggcaatagtaaactttcgcaataa

SEQ ID NO: 266262 - DNA, 594 bp, Klebsiella pneumoniae
atgagctcagccaatcgactggcgagcggcatcgcattcttcgcatcccgcctctggcggatgcaggaagatcaacggatctcggcccagttgacccagggctgtcgccacaatgtcgcgggagcggatcaaccgagcaaaggcatgaccgactggaccttccttctgaaggctcttctccttgagccacctgtccgccaaggcaaagcgctcacagcagtggtcattctcgagataatcgacgcgtaccaacttgccatcctgaagaatggtgcagtgtctcggcaccccatagggaacctttgccatcaactcggcaagatgcagcgtcgtgttggcatcgtgtcccacgccgaggagaagtacctgcccatcgagttcatggacacgggcgaccgggcttgcaggcgagtgaggtggcaggggcaatggatcagagatgatctgctctgcctgtggccccgctgccgcaaaggcaaatggatgggcgctgcgctttacatttggcaggcgccagaatgtgtcagagacaactccaaggtccggtgtaacgggcgacgtggcaggatcgaacggctcgtcgtccagacctga

SEQ ID NO: 266263 - DNA, 600 bp, Klebsiella pneumoniae; identical to SEQ ID NO: 227469

SEQ ID NO: 266264 - DNA, 600 bp, Klebsiella pneumoniae; identical to SEQ ID NO: 251940

SEQ ID NO: 266265 - DNA, 396 bp, Klebsiella pneumoniae
atgtctaacactaacgccaattttgagatgaccgggatcctgttagggcaagaagtccgtaaacgtagaactgctcaggagaagatagccattatccagcagacgatggagccgggcatgaatgtctcccatgtcgctcgcctgcatggtatccagcccagcctgctgtttaagtggaagaagcaatatcaggaaggcagcctcaccgccgttgcggccggagaggacgtcgtgcctgcatctgagcttactgctgctctgaagcaagtccgggagcttcagcgccttctgggcaagaagacgatggaagttgagatcctgaaagaagccgtggagtacggccagtcgcgaaaatggatagcgcacgcgcccttgttgccaaaggacggggaatag

SEQ ID NO: 266266 - DNA, 246 bp, Klebsiella pneumoniae; identical to SEQ ID NO: 229811

SEQ ID NO: 266267 - DNA, 924 bp, Klebsiella pneumoniae; identical to SEQ ID NO: 226163

SEQ ID NO: 266268 - DNA, 600 bp, Klebsiella pneumoniae; identical to SEQ ID NO: 251940

SEQ ID NO: 266269 - DNA, 285 bp, Klebsiella pneumoniae; identical to SEQ ID NO: 70433

SEQ ID NO: 266270 - DNA, 717 bp, Klebsiella pneumoniae
atgaataccgtaaagcctgaatccattgccctgttttgcctgacgcccggcggcgtgcggctggcaaaacggctggcggccatgctgccgcttacctgttacaccagcgaagcgctgcaggaagaggggtttatccccttcaacggcggctttgccagcgctgcccgcgaggcgttcagcagcttctcggcgttgatttttatcggcgccaccgggattgccgtgcgggtgctggccccactggtgaatgacaagctcagcgacccggcggtggtggtgattgatgagcgcgcccggcacgtcatcagcttgctctccggccatgccgggggggccaatgcgctaacccgctatctcgccgggatgctcgacgccgacccggtgatcaccaccgccaccgacgtcaacgagctggccgccctcgacacgctggccttccagctgaacgcccggatgaccgattttcgcgcggcggtgaaaaccgttaaccagatgctggtgagcggtaagcgggtggggctgtggtgcgacggcgaattcatcggggcgctaagccgctgcgaccggcgctgccgccgctgccggtgcctcactggaagctggtgccccagcgggtggtggcggggatcggctgtcggcgcgacaccccctgcgcgctgctctgtacgttgctggatcgccagcttgccgctcagcgtcttgacccgctggcgctga

SEQ ID NO: 266271 - DNA, 498 bp, Klebsiella pneumoniae
atgctggaacacgatcatcagtaccgccgccccggcccccaggcggaccgcctccagcaccagattggagtcgttcaggcgcaggcccgcggggacgatcggcttttccagccccgcctggctgcaccaggcgttccaggactccatggaaaaaatgatatcgctggcggcgatcgcctgcggggtggtcggcaggttaccgccgcgatagccgggggcggcgaccaccagctgttcatcggcaaacagatgccggctttccattccctcccaatcgccttgccccatgcgaatggccagatcgataccctcctgttgcaggttaaccaccgccaggctggtcagcaggcgcaccgcgatctgcggatgccgcgtctgaaagcgcgccagccgaggcagcagccagtggcagccaaaggaggggagcgtcgccagggtcacttccagggtgcggggtttgatctgcaccatgcgcgtggcgtcggcgatgtgctgtaa

SEQ ID NO: 266272 - DNA, 171 bp, Klebsiella pneumoniae; identical to SEQ ID NO: 138617

SEQ ID NO: 266273 - DNA, 195 bp, Klebsiella pneumoniae; identical to SEQ ID NO: 215003

SEQ ID NO: 266274 - DNA, 366 bp, Klebsiella pneumoniae; identical to SEQ ID NO: 218047

SEQ ID NO: 266275 - DNA, 849 bp, Klebsiella pneumoniae
ttgcttgcacaaagtgttgaactagaatatattgttgtcgttaataataactcttcggatgcaacgaaggattatttagatagtaatcagaataaaaaaatcatgccaattcatctaagcacaaatacgggaggtgctggtggattttctgccggtataagttttgctcacggacttggtgtggattatatttggataatggatgatgatgctatcccagatattaatgccttaagtgaattacttttagctgacgagcacctcgaaaaaaaacatattgaaagtggattcttgtgtagtcacgttgttagtgatgataatatttgtatgaacgtccccggaatctctaagaaaaccaatgagactggttacttagattggccagcattcgcttctgtcggtattgtaggagttgataaggctactttcgtctcggtgttatttaggcggaatgtcataagcgaggttgggttacctgtcaaggagatgtttatttggggagatgatactgaatatacatggaggataagtaaaagatataaatgctattatgtggctaatagtattgttaaccataagcgtgtgttggctaaatcgctttcattatctgttgaggagagtatttctcgcattccatggtatggctttttgtatagaaatagtttttataatattcggaagcatgggaatattaaagagtttctgtcttatctgaatcatgtttctaaggactttattagtatactacttcattcaaaaaaatataaaatgaagaagttatatactcttttccacggcgttcttagtggtttgttatttaatccaaaaattgattatcctaaaaagtaa

SEQ ID NO: 266276 - DNA, 192 bp, Klebsiella pneumoniae
atggatttagtcctgttttttatcagaataggaatagccatagtgattataaccatagccataatagctgctggcctttttcacaatcccattgaggatgcaacctttcattatcaccccactttgttcgaagcgcttcatactgacttcgatttctttaactgtattcacctcaaaacgtgctacaagtaa

SEQ ID NO: 266277 - DNA, 690 bp, Klebsiella pneumoniae
atgagtatgctccttaatttctttcctaatcctaacgctcgattggttttgttattttcagttattttgtccacattactatatctcgtttggattttatattttttattacctaaaatacctgccaaaaaccgtggattaatcttggcaatatcgttatcttttctacaaataggttttttgtcgcaattcctgaggcaagaaatagcaactcccttgattctcatggctatatttctgtgggaggataacaaaaaaaaacaatctttactcgtcttatttatatcaataatatttcattctagttctctttttatctttctattttacctgatattttcaagactcagaaaattatatatattagcaggtgctgttacatttcttgtcatggtactcgttttaaactttagacctactttattgatatcgctatttgatgcactacacctatctttttttggcggtaaattggtgtattatgtcgctgcatctaaaaactctattattgatgcagtgaaaaatggaaagttcttttttataatactaatacttatactggtaagatggagaacaataaaagaaaatagtctcaatttggataataatgactggctgtttaaaattgccaaattttctttttggggatgtgtatatacacaatggaaaaagaaacccaggaaccactaa

SEQ ID NO: 266278 - DNA, 831 bp, Klebsiella pneumoniae
atggttaagcggttctctcaaagatatggctatgtaaaggttgaagatgtttttcagttgaatgatttaaacgaagaaaccaggaaggcgatttggaattatctatatctaggtctgttcagtaatagaggtttacaagacaggccgacgcgatgcgcgcagagtatttggatacattattttaataaccctgctgataatattcccgcttatgatagggattttagatatgagaattccctccttacaacaattaaggaatatatctatgaggctaaatggtttaatgttttagatttgttagaggagcttctggattatacatcagatttttatcagtttgatttaggagaatacattaatgctgtctttgaaaaatatggtgtgggctatcgggtaattgatggactaattactcctatatcagatgaagtggaaatcgaaagtattgaaggtgcgttagctaataacacggaatccgctagaaatcatttcacaagagcgctagagttaatggcagatagagagcagcctgattatagaaactcaatcaaagaatctatctctgccatagaatcattgtgcaagaagatctctggtaatgagaaagggactcttggggattgccttaaaactattgaggataaaggacatattcatccagcaatgaaacgagcattccaacagctatatgggtatacaagtgaccagggtggaatacgtcacgcgttaacagatgatagtgaggagcccacattagaagaagctcgttatatgctggtgatatgtagcgcctttagtaattatcttgtgtctaaaatggctgattaa

SEQ ID NO: 266279 - DNA, 357 bp, Klebsiella pneumoniae
atgctggcccatcgcgctcagctgttcttcttccagcagcccatcgctactggcaaccaccgcctctttcagaccaaatttttgcttgagctgttgttcgagccacaggttctcgttgtagtcatagttgatggcgatggtgacaatgccctgctcacggccgcgcttcagcaggcgactaatggtggtgcgatagatccccagctcgcgagcgatttgcgcctgggtcatatcctgctcgtaatagagctgggcgattttgacaatcaaccggatatcgtcactgttttccatagtcatctgctggctcctgcacatttgtgcaaatcgcgggtttgtgctgttgatctgatataa

SEQ ID NO: 266280 - DNA, 2331 bp, Klebsiella pneumoniae
atggcaattactgatacccaacagactgcgcagtttgcggccagtgcagcagttagcgcggctgaagctaagcagtatgcgctaagcatagaaaagccaatcattgatattgctgaatctgtcgatgaggctaagaatgccgctatagcttcaggaatgtatctcgatgaaacgaaagacattgccactggattatcagcgaggattgatttcgagatttccgaaaaagaagccgaattcgaatctcagatgcaaagtcaaaggagtgaatttgaattagcccagcagactaaagaagatgcattcttaacatctcaggtgcaaatggattctgattttaacttatctcagactgagaaagaagatcgttttcaacaattccttatctcttcaggctatgtatttctcggcggctacgaagatggtccctttcagttcagtgcccgtaaccagtacattcgttacgacaaccagtattaccgcctgaatgctgctactgacgtcggctttacgaccaccggaaccgatgcagccagctttgcgaacgacgttactcacttcgttctgatggatggtgacacgcttcgccaaaacctgggttctgaagagagtggcttaggcgacgcactggtgatgcacagcaacggcctaactgtccggcaaatgcttgatgccagggatgcaatcagcgttatggagtttatccctgaggagttaaaacagtatattggccaggaaataaacgcggctacaacaattgcaaatgcgggagatttatatccgtatatagtcgcggcagatgctgccgcttatgccgctggtaaagcgctttatttccccgccggacagtaccctattagccagacttatgcgcaaactgcacgtgaggtatttggcgtgtttggggcgtcatttttggtgcctcacacttcgtttacaacgggttcctggcttcacgtatggcccgctaatagcgggcaacctcggcttatacgcaggggcatttcttacgatgggctaggcaactctcgcggggattatgtgggaggattccttttaggtaatggctgccacagctctgaaattagcggggtttttgccagaaactgctggtttggcggtcttcgagttaacccattgggggcatcgagggacatagtaaactttaagattgaccgcgtgtatctactcgactgcggttctgccgctaactacgcggggttctccatagaactgagcagcggaacaactgctattactgacggatctatccgtgatattgatatttcaggcacgaatgcagacagctccaacacagttggccctatggcgttcacgataaccactaacagcaaatctatgtttaacgtggtgatggagcgcttctttacagctacccggctgaacacgcatgttaagaccatatcaaactcacgtttttggtttaccggctgtgttatgcgccaattctctggtgagacacatgcctacataaatggcgtggatactaacggctatttcacaagtttaccccaggtctcattacaagcaggctatagaaaccgttttgagcagatgtattcccacggcgcattaaataatgcgggattgcagattgtagatggagttgagccggtgtttgaccagtggacattccagccaggacaaaatcaggacatgtctggaaactacttgaaggcattacaaatagactcgtgcgataacgcaattttccgggattgttctgtcagaaatattatcagtaccagttatgatgcgccgtggaaaaaagcattcacaaaatatatggttgataatggcactaacaccgcatgggagtcgtcaatgatgacaaacacgccagcggttctgcaccctctgaattactatagcgccctgacattaaaatcaggaagttcgacattatattacccaactaatgccgtatcttatggtgccgacatcgtatttacggcaagtaataatgcgttggttatgggattcccggcaacgagtaacacaactgacgaccaaaccgtacaatacccaattctttcaaatccaggtcaaggggtggtggattattattatctcactgcaaaagttaccatgacagcaggagatttaagcaactggtatctccgttttcagatgtttgctacatcgtggacgttaacaccgacggaactcaacagtgagtacataattaactgtcgattcgccgtgacgtcaagcactgttttaaatcgtctgattattcatataggtcacagttcagcggtatcctcagcgagcagttttacgctaaggaaggtgcgaacaagttcctga

SEQ ID NO: 266281 - DNA, 228 bp, Klebsiella pneumoniae
atgatgactatcagctacgatggctctatcgccaagaccaaatccggcacaaatatgcggcggccagcatggcccgccggttgctatattacatacaatagtgatacgtctgacgagtttcaccctgacgcatcaatagactatgtagatgctgtgggggctgtgactacgtatagtccggctgacttcgacgagatggcaagtgactggattgaattctcggaatga

SEQ ID NO: 266282 - DNA, 225 bp, Klebsiella pneumoniae
atgcttaggaaccgtacccagccactctacgccggaatctttcatcggagcatcagggttgaggcctttggtgacagcgtgggaaatcaccgcctgccgcttctctttgagcagttcgatcagtcgctgctgttgtgcaatcagcttgtcgatacgggcggtttcatagtcgaggaaggctactatggtttgctgctctgcgattggaggaaccacaaccattaa

SEQ ID NO: 266283 - DNA, 198 bp, Klebsiella pneumoniae
gtggagtacttcaacacgaagctggaaaacgtgaaagtggtaaaagtgaatccagtgatgcacgacgtcaaagatccttctttcgagaagcacaaccatcttgagcggatcgaactgcgctacgaaaaaatcacctggacctacaaagacggcaacatcattcattccgattcctggaacgaacgcactacggcgtaa

SEQ ID NO: 266284 - DNA, 396 bp, Klebsiella pneumoniae
atgaatccttcgttaaccgattcccgccgtcaggcgctgcgttcagcttcccactggtatgccgtgctaagcggcgagcgcgtcagcccacaacaggaagcgcgctggcaacagtggtatgaacaggatcaggataaccagtgggcctggcagcaggttgaaaacctgcgcaaccagcttggcggtgtgcctggcgacgttgccagccgggcgctgcacgatacccgcctcacttgtactgaggggcaaagtgaaaaaagttactttttgttgaaacgacagttagcaatatcccccgcttgcgggggccatacccaccaggagcaaacgcagaaagcccgagatacttctgctgtaccgggggctggcgacatttcaggcaacactcatagttga

SEQ ID NO: 266285 - DNA, 516 bp, Klebsiella pneumoniae
atggcatcactccagcaagtaccagaatggaaacagtggatcattcttttaggtcgctttactggaatgagagcaaatgaaatttgccagttgtatcatggtgatatcaagaaagttgatgatatctggtgtgccgtagttgatgaccttcatgaagggcaaactgtcaaaacaaataacagtagacgatgtgttcctttgcacctggagctgatttctaacggttttcttgagtacgtagaaaggtctaaaggtcgcctgttcccacaactaacatattacaaaggttcctacagccattattttacccgctggtttagtcgtttccgtaaaaaggcttcagtacctgaatttcactccctcaggcattacgttgccactgctttcaagaaagcaggtgttgcggaacagtttgcgggagcctttttggggcatgcaaatagttcgataacgtataatcgctatgggaaaacagttggagtgtcagacctttatgaattacttgtatgtttatag

SEQ ID NO: 266286 - DNA, 957 bp, Klebsiella pneumoniae
atgcactttaaattttacacaacgttaagatttatgaagattacaggtgatgattttaatgattttgagctccttccgggtgtaactctaataagagaccgggcgaagattagaaaaataatcaacaaagacatcaagccctttacaggaattattgaatacgagcatttatataatgcaaaccacataatttatgctgatcttcaagatgattttttttcgccatctacttcaagtgctgatgcagtgatgacttggcttttgtggatagacatgcttattagcacctcttggttgatcaaagataatggtatgctttgcgaaattgcatattgcaataaaactgatcgtaaaacatattcagaatggtctaacaatagtttgttaagtttatttacgatggcagatggtcatcgtcatattgatgttgagttcagcagaaacgacttgattaaatgggaggctataaaccatagagttcaaacccacctatacaataataactctaccgtttttgattcctttgttgattcaaaatattctcgatatggaagagcattaagctttataaaatcagccaagcgagatttcgatcctgcaatgaaaatctcccattattgcagcgcactcgagagtttattttcaacagatagctctgaactttcgcataaactatctgaacgaattgctatcttcttaaaagcatataactatgatcccatttgtacatttgatgaaataaagtcattttataacattcgctctaaagttactcatggtgatagtctaaaatcaactaaagttggtaaactaccagaagaaagtattaagcttgataattatttaagagagatcatgaatataataatagattctgatgaattgatgagtgtattcaatggcaataaagaatgcttcgaaacctatttcaagaaaaaattactacttggtagttaa

SEQ ID NO: 266287 - DNA, 687 bp, Klebsiella pneumoniae
atgaaaatttgtttttttgatatggaggggactttgcttgaaaagaactcatcttttgataatgggaaggttgcaccgagcgcgtggacagtacttgcaaaagaaatcagcgaagcctgtttttttgaagaagaaaaaacaaaagatttatggctggcaaataaatacatcagttacacacaatggatgaaggaaaccgtagaaatacaaatcaagcatggtatgaataaaaatcatttacaaactatattatctcaagcaaagatacaaagaggtgcggtagagcttattcattctttgaaaactcaagggtatttaacggtattaatatcgggaggatttaaagaattggcggacttgactcaaagacgcctaaaaatagatcatgcatatagcgcttgtgagtatttctttaatgatgatggtagcatcgaacatttcaatctattaccaaccgatgaggaaggtaaattagttttcatgaaacaccttgcgtccgaatataattcagaacttgaaaattgcattttcattggcgatggaaaaaatgatgtgtttatcgccaaaaatgtaggtacttccatcgccttcaatgcacaacgggaattaagagaagtatctacatttattgtagatcaagaaacacctgatttatcagtgattattgaccttattagagctctttga

SEQ ID NO: 266288 - DNA, 834 bp, Klebsiella pneumoniae
atgcaaattagtgctcaaaaagcaattgaatatggattcgtttgtgacagaaataataatagaatcacaacagatcattctaataaatcaagtgtggatctctctatcagagaaatcctttttaaagatgaaaaaaatcaggtaaggtctctcggaagaactttattaaaaccgcaagactcggcttttgtaatatcagaagaaatacttcatgtaccagagggctttattgcatatgtttttttaaagaatagattgtctcaaaagggctttcttgctctcaatactggtattatcgattcaggatataatggtccaatttcaacattgctaattaatttttcagcagtagaggaatatcttccaattactgatagcgagcaagataaatctttctttagagttgtgtttcacgaaattgaaaacaatccaaattatcaaccaattcctcctgcacctggttcttatgatgttgcagataaatataatacatataggacttaccgtgtttcagatataactaagtttccaaaaacttttttagaacccgtgatcctaaaagaacaaataagcaaagagttaactgagaaattatcaagtatatccatagctaaaatagggatggtaatcgcttttgttgggttattcctctcacttattccttttggcagagattactatttcgcagaaaaatttgatttgaatgaatttaatcaatataagttgcagtccgaagccaaaataaaagagttagaagaacaactggaaatagttaagggtaaaattggcactacaaacaaatcaaagagctctaataaggtcaataatcactga

SEQ ID NO: 266289 - DNA, 1206 bp, Klebsiella pneumoniae
atgtatcacacaaaaaaacaatttaaaggcacatgcccacactgcaataatgtaattgattatcacgaacttaaattccaaatggaaaatgacattggggaaatgctcgcaaaatgtcaaagttgcggggacacttttggtattcaatgtaagaatccagatgaatcgtatattgttagtggagctgataaaatagattacttggattatgagtgtgaatcaccatcaaacctcaaaaaactaacagtagcattcaaatataaaggtgatattttcagaaacaacccaaaatttgattttgaatcttataatatttacaaatgtcatagctgtgatgataacttagaaaaaatagcctacgaaagcatggcaagtgaatatcaagaatggggccagcaagtttatcaatacatatctgaagacatatcaggttatggatataatgcagaaaaatcaatactaaaaatcgatttgacttgctcctgtggtaaaaatcattctgctttgttctacaaaaagtttgaccattgcgatttttctgataacgattttttactcggaaatataagtaattgcgtttctctcgaagacagaatcgatggaaccattacgaaatctgattttatagaagccataaaaaaattaattgttaggtgggagctattatttgaaaaaacctatctaatattcccttacgttggtcatacaagatccgaaaattctgaactactagaattatggggcgaaatcatatcccaatcaagctcaaacaaacttaaaataatcactaaaactcaaacattgaactcttttaaaaaagcagtatcagaggtttttcatgattataacgttttaagcaaatttaaatttacgccacaagtgatagaagaagctattaaaaacactcgatttcatgcaaaaatttattgcggcgtaaatgataattatgtggaatgcctgagtggatcagccaatatcgcaacaggcccttcatttgaacaacttacttttaaaaagtatgatagttacgatatcttctatgaaaggtttttgaaagctttcgacactagtaaagtcgcagatgatgtatttagcatactagataataaaacaaccaataaatgccatgttcttttcgatcaatcagaaggttatcatcactcgcaacttgaaaagactaccctcatagcccttatcaaaagttaa

SEQ ID NO: 266290 - DNA, 900 bp, Klebsiella pneumoniae
atgactcaatttagcgctttcaactatacacacaatagagataaagccatcgctaacttaatcaacctaattgaagggatgacctgtgatggaaaattaagtgaaaaagaaatgattttccttgatacatggctgatggaatcagacgttctttcccaaaattatttcgtaaactgcatcagagataaaataagcgaaatcctttcggatggtgtagttgaaaaagttgaattagacgaattgaaagaactgctccatgaaatgcaacgcggcttgatggatactccaaacattgacttatactctgcagactctgacaagcatttgcttgaggggctatgtaaggggcttgcttctgactatcatttgagcgatgaagaaatcagctatttaaactggttcttatctacaaatgcagctttaaaaagcaattaccccggtaaacatctttacgaactggttcaatcaatcctgagtgatggagtgataacagacgaagagcgcaccaaattattacaagaaataaccgcttttacaggctcaaatatttctgagggtattgtggatgggtattccacaacttcacctgttgacctaattgatgagtttaatcctatagatagtaaagtttgcctcactggtaagtttctatgcggctcccgtagacaatgtgaaagtgaccttatgaagcttggttgccaaattgttgatcgtgttactcaagatttggactatttaattattggcgcccttagctcgaaggattggaaatttcaaagcttcggaagaaagatagaacaggctattgattatcgtgacaataaaggagttccactgaaaatcctcagcgaggaacactggcaagctctgatgcgtggtggtaattccataactcaatag

SEQ ID NO: 266291 - DNA, 615 bp, Klebsiella pneumoniae
atgtcaaacacaaaagagacccccgaggcgatctcaaaatacaacttcccatctcaaagtggtgggaaggaagcgataacgcgtatcctccaggcatacggattcagtaccagacaggctttatgcgaccatctaggggtatcacaaagcactatggcaaaccgttggatgcgcgatactttcccgcacgattggctcattgcatgccatcttgacacgggcgcaccgatgctttggttaactacagggcaaggctcacccacaacaaaagcagatggcgacaatggattgcctttgcaattaaaagaaatctcaaatggggttatttcatcctctgagcaagttcgctacgacgctcgccttttacctcaagacacaacggccccattcattgtgaagtttgaaaattcgctctatctcgtggacgagttcaggggagagatcaacgatggaatctggttgattgaattagatggctttatgagcatcagacaggtttaccgtcttccaggtgggcgcttacgcgtagagaatggccccgcatcctttgaatgcacaccatcggatattaaagccaatggcagagtgatcagcaaaataacatttactgaataa

SEQ ID NO: 266292 - DNA, 705 bp, Klebsiella pneumoniae
atggcgattatggttaatgattgtccacgttgcggaagtcagaaaattacatttaacattcagtatgggaattacattggggatcgacagataggtcttaataatataataagaatttatgaattatattgtatatgtcgacaatgcattcgtggcacaatttttattgctcagcctttagcaaaacaaaaatcctttgaaggagttgaatggcgttctggttttaattttaatgatataggcactatttcaggtacggttagtccagcggatttgaaagtaagccagcctcctgagtttctccctgagaaaataaatgatgcttttatagaaggggcaaaatgcctatccgttgggtgttacaacgctgctgcaacaatgtacaggctatgtctggatattgcgacaaaggaactgttaccgccggaggggcaggagcccggaagcagagtcagacgtagtttgggattgcgaatgggatggttgtttgataaccaggtcttacctcaggctatgagagatttagctgaatgcgtaaaagatgatggaaatgatggtgcccatgatggactccttgataaaacatctgcaattgacctagaggagtttacatatgtcttattagaacgcctatatacggaaaaggctcgcttagaagaggctaaattaagacgtcaaaaaaggcatgacaaaagcggctcgtaa

SEQ ID NO: 266293 - DNA, 288 bp, Klebsiella pneumoniae
atgatgaacacgggctatgcgctgcacccggctctcaaactcgacgcttgccgagtcctggctggcgacggctttcaggtattttgttgtgcggagttttgcaaacatctgccgacggatgcggccctgtttcgttctggccgtcacgcgacgcggctcgtaagccgtcccgtccgggttgcgctgcatcctgatatttttctgctggctgcggcgcagctgctgtgccagatcccgcatcatgcgcttacgtgcggcaggctccagttccgccagcaacgcatctaa

SEQ ID NO: 266294 - DNA, 690 bp, Klebsiella pneumoniae
atggacgatgagcaaaaaatttatttagaaacattagaagagcttaatacaagaagtaaaagcacaaggctaataacaattacttttatatacattcttttatttgcgactgcactagtattaaccgggatttttgcaataaaatcaaaaagcaacaatccaatatcaaattttatatcaagcatgattgatggtaacaatgaactctaccaagcaactaccattctaaatagctatacaaaagcaatggagaggttaacaaatactaaatcgaaaagccaaaatgataaaaacactgacatcaatgatgccaataacgccaataacgaaagaaccagactacagccaggcgacctaatttatttcaaaaaagataagtcagaaaaaatcgccgattcaattgcctctatattaattagcttttctgtccttctatttatagggtatgttactcgcatatttgttattttcaccaaatactacatgcaacttagcaatgattatgaaaatcaaagaatagcatacatgctatcccgtggggacctatcaaaattctcttctgttttagatgctttaagaaaccataatatcagctttgatagaaccccatccccacctcaagaaaaattaatcgcaggattaacggaagctttagtacaaacaaagagcaaactaaaaaatgaaaattaa

SEQ ID NO: 266295 - DNA, 1233 bp, Klebsiella pneumoniae; identical to SEQ ID NO: 226947

SEQ ID NO: 266296 - DNA, 579 bp, Klebsiella pneumoniae
atgttaattgataaagaaattacgtttaaaagagattttattatatttacattcacatgcatattcgccgtaactatatcaacaggttttatactatacttaccgatcctatttaaaaagtatgttttcttaaatgaacttgcaaactcaaacgttgcattaaaaattttatatttattgccattcttaggcggcgcgataatttttaaaatatacttaaaaagcagaaagtcaatcaaagcatttaacgacctcttattattaggaatcggcttctgtgggctttattcaattctattttttggtattgatgctcttgttaaaaatgaatatttttttaacgttaatagcgtaggaacttttagtattaagctgctctttatgatgtgtagtgtagcaaaagtagccataacatttagtgaattttgtgatgagcggaaaagagaaatcgaggataaaaagccaactataaaaaacttaaaagtagaaaacagccctatactatctaaagcaaaaatagggatatctctttcagtgctggcgcttgtattttatcatcttatcaaaaagaaaaattaa

SEQ ID NO: 266297 - DNA, 1101 bp, Klebsiella pneumoniae
atggaaagagtaaagtctatagtttacagacacttaaccaacgctgattttttcaacattaataagccaccgggcatggaattaggtggtggaggtcaagcttatatagattttccaacaagctcagtaacaccagcacaatggcacgaattttttacaggaataaatggagtttctgttcaacaagaaacacaagggccgagctggacattcccaatctatagtctcacattagataatggtcagaatccggcagttcagtctttgaaaatttatcagagaagacaacagtcagtaagtataactagccagaagcttttttcctctcgctcaaacagagtaagggcctggcacccacaatcaggcttccctatccccgtagataatacagatagatcacaatgccccgatggtctcatggtttatcttgccgctacctatgagggaaaagtatgggcggggtggtttttaaatgacggaacgacacaacttccccttaaaggtattccaccgcaatctattaactccatgttttcattaccggcagacgctgaaggatatagtggaataataaattttcacagcaatgattatctttacataaacccgttagataaatattatcctcttcaatctcaaggaacggaaacatatacttcaggggtatataaccctgcgaatgacgaatcaacatttattgatgacttatttaataatgataatagtcagttcgaagttctgagcaaggagtatattagaaaagtaaaagcaagaaacaaatccatcgttacaaaactgaagaatttatataataacacatgtcagataactggaaatcagtttgcctttcagaaaaaagatggtattaactacacagaggttcatcatcttatacccctcggtgaaggtggctctgacgacatccgaaatttgattgttgtcaacccattaattcataaaatgctacaccatgctacagttacaggtttaaacctggaaaatatttccatcgatgctcatggggtcggaactttacagattaatataaatgatttgccatatataataacatggcatccaaaacacacagcactcatttga

SEQ ID NO: 266298 - DNA, 1068 bp, Klebsiella pneumoniae
atgggttaccgttatataggttcaaaagtaaaagttattgataacgttattggaaaaatttctgaattatgcccctcaaaaggtcgggttgctgatcttatgtcaggcacaggtgtgatttcaacagaattgagaaaacgcgattacaaagtaaccgccaatgatctaatgacttattcatatcatcattctatcgttaacctaaaattctctagcgcacctaattttgagaagttaatagcatttatatcagattttcatgaagtaaaacctgagctttcaccatacgagaatgttattaattttttgaataatgttaaaccaaaatgtggctacttttggaacgaattttcttgtgaaggaaatcctcaaaatagtgagagaccaaggaattattttagtccagaaaacgctagaaaactagatggcattagagaagtcataaacaatttatcttgtgataatattctgactgatttggaaagaagtttattgctacatgatttaataatggcggctaatgatatcgctaatattgctggtacatatggacattacatgtccaggctaaatggcagggctttgactcagttaaatcttaaatgcacagatttattacttaaatctgatgttgaaaatcacatcgtaatgcaaggttatgcagaggagaatgcaagcaagattcaatgcgacctatgttatattgatcctccatatatgaaaagacaatatgcagccaattatcatatattagaaacgttagcccgtggagatgaaccagaggctataggtattagtggattaagaccttggcgagaccagtattctaatttttgtacgaaaactaaaattagagattcatttaaggatattattacaaacatgggatgtaatgaatttcttataagttatagtgaagatggattacttacaatagaagattttaataaattactagctgattttggtgatgttaaaatagaggagttcacacataaaagatttagaagtaataaaagtgaattacaaaatgaacttacagagtacttaatacatcttcaccgttga

SEQ ID NO: 266299 - DNA, 681 bp, Klebsiella pneumoniae
atgggctattttgaaaaaatctttagtggtatcccgtttctgattgaggaaaagcaactcagctatatgaccccggataaccgtttgtttcagccgccccatttctttctgactactcttgaacgattggctgaaataagtatcatcgctatgcagcgggggaattatgtgtggcatggtgatgacgggtattccatcaatggagaggttcaggaagaagctctcatagaaagtttgcctgatcaattcgaaaaaacaattatgctggaaattgatctctcaagtggtacagacgaagaaattgcagaatcactcaaagcagcattaccacaatggcgtaagtacatggaaatagatgagaacccattaaactcggttcgtttcggctatgggacaatcaagaagcttatcaattatcgcatcatacctatgcttgatatcctagtttgggctgaaataaaaaaggttcggatctctgacgacagactatctaggatactatatacagacgacgacgcagaaagtgaaattagactaccccagcagatcaaggatactgaccgacctcttgctcttaaatcttgcacgattgattttatcaggcaatttcattttttcatgaataagaatgattttttgaaggaaataaaggtagctgatgtaataaaattaacagattga

SEQ ID NO: 266300 - DNA, 231 bp, Klebsiella pneumoniae; identical to SEQ ID NO: 222286

SEQ ID NO: 266301 - DNA, 390 bp, Klebsiella pneumoniae
atgccctacgatagcgtttatctggaaaagcgtccgcccggcgcgctgcgcaccgtatggcgtaaattctatggcgacaccacggcgatgatcggcctgtacggctgcgcgggcctgctgctgctctgcgtcttcggcggctggttcgccccctatggcatcgatcagcagttccttggctatcagctgctgccgccgtcgtggtcgcgctatggcgaagtctccttctttctgggaaccgatgacctcggccgcgatgtgctgagccggctgctgagcggcgcggcgccaacggtcggtggcgcttttgtcgtcaccctcggcgccacgctgtttggcctggtgctgggcgtgattgccgggtcgactcacggcctgcgctcgcagtga

SEQ ID NO: 266302 - DNA, 603 bp, Klebsiella pneumoniae
atgagtaacagcctgttaccgccggggtcgtctgcgctggagcgcaggctggcgcaagcctgttcaggtatcagtgatttaaacgtgccgctgcgtgatctgtggaacccgtggaaatgccctgcaaagttcctgccttatctggcgtggtctttctctgttgatagctgggacgaatcctggacggaagaaaaaaaacgccaggctgtcagtgatgccttctggattcaccagaggaaaggaacggtagcggcggttaaacgggtgatagaggctatgggctacacaatgaccattgaggaatggtggttgttagcagatccccctggtacattccgccttgaaattgagctgaacgaactcggaattacagagccaatgattaaagagcttgagcgggtcattggtgaaacaaagccggttagccgtgaaatttccagactggcactctcagcgtcagcaaacgggacgggatggattggtgttgcaattactgacagcgaaactatcaacgtttatccgccgggatataaaccggaaagcagcattatttatgacggtctgattttccacgacagcaattttatttacgaagaggaataa

SEQ ID NO: 266303 - DNA, 273 bp, Klebsiella pneumoniae
atggcaaggaagagcgatccactggcgtttggcgggttggcgttattaacgctgatctggagctttagctggatcgcgatgaagcaagtgacgagctatatcggcgcttttgacttcacggcgctgcgctgtatttttggcgccgtggtgctatggatagtgatgttgattcaagccgacgcctttcggctacaccctggcgatcgcgttattgcaaacctgcggcatggtcggtctggcacagtgggcgctaatgagcggtggcgccggtaa

SEQ ID NO: 266304 - DNA, 330 bp, Klebsiella pneumoniae
gtgattctggccgcgctgtttatggtgctggcgaaccgttacgactggcagctctttcttgaggtgaccgggccgggtggcagtggcaaaagtattctggccgaaattgcgaccatgcttgccggggaagataacgccacgtcggccaccatcgaaacgctggaatcaccccgcgaacgcgctgcgctgattggcttctcgctaatccgtctgcctgaccaggaaaaatggagcggtgacggggcaggactcaaggccatcaccggcgggatgcggtctccgttgacccgaaatacaaggatgcgtactccacccatattcctgcggtga

SEQ ID NO: 266305 - DNA, 207 bp, Klebsiella pneumoniae
atggagttgcacggcctgtggccgaccatcacgggcgcgggtatcgcgcggggcaatgaaaccgcgcaatacaccccgtctgcaacctcggcagtccatccggttcgctcgctgtccgggatttttcagtttggattagtgggtagcccggtaacggtcgttggtgaacaaggcgtacgcccggtttactacgacccgctggcgtaa

SEQ ID NO: 266306 - DNA, 153 bp, Klebsiella pneumoniae
atgaaaaaattgaaaacaaaaaacttgaaggaaaggctctgtgtgagaaatatggagtctcaactgaaaccattgcctatgctttatatgttcatagcaatagtttctttcttaaaaacgactacgttcaggatgacattcactatgatatag

SEQ ID NO: 266307 - DNA, 285 bp, Klebsiella pneumoniae; identical to SEQ ID NO: 186233

SEQ ID NO: 266308 - DNA, 174 bp, Klebsiella pneumoniae
atgtctgaaaaattggaagatggcactgttgtccaactaaagtctggtggaccgctgatgaccgtaagctactttgatgatgaaagaggtcaatattattgcgaatggttcgttaaagatgaacggaaatcaggttttttcagcggaacctctctcgccaagtatgattactga

SEQ ID NO: 266309 - DNA, 600 bp, Klebsiella pneumoniae
atggcaacaccagattgggaggccatcgaatcggcttaccgagctggcttgatgtctatccgcgaaatagcttcacagcatggcatcacccacaccgcgataaacaagcgtgctaagaaagaagggtgggagcgagacctcaaggcgaagattaaggccaaggccgaatcactggtttccaaacgggaggtttccaagcgggtttccagcgaaaggatggtttccgaaaggcaactcatcgaagccaatgccgaggtgatcgccaacgtccgcatggagcatcgtggcgacattcgccgcgctcgcaatatcgctaattcattatttgatgaactcgaagcagaatgcgccgacgtgccagcacttcagcagttgggcgaactgatgtaccagcccgacgataaaggctatgacaagctcaatgagatttaccacaaggtcatcagcatgccgggccgagtgaagtcgatgaaagatttatccgacaccctcaaaacgctgattggccttgagcgacaggcatacgatatcgacggtgcaactggcgatgagtcaacgaagaaactttccgatttgatggatgatttagccaaggggtaa

SEQ ID NO: 266310 - DNA, 2544 bp, Klebsiella pneumoniae
atgccaaataagaataatggattattcaaactatccaccgtctttctcgcaatgcttccggcattgctttctggtttgaataataaagcgcaagcacgtgactttttcgatccctcattcattagctcattgaatggtagcgatccatcaaccactcccgatttatccatatttcagactcagaacgcgcaggcgccaggggattatcgggtcgatattatgtttaatggccgctacctggacaccaggaccataaagtttgtcgccaacaatcgcgccagcagcgataaccgcgaacccgctctggttccctgcctgagtctaaaagcactcgcggaatatggcgtaaggataaaagcctttccagagttagccgaggatcaaaacggctgtgcaaacttttctgtcattcctgacaccaaagcagattttgactttaccgcccagcgcttaaatatctctattccgcaggcggccttatccaccaccgcacagggatatattccaccggatcagtttgatgacggcatcaacgcgttattggtgaactatcagttcagcggctcaaacgacatgcaggccaatgatgaatactacagtctgaatctgcagtccggcctcaacgttggcccgtggcgcatccgtaacctcagcacctggaataaaaacaacagcggtgccggggactgggattccgcctatctctatatgcagcgcagcatccgctccatcaacagtaaccttgtgatgggtgagagttcatcgctcaacggtatcttcgacagcgtgccgtttaccggtattcagctggccaccgatacgacgatgttgccggaaagtatgcgcggctatgcgccaattattcgcggtatcgccagaaccaatgcccgcgtcatcattaaacaaaacggctatcaggtataccagacctatgtcgctcccggggcgtttgaaatcaccgatatgtacccgagcggcggtagcggcgacctttacgtcacagtggaggaatccgacggatcgaaacaagaatttgtcgtgccgttcgccaccctgccggtgatggtccgtgaggatcagctggaatatgagatcacatctggtaaatatcgcccgtacaatggcggagtcgatgaaacgccgtttacccaagccaccgcgacctacggcgtctccagcagcctgacgctatatggcggcatgcaggcggcttcgcgatatcaggcgctgtcgacagggcttggctataaccttggtgaactgggcgccgcctcggcagacgtcacccaggcctggtcaaaaatgaaagaggatgaaaagacctccggacagtcctggcgtgttcgttacgggaaaaacattcttgaaacgggtacaaacgtgaccatcgccggctaccgctactccactcgcggatttcatactctctcagaggtcctggatagctactctaatgacggctactacacttcgcgctcgctgcgcaaccgtaccaatttgacggttaaccaaagcctgggtaaaggtctcggtagcctgtcggtaagcggattaatcgaagattactgggatgataagcgtaccaacaagtcgatcagtgtggggtacaacggcggtttccgcaatgtgaactactacctcggctacagctataaccgctatacctggagcggagataactccgggaaagacgcccgggacgaccagcgcattacactgaccgtaacgctgccgctgagcaattggctgcctggcacctacaccagctatcagttaaccaacagcaatccgggatcaaccgatcagtcggtttccatcggtggtaatgcgctggagaacgatagcctggagtggagcctgcagcaagggtacagcaaccgggaatactacagcggcgatatgcgggcgacctataacggtgcccgcggcagcgtcaacgctggctacagctatgatcgcagcagcgagcgcattgactacggcgccaacggcagtatcgttgctcatgccgatggcatcactctgggtcaggacatcaccgacgcagcggtactggttaaagcgccggggctggataacgtcagactgactaacgacaacaccatttctaccgactatcgcggctacgccatcgtcccatatgtaacaccataccgtcgcaccgatattacgctcgacagctccacgcttggcgaagatatggagctgccggaaaccacgcagagcgtcgttccgacgcgcggcgccatcgtgcgtgcaaactatgccggcaatatcggccagcgggcctttgtgcatctgaaaaccgccagcggtcaggacgtgccttatggcgcgatggttctactcgtcggcgacagcaaatcgcagccaagcatcgtcagcgatgccggtatggtctatatgtccgggttgcagcagaccgggctccttaacgtccagtggggcaaaagcgcagcacagcagtgcaatgcttcatttactttaccggccagggaaggcaaagcgtctggcatcagtcaaatcgaaacgatttgccggtaa

SEQ ID NO: 266311 - DNA, 276 bp, Klebsiella pneumoniae; identical to SEQ ID NO: 77241

SEQ ID NO: 266312 - DNA, 294 bp, Klebsiella pneumoniae; identical to SEQ ID NO: 77242

SEQ ID NO: 266313 - DNA, 291 bp, Klebsiella pneumoniae
atgcaggcgaagcagatccgcatcggtgttcccctgcaggtcgtaccctgtctccggccagcgatataccggctccagttcaaccgtgcttcctgcaacaagcgcgtaaaacagaggtacctttcctgcctgtactgcagggcgatattcctgaacgtcgaagatgcgaatggtacctttgacaacactcagcttaagcgtaattgggtctatctggatcaagtcgtaacgttcgttgaggtaattcaaggtcatgttgacggtgtacgtcgccgtagtgagaccgcgtaa

SEQ ID NO: 266314 - DNA, 348 bp, Klebsiella pneumoniae; identical to SEQ ID NO: 16878

SEQ ID NO: 266315 - DNA, 189 bp, Klebsiella pneumoniae
atgggcaattgctacatctgtaaaatcccaaacgcggtatacaattgttgcagaagaacgataagtagtatcgtcaaaatcaacttcctgaccttcccaattagcgataatgacattatcaaactgaccaatcaaaatagtatcgtcttcaataaattcagaaacgactacctgtacttcgtcatttag

SEQ ID NO: 266316 - DNA, 882 bp, Klebsiella pneumoniae
atggaaataaggaacaagaagagggagctaacgatacccctacaggcgattaatacagaatcgcgaactatcgatgtcgccttttgctcagaaatgccagtagaacgtgaaatcaatggcgaagtctataacgaaattcttttgtgtggctcagaaaacgcagacctacgccgcctgaataacaatggtgcagtactttataaccataatcgtgatgatcttattggtgctgttgtttcggctcaaatggatacagaccgggtaggcagagcgactttaaagattagtactacagcgagtgatatgtgggaaatgatccaggaaggaatcctccagcatatcagtattggctacaacattaatgattatcgaattgaggctaataacatctatgttacgcaatttgaaatctatgaaatcagtttagttactgtacctgctgataccaatgcgggaattggtcgttctctcgaaacaaatgaaaagcctattgaacctgaatcactaaatacaaccagtgaaacaattcaaaaggaagaactcatggaagaacagaacaaatctgttgagacggaaattactcaggaaattgaagttgaaacaccaaaagaacacagtgatgaagaactgttagccattatcgctaatcgtccagaactactaaataaactcacaactgtagaagaaacagtaaatagtaatgaattaaccgaagcagaattagaacgccaacgcgaattaacttccatcggtaaagtactaaatattgatgtgtcggaagccattggtaaaggaattaccgtctccgaatttaaacgtcatttaaatgataacaaaaatcctgttcatgataaggaaatcaaaacaatggaaaaaatctaa

SEQ ID NO: 266317 - DNA, 294 bp, Klebsiella pneumoniae; identical to SEQ ID NO: 102300

SEQ ID NO: 266318 - DNA, 378 bp, Klebsiella pneumoniae; identical to SEQ ID NO: 104959

SEQ ID NO: 266319 - DNA, 882 bp, Klebsiella pneumoniae
atgatatcagcttcaagcatatggttaaaagatgagggcataagtaaacaacgattcttgatacttttttttgcggttttttctttcatcgatgttgtaatgatcgcatccacccttcgctttggtttcgcggtggcattaatgttaagaggtgtagtgctttactcaacccaaaaaaaaggaaagggagcagtatatataatactatcctgcctgtgtcatgcatcaatgtacttagtagttgttgcatttatagcttcttgtttttataagatgtccaaaaagcaatgcattatattttctattattttttttgtaatgagcagtacactggtaccagttatcctatcacatgttaatcttggagttgtcaatgattacttcataaatggttatgtagatagtgattttgctaatgttactgatgatagtcatacattgttattacaattgtataaatatggtttattcgttgttttgacagttatttactttaaaaatgatggtgtcaatactaaatatgataatttcgttcggcatcttatcgctatttcattcgttatggctatatcaataactgcgttgaatcgatatttaatcggtatatctatacagtttgtaatgtttggtgcgtttgttattaatggtagttattggctaaggagtattattaaaccaatgattgttgttatattgcttttcaacattacttttatcaatatttatttggaaagacgtcaaatacaaatggcaagattatggactggactatatttacctcctgcagttttactatactataatatggaccagtttaataattatctttcagaattagactctgatggaaactgggttaaaaacaaactgggtggtaaataa

SEQ ID NO: 266320 - DNA, 723 bp, Klebsiella pneumoniae
atggcagtaattaacggtttatcaatcaatattccaggggctacctgggacgccgaatgcattatcggatcgcgttatcctcaggcggcatttgcttcgctggcaacttacggcacccagaatgaccgtacgatcatgggggcttcgccggtcgctgtcggcgcaccggttcagcacgattattactttacgggtgatgccaacaccgggggctatgacctcaaagtgactgataacatcaaaaaaacagagatggtgcttatccgtccatcagcagtgcgctcgctgggtatggggaattatctggggggcgatgttgtcccgcagggagacacgtttgtatttgagccagcgatcgggcgtctgcgtgcagtggttgggcgtactgccggtacggctgaatcaagactggatgtagcgatggataccggcaagttccacctggcgttttttgatgtcagcggtgaggccgttcaggttcataagatggtttcgggtcagctggtttccggggcgctgacggcggtcactgcacgtgcaatcccgtcaccggctaaaccgattatgaccgcccgggcgaataacaccatgactgacttcctcggcagtgttgatattgccatgaccggcgtatggtcaggaaccaacctgaccgccgcacaaaagcaggatatgtgcaatgtgatcatggaaatgtacggcgatatcctgccgctggcgtag

SEQ ID NO: 266321 - DNA, 2115 bp, Klebsiella pneumoniae
atgacaaatattagcgaaacgccccgctgggaagaaggtatataccaggtaaggcgtggggataaagtagaaggcggtgctgatggtgtggcaaatattcagtcacgccagctggcaaaccgtacattactgcttaaacagatggtcgatgggcttcagtcgggtatcagtccttataacagcgcagaagaggcacaggctgatattgaagcggggcgtattgtcgaaggtgcccgttttgcggtctggtcagacaatgctcacgcctgggcgcaggagtaccagaacattaacggcgtggcgacgcctaccgggaagtatttaccaagtaaagaatttaccgatctgctttatggcatggttactgacttatttaagcgcagcgtgcctgatggctggaaaactatattccccgatgataacggcaattttaccgtcggtattgatgatgtgggccgcctgattgccgggctggcaaaaatgaataaagccgaaattggtacagcggacgcgaagcgccttaatctcggtaatatttttttatcgcagggtgacgacgggaacgcgctggcattacacgatgttctgatgaatatctgtatggcgattactgagggcggggtgttgaaagtcggtaaatcggagattaacactctgcgcagcctcgggaaaatgatcctgccggatgcatcggaaatgacccggcgggtaatgagcgattttttgtgggcctgggaagacgataatggagacaaaagcgtaggacttaaaaaaaacggtgcctggtgcgcggggaaaattgaaagcaatgcggtcgagtcaaagcgtgtcagtaccgaaacgctggaagtaaaggcgatcacttccccggcttttctgcgttatttcagccaggccatttcttcgcgtctgccggatattgcccacaaaatcggattcgggcagtcgcttgctgcgggcgtgaatacccaggcgctgattacgattgcagacctgtataccgccgtgcgttttaacggtggcgtgcgggcgcaggatggtccgggaacctcagcagaaaaccacgcaaagctgttgccctatgtggaaacgttcaaaagcaccgccaacggtgatgcatgggaaacgccaatgggcgccagcattcgcggctggtacgagctgatgatggcggagaactacggttttaacccggatgatctcattgtattgggatccgttcccgctgaaggagggcagcccattgatgtgctggcggcctatcccggacggtacatgcagcgtgtttttgatgacattacctatggttacgcccgcgcacaggagctggggaaaacgtaccgccctgttgctatgtactggctgcagggagaggccgaccagactaaaggcacgccaaaagcagtttatcaggccacttttgacaaaatgcagaaactgatcgacgaccacgcatcggcagtgtgcggcgaagaggttcatgtgccggtttttgtttaccagttcagcagctggattaaccggacaccgaacacggcctatccgacaatcccgatggcgctgctggagctggcgcagacgcgtgaaaatgtctatctcactaacccgatgtatatccacgattacacggatggcgcacacctcactgccagaagttcctatattcaggggctttatatttccgtgatggaaaagcgggcacttgttgacggtaagacggcaaagccgttgatgcctgtgggccataagcgccaggggcgtgctgccaccgtgtggctgaatccggttggccggctcgtctttgataccagtattgtttctgaccctggcaattacggttttcggctgctgcatccagatacccgtgaggttattccactgactggcgtcagccttcgttatgacgccgtcaatatttccacggctgcggatattccagagggggccatcctccagtatgcatttcatggcggaacgaccgggaaatcaccgggccgactcagcgggccgcgtggttgcctgcgtgacagtcagggcgacattgtctcattcagtcttaatggcgaagttatccgtatggacaactacagcgttatgttcgaattaaccctctga

SEQ ID NO: 266322 - DNA, 1029 bp, Klebsiella pneumoniae
atgcattcagaacttcgaaaaaaactctatctaattgaaagtgaacgtgttgctgctattataaatggaagctcagtccaggagattgagactgcgcttaatactaatggcgaagaaatcatggaggacgtgacaaataaactgatacattcagtcagggctgtgattaagctggtttcgcctatatatttttcttctgaatttcttaaccacctgatttccgctgactcctcatccttagggaatcccatttctgaaaaggaattttgtgcagcgcgcgattttgttgaaagctgcctgaaagctaatctgagcaaggttcagtggcttcatcttgagaatcaattccgaagtaatgctgaaggtttttgtatttcccacagggatgaggaacacttcatcttcacccaagatgacccatttggagtaaagtctacagacctcttagtgcacgagttggggcatgctgctgaccacacggtatcacgctctcgtaatgatgacagtctcttaatacgtcatattactttgtgtgaggccgtagcgtactattgccaataccaatacctatctgagtttggtactcaggcaaaacggcatggtagtttggggcccctttgctttctttatctgtgtatcgcaacagtcaggtattgtttgaaaaaaaatctaccactcagcgattttgaccctgaagtggacattgatgacagcgagtttaacgaaattatagattcctataataaatgcggtataaatggacgagagtatatatgtagcattctgaatgaaagtgtaaagccttgtggcagtcttactaatttggtttttaatcaaatagcaccaaagttcggcatcgtgcttgcaatcctgcttttggactgcgaatccgatctaatgattgaattaattaatgaaaatacggttgaaactgatattgattcaattttacataaatttattcctgattattatattcagataaatagtttcgaaacccttgcacttaaatacataaataacgcttag

SEQ ID NO: 266323 - DNA, 975 bp, Klebsiella pneumoniae
gtggtcgagggcatgcttgatgacgagagtgttcacgacctgatgctttcgatcggtcagcaaggttattttccaggagagccacttctcgtcttcaaagacggtaacaaactcgttgtcgcagaaggtaatagacgccttgcagcagttaaactcttaaatggcgagctaactcctacgcagaataagaaaaacagtatcgatgatataaaaaatgatacgcagcataagccaatcgagttgccttgcatcgtttatgatttccgtgaagacgtactgcgttacattggttacagacatattaccggtgtaaaggagtgggactccttatccaaagcaaaataccttaaagagttatgcaataaattctatacaacttctaccaaagaagaaacactaaaaatccttgccagagaaattggaagccgcccatcttatgttggcctcttattaacatctttaagtgtttatgatgtggcaaaatcaaataacttctttaaattaaacataaaagaaagtgacattgagttttcatatattacgaccgcattaggatacagtgcaattactgattggcttggcattcaagacaagaaagattatgacttgaatggtgtaaatgaaaataacatcaagaatattttctcgtggtttttcgttagagatgaacatgctaggacaattgtaaaagagtcaagaagaatcaaggacattgctacaattgtgcaacatgaagatgcgatagagaatctaatcgaaactcgagacatcgatcaagcattcttatatacaaacggaaatcaagtagcccttgctgaagcaatgaagcaagcccgaagccgcttaaagacggtttgggaaatgttatacaaaaacaaaagttatactacggctgatcttgaaatcgctgaaataattttcgaggacagcaaacaaataagaaactacattagaactaaattagaggatgagtag

SEQ ID NO: 266324 - DNA, 921 bp, Klebsiella pneumoniae
atgctcaataatttagaatctataccttctaatgacgagtttctgtgggcagatttcctcgaaattagggctatggtccacccagacaaggcctttagtcgcggagatttagatagtgtaatgcgagcgcaaccagaggaattcaatcgtgaacaatcctctgctaaatggagatttggcacggacttcatcagacaaagaattaacatctttagagattcttatccatttagtctttctgaagatggagatactttgactttagaaaattatgatgatttagaaaacattaaaaaattctacctatcgttactcatttgcgcaaacattaaatatattccacaaggcacaagaccaacaattacacgttcttttgaaatgataagcctacctattttcacatctctaatgccgagaggatattatgtgtatccaaattgggcaggcggtggtgctaatgctagatacacgggattattaattgaaaagtaccaagctattgcaaaagatattcgatgtgaaacaaccacgttcaaaccacgtgattttaaacctcgtgattctggtgatggtggaatagatattgtggcatggcatccgtttggtgatgagcgagatgcaattcctgctgctttcgtacaatgcggatgttcaaaggatgaatggagacataagcaactagagccatcatatgccaaactgggttcgaaaatgccggttacccatccttgggcttcgtactactttctaccgcaagatctgaggtggatggatggtgattgggcatataaggcagatattggtggagcaatactcgttgacagattgaggctaatcaacttagcgagagagaacgagttgattgacgctctccctccgactccatacgttgatgatgccgtatcaatgtcttaccgataa

SEQ ID NO: 266325 - DNA, 441 bp, Klebsiella pneumoniae
atgtctgcttattcgtttcttgatatctcggcttccctggctggtcctacgggagctattgaactcggtgctggctctgcgaactctgaagaggggatcgtggttgcgatgaccgaggcaaaaaacaccatgaccatcggcgcagatggtgagggtatgcatagccttcacggcggcaagagcggcacgattaccgttacgttgctgaaaacttccccggtcaataaaaagctttcgctgatgtacaacgcgcaaagccagtcctcttccacctgggggaataacgtcattgtggtccgaaacaaagcaagtggtgatatcgccactgcacgcggtgtggccttccagaaacaaccagactggaacaacccaaaagtcgccggaacggtcgcatgggtgtttgactgcatcaaaattgatgaactgcttggggaattttaa

SEQ ID NO: 266326 - DNA, 486 bp, Klebsiella pneumoniae
atggaatgcacgattaaaggcgttaattaccgcgccaataagctgggcgtatttgaacagttgaaggtatcccgcaaattattaccgatcctcgctggcctgatggctgattttagcagcatcaaaaagcttcttccggctggaggtgtaaaagagctatttccggaaggtggcgaggaaggtggcgaggccgttaatttggaacggttggagccagttttcaacacgctgctaccgcgtatcgctgacgaactgtcaaaactcaccgaagaagacacgaacgccatcatccatccttgtctcgctatggtggtgcgtgaaaacggcaaacaatggacgccagtcttccgcagtggagagttgatgtttgatgacattgatctgttcagcatgctgcaactggtggcgcgggtggtcgccgatagcctgggaaattttttgccagaactcccaggcaacgcgacgcccaccccgaaagcggactga

SEQ ID NO: 266327 - DNA, 1917 bp, Klebsiella pneumoniae
atgaacgctgagacgattaaagattttctcgtgtcgctcggcttcaaagtcgatgaaagcggcgagcggaaatttaatgcagtgctggcgggggttacttctaacgccattaaaaccgggttcgccgtcgaggcggcggcgctctctgttatcgcctttacggcaaaaatagcccaggcatctgacaagctgtactgggcatcccagcgcactggcgcgacggtgcaggggcttaaacaggttagttatgctatttcgcaggttggcggcagcgctgactcggcgatgagttcgctggagagtcttgcacggtttatcagaaccaatcccggtgcggagggcttccttaatcgcctgggtgtgcagacacgcgacgccagcggcaatatgcgcgatatggcgagcatcttcaccggggtaggccagaagctcagcagcatgccatattaccgggctaaccagtacgccagcatgctgggtattgatgaaaacaccctgatggcgatgcggcgcggtgtcggcgggttctccggcgaatattctgctatggcgaaagcgatcggatttaatgccgatcaggctgcagtaagttctaatcggttcttgacgtcgctccggtcgttcggcgaaatggcagggatggcgcgggataaaatcggcgctaacctggctggtggcctcgctggttcactggataaattacgccgtcaaattctcgacaacttcccgaaaattgagcagacgctgaccgcggctatcaagggggtattgtggctgggtgaccttattgcccggttattctcccggctgatggaagggacttctgatctgctggactggtggaaatcactggataagcagacgcgggaactgatcacgctgtttggcgcattaacggtagcgctgcggatccttaacagcacgttctggatgtctcctatagggcttgttactgcgttcgctgccagtatcgctttgctatgggaagactataaaacctggaaagaaggcggcaaaagcctgattgactgggggaaatggaagccggaagtagacgccgccctgaagatggtaaaagacctccggcataccgtcgtcgatctgggtaaggcactggcaaaacttctgaatattgaccctaaatcttggtctctgaagtgggatttcagcaacttcatcacccagatgggtgaattcagtaagatgctgagcatgattggtgacctgctgagcgctatcaaagatagtcgctggtcagatgctgccagtattggtaagcaactactgagccagggcaacaataacccggatgctctgccaggtgtttctgatagcgccaatggcgcagctgactggattaaggataagtttggttttgaccctcgcagcgtcggacgatttttccgtggtgaaggtaacacgcttgcagaccgcaacaacaaccctggaaatatccgcccggtaggtggtaacggcttccgttcttttggctccgcgctggaaggatggcaggcgatgaaaaaccagttgatgcgctatttcaccgggaaaacgacggggcggatgctgcaaactgtccaggacatcgtgagtacctgggctcctgctggcgataacaacgatcctcagctttacgccaaacaggtagctggctggatgggcgtttcccctgatgccgtattgaacctgaataaccctaatacgatggcttccctgatgcagtctatggcccgtaaagaggggtacgccaactggcaaagtcctttagcgtatcaggctgcaggcgcatcaattcagcaaaacaatacctataacattcacggtggaaacgctatggaagttgctcaggaggtcggacgccgacagattgatgcaaatgccagggtaatgcgcaaaaaccagagcggggtaggttga

SEQ ID NO: 266328 - DNA, 588 bp, Klebsiella pneumoniae
atggatatcctttctacgctgtttcagcagcagtcccggcgtatcggtcttattgttcccagtgtagtggtatctgaaaagcacagtgacacgctggaaattactgaacatcccgtcgaaacgggggctcctgtttcagaccatgcctataagcggccatcagaggtcgtgatggaagtggggtttgctggtggtggttcgctgctggatttcattgatacgtcctctctgggcttaacgcttggcctgagccctaaagaaacctatcagcaaatactcgacctgcagactagccggatccctttcgatgttgtcacagggaagcggctatacagcaacatgctgataagggcgattgaggtcacaactgaccgtacatcagaaaacgtactgatggcggttttaacgcttcgcgaagtgatcatcacccagactcagcagatagcggtagccgataaagccgatatgaaggagggggccaatacgtcagctgttatcaactccggcacaaaagcggcaaagcctcagaacgaatccttgcttagctctggctggcaggggctcaaatcaattattggaggcggctaa

SEQ ID NO: 266329 - DNA, 303 bp, Klebsiella pneumoniae
atgcaggtatacgaaatccccctcactgctgataaccagcaattcagtaccattctggcgggtgttacgtaccagataagcatcacctggcgtgatccttgctgggttctggatatcgccaatagtagcggtaaccaggtggttaaaggtatcccccttgtgactggcgctgacttgctggctcagtattcctatctcgggttcggtttcaaactcgccgtggtttgcgacgatgcgaaccaggattacccaacccaaaccgatctcggtaccgccagccacttgctggcaataacggagtaa

SEQ ID NO: 266330 - DNA, 1062 bp, Klebsiella pneumoniae
atgtctcaaaactggatgcgccatttcgagctgcagctactggatgaaaacgggaagggaatagacttgggtaacttcaaggttactttcacgatcgactggttcaacatcagcagtgccacccgaaccgggacgtttaagatttataatctgtctgcagacacggtgaaccggatcaccggcagtgaatttgccactattcgcgtaatcgctggttatgatggtattgccgccgatgttgacgccagcgacgtaggccgcgttcgtgaggtcgatgcttctcaggtgggccagtctgacggttgtaactggggattgctgtttacaggcgatattcggtacaccatcacgggtaaagataatccggttgattcgttcgtacttattcaggccgcagataccgatctggcgtttacctcttccatcacggtgcagacgctggcggcaggttataccgttgccgatatgaaccgagctctgatgaaggacttcgaggcgaaaggagctacggagggcgttacaccaccaatgccagctaccgtcttcccacgcgggcgcgtgctgtttggtatgacgcgagacctgatggataacgttgcaaggcaatgcgaagcaacctggcaattcgttgatggtcagcgccagatggtggcaaaaaatgagtatgtacacgaagctattgtgttgaacagcgcaaccgggctaatcggcatgcctcagcaaacgatcggcaacggggtgaacgtacgcgctctgattaacccgaacattcgcgttaatggcctgattgagctggatcaggcgtctgtctaccgcaccgcgctggcgaataatgatatcgctatggctggtggacgcattaccgatcaggacaataacgggaatatatccataaccggcaccacctcacagactgccagcattgctactgacggcgtttatattgtgcgcggcattatgtacactggcgacacaaggggccaggcgtggtacatggatatgatgtgtgaggcgcgtggggctcaagatttgagaactcaggattcgctcaaccgggggtaa

SEQ ID NO: 266331 - DNA, 237 bp, Klebsiella pneumoniae
atggatatggtaaacggtgaacgtgttacctctcagaaaattacaaacttgggtgccgacggcatcaaaattgagatgggtttgatgccagccaaagacgggaataactacgggtttgagtacattcaccgtcctggtagcgaaaaacggtttttgaacgttcaactgctgcagaacagtatggatgcgccgaagctgattggatcgtttccttgcaggaagcttaatcatgaatga

SEQ ID NO: 266332 - DNA, 558 bp, Klebsiella pneumoniae
atgaatgattgtgtagacaatataaaaaccattgaagagcaagaaaaagaacttatcgataaggctgaattattgttcgaacaccaaaaagagcaatacgaatcttcagttgtaagagtccgtcgcctggaagataaggcactaaaaacatttgggtcgctaaaccttattattacagtggcacttcttatagttagatattggtggggggatatttttcctggcaaatatacacctttacatgcattttgctggatttcactttctgtatttataatcatgtgctttatttcatgggggttttctttcagtgcaatgcaattaaaagactgggaatgtccttctacagatgcccaaggggtggaagttttttatatggataataaaatatataattcactttcagcatatgctagagaatactctaggcttgcagatgttgtgggtaatatacatagggataaaaccaagttaatcaataactgttttgaatcaatgcttttcggagcttggtcgtttacagcttttttaatttccgttgcaattattaaaatttaa

SEQ ID NO: 266333 - DNA, 426 bp, Klebsiella pneumoniae
atggaaaaaatttcatttttgtacgtatcccaaatctttcccggaaagattgctcgatcgctgaactatccgcagccatggataaagccagatgagcaatcagggaaaattagcattgatgtttcttttggcttaattatcaaaaccaaagtaaattatcgcgttgatgtagatttattctttgaagatcagaaggttgagtttggaaacaatcagcctcttcaaactgacccgatcgttgctggaacaacttctggcaatgagtcagtaagcattgaaaacatgtcaattatgaatattcacgctgaaaatgagggggtttatagagtaactttatcccttcatgtgattgatgacaatgaaagtagcagaatgattcacaatagtgagtgttttttctatttatcaaaagaatggaagctttaa

SEQ ID NO: 266334 - DNA, 444 bp, Klebsiella pneumoniae
atgtcacgatcagcatttgttatgcgagacgctaaagttgccaatgaagaatacgacgtgcataatttgaacaatgattatggtggcggtgacggcgggggtggtgatatggcagagcgtttagagagactggagaaaaaagtagactccattgagtccaccttgtcacgcctgaatgaaagcatggcgcgcctagattacaaaattgacctgcagagtgcgaaactaacatccgcgttagacttgcaatcaacaaaaatgacagcgtcactcgaacttcaatcacaaaagttagcgtcttccctcgaaaatcagtcccttaattttgatggaaaattaaaggatcagcgtatcgccatcactgcatgggtgcttgggctgccaagcatcatatatgggctttatcgaattgtagatttattcgcgacgcataaaccaggctaa

SEQ ID NO: 266335 - DNA, 1701 bp, Klebsiella pneumoniae
atgagaattgaaactgtttatatcaaaggatttagaaattactgtgatgccgttattaatttcaatgaaaccaatttgattataggcgcaaatgatgttggaaaaaccaacctattatatgcaattagattattacttgataaaagtctgtctgaattagatcttgaaccaaaaagtaatgacttccatgtaagttcggcaggtgaacaggttgaaaatatagaaatcactatcaagtttatagatgttagtgaagatgctgtaatatctaagttaggaggatatattagcgataaaggggaaacttacattaagtattttgcttcatcattaactatgaattacaagattttacttagccatgagcataacaattttgatgaggtccctaataggttttacttaaagtgtttaagtctaaggtatataaattcgcagagagatcttgaaaaatatattaaaattgaaaagaaacatcttttaagattagcgcaagaagttcgtagtgaaaaggatactgaaaatgacggtgtggtttttactgaattaaataaactgcttactgaagtgaatgagaaagttaaaggaataagttatgttgcatcagcaacggaagagcttaacgaagaacttaggaagttatcatatattcatgatcgattaacagttcaacttgatactggtgcaataggaattgatcagtttatagaaaaattagaattaagtgcaaatacaaatgggaagaaactaatgcttggaggagatggatttaataaccaaatccttcttgcgttatggaaagcaaagagcgttcgcgagcatgatgttgaaagcgaagtagtgatatattgtatagaggaaccggaagcacatctatttcctcaccagcaaagaaaattggcggcctatttaatcgataaacttccaggccaagcaatcgttacaagccactcaccccaaattgcagtgaattttcaacctgattcaatcataaaactatactatgatgatggagaaactctagccgcaagtaatggatgttctgactgtattagctcagcatgggatggagtgggataccggatgagtattattccggcagaggcattttttgccaatgtggtttttttggttgagggaccatctgaagtaattttttacactgaattagcaaaagcactaaatattgatcttgattattataatatcagtattctttctgttgatggtatccaattcgaagtttatggaaaaatattaacagctctaaatattaattgggtcgtaagaacagacaatgatgcttcaaaagtaccccataaggatgaatggcaatatgctggtataaatagggcattagcaatatgtggaaagaataaagagccaaactcaagtgttcctatagatagtaaggctttgcatgataagtggggaatcatttctccaataataaatcctttcggtgtttatatatcttttttggatcttgaaggagatcttactaatgacttctcgaagcatgttcttgattatacaggtaaggataatcaagatgatgcagctgattatttgagaggcaaaaaagctatacgtatgcgtgagttaattaaagagaaaaaagatattttaattgacttgaaggataaagatatagctagacctctaatacatacgttgaaaattgctagaggtgaatcatga

SEQ ID NO: 266336 - DNA, 1623 bp, Klebsiella pneumoniae
atgaacttaactaaggaacagttagatgcaattaattatgatgggaatttggttataactgcatgcccaggaagcggtaaaacaacaatactcgcttataagattgccacttgtttatcctattccaaggattatcagggagttgttgcgttgtcatatacgaataagtccagtgaggagctaaaagctagatgtagaaaattgggagcagagttaaattctagcttctttggaactattgataagtttttaattaatgaaataactttaccttttttaaggcaagtctggggtggaaacgaaagagatctcgaaatagtgaagtatacagatcttcctcaagaattaaaagataaaacaaataaatattttgaacgaggcgattttcattctaatacttcatttgatggcatggattctctgaaggatgtttatttaaaggggatggtagttttagactttattcctcatttggctttttatatagttagaacatcatactcttgccagcggtacttaatggcaaagtatattagtttctttgtcgatgagtatcaggatacaggttattttactcatcaggttttcaagttcataccaacgttagggatgcctcttactatcgttggtgatttggaccaatcaatttacttgtattctcaccgtagttcggattcactaaaatatttcatgagtgacagtggtttctgtcataaggaaatcacagtaaaccacagatgtcacccatctatagtgaattacgctaatagaattaaaaatttcgaatgtcaattgacttcgtgtgatgagatttttgtttatagaaaatgtgttgatgggaatcaaattgatatagccaagtggattggtgaaatccttgataaggtaaaaaataaattctctatatctgataataaggaaattgctatattggtgagaagcaatgcttgtgcggagctaatttctgataatctagttgtttctaatagggcttatttagataatgaattgacaaagtctggtggtaaagtttctggcctcgtcaatgatttattatgttacaggtacaactcaaataaaactgcccagtctattgtggagggggttttggggaacagtatcaaaaggagcgaggctactcgtattcgtaaggctattaagcaggttagaagagctacagacactttacttatcgacgtaataaataaagttgtagtcatccttttagggactgagcttgagcagcatcataagtttgctctttcagagatattggttactccgaggatgcaaaataattatttggatgttagaagtgatgaagtacaaataatgacattgcataagtctaaaggtcttgagtttgactttgtttttcatttggatctgtatgattggattttgcctaaaagagttttcatagatggaagttatgatgttgtattcgaaaatgaacagcaatgtacaaatcttcattacgtagggattacacgagcaagaaaaggcattgtgctcatacattcaacgaaacggtataatggttcaggtgatattaaaaatggggctccatctcaatttcttttgaaaccagggttggatggtctttataaaaaattaaattaa

SEQ ID NO: 266337 - DNA, 579 bp, Klebsiella pneumoniae
atggcgactagttacattagcgaacatagcgctgagtactatttagtaccagcactaaagacgattttgcaggaaaaatatatccatgttgctccagtcttcccatggatatctcgagagtttaataagatctcaatgcagcttcataaaaatgaccagtttcacgtgatagtaatgtttccacgcaggccaaaacttgatagtccatacagtgatgagatatatgtcactattaatagagagcttgaagtatttaacaaagttgggagagaaataggagtaccagtgatagccggttgccctaatgctatagatctatgggatttatccaactgtaagaattacgtatggattaatctttcacattgtgattatcatgaatacttaaatccaataagtaagctaaaacaaaatggatgtttgctagataaagaggacattttatcccttgtaaggaacagtgcaatttttgactttgcgtcttttgtagatttcttccgagctgcaaaagaaactcaaccttacaggatgtatggcagcccatataagccagtatactttctgattaagacacactaa

SEQ ID NO: 266338 - DNA, 1509 bp, Klebsiella pneumoniae
atgaatcttagtgaattcatggaatcttacgtaaaccatccagtagtgtttgttggtgcggggtttagccggagatacctagtaggcacttactcatggcaagaacttctaaaaaaggttgtttacgaaatgaaagggagtcatgacttttattttgactctgcaggcaggaacgctaattctttaggtgaggtagacctgccaaaagtagctagcgaagttgaaacagagttcaacagattattagaagctgataggaatggtaagtttaaaagaataaatgataaatactacgagtacgctgcttcaggaaactactctgccagtcgcatgaagatatttatatctgaacttgtagatttacatcaaataaatgatggtgataagtatgcaacagaaatggagttatttgccaaagcaagtcgaaatataggttcagttattacaacaaattatgatagattcattgagacattgattgggtttaatccaatcattggaaatgatattctgctaagtaacccttacggctcggtatataaaatacatggttgcgtatcacaccctgaatctattgtgatttcagattccgactatgaaagatttaaaatcaacaaccacttaattagagcccagctcatttctttatttattcacaacccaattatatttatcggttatagcataagcgatgaaaatatcagggatattctgaaaaccatcttttcttatatttctaaagattccgatttagccgataaggttagaaagaattttctactcattgaacgagatgcaagcagcaactctcttgaagtgcttgaacatgatgtagttattgaaaacattggcaatattaaaatcaacaagattaaaaccgataatttccaagctatttttgaggagttaataaaccttaaacttccagtctcatctatggatattagaaaggttgaaggagtaatgaggaaaataaaagaaggtggtaccgttaaagtaaaaatagttggcgacttagaaaacttagccaatgacgaactagtcatggctgttggctctgtacagaagataacttaccattatcaatcagcatccgaaatggtaatgaattattttgagatcatggattccaaaaatgatgcgttaatcatgttgttaaacaaaataaaagtgacccgaacgcagtattttacagcgcatgggttttcaactatatgtaatgaaatacataacattgaacaacttaaaaacaatcaagaaataaatctcaccacctattttaattctattgatgactctgaaagaatcaattgcgacacagttgatgaaatcatttccctcggatttaaaccgtataaaatcgttcgagttattttttacaacacatatgtaaacaatattgatcttgataacatcgaaggatatctgagggaaggagtggcactagaaatatcgccctcagattataaaagacttgttagcttatatgactttaaacggtactcttaa

SEQ ID NO: 266339 - DNA, 504 bp, Klebsiella pneumoniae
atggggcaatttaccttattcacctatattcgcccgtacctcgaactgatcgctcaggtcgatgccaggaccatctcgctactattattagcgatcggtatttccggactcgcggggactacggctattggactggtgattaaaaagcagctctataaaacgttaatcattattccgctactgatggccctgattgcgttattactgatcccgctggcgacaaaccttgttgcggtgtcgattctgctggccctgtggggcgtactcttcaccgcagcgccggtggggtggtggagttgggtcgcccatgccagcaaaccggataccgaatcaggcgggggactgatggtcgccacagtgcagttttctattgcccttggtgcaacggtcggcggtattttattcgaccatctgggctatgagagcaccttttgcctgagcgccgggatgctgatcgtggccgcgctgatgacgatccagacggcgcgacgttctgctgactga

SEQ ID NO: 266340 - DNA, 306 bp, Klebsiella pneumoniae
atgatgaaagcctggatcgtcaacaaacccggttcactggacaatctgcagcttgtcgatcttgccgaccccggcgcgccggcggcaggcgagatccgcgtagcgctccacgccacctccctgaattatcacgatttgctggtagcgacgggggtgattcccaccgccgatcggcggatcctgatggcggacggcgcgggggtggtcgagcggttggcgccggagtcagcgagtttcagccaggcgaccgggtggtggctggctttttcccgcagtggctggatggccgtcctggcccgcaggtga

SEQ ID NO: 266341 - DNA, 459 bp, Klebsiella pneumoniae
atggggtttctgaatgctaccgaagcggagttcgatgcgctttatcgcatccatgtgaagggggtttttttcctcagccaaaaattattgccgctgctggcggatggcgggcgaattgtgaatatctcgtccggactgacccgtatcgtgatggcgaaccgggcgccctatgcgatcatgaaatctgcggtggaaaccctgacccgttatatggcgtttgagctgggcggccgcgggatcacggtaaactgcgtagcgccgggcgccatcgccacggatttcagcggcggggtggtgcgggataacccgcaggtcgctcaggcggtggcgaacatgacggcgcttggccgaccgggggtgccagaagatatcgggccgatgatcgcctcgctgttatccgatgatcatcgctgggttaatgctcagcgcattgaagtttccgggggaatgcgcatctga

SEQ ID NO: 266342 - DNA, 486 bp, Klebsiella pneumoniae
gtgcgtcatagcgacaaagctcacctgcttaaaagagtaagtattggccagattgaaaagttgttttggtggttcgtgccgcggagcggcataaaaaaaccgccccgaagggcggcccagaccgctgacaaaatgcaatcgtcgggattgcccggcggcgctgcgcttgcacgggcctacagagaattgcctaactgtttaatattgctgtttttcgtaggccgggtaaggcggaagccgccacccggcagaaaggcgatcacaataacgaaaaccggtttgtcatcggccatagccgccccgaagggcggccaggtttacttcacgcagcgggcgcactgcgatgtctggatttgctggaagaagtcgttgcctttatcatcgacgagaataaacgccgggaagtcttccacgtcgattttccagatagcctccatccccagttccggatacgccacgcactcaaggctgcggatgctctgctga

SEQ ID NO: 266343 - DNA, 159 bp, Klebsiella pneumoniae
atgctgcaactgcagctgaagcggcgaaggccgcagcggaaactgctgagcaaaattcatctgtttcggccgttgcctcatccgaatcggccacggcagccgcaggttcagctgcgcaggcagaagagtacaagaatgatgcctctgaatatgcgctga

SEQ ID NO: 266344 - DNA, 2121 bp, Klebsiella pneumoniae
atgtctaatttacctgaacaaactgcctgggaatcaggaattcatcaacttgaagagtcagaacgtgcgaaggctggacctggtggcattcttaataccccggcatctcagttagcaaatagaactcgttggctcagagagcaaattgagtcattgtctgattatagagagtatacatttcaacctacggaatctgatccagacggaacaatctctggccttgcggggactcctgatggtcagatttttcgtgtagcattaagttctgatagccctatatcatttaaatattactttaacaaatctggtgtagctgaagaatcctcttggttattgggcgctcaaaaattttttgattttctcttcctctttaactccatgttcagtaccagcggtgtgtccggatttgatgcacttttctccaatacgcaggggcagtatgtaggaggtattgattcctctggtgccctgaatttcgggaagatgatcgcgaatcttgcagcgtttgcgtcagctgatatcaagtcattgacgacggaatcaatgaagctggcgagcggggctgaggtgacctcaaatatccctcctggatttgaatgggcgctcatgagcctgttcggcagcgctgctgttggtctgaaagacgacggcacttttgcggcaggtaagctgcaggcgctggttgccagtatcgggaagttgatcggcgacatcgtttttcatggtggggggaaaaccacaggcacattacctgagggttttttatggggatggatggatgattacggccgggttacacacggcggaaaagccgatggaagcgttgagtccggcacgataaaagtgaaaaggcttgtcgctggctctatcgaatcggactcattgcccgttgagaagaaacctctcgctaaaagactggcagatgtaaaccacataataggttatggacaatctcttatgggcggtataaatgcgatgccgctacaaactacaacaccaattacaaatgcttaccgctttgttggcggcgtgcgcgctcaggacggtacaggaacatcagcggagaaccacgccagtcttgtcccgtatattgagacctctgctgtaaccggcgacggaacggggtatgaaaccccgatgggaggaactataacggcgatgctcgaccggctgttagttgacgcagaagggtattcttccggtgatttaaattttcttggttccgtccctgcgcaaggcagtcgctctatttctgagctgaagcagcctgcgggtatttatatgaccaggctgaaggatgatattacgtacggcctgcagcgtgcaaatgaattaggcttgacctacgatatacttgcaatggaatggttacagagtgaagctgatcaatcagcgggaactcttccagctgtatatatgaattcttttggcgaaatggtaaatactgtaaatagtcatgcatcaactgttctgggtagaacggtcactattccatggtttatttatcaaatgaactcatggataaatagaacaccgaacaatacatatccaacaatgccgttaacattactcgagttagccagaactcgtgatgataccaggctagttcaaccgatgtatatgtatgactattatgataatgcgcatctgcttggatttgattccaaaatttgcggttaccgtttcgggctggctattgagcaggagcttatcactggtacgaagtttgagccgctgtggtctaaagatatttccctacagggtggagtggccaatatttggtataacccggttggcaaactggtgctggatacaagcattgtgaccgacccggggaattatggtgtatccgcgatagacccgaatggtaacgcgctgacgctgacagaagtttctgtacacctcaaccgtctccgcgttcgcgcatccggcggtattccgtcaggctctaaaattcgacttggctttattggtggcactccagggcaacttcccagccggactaccggcccacgctgctgcctgcgtgacagccagggcgacactatcaaattcgacccaacgggcgttgcataccgtatggataactacgccatcgttgaagaaattacactgaactaa

SEQ ID NO: 266345 - DNA, 624 bp, Klebsiella pneumoniae
atgtctggcgatattaaggcagtatttgacagcaatttgattgcaactcaggctggtaccgtacaggtatttcattttgatatgacgtcccgtgagtttattggtactgaggaagtttatattcatgtcggtgtcggccttcctgcattttcatgcatggaagaaccaccggtacaaagtgaatatcaggttgctgttcgttccgaagataatttgtcctggtctgttaccgatgattatcgcggtatcaccgtctatgatattcagacgctggccagccaagttattaccgagaccgggcccatacccgatactgtaacgacctccgcaccgttaacgccatatgataaatgggacggttctgcatgggtaaccgacgccgatgctcagcatgcggctgatgtttctgctgctgatatgcagaaaaaagagcttttagctcgggcgtcggatgatatttcaattcttcaggacgctgtgactcttaatattgccaccgataaagagaaatcccagcttacatctttgcagacgtacagggtacttctcaaccgggtagatacggcgcttgctcctaatattatttggccagctataactacaccggagggtaataatgtctaa

SEQ ID NO: 266346 - DNA, 453 bp, Klebsiella pneumoniae
atgcctgaaattacgattactgcaaagcgcgacgggtttcgtcgctgtggggtggcacaccgtgacgtgccggtgacctggccggatggccattttacggacgaagagatcgccatcctgcgtgccgagccggcactggttgtccatatcggcgcactcagcggcgatgacgacaaactggaactcgcgctgacacgcattcagaggctggaagccctcatcctgcagctcaaagaggactcggttggcctgatgcaacaactggctgaaatgaccgctgaccgcgaccgcctgcaggctgagctgacggtatcaggcagcgtgcctgtcccggaggtcaaggataacgccgctgacggtactgcaggcagtgcgtcatctccggaggcgaaggatagcgccgctgtagatgatgcagccgctgcggacacctcagccaaagcgaaaaagtaa

SEQ ID NO: 266347 - DNA, 375 bp, Klebsiella pneumoniae
atgaaatttttactgagcctgcttatcgatgcgatcgttgcggtatctctggggctgggcgttctgtgggccgatgaacgtctactgaatattggctatttttccgggtggtttgtcggggttgttaaccttctggggctgatgagcccgaacggccaggtagtatttgcgcgcgaatacgaacatcgttcattgccccgtcgttgctatgacgtcctgacggatgtggcattcattgtgttctccgtctggtcaggctggtatgtgatgagtgctgtctatgccctgcaggctgcgggtaaagcggagctgatcgcaaagctggagcgcaagttggttgcaccggcggtttcggagcaagcccgtgacgcgtaa

SEQ ID NO: 266348 - DNA, 333 bp, Klebsiella pneumoniae
atgaccaataatagagaacctgattatatcagatacgattgcgggtgctgcgggttcgaaacaatcaaagactggcgagataatgacgtctgcccgaaatgtaaccataaaccgctgaataaaactgaactgttctccgctcagccagcccctcagtctgctgaccttcagaccagagctctggttatgtggattaagcgtctttcgctggcgcttcgctctgccagccctgataacaaattacctaaagcggcgatgggttatctgcaaaataacggccttatcagcatcgctgattgccttcgggggaacaatgaagagcctcctgcgtaa

SEQ ID NO: 266349 - DNA, 633 bp, Klebsiella pneumoniae
atgactaatttagcaagaagagagttccatttccatagcgccatattaactccagttcaggatcgagatgatgtttggtttacatcatcagatcttgccaaggcgcttgggtacgcctcaactaagagtattagcaacctttacagtggtaactctgaggagtttacagaggctatgacaatggtcattggggtaatgactaacggaataaacaacaacttacgtgaaaaaaaggtcaggatcttctctttgcgcggcgcccatcttatagcaatgttcgcccgcactccggtcgctaaagagttccgccgctgggtgctggatattctggatcgtgaagtggttcattcgccgattgctaagcagttcagtgatgatgagctatgtcgactcgcttggatgtgggatgtaaccaatcggatgcaaaactttgcaagagatttatacccagcaatgcgaacaatcaaatcagagtatgcaggtaagttttatgactttggtaatgagtttcgctggacgtttgaagaagcgagaaaggctatagcaaaggcgtctgagcatattgcatatgaaccacaaaacgacgacaactggtcgcgggtgctaccaagattaagaaaggagcttcactga

SEQ ID NO: 266350 - DNA, 414 bp, Klebsiella pneumoniae
atggcgatcgttgcattcgacagtgctgagttcctggggatttaccctcgttttgcgggtgtgctgactccggttcagctggagaatgcattcgatacggcatgcctgatgctggataactctaacggctcaatcgtgccttatgaccccgacaacggcataaaggaacgcaaaacgcttctttatgcgctgacgtgccatttgtgtgaaatggcacttcgtgttgccggacaggcaggccccatgaccggagccagcgaaggcagcgtcagcgtctcctttgctgctcctgatgtgacgaatgcctcctggttcaagcaaaccacctgcgggtcgatttactggcaagggacgagaaagtacgtcattggcggacggtatatcgctcagcgtcattaccatccatgggggtga

SEQ ID NO: 266351 - DNA, 366 bp, Klebsiella pneumoniae
atgtctggcaccgtacacattcgcctgaagcacccgcacgggattatttttgaccttgccaacgatcgcaaagttgctcttaagggcagtgactttcacctgcgagggctggaaaaaggcgtgctgacctgtggtttcggtaaaactcaggtaaaagacaccgactgggaggaggttctgacgacctatccgtcgatggttgaggacttggtccgcaaaggcgttctcatttatgagaatgacgctgccagcgcagaagaccatgctcaggataataccgaggtcaggcatggtcgtgagccggtagatgtcaaaaacgacaaaaccatcaagaccgaagaggccccggcaggcgaggttgcataa

SEQ ID NO: 266352 - DNA, 1020 bp, Klebsiella pneumoniae
atgaatattacgtttgaacaagcgaagcggtacgggtttaatttcggcaacaatgcacgactgtggatcacacaggatggcatgccgcaaattcttcaggatgccgcgctgattacccaggccaactctaccattccggcggagttgctggcgtatatcgaccctaccgttatcgaaatcatgacggcacctcgcaatgcgcgtgagctttacgcagaagagaagcgtggtgactggacgaccccgtacttcaaatggcgtgcagatgaacccactggtaataccgccgcctattctgacttcggtcagttcggcgttgctggtgtcaacagcgagtggcatacccgtgagcagtatcggttccagaccattatcgaatatggcgatctggaacaggacatggcggcccaggcgaaaatcaaccttgccgctgccaagcagcgcgctgcagcgaccaccatcgatattgacgccaacaagttctatctgctgggcgttgaagggaaagaaatctatggggcgctgaacgacccgaacctgccagccgccgtggctcctatttcggtaagcggggtgacagcctggtctggtaaggatgctatcgcccggtacaacgacgttatcaagttgtttacccagttggtcacgcaactgagcggcctggttgatgagaagtcacgtcttaaaatcgtatcttctccagccactcgcgccctgctggcggcacctacggcgcttggactgacaaccatgaagatgctggaagattacttcccgaacgcagagttcgtgtccctgcctcaattgggtgccgcttatgccccggcagcatctgaaacgctgatgattatcgctcctgaggttctgggtaacgagactggtctgttaggtttcggcgaaaaaatccgcatgggtcgcatcgtgccctctctgtcctctttcgcgcagaaagtttcaggcacgacttacggtggcgtgatccgggttccggcggccgtcgctcagatgacgggcatttaa

SEQ ID NO: 266353 - DNA, 483 bp, Klebsiella pneumoniae
atgggactccagaaacaagttggtttgtattactccggggcggttgcgggcgataaagcgtcgcacaacccggttttttatcggccaaaaaatccgctcgccgaaggcgctgtgactgttggtaacttcgtgtttgaaggtaccgacccggaagcgcaggtaaaagcatcaggctctgttgtggctggttttgttcagcgcttgattaactattacaacttcgtcatcacttccagcggcacgctgaccatcgccgacgagacgccgattacggtggccattaaaggtgatttctatgctgcctattccgggacagcaccaaccttcgggcaaaaggcttttgcctctaccaccgatggcagcgttgcctacggtgacgcaggcgccactgtagccgggcatgttgagaccgacttcattgtgaaagaaattcgcagcaatgatggcctggtgatgatttcaaacctcacttccgcagcctga

SEQ ID NO: 266354 - DNA, 1476 bp, Klebsiella pneumoniae
atgcccgtacatcagaaaaatggcaaatggtggtggggcgaaaaagggccttacagcaccaggaagaaagctgaggctatagagaagactgcttatgccagtggatatgttggtgacacaagtatccgcgcaatggtttttgataaagcatcgcgccgccgccttgataacaatggttacctgcatgtcagccagacgcatttaacgaaagagcaggtggctccgtactggggtaaggaaattcccggatgggaaaaacttggtcttgaaccagagaaggtttattacgcctatcgatcagctgaagaactcgaaaaagcgaaagacactttcaacggtatgccgcttctgatcctgcacaaacaggacagcgccgatgccccgctaaaagagctaagggttgggtctatcggtaccactccggtctgggatgctccttacctcgataacgcactaaccgtaactgataaagaggccatcgacggaatactcaatgaatctctgaaagaaatcagttgtggatatttcttcgaacccgattttacgccgggtttctttaatggcgttgcgtatgactttgtgatgcgaaacatccgcgggaatcacgtagcgctggtaaaagagggtcgcgctggtcgcgacgtatatgtccaggacgcgatgccgtctaaaccaacaaaggtgcacaaaacaatgcaacttaataaaaaacaggtggccgcggtcgttacgttggccacctacctgaagcctcgccttgctatggatgccgctccgggcgatctggctaagctggcagttaaatactcaaaacctcagtctctggttaaggccgttgttcgacagtacagcggtaagctggctcaggatatggaaattgaacctgaagagctggcggagctgatggagggcgccgaggaggttgcgggtcctgaaacagaggcccgaactgaagaagaggcatccttcgacgaagataacgcctctgaaagcctgaaggccatgctggaaggcaaagttcctgacgatctgctggaaaaacttcttgcctgcctgaatcctgaaactgcccaggaccaggaaacagaagaagagaaagccgcccgtctcgccaaggaaaaagaagagaaagaacgcctggaaaaagaaagcaaagaaagggctgccatggatgcaaataccattcgccagcaaatcaccgctgaattcaaatctaaaaacgaggccagccgcaaggttcgtgagctgattggtgaagtagatccgatggcgttcgacagcgccaatgatatctacgcccatgccctgaagcagaaaggcgtgactatcacgcagtatgagccggcagcatataaaggcatggtggatatgatggtggcaaacaagccagctcagaccccgtccccggcctttgatcactcagctgtaacgcttgacggtcagtttgctggcctcaaaaacatcaaaatccagtaa

SEQ ID NO: 266355 - DNA, 177 bp, Klebsiella pneumoniae
atggcaatcgtcttttcctacgatgaaaaccattccatggttatattccggcaagaccatgctttcgatctctcgaaacccgccagtggtaatccctacctgaaccgagaagtgctgaatgatgcggtgagtcatgtgtatgcccttatggttctaaagtcaggagtttccccatga

SEQ ID NO: 266356 - DNA, 270 bp, Klebsiella pneumoniae
atgatgatctcgccggtaccacccaaggcacgtaaggaattctacatatgcatctttgggtgtagggccctcaccggaaatatggcacttttctccaggagtatccgcccagaccgcgcattcaaaacacttattgaagcgattaatcgtatgtgcggtttattattcgttttcacattcatgcctctcttgcccggtgtaatcctcgtcatcgccatcgggaatatcgctaacatcgataccaaagaagccactgtgcggatcctctga

SEQ ID NO: 266357 - DNA, 1512 bp, Klebsiella pneumoniae
atgacacaaaacacacgacgccgaagcaatcggcgggggcggactcacgccggaagaaaggggctggtcatttctcaggcagtgagagataaaattgaggctggcgaatacattcccacccttgaccagattaaagcgctgtatggaccagcgaagacgctgggcgcgccacagagtgcgcaactggcaatggacaatatgctgaatgagtcaggtgcatataccttacttcagcatgcgttccagatggggcaattcccctctctggttccgtcattcatggggtatgcggcgctttcatctctcacgcagaacgggcttatccgcacctgtattgaaaccgttgcagatgacatgacccgcgaatggatagagattaatgccgttgatgaaaacgacagcggtgacgaatcggacgaaaggaagattttagaggacgcgatgattgattatcgtgttcaggctattagccataagggtgcggagtttaatggctacttcggcggtgcgatgatttttatcgacacaggcgtaactggcgatcaactgtccttgccgctggatatcagcgaaaaatccactgaactgcaaagttttaagcgatttactctgattgaacccattaacctgtttcctgggaattatgagtctatcgacccactaagccctcactactacgttcccgatatgtggtgggtgcaagggaagcaggttcatgccagtcgcctgatacgcatatgcggcaacgaagtgccgattatcctgaagccgacctataactttctgggtattcctcaggcgcaaatcctctatgactacgttatccattttcaggatgcgcgcatgtctgaggcgaggctgctggagaagttctccattaaaatcgtcaagacggatatgcaggacgtgttgacgaaccccaatgcaacttctggggtggatgctcgcgtaggctacatggctgccaacatgacgaatgacggcatcatgatgcttgataaagacatggaggactttatcaacgtcaacgtcccgttgtcgggcgtcactgatatcgtgcgtcaacaactggaatttatcgttgcgattaaccgcactcctgcggtcaaattgcttggtatctctccggctggcttcaacaccggcgacagtgatatcaaaaactacaacgaccatatctcatctcagcaagagaaaatcctccgcgctccggtgcagaagatgctggatatcattcagatcgtgaagcttggtaaatacaacaagtctgtatcattcaagttcaaagggctgaatgaggatgatgagaaagcgatcgctgatgctcaggatgttaaagcgggaacccgacagaaataccttcaggaaggcgttgtttcgcaggaagaggtgaggaaggccatttcagaggatccgcacagtggcttctttggtatcgatgttagcgatattcccgatggcgatgacgaggattacaccgggcaagagaggcatgaatgtgaaaacgaataa

SEQ ID NO: 266358 - DNA, 1512 bp, Klebsiella pneumoniae
atgacgactgctgagcaaaaaatattcgcccgcaaggttgagtgtgaagaggatggcatgtacttcgctcgctacttcttcaagcagcgcaccggcggaaaaatgatagtagcccctcatcataaagttattcagcaaacactggatcgcgttattgatggtgagataacccgactggttatcaacgttcctcctggctatacgaaaacggaactggcaaccatcaacatgatggggcgcgggctggcgctaaactgccgggcccgctttatgcatctgtcctattcgcataaccttgcgctgctgaactcttccacggcgcgcggcatgattaaatcgcaggcgtatcagtccatgtggccgatgtcgttgcgcgatgacgctgatagcaaggcgatgtggtggactgaacacggaggcggagtttatgcgtcgtcatctgccggacaggttaccggttttcgtgccggacatatggagcctggatggcagggtgcactgattatcgatgatccggttaagccggatgatgcttactctgaaatcgtccgcgacggcgtcaacagccgctttaacgagacaatcaaatcacgactggcgatcgagacgacgccgatgattgtcatcatgcagcgcatccactaccacgacctgagtggttatttgctacgaggtggaagcggtgagaagtggcatcatctgaatctgccggtcctcattgacaacagccgcagctacgaagaaatatatccggaaaacacccacgcgataccaattgatcatggtctgcctgatggctggttgtggccgtttaagcataacgaatctcaccgcatatcgctgttctctcaccggcggaccgctgaagcgcagtacatgcagaatcctaaacgcttcaatgcggaaggggctttatggactgaggacatggtcgtgggcgcgcaccggctgaaaatcgagttgccaaaggcgcgaacggttgttgctattgaccctcaggcaaccaacagcgaggaaagcgatgaaacgggaattgttgctgcatcctcatatggtggcggcaaagatcgcatgtattcactggatggcgactatagcgggaaatacagccccaatggctgggcaaccaaagcgattgatgcttataacactcatgaagccgacgctatcgttattgaaaccaaccagggcggcgatatggccgaggaaacattgcgcaatgctggttttagcgggcgtattatccgtgttcatgccagtaagggaaagttcgctcgcgctgaacccatttccgctctctattcacaagggaaggtttcccataacggcaatctgtatcaggtagagaatcagtttctggaatatgtcccttccacggcaaaaaaatcgcccgaccggcttgatgctgcagtgtgggcactcaccgaactaagcctcggtgcgggaggtttgaatatcaacccagcccttgtccgtcaggcgcaagctcgcaataactaccctcggcgataa

SEQ ID NO: 266359 - DNA, 480 bp, Klebsiella pneumoniae
atggcagcattatcgacagaggttaaagccttcattgttcaatcacttgcgtgctttgaaaagccagcgagagtaatagagcttgtaaaggctgaatttgggattgtggtatcccggcagcaggtttcgcaatactctcccggcaatgcgatggcggcaaagcttagcaagaaatgggtggatcttttcaatgccactcgcgagcgcttccagactgaaatatctgatatcccgatagccaacagggcttatcgtttgcgcgtgcttgaccgtgtggctgaaaaagccgagagcatgaaaaactatgtcctcacgatcgatgtcatggaaagggcggcaaaagaggtgggggatgcctatagcaacaaacataaggttgaacattccggccccaatggtggcgctatccagacgatcaccatgagcaaagaggaatataaatctgcaaggcaggagatgctggaggatgacgactgctga

SEQ ID NO: 266360 - DNA, 513 bp, Klebsiella pneumoniae
atgaaagaagaatggaaagttatagaaggctatgaaaattacgccgttagtagtttgggtcggattaaaaggcttacctccaacaataacgctgtcgctgggaaggtgctaaagacgttcattgcgaccacgggttatccgatggttaaccttattggtgagggcggtcggaagatgctctcagttcatcgtctggttgcaaaggctttcatcccaaaagtgcccgggtgcgaagaggtcaatcacatagactcttgcaggtcgaacaatgtcgctgaaaaccttgagtgggtaacggccagcgggaacaggctgcacgcatatcgacatggcagcctgactgctaagggtgccaagaatggatattcaaagctgactgaagacgccgttattgaaattcggcgacatccatctatcactaaggatatgcaggaaaagctttcagctaaattcggtgtttctatggcgaccatccgtgacgtggcggcaaggagaacgtggacgcatatttga

SEQ ID NO: 266361 - DNA, 354 bp, Klebsiella pneumoniae; identical to SEQ ID NO: 222967

SEQ ID NO: 266362 - DNA, 1818 bp, Klebsiella pneumoniae
atgtatcatctcgacaatactagtggtgtaccagaaatgccggagccgaaagaatcacagtcaaccacaccccgctggtttggcgagtctcaggaacaaggcggaattagttggccgggagccgactggtttaatattattcagttagaacttcttaacattctatcttccgcacaaattgcgccagataaaacaaagttcaatcaactaactcaggctattaaatccattggcggtgatgggttaagtcaacgattagctctaaaagatagtagtgttttaattgctgggttaagtgctggcttaattgcggggaatgcgctggcaactaaacacctggagcggtccgcagatgtttacgatgttgttattacctacggtcaatcaaactcagcaggtgaggcgaacctctctggtgatacatccggctttcctccgccgcttgagcgctccctcatgtacgattttaccgacgggacgatcaaaccgattattcagaaaattgttagttcttcaggtgtcgcatcttctggtcatgcatggggagagttctgtaacgagtggtatcgcctgactggccgaggtgtagtgattgttcattgtggccgtggcgctacgtctatagcgcaactgtcaaagggatatacaactggcgccgccgattattacgggaaaatggtggccggtgttgctgccgctaaagtcagaatggtatcgcagggtctgccgctgggtgcaacgtttatggcgtttcatcatggggagacagaccagcaactgcttaccacatttgatgtttatcgcgctgcattattgcaattatttaacgatgtcgatgctgacgtaggcttaactcgtttctgtaattttaccgttgggtgccctgctaaccgcccggaatatgcctgggcgacgattcagaatgcgcaacgtttcgtttgtaacgggcgcgagaaaatgctgaccgtttttgatggctgcccgtcattcttgctccgcgatggtaatgttggctcagagggcgttcactatacccagaagggctataatttgatggggagggagggcgcacgtggcttgtggtcttcttttggtggtgctgaaaactacaaaacagccgtcgatttagctcagtataacaagcacattgcaccgtggtcgcgagccgcgcactttgcagcgtccgtgcgctgggctggctctacaaactcatggggattactgaacaaaagtaacgatagcggcacgtggcgccctgcaaatatcaacgccgttcataccgcagccgatggtaactctctggaatttaccgtcgcagacaaagcagcgctctatttcacaatgtccgcgagcattagtcgtaatctggcccagcagggactaaggctgactgctgagccgttcagcgatggtgtggaatataaaatcagggtggttatatacgccgacgtttcattcctgctgaacactgtcactggagagctgagaacactacggcaaacctctgttcagggctggctatcgagggcgattactgctgttgtaaatgcccctggtgttgtgacgctgacgcacggaagctgtttagcttatccctccgtctcgtactatggctctgaagatggctcaaaggtcgctgcgtcggtatcttctttttgcgcaaatggggttaccactcgtgttaactgcagcataacagttaacgatcaaaacccttgggtgacagtgaatttacctcgcatgctcctgaaacctgattatctctatgacgcggattctacaattaatatgacaggaatctacgccccagagttttaa

SEQ ID NO: 266363 - DNA, 333 bp, Klebsiella pneumoniae
atgaatatcatcgtggtgctctgtctgaacaacatcgcccggacagtgacaggctattacccactgattaatgccagaaacatttgtgagttttttatcgccatccggcagattcatctggtcaggcataaggtgtatcttataacggaccgtgcgccgtatcaccaggcctcactggtacaggactggtcagtggtgatgaatgagcatacgcggaacaaccagtatttcgccacatcgaaggacttcctgcaggtgaacaacggatttttcagcgatatcctgccagagatagcggggaaacgggatagtcacattaacgatattttttag

SEQ ID NO: 266364 - DNA, 1770 bp, Klebsiella pneumoniae
atgagcaaaaggcatgcgattttaataagtaatagtgtttatgaccttgaggatttaaatttagaaactccagataatgatattgcagcagtagagtattctcttttgagtagagggtttaccgttgataaatatcacaatctaaaaatacaagattttgaaaacatctttgaaaatttaagaaatagtccaaaatatgaattattctttttttattactctggccatgcacttgaaataaatggtagagggtatctattgccagtggatctttcaggaaaaacggcatatgaaatagccacgtatacataccaccttgataagctgttaatggcaattgaaaaaaaggcaaaagcgaaggtggttgttttagattcttgccgcaatcgtgtagaaggttgggaagataaggattacacatcatttgctaactatatcggttttgagccaaatattgatacatacaaaaatcttgcgattgcctattcaaccagttcaggagcgaaagccttcgaggggaaagggattagtctttatgcgaaaaatttaagtgaatacattctcaaacataatataggcatagacgatgtgttcaaaacaattggagctaaagttactaaattatcgccagcagatcaacggccgtggttttactcatgccttgatgaatccctaacctttagcgatttgcctaactatgaatatgtccatgccattaggactccccttagtggggaagagattggcatcagcttattgggcagggagcaagtagtgtatggtaattctcatgcaatatttggagttaatcaaacttatgcatataatatttataaattaaaggagaatgttatacttgggggcggttatagctctaatacaggtctggtgttagccattgatgataattcgatcctggctggaaatacgaaagtaaacccagattttgactttagggattttagatgtatccaagtgtcaccagatggccaatacaccattttagtaggcatggcagagtttgttatcttggataatataaactttatcgaacacaaagaagttcttgctggtgataatttatacgtagcaaagttcattgatgactatactgtatggataggttctgataatggtgtccattcgatttcattaactgataatgggattgtttataataatgttgatattgaatatttattatacgtctatggtatagatgttattgattctgagactgtcacactctcgtgctcaagtggtaagatattctttgttaacaaaaaaacatttgaagtgaagaatattttatctcttggtgaaaccgtgcgctcattctcttcgaggcgagattcactgatacatataacaaatgatgatcaattaatacaagattttttatataaaccttggaccctggatagaggtgccaactccttcttaaaagaacacctatctgacaatgcaatagtttttataaaagtctcgcctattgatcctcttatagtcgctgctagtgatgaagggattttatatttcatagataatcgtacttttgacgcttatgagactatatcagttggtacgcctcagaataaaattcaaggtgtttcttttgagcccgatggaaacattttaattctaactaatgatggttttgtgcatttttattgtaggggagaaactgatcataaacaggctgtaaaatacgttgataaaattgggaaaacaaaaagaagaaaccaaaaaatcgctcatggagttaagtga

SEQ ID NO: 266365 - DNA, 600 bp, Klebsiella pneumoniae
atgctctggctccgcttcctgctgtcaggttatttgggactttggatagtcagtattatttgctgcctgtttttctatctgttcaggctaaccgataaaacgagttgggtactgcccgttgtcagcatagcggggtttgcatttattaatacgttattagtttgtgcgctgcggcaacccgctgcgtttatggggctaacgcaggcagatgaaatcctgctggagaatattcagccggttaaagcaccgcagttacggggggctgaacaggtggataaggtggcagaatttatgcaccggaatcagccgtttctggattccaccctgtccttaagccagcttgcgcatcagttaaaactctcgccgcacgatctgtcagccattatcaacaacgggtttcagcagaatttttttacgtttatcagcgagtaccgaatagagcacgctaaaaaactcctggcaatgccggaagataagcggaccattcttgatattatgtattcctcaggctttaactctaaatcggtctttaataccgcgtttaagaagcaaacgggtttaacgccttcagaatatcggcggcggcactgttgcaaatag

SEQ ID NO: 266366 - DNA, 207 bp, Klebsiella pneumoniae; identical to SEQ ID NO: 129973

SEQ ID NO: 266367 - DNA, 726 bp, Klebsiella pneumoniae; identical to SEQ ID NO: 129974

SEQ ID NO: 266368 - DNA, 417 bp, Klebsiella pneumoniae; identical to SEQ ID NO: 129975

SEQ ID NO: 266369 - DNA, 699 bp, Klebsiella pneumoniae
atgttacaggtgagtcagctacatcaatactacggcggcagccatattttgcgtggggtggatttttccgcccgccagggcgaagtcacctgcctgctggggcgcaacggcgtcggcaagaccaccctgctgaaatgtctgatggggctgatcccggcgcgcagcggtgaggtacgctggcaggatcagaacattacccaccgtaaaccgcaccagcgggtacaggccggggtggcctacgtccctcagggacgcgagatttttccgcgcctgacggtggaggaaaacctgctgatggggctatcgcgctttcccgcccgcgaggcgcagcaggtgccggaggagatttaccagcttttcccggtgctcaagaccatgaagcagcggcggggcggtgacttatccggcggccagcagcagcagctggcgatcggccgggcgctggccagccgtccgcagctgctgatcctcgatgagcccaccgaggggatccagccctcggtcatcaaagagattggcgaggtgatccgtcagctggcgagccgcggggatatggccatcctgctggtggagcagttctatgactttgccgccgggctggcggaccactacctggtgatgtcgcgcggcgccatcgtccagcagggcaagggcggagatatggaaaccgacggcgtacgcgccctggtgactatctga

SEQ ID NO: 266370 - DNA, 1575 bp, Klebsiella pneumoniae
atgaacgcattgcgtctcatgagtgtgttggcgctattgctgaccttgctgccatggcgggcgcaggccgcggaggcggacgacttcgttgccgccagtcgcagccagcaggcgcagctgttgacccagtgggcggcagcgccgcaggcggatcgtctgccgctgctgcgggcgttgaccaccgagagcctggtgatggacgacggaaaacatgctttccgcacccgacagggcggattacagccattgggcgctgtcgccgcgccgcagggcgaaacccggccggtccgtctgaccaaccggctgcgcaatctggctgccggcgcgctggccagccatcttattttaagtgacaacgtcacagagcgagcttccgccgcacgaacgctacagcgggaagcgaccccggccatggccgcgctgctgcaacagcggctgcaggcggaaaccgatgataatgtgcggggtctgctggaggtggcgctggcgcgcctgcagctcactcagcctgaggccagcgcgcggctggccgccgtgacgctgctcggccattccgcggatccggaaacccaggcgctgctgatcccctttaccgatgcccagcatgagccggatgcggcggtgcgcgaggcggccagcgacagcctgcaaaagatcaaacatcgtctgctgctcggcgatctgctgggccaggcctttatggggctgtcgctgggctcggtgctgctgctggccgcgctggggctggcgatcacctatggcctgctgggggtgattaacatggcccatggcgagatgttaatgatcggcgcctacagctgctggctggtacagcaggcgctggcgcagctcgcgccgcaatggctggccttttatccgctggtcgcgctgccggtggcgtttctggtgaccgccgggatcggcatggcgctggagcgcaccattattcgtcatctgtatggtcggccgctggaaacgctgctcgccacctgggggatcagcctgatgcttatccagctggtgaggatgttgtttggcgcgcagaacgtggaggtggcaaacccggcctggctctccggcggcgtgcaggtcctgccgaacctgatcctgccgtggaaccggctggcggtactggcgttcgtcctgctggtgctgtgctttacctggctcatcctgaaccgcacccgtctggggatgaacgtccgcgccgtgacgcagaaccgggcgatggccgcctgctgcggcgtgcctaccgggcgggtggatatgctggcctttggcctcggctccggtattgccgggctgggcggcgtggcgctgtcgcagcttggcaacgtcgggcctgaactgggtcagggatacatcatcgactcgtttctggtggtggtgctgggcggcgtcggccagctggccggcagcgtggcggcggcctttgggctgggcattttcaacaaaattctcgaaccgcaaatgggcgcggtgctgggcaagatcctgatcctggtgatgattattctgtttattcagaaacgaccgcagggtctgttcgcgctgaaagggagggttatcgactaa

SEQ ID NO: 266371 - DNA, 648 bp, Klebsiella pneumoniae
atgacaaaagaagctgttttggagcaaggtagcgagctgatcgtcttccctgaattagccttgacaggtcattacgataatgcggctcatgctcaaacgttagaaagcccggcagtgcagacgctggctcgcctggctatacagctaagagtctaccttgtggtcggaatggcagaaaagcaacatgataaaaactacattgcacagatgctgtttgggccagaagggataatcggcagttacaggcaaatccatctttcgcaggaaagccaaaaatgggccagcgcgggagaacactggcgagtgtttgataccgcgcttggcagaattggattgttgtcaggtcacgatgccctgtttcccgaatcagcacgaattctcgctttaatgggatgcgatattattgcgtgttctgctgcgctttcggcaggatttaccgccgcccacgcgggcagctctgtgacacagaatttccctatcccaacaggggccgatccgctgcattggcacttattcagaacccgtgcgggagaaaacaatctttatctggtttttgctaatgcacttgatggtatagatggggcaggaggatttagcggaattttcgggccagaaacggctttgttgaataaatcgaacttttgctga

SEQ ID NO: 266372 - DNA, 1161 bp, Klebsiella pneumoniae
atggatatcacagataagcatattagaactattgtttctgctaataatgatgggaatttggctatatttgtaggcgccggtgtttcaaagtcatccgaaagtaagactaggaaaatacctgattggtctgagttaatgactgaattaagaggagagttaggtaattatgaagaaaatgattttttgaaaattgcacagctttattttctctccttcggagagaatgtctactatagcaagattaaaagtctttttccctctggccttaatccatccaaaatacataagacgatttttgatattagacctgattttattatcactactaactgggatgatcttttagaacagactgtttcagagaatgcttttttttatgatgtggttagctctgataaggatttgatgaagtcgggtttaaaaaacaagctaattaaaatgcatggtgatttcaaaaatcataatatagttttcaaagaagatgactatattaattatgatgggaattttccgcttcttggcaacttcataaaaagcatattgtcaactcatgtaatcttgtatgtcggatattcctataatgatatcaacattaaacatatactaaaatggtctcagcaatatacttcaatcagacctccgatgtttttagctgtctttaaagaagatgaggctcagagaaagtatcttgaaaatcatggtataactacgttatatttgtctgagtgtgagtgtaatgactttgataatgaatattctaataaactgttaacttttttgaatagaattaaatatgaagaggtctttaaggtaagtggtgatggtgaggagttgaatgatttatcttgcctctctttcatttatgagcgaatttcgttactgaatgatatggaaaggtgttttcctgaccaaatattaaaggctttgtctaattgcggtctattgtacacgcaagatgcgtctgcctttttaagattctattcagaagaattaacctatgattataatcctaagctcaggaaggtttactctaggtttaaagtgattttaaacgattctcaattaatttctaaacataaaaaaatattaactaatattttttctataataaataagtgcggattgtcaggtgtgattttggatgataatcggctttgttga

SEQ ID NO: 266373 - DNA, 762 bp, Klebsiella pneumoniae; identical to SEQ ID NO: 101528

SEQ ID NO: 266374 - DNA, 417 bp, Klebsiella pneumoniae
atggaattagtaaaccttgaaatgcttgacatgataaagctaaaagaaatactgaataaatattttatcaagtcaacaatcgatggggatggagaccttattatatcaggaagtatcaacctattctcaaatatagacaaagagaaagatacacttagatttttcggctctatacaaacgaaataccttaaaaaagaaaagagcattcttaatgcttttgcaacaaaaataaacacggcaagcaacaccattaaatattcaaatttagatgattcaatcttttttgaatatggattatttaccttaggtagtgttgatgaaaaatttatagtaacaaccgttcagaacattatgaaagaggttaatgacacgcgcggcttattccctttgatggatgaagttttaggcgttgattaa

SEQ ID NO: 266375 - DNA, 702 bp, Klebsiella pneumoniae
atgaagcgtattgccctttttttctgtttcatttttagttttgcggcccatgccaacaatattattgttaacggtacccgctttatttatccaggaaatgaaaaagaaataacggtacagctttcaaataacgccgaccgtccggcgctggcgcaggcctggctggataacggcgatgccgatgccacaccggataccattaccaccccgtttattatcaccccgccgatttcgcgcgttgacgccaagagcggccagacgctgcgtattaagctcggcagcagcgccggtctggcgaaagataaagagacgctgtggtggctgaatctgctggaaattccgccggtggtggccaatcagaaaaatgaaggccagaacgtgctgcagctggcgatccgttcgcgctttaaatttatttatcgtcctgccggactgggcaaccgcgatgcggcggccgagaagctgaccctgaccgccagcggcagtagtctcgccatcaacaacccgacgccgttctacattaccgtcagccgtatttcccgcgacggcggtaaagccctgaacagtaaaaccgtgatgctggcgccgcagtccagccagacggtggcgctctcctccgccgtcaaccgcggcgaaaccctgaccgttaacaacattaatgactatggtgccgatgtcgcagtgaaagtggccgttaaataa

SEQ ID NO: 266376 - DNA, 519 bp, Klebsiella pneumoniae
atgataaagatgaggccgagaaacagctgccagtactccggcatcaccacggtgaaaatgctcttcgcgccgttgaccagcccggcgccaagcaccgggccgatcagggtgccgcgcccgccgagcgccacccagatggcggcctcaatggagttggtcggcgacatctcgctggggttgatgatccccacctgcgggacatataacgcccccgccaggccgcagagtaccgccgacagcgtccacaccagcagcttgaagccgcgcgggtcgtacccgcagaacatcaggcggttctcggcatcccgcaccgcggtgaggatccggccaaacttactctgcgccagcgccgagcccagccacagggtcagcaacagcagcaaaaccgtggccataaacagggtggcgcgggtgccggtggcggtgaccggaaaacccagcagcgtggtaaaaccggtgaaaccgttattgccgccaaacccggtctcgttgcgaaagaacagcagcataccggcataa

SEQ ID NO: 266377 - DNA, 1041 bp, Klebsiella pneumoniae
atgctcacctattgtattgtcgctgctacatcaatcattatgctgtgtattatactatataaaataaaacctaaatatatttattattcatttttattctataagaaaaaaataagccaagataagaatttttttagcagctgtattcagtatgtagccaccatttttttgttcacaattctgtatttttttatagagtatgttccaatctcagattttattggcaagataatgccgttattgcctgattatgttagtgcctttttagtctctctaaaaggtaaaggtgcttcaataacaatcatactggcattaatagaacttataattttattatttttgttttttatttttatgaaaacccccacatctccaaaaaacaagatagtcaatgagttgagtttagataaaatcataaattataagaatgttaatatattctcattttttggctccatagaagatataagtaatattcaagtgattgtgacatctgagaatagtgatttagaattagcaagcttttcaagtacatcaatatctggcagggtgagaaatatggcgtcatctaaggatgatattggaaatgttatatctgatccactgtatgaaaatattgttcgttttaagaaaaagcataataagtataacgattttaatcttgggatatgcattccttcgcaacctttgacattacagaagcatggggtgaagtgtgttatccacgcgattgcaatcaaaaaaaatagcgacaatacaataagttatgatgatcttgctataaagaaaataatttcctattcaatagagaaatgcatcaaaaactctttcgaaagtatttttattcctatttttggtataggcagtgctcagcaagtacctacctatttaattaataaacagttagagtcaataaagtccgtattagactgcgagttaatgaatactccgtctgctttaagtctgaatatttacttgggcgtttatcgagaattggattgtttattcttaaaaaaatcagcagtaaaaacgtttaggtag

SEQ ID NO: 266378 - DNA, 519 bp, Klebsiella pneumoniae; identical to SEQ ID NO: 191848

SEQ ID NO: 266379 - DNA, 1146 bp, Klebsiella pneumoniae
atgaacattcaacagcgtatagctgaacgcttagtacaagcgagaaacgacgcgggaatgagtgcaatagctgtcgcagatgcgattggtgttgtacgtcaaacttacagtaagtttgagcaggcgcagggcgttccaagcgttactcaactcatcatgctctgcaaggtttttgataagcctatcgggtatttttatgatcaagatgatggcgagtttcgttttgcaatgcgagcagatagccctgatttattggacgctaaactccgcaatgaattgattgaaaagttgaaaaatatcaacgctattgaggaggctgctgatgcgaatttaccagaagatcttcctaactcaatgcctattttctctgccagagaagaggacttacaaagggtagaagataaggctatggaagagcgtttccgtcttggtatcgggaacgctacctgtgttggtgacattgtagccattctggaagcgtctgatatccgtgttattcctttcaatcgcgaagaaaatgataaaggaatggtgttcgggttttctgcgttttcaaataaatacggtaccgcaatttacgtaaatgttcatgacagtatctcagtagagcggcaaattttcagcatttgccatgaatatgcgcaccttatctttcatcgtgaagagtataacggccctgccaaaagttataaaaccaaaggcagatcaacttcaccagaagagaaggttgcgaaccattttgccgcttgtttcttagtgccagaaagtgcattgaggaaacagtttgtcatgcaaggtgggggatgggcttatgaagaaaccgttcttaggctgaaaagcatatttagagtttcggctacttgcattattgatcgccttagtaaatgcaagttaatcaatcaacaaaacactagatacctatgggcaaccgctaaccgtaaaggttggatgaggtatgaaccgaatcctataagagaagcactaaattacaaaggccgtttaaccgtattgtcgcgtaaagcgtgggaagccggttccgcgtcggaaaccttcatatctgaacttttagaactggatagaaaatctctcagtagtcttctggatgaatggtacgacgaacaggaggctggagaggatgccgtttga

SEQ ID NO: 266380 - DNA, 813 bp, Klebsiella pneumoniae
atgtttctaatgaaaagttgtgaaaaagaattcaatataaaaactctgggctcgatacggattggcactttgtatggttttaggattttagagaatgatgaggtaagagatatacttgaaggacaatatgattacaagataagcataaaaaattccgtaatacctattgaagtgcttggttatttatacaaaggtttcttttcattagaagactttgattatccgtacaatacactttctatccgcccaaacattcgctcagctgaaggtttaattattggtggtaaatttcaaatatttaaccatgatgcaagggtaaccaactcacaagtaattctaaccagtctgcatcataattgttttgtgttttgtatgtcattgtcatcagacatacctcttaaaccaaaattcaagggttatgatgatttttggttctttagcttagatagaagaaaattgttttcagatataatcaaagagaagatcagagactgcatcttaacaaaccctgaagaatatggcgtaattattgaaaatgacaaccaattggagattagagcatcacatgaccccatcaaatataggagaaaaaatattaatttaaacacttccaatgttagcacgttaatagcagcaataaaggaattggataaaatcgcctttaccaaacctctaaaatacaaagatgacaatgaatatagattctgctttgaagtctttgttaatggaactccaatatcaataacaaagccatatatcgacataaaaatggatggcgaaacgacaagaaggatttttcaaaaagaagaataa

SEQ ID NO: 266381 - DNA, 2604 bp, Klebsiella pneumoniae
atggcctttaacccggagctggggagcacgtctcccgctgtgttgctcgataacgccgagcgcctggataagctggttaatggtcccgccgcagatgttcccgaccgtggtggtgaccctctttattcatggcgccagatgatggcgaaaaacgatgagatccggcagaacatcattccgctcagcaagcagtacatgacgattgaggctgcgcaggcggatatcgcgaatattccagaaggcagcagcacctatgttcgcagtcaggacggaagctctctggccgatgagtacatcaacaatggtggcaccctgactgctaccggacggaagatgccatccggggccgcagttgaactcatgtcagataccgtccagcgtttaatgacggcgctgcacgttatggcggagggcggcacaagctctggttcaggtattgaaagcagcgacacagtgcagaatctgatgaccggatttaacgtgctggctgagtcaattaatactctgtcagtgggaaaccagcaaaatgccagcggattatccaggctggtctcatcagtccagatttgcactgaaatgctgaacacgctggcggctgagatcgtaactcctgacggcgcatcacagtatggttatgtggcattttccgcgcccggtacagtcaacgctggtaacgggtcgtttggcaccgatacacgctaccgcaggactgggatgatcccggttcgcaagggtgacgttgtgcgcctcactgtttacaccacatcggcaaccgcaggccacgcagctgcgctttacgatgcatcgggagcgtatgtgggtccgctggggattatgtgcgcgtcgtatgcggcgtatcaggcacggtattaccagtgtgaaatttctcaggatggctttgttgtcgctaacacgctggaccagagcgcatcttcttctgttgatgtgactggtgcggccctgacgattgaccatcgtcttcgtggccggtcagcagatgctgttattaaactgacaaagtcggatttaatcccggtccgcctggataatggaaacattaacgccagctcaattacgcaggatggaatcgttaattattccaccgggctgtattcctgcaccggcggcaggctcctgttcagtggtttgcctgtagcctcatcgccgggtcagagcagcagcctgtataacgttgtgttctatgatgctgccaaagaccttattgcatatcgtcccgttttctccagctctggctacgttattattcctgaaaatgctgcgtactgggcgcagcagataatcaccgacagaacgcctgactggtctgctgtctcaatcgtttattacaattatgtctataaagacgagttgcataaacttctgtcttcggagcgcgagcgtcttggacttgattatccgaacgagtattggctgcaggatttcagcggtactaccgatattgagtggattcagaacgcaatggactgggtgcatgatgctggcggcggatggctgataatttcatctgactatgttaaacagcagttcatcatctccgaggcggttattcaccgcagtaatgtctgggttgttctcgacaatgttgagattaaattgcaggacggcgtgcatgacaatctgtttcgtgcggcaggggttattgtcaaccctgacgacccgtttggtctgtgcctggacctggaaattacggacaacgtccgtctgattggcacaggttacccgaaactaagcggcgctgacgtggcgtactatgctgatattcctgcaggtgccgggccacgctactggattggtgacgaatatggctggcgaggtacggggctgatttattacggtacgcagaattttgaaatcggcggattcaaactccagaacgtaaaaaactgggggactgattttgggtacggttctaaaaatggctatatccatgatattgacctgtggcagccgaacaagaatggagacggaattcatttcaccaacggtgccagctatatgcgggtacgccaaattttcggctatgcgcgcgatgactgtttagcgatggtcaacagcgatgattctctgaaatacagcactgccaatatcccgactgagggttcaattcgtcagtggatatatccaacctgtcctttctggtacggctgggcgggaaatgagaccgtgggaaccagcaacgatattcacgatatcactgccacaaatattggtcttactggtaatgagcaggtcagcaccattctgaccacgcagtttaaaatctacaacgtgacaatcagcggcataagcagcgttaactacatgacacccggtcgcggctgggatgaggttaatgcaatactgaaatcatatgccgggtttggtgatgcttcccgctataaggcaggtaatgtcagcaacatcagtattaataacatcattgagtgtgcatcaaaaaattacagtatcgatataaccctagagggccggaatatccgcatcaatcgttatatgaaactggatacccgtgcgaaaacaaaaggtgcgctgaacatcagcagctcagcggccccgtacgtcacaacctctaatattgtggaataa

SEQ ID NO: 266382 - DNA, 1926 bp, Klebsiella pneumoniae
atgaagcttgaagcaattcggttatctggtttccagtcttttggcaaagaaccaactgaactaggcttggaagatgtgacctatctcattggtcctaatggatcaggtaaaacagcagcacttcaggctttatgccgactttttgcgtttgatccaacattgcgtcgtgtccagcgaacagatttccatgtcccttttgatgaggatgaagttcctcctgagagacagttgtggattgaagctgactttctgtttcacgaacttgcggaggacgaggataacagcactgtggctccttattttggtcacatgcgacttgatgagccagaaggtattccacgtgtgcgttttcgcctcactgctactatgggaatagatggggatatagaagaaaatttagcatatgttttggatgtcagtcctgatagctcacctcaaaccacagctcaagtaaccagggcagagcgtaataatattcaagttcactacttaccagccagacgggaccctgcagaccatattgcttacggtgctaacgctttactcggacgtttgctccgtgctgttcgttgggatgatgaacgtaatacgattagaggattaaccaaccagataagcgacagcctagcagctaatccctccatcaatgctttcagtgaaagtttgaaattaacttgggcaaccctacacaaaggtaaatttttctcggatcctaaaattacatttgtggcttcggagattgaagcattgctacgccatttatcggtttcatttactcccggccatgatggctctcttgtcgatttttctcggttgagcgatggtcaaaaatcgatgctttacctttctcttgttctatcatctcaagcgatcggtagagctgttctcgcagaggaagatgttacatttgatcccgacaagttgcgccctccgatttttacgctggtcgcagtggaagaaccagagaatagcctttctccccattacctgggacgtatcgtcagtgccttgaataccatggcaaaaaatattgatgctcaagccttaattgctactcatgcaccatcaatgttacgaagagttgatcctaaatttatacgttatctacgacttactgaggaaagaaaaacacgaattacgtgtatcaaattgccccctaaaacagatgaagcacataaatttgtgagagaggctgtacaagcattccctgagatctatttctcacgcttggttgtgcttggtgaaggagatagtgaaggaatcgtactgcctcgtttgctccaagttaagggcactcctgtggatgaatcagctattacggtagcaccgttaggtggcaggcatgtaaatcatttctggcggttgctttcagcactgcagattccctatctgactttgcttgacctggatgtagctcggtatggcgctggatgggggcgaattaaatacgttaacgatcagcttgcagcatttgagccggagaaagtacttcctacagaatggaaaattacaaaatggaatgatgaaactacgccaataagaactcaccatttttttaataaaggcactcaagacattttcgaagaacttgaaaaccgatctgtgtttttttcctttcctatggatttggacttttctatgttgctagcttatcccgaagcttatggagttgaaaaagaggagccggatgagtcaacaataaaagcagtgcttggcaaaagctataacaatatttctcaatatagcgtagatgaacagagttttttcgctacatatcatctacgttttaaattaggcagtaagcccgccgcacacattgatgctctagcgaaactaagcgacaaaaaattaattgcgaatatgccagagtcgcttaatagactagttgatgccgttattgccaaacttggagaattacctgaatga

SEQ ID NO: 266383 - DNA, 1668 bp, Klebsiella pneumoniae
atgattcctattgaagcatggcaacccgcagatggattaacgctggaaccaaatgcaaaacgagcagcaaaagcccgtaaacgttgcttagctcttaccgctggaccgggcgcaggtaaaactgaaatgcttgcgcagcgggcagatttcctgttacggacagggacatgtcggtatccgaagcggattctcgctatctccttcaaggttgatgctagtagaaatctaaaagagcgcgtcgaacggcgctgtggtgcagaccttgcctcccgtttcgatagttatactttccatgcatttgccaagcgaataattgatcgctttagaccagtactgaaaggaagagaggcattagattcagactatacgatcgttgataagaaaatcagtatttctcgttccgaaatcgaatttagtgatcttgttccgttggctattaaaatattgcaaaactcaaaaattgctcgtaattctattcgtcagacttacagcgatattttccttgatgaatttcaggattgtacaaatttgcaatatgaattggttaaacttgcttttctagggactaaaatccggcttactgcagtaggtgataccaagcaaaaaatcatgggttgggcgggagcgatggatggtatattccaaacatttactgatgatttcaatgcagttccacttaacatgtaccgtaatttccggtcaaagccacaattgctacgagtacaaaacgaaataatccgtcggcttgatcttgcatctgtcatgccagatgaacaattgaatggtgacgaaggtgagattcatgtcgagagtttcagaaacagtcaagaagaagccatttatttggcaaatattattaatgactggattaataaagaaggattggcaccaacagaaattgccgtcttagtttctaagcagttagatctctatgctgaccacctaatgatggagctggaattacgaggaattccatatcgaaacgagcagcaaatgcaggatattactgttgagccagttgcacgtttaatcgtagattatctttcatgcctctatggaaagcgtgaacccaaggcttggatccgtctgatgaatcagctgattccttttgctgatgaagaagtacagtcctgtgcgcgaaaggaccttgatcgtttgttaaaaaaacagcgcaaagaagcaactagtgctgaacagcttgattcacctttttcttgttggtggaagtttgtaaaggagtttttaaaacatattggctctgatacaatcgtagccctatcacctgattacgaatcacacaagcgtctacaggaagtttttcgtgataccaaagcaaggattgaagagttgcttgaaattgaatcagatttgccacaagctcttggacggtttacggatgaccaagcagtcagaattttaaccattcacaaaagcaaagggcttgagttcgattctgtaattataatggcggtggaaaacgagattttctttggtaaccaagatgagaatcgatgtgcattcttcgttggtgtttcacggacgaagagacgattatttttaactcatgctgcacagcgtgaacgacctgctaatgccaaacgttgggaagtccatcgaactgttcaatccgaatatattggttatgttacaccatttattaaacggtaa

SEQ ID NO: 266384 - DNA, 1734 bp, Klebsiella pneumoniae
atgagaagcttgcaatttcaacgattggttctgatatcagattcgaaaagacttgcgaatcagttcacgttcccgaagagattgaatctaattacaggagaagataacagtatcggcaagtccactctagccaagagtttactatggtcgctaggatgcgatccagttatcgacgaagaatggaaatcaaatgacattaaatcgatattatatttcactataaataataaagaatatttttcttgccgtggaagccactcaataattttgggcgctatcgatggtgaagcgaaaagatacacacatataactggtgatttttcacaagacctatcagatcttgttaactttaaaatgaagcttcctaatcggactgatgggaaattagagactcctccgccagcatattattttttaccattctatattgaccagataaaaagctggagttctccttgggattcattagaaaacttaggtcagtatgccaactggaaaaaatcgttaataaagtattttactggctatctgaaaccagaacattttgaattagaagaagaaatttatgaatatagtgaggtaaaaaaagaatcaacagcaaaaatagaaaaatttcaaagcgcagttgacgtcatagttgataattctgctgatatcaccatagcattagataatgagaaatttagcgaaattcagaaagagataaatactgagcttcaagagtttatcgattaccaaaggaagctttatgatgctcaggctacgattacctcaaatatatatgatctcgaaaaacagtatgaattagccaccagttctgcaaacgaactcgaagaagattataagtttgcggtcgagtctataccgacagatcatttagagtgcccattgtgtggtactcttcacgataactcactgactaacagagcattgcttctttcagagaaggattcgctacttgacgaggcaaactcaatagcatcagaaattgaggcgcttagatcctcattatttgagttaaatgaagtagctcaatttgctactaatgaaattgaaagaattaataagaagtatctcaccgatgacaatgagggcgaaaaaacactcattacacaagtaattgatgctatttcgaaagaaaaggtctcaagaagtattcaagttaaaattgataatgaagatcttaaaatcagcaaagccaataactctgtcgcagaattgaaaaaagatcagagaaaacttctttcaaacaaggataaggaagaactgaattcttcttttatgtcaaagctattgggaaatattgaagcactaggttcaacaggagtaaatcttagcaaagtgaaatcgcctactgattataaacagttacttggtggcggtgctgctgaggctgccaggggattgcttgcttatcaactctccgtactgcaacaaatacatagtgctaaaacttgcatagtgcctcctttcgtcattgatacacccaaccagcaagaacaggcggggcatcgttatgaaaccgtcatcaaagaactaatgcgcagtatcccagaggattatcagataatactgtgtgcaatggagaataatgcattaaatgaatttaaacatgatgccaatgttattacattaaattctgaaaagttattggattcttcccaatatgactctctaagatctgagtataaaaacattcaattggctgtaagagaaacgagggatgatgattaa

SEQ ID NO: 266385 - DNA, 1086 bp, Klebsiella pneumoniae
atggaaagtaatattttaggtcatgctcagagagaaacttcaggagcaactacatttggaaaatataatttccaatatcattgggctttatgcagaataattgaaaaacataaatccaatgcagactatgcattattaattgaatatcatgaggatgtcgttatcgcagactcattgtttggcagttcggcgaagtttgaattttttcaagtgaaaaatactgggaattccttcactgttgactctttaactaaacgagtaaaaggtgcagagggacttaagaactccattctaggaaaactattaagctcatgtataggcactgagtatgaaacacgtattacggaaataggtcttgtatcctctagtggcttctcatttgatcagaaagataataagttaaagttagatattataacttcgggtgatcttagcgtggattgtctatcgggcttaactgggaaattaaagtccgagcttgggatagatatttttccagaaaatctaaagttcatcattccaaaaataaagttagaaaatcaagaagaattcgttattgccagatttgctgaattagtaaatgaaatatttccaaatagtcattgtaatgctgtcaatatttatagggcaattatcgatgagattcatcgcaaaggacagaatacttacgactttactatgtgggagaaaatggtagaggataagtctctcacatctcatacggtaaaagatgtcatagctgtaaatacaacgagtccaaaatttgaagactttgagaaagactttgagtatttagctaaaagcgatatgaaatggaataccttaacatatcgaaagatggtaagaaaaataaaacaaatttacttacgtagagtcgggtatgcttcagcttttgatatgaatataatgagaatagctcaacaggcgctcagtaatgttccggaagaagactatactgaaacaagcgattacattaaggcagttgttatgaaagctaaagagctgaatattaaaagccaaatcccagaagatgatgatatactttgcgagataatttactgttttttgaaggtgatgcatgaataa

SEQ ID NO: 266386 - DNA, 2319 bp, Klebsiella pneumoniae
atgcaaaaattaaccgttggtttaattggtaatcctaattccggcaagaccaccttatttaatcagctgaccggcgctcgccagcgcgtgggcaactgggctggggtgaccgttgagcgtaaagaggggattttcgccaccactgaccaccaggtcacgctggtcgacctcccgggaacctactccctgaccaccatctcctcgcagacctcgctggacgagcagattgcctgccactacatcctgagcggcgacgccgacatgctgattaacgtggtcgatgcctccaacctcgagcgcaacctctatctgacgctgcagctgctcgagctggggatcccctgcgtcgtcgcgctgaacatgctggatatcgccgaaaagcagcaggtgcggatcgatatcgacgccctcgccgcccgtctcggttgcccggtcattccgctggtatcgactcgcggacgggggatcgaagcgctgaagatcgccctcgaccgtcatcaggcgaacagcgatcttgagctggtccactatccgcagccgctgctgcgcgaagctgacctgctggcgcagcagatgtcagcgcagatcccgccccggcagcggcgctggctgggtctgcagatgctggagggcgatatctacagccgggcctatgccggcgacgccgccgataaactggatatcgccctggcgaatctcagcgacgagatcgacgacccggcgctgcacatcgctgacgcgcgctatcagaccatcgccgccatttgcgacgccgtcagcaataccctgaccgccgaaccaagccgcttcaccgccgcgatggacaaagtgatcctcaaccgcttcctcgggttgccgatttttctctttgtcatgtacttgatgttcctgctggcgatcaacatcggcggcgcgctgcagccgattttcgatgccggctcggtcgcgatctttgtgcatggcattcaatggctgggttacaccctgcacttcccggactggctgaccgtgttcctcgcccaggggatcggcggcggtatcaacaccgtgctgccgctggtgccgcagatcggcatgatgtatctgtttctctccttccttgaggactccggctacatggcgcgcgccgcctttgtgatggatcgcctgatgcaagccctcggcctgccggggaaatccttcgtcccgctgattgtcggttttggctgcaacgtgccgtcggtgatgggcgcccgcacccttgacgcgccgcgcgagcgtctgatgaccattatgatggcgccgtttatgtcctgcggcgcgcggctggcgatcttcgccgtcttcgcggccgccttctttgggcagaacggcgcgctggcggtcttctcgctctatgtgctgggcattgtgatggccatcctcaccggcctgatgctgaagcacaccattatgcgcggcgaagcctcgccgttcgtgatggagctgccggtgtaccacgtcccgcatatcaagagcctgattatccagacctggcagcgcctgaaaggctttgtgctgcgcgccgggaaggtgatcgtcatcgtcagcatcttcctcagtgcgctgaacagcttctcactgagcggtaaggtcgtcgacaacatcaacgactccgcgctggcctcggtgagccgggtcattacgccggtgtttaaaccgatcggcgtgcatgaagataactggcaggccaccgtcggcctgtttaccggcgcgatggcgaaagaagtggtagtgggtacgctgaacaccctctataccgccgaagatatccagaatgaggaattcaatccgcagaccttcagtctcggcgaagaactgctcgctgccgtcgatgagacatggcagggactgaaagacaccttcagcctcagcgtcctggccaaccccatcgaagccagcaaaggcgatggcgaaatggccaccggcgccatgggggtgatgggcagtaaatttggcagcgcagcggcggcatacagctacctgatcttcgtcctgctctatattccctgcatctcggtgatgggcgccatcgcccgcgaatcaagccgcggctggatgaccttctccatcctgtgggggctgaatatcgcctattcgctctcgacgctctattaccagaccgttagctttagcgatcacccgcgctacagtctggtatgtatcctggcggtagtgttgttcaacgtggtgctcttcggcctgttgcgccgggcgcgcagccgggtggacgtctcgctgctggccacgcgaaaaacgccggcctcctgctgttccagcccggctggcgattgccactaa

SEQ ID NO: 266387 - DNA, 1044 bp, Klebsiella pneumoniae
atgtcaagtttggtagatgatgttcttagccgctatgcgcaggttgtggaggatggctatattgcaactggaggccctcgctttaagagctatgctgtatctaacttaaggggaggcgttgggaaatcaacaatgaccttcaacctggcgtacgaaatttctcgcgttaattcagtacttgtcgccgacctgtgcccccaatgcaacttgaccgaaacgatattgaaaggtgcgaacccaaaagttactattgctgatgccttaactcctaagatgctaggccctgcatttggcgacaaacctgacgatatctcatatcgtgtaagtaattacattgaagatttcaagggtggaaaggcttgttatgcaatcccgggagatccagagcttttcgctttcccatcgagcatgtatcaacaacttcaggtagccttatcaagaggtgagccaaaagctgtctccactcttcttacttctctacattcaatcatgaaggaagaagctattgaaaaaaaatgtgaaatccttctcatggacacaagtccgttctatgcagggggaacgcatttggcttggtgcgcggctgaggcattaatcatccctgttcgagtggatgagcattctattgaatctcttaatctgactcttgatatgctctcaagaacagataaagactttcaaatgtggaacgaccgcgccggggggttatcttcgccaaaggttgcagccattgtgatgacgatggctggatcgaaaagtcggctttcctcaacccctggtaaagcctctcaaatgtacattgaacgtgccgttaaaatcgctgaaaaatacaatcatctttttgccgatcaagacgtgagtaaagcgtttgttgtcaccgatgattttgtttccagtgggcaaataagtggtgccgaaggtataccaatttctcagctcaaggttggtagattccatacagtaagtgaagggaagcgattgcaagtaaaccaatccgttacacgatatcagaagcaattaagatatcttgcaagcatcctttga

SEQ ID NO: 266388 - DNA, 255 bp, Klebsiella pneumoniae
atgcaactgaaccggattaaagccgtgcgcggctataaagctccgcgtcgtatcgctggcagaccttcagtggttgcgcctaatcgtgtgcagcggcagtttatcgttgtcagggccagtcaggtctgggttaccgatattacttatattcgcacctggcagggctggctgtatctggtggtggttatcgatctgttcgcccgtaacgtggttggctggtcgatgaagcccactctctctcgcgaactcgcgtag

SEQ ID NO: 266389 - DNA, 177 bp, Klebsiella pneumoniae
atgagattatttattagagcatttatatttataattttagttagtatgcttaatgtctatgttcttttctttcacccagagatcaaggaaagccttgtggctatagatttattatcctttgctatggccatagcaatactttatggcgatataatgtctagcgatgaaagtgaataa

SEQ ID NO: 266390 - DNA, 1161 bp, Klebsiella pneumoniae
atggatggaagcgatgtcggagagttgattgcagaattcaatgcgactaaagcgcttcgtccagaagtcgttaaagcggtatggcacaattcacttcgtttgcctaaaaacgaggcattgattgatgctcagtggtctgaaatagcagatgactacatgaagcgtatgggcttctctgaaacgcatctcagatgctacgtcctacatgacgacgaagatggccagcacatccatatcatcgccagcagagtgtctcttgatgccggaaagctctacctcggcaggaatgagaacctggcaagcacgagaataattcagcaacttgaaaaagattacaatctgacaagaaccaaaggactaaaagcatcttcagcagcgccctcacctaaaccgaagctcaaaaaatcccgtaatgagctgatgatagaaaagagaactggtgagctatgccctaaaaccatcatccaaaacgctctggaagtactccttgccgataaaccgtcaaccactgagtttgtgcatcagcttgtcgcacaaaacatcagagcaatcccgaacatcgcttctaccggacgcatgaacggcttctcattcgaatacgacgggattgctttcaaagcatctcagcttggcaaaggctattcctggacggctttacaggacaaactcgattatcagccggaacgcgataatgctttcctgtttaaactgaaatcctctgtcagagaaacatctgttagtgcaactcatgatatggccataactacagatgctcctgaaatcatgacagaatacgttaaccgccccatagaagcacttatcctcgataaccgagctgcttgtcaggacgaattcactaacgcttcagtcaaacagcttcactcagaaccaggcgctggtgctcaaggagcgtttgcaaccgaagcggtaaaagaagcctctaagcgaagctatatggtttcaatgttcagatggttagaaaccatcccctatctcaataccattattaccatcttcaaaaacctcaaaatcccaacccttaaacgccctctaaaacacaaaaccatcactggcgtgagagtgatagagataacgcctctcccccaaaacaatctcattgaatcagcacctcaatccagaagagcttcactctcaatgtag

SEQ ID NO: 266391 - DNA, 1137 bp, Klebsiella pneumoniae
atggaaggcatcgaaaaatatataatagaagaatataagtctaagaaagacacttatattaggcttggtcaatcaatgaattcattggtggatacattactgcatacttcagggataaaggcatacaccgttcagcacagagtaaaggatgaagggagccttaaagacaagatacaattaaaaaataagtacaaaacgatatctgacataacggacattcttggattaagaataataacttactactcaagtgataccgacctggtagaagatataatcaaaaacgaatttgctgttgatagcgaaaatacgattgataaaagaaagaaagatgatccggatagattcggttatatgtcactacattacgtagtttccttggatgaaaagagatctaatctcaaagaaaatatcaaattcaaagggattaaattcgaaatacaaatcagaacaatactacaacacacatgggcagaaatagaacatgaccttggctacaaatcaaaaagctcagtgccattacatataagaaggaaattctctagcctttccggggctctagagcttatagatggcgcgtttattgaaataagaaagtctttggccgcttatgacgaagagacaaaaaatcaaataacggcaattgaatccacatcaaaagacacacaaaaaagaaaaaacaacaaagcaaatcatgaagttagcgacataaatgcaattttaattaaaaacttcatcatttcatcaccaatgatgcaggatctttatgatgcatacatcaatcaagaaaaatcaaaaggcgttatcgagagagttatttatccacttgatgcgaagagtgatcttgatgttaattacgaaaacctcgcactaattcttaaaaagttaaatgctaaagacattggtgatatattagaaatcacctctgagatcagcgaggatccgtatataataacaacgattgtcaataacagaccggattatatgcctgctggggttttatcaaaatattttctattcctattttgtatatatatttatattcacaaaaaagaattacatgattcatttaaagaaacaggatctattaatttaatatctcaactaggggcggcctactcacaaattaagaaataa

SEQ ID NO: 266392 - DNA, 747 bp, Klebsiella pneumoniae
atgcgatttgagatatgtgatattttgactaaagcaattcaaaagccttttaatgaaagccaatatttacaggaaataaatttactatctaaccttaatgttgatgggttaataacaacaaactgggattgttttttagagcaacttttccctgactataaagtctatacaggtcagaatgaattgcttttttctaaccctcaatctattgccgaaatatataaaatacatggtagcgcacataaacccaaatcattggttttaactgactatgattatgcggattttaatttaaaaaacccttatcttgcagcaaaactgataacgatttttgtcgagcaccctgtagtattccttggatattctctttctgataaaaatattagcgatttacttagtgcaatttctgtatgtattggcagcgagaacctacatcaacttcgaaataatttgatatttgttcagcgcgaagaaggtatcgacgaaccaactgtctctgatacttatactgcgattgatggtgtgcagattcctattacgttaatccgaactgatgattttttaccaatttatgaagctatagacgaaaataaaaggaaaatacctgcaagaatactaagatattgtaaggaagagctttataatttagttcaatctaatgaacctgagaaaaagatctatgtagtagatattgatgaggtcgaaaaacatgaagatgttgaatttgttgttggtgtcttgcattga

SEQ ID NO: 266393 - DNA, 588 bp, Klebsiella pneumoniae
atgaacaacttgaaagagatgatccaattaataaatgagaaatatcttaactcaaacaataaaagaaaaggtgatttgggcgaagctctagccattacacattttgaagaaacaaaccagggtttcattcatgtacatcaagaagactggtcttacccgaataaaatgcgtgaaaaaaatgctcaacggccagatttttacatgctaccaatgggtaataaaattacagcagtagatgtaaagcattgggagttgaatgataatctggattttgaactatcctcgtgtgaattattaaaatatatagagcttcaattgtatctcatggagattcatagcaaatccatagatgattgcaatgatattttgattaagttcttcgtaataccatcacaattcaaaggcgatgcatacgcagaagtttcattacatgaaatggtacaaaatgaacttaccctagaaacaaacgcacctagcggaaatgtaattaaaaacataatctacagattttccattaaagaccgattaataaaaattggaaccaagtctgatgtttacaaccctaatgaaacagccgaagcactataa

SEQ ID NO: 266394 - DNA, 714 bp, Klebsiella pneumoniae
atgaacctcgattcgaaccaaaaaatattacttaataatcttgccaggagatcatttagagacatggcagatcaagattatttggctgcaaggttatgctttaaaaataaccttccattccaatttttatggatgtcgcagcaagcaattgaaaaatatataaagtgcatacttttatttaatacaatttctacaaaaggaattggtcatcatcttgaggagggaattaatagaataaacaacatcccatatttacatcttgatttaagtgataaaaccataaccttcataaaatatattgacgatcaaggaattaatcgatactttcaaaaaacgatgttcacgcaaggcatggagttaatcacactggacagaacagtatgggaaatcagaagatactgcaaagtgatcaattatgagctcaaaaaaccggacggtgaaataattaacatgcttgagccagaacttaaaaccataaagcgttcaagggaactccctccgcataatttcaagataataggtggatatcttgagcagagattaaaggataatcggtatgggcagggtgatttattaacatggaaaaatttcttttttggtaaaaaaaagaaaaacactataaaaatagctcgctcaattcgctgggcatctccaactcaagaattacatccggaaagtctcgaatttttgggtagttatattaagcttaaatga

SEQ ID NO: 266395 - DNA, 1707 bp, Klebsiella pneumoniae
atgaaaaaaataaactgttatgcggtatttgaaggcggcggtattaaaggcgtcgcctttgccggagcacttcaaaaagcagaggaagctggtctaaactttatcggatatgccggtgcctcagctggtgccattattgcatttcttgcggcattaggttactcaggttatgatatatacaagataataaacaaggttgattttaagtctttattaaacgaaccgactcccgatgagttaaaaaatctcaactccatattaaagaaagccaaagaaataggttggttcaatgagaaatggtggggttgtaaaaaaatcctgcatgcaattaagcttaaaaatcatctagaaaaaagccataatggattacttcccaatgctatcaagcgacttattacaaataatggactatacaataaggataacttaatagatattttagccaattttgcccgtgaaaaaataacaataacccagttaccaaaattatattcacctaatggagcatatttatcattcaaagatttcaatgagatcactaatatagaccttaaaataatttctactgacaccttgacaggcagagcgattgagttttctgttgatagtagtccagatgcctgtgtgttgacaacaatttccgcatcagcatcttatccattaatatttgagccaacgagttatcaacattatgttttagctgatggtggtctctcttgtaatttaccaacatatttgttccataaagataactatcggaagcttcctattttttcttttgatcttataacaacgaatagaattgaaaataaacatccgcagacaccttcttttgagagttttacttctcatttaaaaaacttagttaactcatcactagatgctagtacaaatattatatcagaagttgtaggtggtgtttctgtacctcttacaatcccgcagtcctcaggaaccttaaatttcgcaatatcaaaagttggtttatatgaactttattctttaggacgctatgaagcaaataaattctttaaaacagatataattacaggcattttgagggaaaccagaactgaacatgacattgcaaaacttttatttgggaaaatggatagcattttgacatttttaattaatttcttacctaaaagtgataaaatcattaaagcttggatttacacaaacatagatgttcgagaacaacaggttgtatcttttgcaaaagattccaatataaacttaagtttcgatacttataatatattttctgatgacccaaaaaaatctatatacaaaatacctttcaaatcaaaatatttagcacctgctgaccatatttttcccctcataaatcaaaatggtcagttaaatcaggataatgactgtacggctgcttggttagagaaaaaaccaacattgagttataatgatgagaaagtaaggatttgctacccggtcttagaccttgatttaagagcggaagtagtaaatactattgaaaaacaaaatgttatggccgtaatatgtatttcaatggagacaggttataacaattgtccgtggttaaatatttctcaaggaaacattgacattacggattttatgttcgaaactctaagcaggactagtataatcgtgagaaatatgatttacggtcatcaggcaaatttttatgatttgaggagaaccagcgattatgaccagtaa

SEQ ID NO: 266396 - DNA, 2229 bp, Klebsiella pneumoniae
atgctgctatgtaattacctcattgatttctttagaaaaaacctcaacacatcgtggaatcccaatgagcaactaaaacgcaaactagctgaacacatttcagttgaatgcacacagagcacctacaatgaaaaagtgttaataaataatcttggttttttgttaaacgaaagattacaactgaatcaggatgtatttagatacgtcataaatgaacttgcaaaaaaaggttgtatttttaattaccacgataaacttttaattcaaaatgcactaaaccgtattgacttaaatttttcacactggttttcttcacgatttccttcttatttcgaagaaaacataatttctcacgcagaggaaaaaagaaataaatcattcattgatgttgattggtatttaaataatgataagaagtcagatgatgtaattgaatcaattttctgctcatttattcactatgcgtttataaaaaaccctgacattagtgaggatttctctatcgagcaacttcataaagagtctttttgggaatatttaaaaaacaatcatagcgaacaaataaatagaaaaaatggactctcaatcgtaaatgcaacctcaataattgatcaatgcgcttcatatgaagaaaatttatcgtgtattttcaatttaatagaggatcaatatacaactcttgataatcattcatatttagcctttgtatttgacgattccattgttaatcgttgggaaatcattgctgacctgagcatttacgccgagaaatttgtcgaagcaccattgaacaaaaaattctttgagtacaaaagagtagaatcagacacttgttcacatgtaaaagaattaaaccttgaaaaagctaaattcgagttactgaatgaggggttcacttataaagactgctatgttgcttatgaagcagaaaaagaaaatatcattgttcttttcgaaaaaaacatgagagatgagagaatagtcccttgtcctacttgcagaagtaataatgtacgagggaactcttatccagttctaggtgttaagagttgggagtgtaataatgttttttgcggtgataaaagcaaatataatcgtggcaaaagatactctcttgtatctataatgcgtcagcaagctatccttgatgataggaatataatctgcaaagaagtgttgaaaaactggagaagggatataagctacatcaactccaaaaaggaaatatactctttccttatatcctgctattctttagcagatgatactgtaaatattataaataactcgaaaatagatataacattcccatacaggaatattagtataaaaaaatgggaagtaaaatcaaatttatattattatcagaaatatgaatcccttcattttttctctaggtttttagttaaaaaggaaactaaaaaagatattaactcgcctgtaataaatatcacgggaagggatgatattaaattatataacggcgattgctttgaagttttatcacaattacctgatagtatctttgatggtgcgatcacatcacctccatactataatgctaaagaatattctagctggaaaaatatatattgctatctatatgatatatatggaatgtttcaagagacataccgtacctttaaagagggagggatatttctctttaacatttttgattattttgataatgaaaacacaattgtcttctctcagatggggaaaaaacgcctaatattaagttcttatattatatacttagcaaaaaaagccggttttaaaatagttggcaattgtgtctgggataaaggggagatccaaggaaataggaactttaatcaagggaataactccccatattatcaagcaccacttaactgctgggagcatatattgatctttgcaaaatctgaaagtggtcgatttgacaatattgctgataacatacccacaaagcataagagtacacctgtatttaagataatcaaaggcgaaaatacttatggtcattccgctcctttttcaaagaaaatccctaatattcttttagaaaaaatggagaaaggttcattagtacttgatccttattctggcagtatgactacaggaagagctgcattagatttcgggattaattctatagggattgaacttcatgaggattattgtcatctatccctaaagaaattagaagatgaagagcaggaaaggcgtaacatgttactttaa

SEQ ID NO: 266397 - DNA, 594 bp, Klebsiella pneumoniae
atgaatattggtttatacccaaatgatagtagagattggggagaagacgattggcaccaatttctgcaagaattagttaataataatttagtgtcatatgaacagatcacttctctcgttttggggcatttaaacccatctcaagtcggtacatcaatagcctctaaaaaaacatttcaggcgcattatcctcctcggcaatgttgggctgctgttcgttcttggcattttgaacagtcggggcgatgcattgactgtggaactcgccttgaattacaggcagatcatgttcttccgcgagaattgctaggtgatgaagctgaccggcttgataatatggctttgaggtgtcgaaggtgcaacgttataagaaggccaagtcatagaaacggtggaatagctcatcttaccaccgaatcagcactaatgtggttgctctttactcatcagcctacaaattatcaaacatatcgagatttgtgtcgtgcgtatggaatgactatggcaagtatccgttttgaagaagcatgggctatggcaagatggctggaaagagaaggtttgtattatatagacgaaacttctattttttga

SEQ ID NO: 266398 - DNA, 360 bp, Klebsiella pneumoniae
atgaaaaaaatactcatccttattacgctttcattatgctcattgcctgcacttgcagaagaagatcaggggcctggaaaatacatttgcgatattcgtatctccagcctggacacagccaccaaaattctctcgaaagccgcaacagttctggataacggaaacgacttcatagttcaaatgcctaacggtgatcagttatattccccagatctggaaagcatagatgacgggttgaaacagaaagctgaaaaaggcggggtaaccttcattcgccgcccaacgttcggcgacaggttcattgtggaagatgcaaatacgggatttttctacaagatgcggaactgcgagaagaaataa

SEQ ID NO: 266399 - DNA, 993 bp, Klebsiella pneumoniae
gtgaataaaaagatatatatagatcctcgttgggaaaaagcaggtgggatagggaccttttataaaaatataaataatataaatcaatatgaacatattgatataaaaggccaaccatttaatgcaactgactgttggcattccacaaaagccatatttaagattaatgatggcgttattttttttccaggatatataccaccattatattcaaaaaagccatttgtttttacaatacatgatctcaatcatttagatagaaatgagaactctagcatctcaaaaaaaatattttataatactgttataaaaaatggatgttcaagagctaactatatttttaccgtttcggatttttctaaaactcgcattattgagtggtcaggtgttgatgaaaataaagtaataaatgtagggaatggggtatctccagccttttcccctaacggcgaaaaggtagattttgattttaaatttctactttgtgtcagtaacaggaaggggcataaaaacgagttaggaactttattgggatttcaaaaagcaaaaattgacccaacaataaaaattgtttttactggagaaccaaatacatttattaaatcaaagattgctgacctcaaccttcaggaccgtgtggtgtttacaggttatttacctgaagattatttgcctaaattgtatcgttctgccattggcgttgtgttcgtttcattttatgaaggatttggtttacctgtagtagaagctcaagcgagtggaatacctgttgtaacatcatatggttcatctcttgaagaaattgggggcggtgctgcatatttggtagatccaaacagtgtagatgaaatttctaaagggatctcggaaatatgtaataatagcatattgagggagagattaataccagaaggaattattaacagtaagcgatttgactggaataaaacggctcggcaagtagataattatttaaaaaaactgaccgattag

SEQ ID NO: 266400 - DNA, 282 bp, Klebsiella pneumoniae; identical to SEQ ID NO: 61246

SEQ ID NO: 266401 - DNA, 1077 bp, Klebsiella pneumoniae
atgggcacgccaaaatttatggcaatcctgaccgctgaaggtgaaaggaaaatggcggaggcggcgttatcaggtgagcctgtaggcttctcccatatgggcgtcggcgatggcggtggaacgctgccgcaaccctacgccacgcagacggggttgattaacgaactgtaccgcgcaccgcttaacaggcttgttatcgctgacagcggtgcaaatattatccgggccgaaatggtgatgtttccccaggttggcggattctggctgcgcgaagcggcgctctatgacgatgagggcgtgtgtctggcggtggcaaacctgccgccgtcgtataaaccgctactggcagaaggctcgggcagacagcaggcgctaaatctgtggattgcggttaacaataccgccgatgtgcagatgatgaccgacccggccgttattgttgcctcagtcgctgaggttgagcgggcaaaaaatgaggcaaaggattatgccgataatgttgcagggcagctcgacacggatattcagcaggtgattgctgatgcgataacggcggcaaagcgtgatttctgggaagacgataaccccgtcggcaccacgcgattttttaatcagaacgtcaacccgaatgaaaagtggccctggtcgcaatggctgtacaccggcgaaaacaaaacgattcgagttgcgaaagccgatggctcgaacgtcgggacgaccggtggtagcgataccgtcacgctccagaaggccaacctgcccgccgtacagattgacgtgagcggcgaaaccagtgaacagccagagcagaagttgacgaccacgaaaaacggtgaacacaatcatggtggcgtggccagcaaggatgacccctgggagattggcggcgatgtgcgtcagctctttaaccctaaagagctgggtgtgaccgatgacgctggagagcacgaccacgaagtcactgtaccgctgcataaacatacgaccaccggcaaaaccgccaacctcggcgaaggaaaatcgttcagcgtggtggaagcgcacaccctgcttatgtgctggagccgcgtcgcctga

SEQ ID NO: 266402 - DNA, 507 bp, Klebsiella pneumoniae
atgacgacgctgattattaaaaagaacgatgagctgcagccgggtggcgtggtggtcatcccaccgcctgccagcgatgagccggtgataaaaaatacgtttttctttcctgacatcgacccgaaacgcgtgcgggaagggatgcgccttgagcagaccgtcgccccggcccggctgcgtgaggccatcaaaaccggcatcgccgaaaccaatgccgagctgtttttgtggcgggaacagcagattgccggaggctttagcaagctggccgacgtgccggctgacgatctcgacggcgagagcgtgcgcgttttctattacctgcgcgccgtcacctcaatggcaaccgccacgctctacgagcgttatcgcggtgtggatgccagcgccaaaggcgacaaaaaagccgacagcatcgacaccactgtcgacgagttatggcgggacatgcgctgggcggtatcacgcgtccaggacaaaccccgctgcatcgtgagccaaatctga

SEQ ID NO: 266403 - DNA, 282 bp, Klebsiella pneumoniae
atgggcgcgcatggcggcgagtgccacctcttcggtaaacatgtactgcggcgggcggcggtgtttaccaggcatggtcagaccgtacttaaacgcgtagcgggcaatatccatcgcgccgctgatatcgccgacatcaagacgccacagcatgacggtcatcacgatgtcatcctgcgcgcctttgccctgttccagcacgccactgacccacggcagatagaacggcagcagctcgcgctttttcgtggctttcagttctttaccaaagatggcttttaa

SEQ ID NO: 266404 - DNA, 192 bp, Klebsiella pneumoniae
atgaaaaaaatcgcactatttatatttataataataaatattatttctatacttcatttgttatgtgaaggttccatatatgtaactgacttccaggggatattatcctcactgatacttgcgttttcagcagcatatttcccaataattgtttttataagtattgatgaccacgagcaaaaaaaagcctga

SEQ ID NO: 266405 - DNA, 609 bp, Klebsiella pneumoniae
atgaaaagaatagacaacacatcttatttgtatcattgggttaagtcagaaccgcactcaagggtccagcacgatgactttgaaaatgcttttcaaacattcttaacaatactgaatgattggtatctaaaaagtggggatattattaaaacaggtggaagtccatgcatctgctttactgagtcacctgaatattttatgtatagggataaatctaagtatcaaccgtttgggtttaaattttataagaagagtatattccgctcgggaggaagggcagttatatattctcctgaaaatgaaaaacatctcatacatgaatcaatgttatggcgttacatgcggcatgatcctttagtcgtatctgaaagaacaccatatggcgttgattttacatgggagcgcgagtggcgcttaccaagtaatgaattgccagttcttgaagctaaaaatattattgtacctaatgaacgttatatttcacgcgtggtatcagaaacagaaaaatggcttgagagtaatgcatctgaaatggagaatgctgtggtgtttatgagcctcattctgattatgaagattatatatttgccattagggatatgcttataa

SEQ ID NO: 266406 - DNA, 486 bp, Klebsiella pneumoniae
atggacgcactggccacaggtcgcaggatcaagtgcctgacctgcgtggatgatttcacaaaggaatgcctgacggtcactgttgccttcgggatttcaggcgtgcaggtcacgcgtattctggacagcattgcgctgtttcgcggctatccggctatgataagaaccgatcagggcccggagtttacctgccgcgcactcgatcagtgggcttttgagcatggtgtggagctgcgacttatccagcccggcaagccaacgcagaacggatttattgagagttttaacggacgctttcgtgatgaatgcctgaatgagcactggttcagcgatattgttcacgccaggaagatcattaatgactggcgactggattataacgagtgtcgaccacattcatcactgaattacctgacgccggctgaatttgcagcgggctggcgaaacgggaaatatgaagaaaaaccaaccgacattactaactga

SEQ ID NO: 266407 - DNA, 264 bp, Klebsiella pneumoniae; identical to SEQ ID NO: 218364

SEQ ID NO: 266408 - DNA, 2391 bp, Klebsiella pneumoniae
atggacgcctgtattcgcatttacagcgctgaagacgatgttcgggagagagcgctggctcacgacaacgctcgggatatttatgctcatgactgcggacagttgccttttggcacgcttgaccccagagcattcgaattaatcgtccgggatttatttgatgagaaaaaggttgaggcgacctgggactggtatgacacggcctttcggataaatgatggatccgataacggcatcgacgttcaactgatgaaagaccgagtgattgtgggcatcgtgcaatgtaaacgttacagttcgaaagcgtttaccatgccagaagttcgcgatgagtggataaaaatctgccttcgcagtctgttgataagagatttgcttcctcctgacggtctgccatttcgctatattctcgtagtttctgataacgttaatggcgaaacacagcagtatttccagcaaaaccctactgcgctggccgattttatcggccgaaaaacggattacctcaaagcactggttgccgtccggaacaaatatgcgttgctcagaaaatccccgctacttaaggaaaaaactggacaggcattatatgacatggtgcatccgcagtttgagcgactgaatattgagctttacacccgtgaatcgctctcgccacttgtgcgtgcgtccgacaacctcatgggcatctattttcgccgtgaagtgtatttttctcaaaagagcgttctggattttttccgggaagtgtatccggagggcgctaccgcgtcggatgtacgcgcaatgcatgcggaaaacgtttatacccattatggaaatgaaaacctgttatctgcagggcggttaaacgcatttatttttccggcgggcgaaagacttcctgtgcgtatgttgggggatttcctaaaagagaaaatgcccgaggtggccggaaactatccgatcatgctggtctgccccgcgaatgcttttgaccctgctgaccagtactccattgatgcgcttatcagtgactgtcagggcaccgttatcttacaggcaggctgtggcatcgtgcccggtactgtgctaaacacctggaaaaacgacggctggctttgtgctgacagcgtgggtcttttcccggaaagggctcagtatcaggcgggctggtgctgggtaaggtccggagcgggcgatattcaccgctatattttacttgaaacctgcgactgcgatgacacgctgagatatgcagggcgcgcgctccgcctagcttttaatgatgtcaatctctggcccgtgctgaacaccgattattacattccggccggttcttccggcacggtacttgatgaccgtctatctctgagcattgctgatgacggtcgccagcggcccaacgttcttctggtctcatcatcctgtgcgctgacgcaggagcgttttaatgcacaaatccgtcgttttgagaacctgcgtcagaagcgttttctgggggtcattctctgccatcagtcacaggtagagattacggatggcatacgtaatgcctccggcatttatcctgccagtgcatgtagtgatcttttgcacgccgataacgggccgataccagccctgttaattcgggataagggcgtgacctgtgcaatgttctgccttcggcttaattcggcgggcgatgaatttatcgcgacatcctgttacctatggcaatggcacaaagggtgtttttacgaggtagaggatggtatacaacttgagcttcagcgagtgctgctggatccgttcaccgatccccctcaatgccttgtgcaggagggggtgaatgcatttcgccacgcgctggtgacctgtaaccctccttatgccggctattttgttcattatgcactgagcgggcctaagtcctatgtctatccgcaggtgaacacatttcttcagcagcgccggggcatgcgtaaagtgatcagagcgctcagctatctttccatgcaccccagcgtcagctggaatggtaatcatgccgtgactggtcatcttttatggaacagtgaggggacaacacctgagtccgtgatgggatggttgcctgatgaaatgagtgacacgcaggttgatgccatactgacccgatggatacaggatggggggcagcattgcgatctgagcgtgtttgctgatgtggaagatgacctgccttcatacggtcgttcaattcgacaggacctgacccgtgccaatattgctgaaccctcggcggaggcggactccttcgctgtgccacgttctacgcgtagagcttggcttttccctcttaatcctctactcagccggacgcgaaatgacgatccggctgagcttgagcgctatctgagcaatttatggacggtaaaaaatggatag

SEQ ID NO: 266409 - DNA, 546 bp, Klebsiella pneumoniae
atggatagtctaattgctgaatttgaaacaaaagcagcctttgccggattcttcaggaaaacactgccagcagaataccttgatggtttgtctgaaggcagtctttactgggaatccgaatatgcatgtatgctgctgtggcctttgaacgcgaaacctgaccagatgcaaagagaattgatcgtcagcgaaaggattgcggacgctatggcccggactcgtgaaggcacgggtagggtcattgatgcaagcgtgatatatgcgatgccgtcagttcactgtgtccctgacggcatgattacagatattgagcagaatacccgtctggtcagaaagcatttcgtgtggatggaaaacggggagtggaaacgcaccggtcgtgtcaccatgctgggtcttgccccactggagcagcggaggttatctaccgaagatctgagagttaccagcagcacgcaggctcttctggctgagtttgagtcaggaaattctccgcgagctatcgccctgaaccatggacgtcagtgggagagtggcgatgtataa

SEQ ID NO: 266410 - DNA, 2742 bp, Klebsiella pneumoniae
atgtataatcttcagatattaaacgtgacgattagccggtttcggggcatacccggagaggtgactattccgcttcacacggggctgaccgttatttatgccgcaaatggtacgggaaaaagcacgctttgtcaggcggtggagtggttactgacgggcacattaccggacgtttcagaaagttcgctgacctgtaagtggggggatggagaaacctttgttgccgcagactgcattatcagtggtcagcagtaccggctaaagcgctcgctgaagggactggagaagtccgacggacaggtcatcactcaatgcaacgatctgtctcttcttaagctgctctctccggaggaaattggtgcgggcaaaaaccgtccccagtcggtcctgacaaagcagacctggcttcgcaatagccggtggctttattcaaatgctttatccctgctggtggatgaatcgcaagccgatcagcgttcacaggtctttgccaacatactgggttacggacatctcataccgctacagcagtccatcagcagttatctccagtatctgcccggtgtcagccaactgacacagcggctggaccgtctccgggaagagctccgcgccgtcaatgaggctgaaaaagcaaatgaacctgcgtcagatgcggctgagctgatttcgcagcttgcagtcagcctggattccgggcaggacaggtcaaatcatgaaactttccttcaacgtgcgcaaacggatatagcgaaatacagacgtgaggcggaaaattatggagccatctgtcttgatgtgtcagcccggtgggaagcctttgagcatgcatcaggagaggagcagcagttacgcaccctaatccttgagcatcgcaccgcatggcaggatgccaaccagaagcatcagcgtgccggggagcaaaagctgcgtgacgacggtcaggttcgggaactggaaacgcgactaaaatggatagctgcgcaaggctctccggcgcaggattatgctcagataatgcagcaggcgggcgtcagcgcaaatctccgtttcacagatatgcagctgcttgaaaactattttgaaaagggtatcccgtcaggcgcgttacagagctatcacgaagaactgagtcgctacctggaggtggcgcgcagcgtgtatgtttcaggacaggctcgtgaggaatggcagtctcgtatcaggcgcgtgtcgagggatgaggtggttgctttacgtgttaaagcacaacaggcagcggatgaacttaagcggatgacatcctcggtcagggcgttggatgatcagactgctgaactgcacgcactgggattgcagcttgtcagtcaggtacaggggagctgttgcccgctctgcacgcatgactgggttaaaaatgaacgtttattaactgcgttaagtactgcccgcgacaggctttcccctgaagcacaggcgctgaatgtgcagcttgagaaaatgcgcagtgattatgcgggcatggaagagacgctcagggaaaaggaaggcttattgcgtgatgcagacgccttttcagcatcccttgccgcagcggagagcaagctcagtgaggcattcagggcgcattgcaatgttgtcttttttgaggagagcggaataacctcatcgtcacccgaacagttatctcagtttatcgctcacttggacctgtcagcacgttatgcggcattcagggagaggctacttgccgcggaagcatttctaaagacggatacagacgcagtggtcgaattatccgtctacgaccggtgccagtctatgcagtcttcgctggcgaagatgaaggatgatactaacatcgccctccggacggcgcggctggcgcagcaggtatccgaaatgaggctgaagcagactggggaagacgtctctaaaagcctgcaacaaataacggccacagaagagcagcttgttgccgttcttgctaagcttcagttcatccagactcagtggagaaaaatcagtgatgcagacctgacaaaagcgaatctgctccagtgtgaagaggtgcatgcaggcatgcagaaccgcctgaatcacttggagatgctatatgcactggctcagacggccgtggatcggcacaggactattactcgcgcgggaacgcttcgcaccagcattgagacgcttgagcgcaggctaggcgaacacacacgcagaaaacgggaaggtgagcaggcccgtgatgagctagcatccgaaatcgaacgtctgaccagcctcagccttaagaatctcatcgaacctgcttcggagatgttttcacgaatgcatgccaatgaagtttacgacggactgaaggtggcaaaggatggcaagctgagatggcgggctctgacaggtgacaaagcggatgatgaacttattacgcaggattatttcagtcaggggcagcggcaggatcttgcactgtccctgtatcttgccagagcaaggacccttggcggcaccttctttcttgatgagcctgtcgctcacctggatgatatgaaccgggtggccatgacggatattttcaggatgctgacgatgcaggagaagggccttgggttagtgctgacgacggcaagcgacccgctgaggcgccatttgagacaaaaattctcggccctctcaggcgatcgtgcattgctgaccattatcaccatgaacggtaaccctcgtcagggcgtctcctttgacattgagcagtattaa

SEQ ID NO: 266411 - DNA, 2004 bp, Klebsiella pneumoniae
atggcacgtgaattgattcaacaagagcttgctgaacttgcagtgcaattcgagcgagcatctgctgggcttttatcagtaacaaaccagctatctacttttgaatttgaaaagggactatatggagttttgtttataaagccaaacaagcggctctcaaaaatattctcaactgatcgcgaggtgatcgtgttgatcactaattttcaagatcagcaacagcgtacgatacaagcactaaagacccaaattgttgagtcgcaagggagggtggaaggagcacttgcaatcgtagtgcatgccgatctggatgggaatagaaagctcaaaaactgggggagagaacagagcttagccattcttcctatttccgcccgagatgtgattagtgaccctgcaatgtttgagcgagatcttctgcaagactttttctcaaatgacccctttgatgttacaggccctgtatccgatgatgctaggttcttcgggcgacgtactgaggctttggatattgcgcgacaactgagaaatggacagattcgatcatcgttaggaattcgaaagattggtaaaacctctatcttaaacaggattcttcatgaagctagggtgcatcaagattgtgtatctatcatgattgactgttctaaggacgatatatgggagcaaaatgcggctcagctgctgagctctatatcggattctgttacgacagcgtcttcgtgtagtccgaaatatgccgaagtagttcgtactcgaaacttgaagataacgcttactgatgccagagcctccttgctcaaagttattcaaaataccgatggaacggtaataatgttctttgacgaggtcgactacattacaccaggtagcccaacagctaaagcagcgtggaccgctgatttcaatcctttttggcgaaatcttcgtgcagtcgtgcaggaatgtgcacgactcgataaaaaactgtctctattcgtgtgtggagtatcgagtaaatggtttaaggaagagtcaattgggggcgtagaaaatgctgttttagcattcattccggacgaatatctgtcgccacttgcccctaatgccagtgctgcaatgattagggctacatccaaagttacagggttgacatttgatgatgctacagctgaatggattggtaatgcatgcggaaacatgccgtattggactcgcaaggcgtgctcgtacattcatcggcatattgatattagggatagaccgtgctctgtacagaaagaaactgcgcagcgattggtaagagattttgttgaagttgagggagctgcaattgcagaagtagctctaaatcatctttttagagtacatcctgaggtctatattccagccaaacaggtattggaggggcagatttgtagtaagtcagatattctaacgtctacattgttgagatatggtgtgttgcaagagaaacttggaaaaattcaacttggtagcatcatgatcgaagaaggtttgaagttatacgagaaaaagaaagccgtcttgtcagtacctactgttgaagcaactcaggagagtgctcagaatctattgtttaccctagatgagtgggctgatgagttagcacttattaatgctagccgaaataagctagaaaaaagattgcgcgggctctcgctgaattttataaaattttcttgcctccaagataagtcaaaaggagccccttcagctcgtatacaaaaatgtattgaaagacatcgtgttgataagctaaagcatcttccggctgatgacttgattgagaaacttctttggtcagagctcatacgattaatagaaaaagaatgggatcttttttcttctatttttaatgatcttcgcttattaaaagagcatgcggaattagtaaatgatcgtcctgatactcatgcgaaagatgctgatggagcagatatagcccactatagaagatcgcttcgttggcttgaagatgctgttcagcgtgcaagtgcttaa

SEQ ID NO: 266412 - DNA, 1743 bp, Klebsiella pneumoniae
atgtcaacgaagcaaaaattagaacttaactggattggtaagcataagcgtcctcgtttagagccacgtattctgcttgaagacaagtcattatcttatggtgatgcagatagtgaaaatctgctaatacatggtgataacctgttggcactgaaggctctggagcagaagtatgcaggtaaggtcaaatgtatctatatcgaccctcccttcaatacaggacaagcttttgaattatatgacgatggcctagagcattctttatggttaaccttgatgaggcaacgcttagagattctttatagtcttctgtctgaagacggtcttttttggattcatttagatgattctgaagttcattatttgaaagttgttttagatgaggtttttggaagggaacattttgtttcccatatatcttacgagagatcttctgctgctggcataggtcagggaggttttattgttgatacctctgaacatattttgctgtacaaaaaatctattatctctcagcatgaaattaagaactccatcccattagatttaaagactattaaaagatataataagtcactcaaatcttttaaaggtaaaagattagtaagggagtttatttcaaaatcaaatggaaaaccagttcgagtctacgaatatgatgagtttgaagttcagacaatatctttaaaagattatgataaaagaaaaactgaaatagacctagcgttggcagataattttgagacattgttcagaactaaccagatacaaaaggaaaactctttccaaagagatcttgttgatggcatggataagtcaaaactatattcagtagagtacacgcctagtagagggaagtatcaagatcagctaacagaacttttttatctgaatgctgagcttttttcatggttaaaagacacagcgacattagaaccggaaggaatagtaaaacattctaatttaaccaatttttggcgacatgaggatatcccaaaagctgatatagctaacgaaggcggagtcaagttccctagaggaaaaaaacctgagcagctattaaagagaataatcgaaatttccactaaacctggcgatttagttcttgattcatttggggggtcaggtacaacgggagctacagctcataagttgaaaagacgttggattatgatagagcttggagagcattgccatactcatatagccccgcgcctcagaaaagtagtcaatggtgaagaccagggcggtatttctaaatctgtagactggaagggcggtggtggtttccgctatctacgtcttgccccttcattactcaaaaaggatagctggggcaattgggtgatcaacaaagaatacaatgctgaaatgcttgcagaagccatgtgtaagcatatgaattttacctacgcaccaagtcagactcaatactggaatcatggttacagtacagaagctgattacatctacgtcactaccggttctttggcttatgaacaactcaaagttataagtgaagaggtgggaactgaacgcacattgttgatctgctgtaaagcctttatgaccgaaggggcagactttcctaatctgacattggtaaaaattcctcgtgccattctgagtaaatgcgaatgggatcaagacgactatagctttacgctaaatgtactctctgatacagaacaacctgacgatattgaatacgacgaagatactgaaggcgaagaactattatga

SEQ ID NO: 266413 - DNA, 387 bp, Klebsiella pneumoniae
atgtttgctaaatcctttattgctctcgacggtaacggtcgcctgaccggagctcgtactgcgcagacagcgccttacgatcgctatacctgccatctgtgcaacagcacaatgcaataccatcctgaatacgacaccgaacgcccgtggttcgaacacaccgaaacgggtctcaccagcaatggtcgacagcattgtccctatgccaatccggatgcgggtgaaatgcaccttgttagacgcctgcaactcatccactgcaatgccgctcccagggccagtaaagccgattggcactgctcacaatgtgcgatcgattactatggtgaacgctattgtctgacctgtagcaccggagacttcagccaaccaacagatgcagcatga

SEQ ID NO: 266414 - DNA, 393 bp, Klebsiella pneumoniae
atgatgctgttttttagaaagtatgggtttttgtttatccctccagtctactggctcatctatctgggagccaggctgacatacaatggactggcaggagagttttctcctgatttccttcagggtattcgacatgaaggcctctatattatctgtagtctgtgtgtcttttattttttctgcctggaggtggaaattagtgatggggagttctcagcgaaccttctgttcctgattgttttctttcatgtggttttgttatttatcactctgcttatttgtttgtggcaaggggcgatgttgttggatgctatctttatgggtcagattattgcctccatgtgtttattgttttttattccagtgctttccattataagaaggagtttctag

SEQ ID NO: 266415 - DNA, 1206 bp, Klebsiella pneumoniae
atgtataatacaaaaaaacaatttaagggcgaatgcccacactgcgagaatgtcattgactattatgaactaaaatttacactagaaaatgacattggagaaatgatcgctaaatgtaaaaactgtaataatatgtttggcattaaatgcaagaatcctgctgaatccgatattgttagcggagctgataaaatagattacttagattatgaaggtgaatcaccatcgacatttgaaaaattaaaaatatcattcatctataaaggtgacatattcaaaagcaatccagaatttaattataaatcttacaacctttataaatgtcctcattgtgaggataatttagaaaaactagcatacgaatgcatgaccaaagaatataaagagtggcacccacaaatttatcaatatatatcacaagacatttcagggtatggatataacgcagaaaaatcaataataaaagttaactttttttgttcttgtgaaaaaaaacattctgcattgttttacaaaaaagcagatcactgtgattgttctgctcaagactttctacttgggaatatagacaactgcgttaatcttgaggataggattgatggaaccatcaccaaatctgacttcatagaattgataaagaaattaataattagatgggagcttttatttgataaaacttatctgatattcccttacgttggacatactagatctaagagtaacgaactattggacctatggggggaaataatatcacaatccgacacaaaaaaacttaaaataataactaaaacccaaacattaaattgctataaaaatgcagtatcagaagttttccatgattattatatcctaagtaagtttaaattcacaccacaagtgatagatgatgccattaggaacactcgattccacgcaaaaatttattgtggcgcaaataaaaattatgtggaatgtttgagtggttcagcaaatattgcaacaggccctacacatgaacaacttacatttaaaacttatgatagctatgatgccttctatgaaaggttcctgaaaacttttgatactcgtaaagttgcagatgatgtatttaatattgtagaaaataacccattccctaaaaatcatgttctgttcgatcaatcggaaaattatcatcattccgaacttgaaaagtctgcactcattgaacttatcagaaattaa

SEQ ID NO: 266416 - DNA, 609 bp, Klebsiella pneumoniae
atgactagcagcctgttaccgccggggtcgtctgcgctggagcgcaggctggcgcaagcctgttcaggtatcagcgacttaaacgtgccgctgcgtgacctgtggaacccgtggaaatgcccggcaaagtttctgccgtatctggcctgggctttctccgttgaccgctgggaggaaaactggacagaaaccgctaagcggcaggcggtcagcgatgctttctggatccatcagcgcaaaggaacggtggcggcagttaagcgggtgattgaggggctgggttactcaatgactcttgaggagtggtgggaggtggccgaccccgccgggactttccgccttgagattgacctcaatgatatcggcatcacggagccgatgatttacgagcttgagcgaattattggcgatgcaaagccggtaagtcgtcacatatctcagttaacgctttctgcaagctcgtcatgtatcgcaacgattggatgcgcattgtttgatggtgaggttattacagtttatccgcagggatatatcacggatgacatcgccaggtttgacggcacgccattttatgacgggaactatcattattcaggtaaagcgcaatga

SEQ ID NO: 266417 - DNA, 2046 bp, Klebsiella pneumoniae
atgaatatcagtgaaaaatcaaaatgggaaacagatgttaaactgctggggcgactggataaggtggaaggtggccggaatggtgcggcaaatattcaggccgttcaactggcaaaccgcaccagatatttgcgagatcagcttgacgcttataatactctcatcaagtctggtgagctgccgtttacaaatgaagaggcagcaaaagcagctattgttgcgggacgtatacccgagggctccgtattttctgtgcgctcagataatccggctttttgggcggaagagttcagaaatacgggcggtatgccagaatcaacgggcaaatttattacttcctcgatgatgacattgccgcttatcgaaccgacagagggggatgatgacggaaccacagccggtattgcagcgactctggagggccagtattttcttgtactcgatccatcatccagtgattctgcggtgaatctgtaccggaacagtaatggtgaagccctctccgtatctggttttgccagcactggcgcggttgaagatgtacgggaaaatatcactcagtttccgctttatgatgacgctatggttataactgatgaacttggattttcacattcaagaattaccggggatggcggaataataacgccttctgttgctctgctgcctgatgaaataacttcaggaaatttatcagtaagaaatatgccacgattcgacagtaatacactgatgctgtctgatgagctgggtttttctgtgaaactttcagagccagtcgcaggagatgaaactaacccgggtgagataacggtagatctgccaccgcagtcagctgcttatgggttgttgtccaaaatgcgttcggcactggatgatgtctgcgtgattatcaacagtgactctaccggaatcagccaggatacggatccggcacatggtgtatttaaaaaatggacacgcaaactggcagaattcctcgctgccagttatccggcttataccgtgaattattacacctggtcagcgggagcctatgccagcccggaaacacttcaggttgggactgctggtaaaacacttcatttttataatgcggcaattgccggtacgcagccactttatctgatggggcgatattttgaggcggcttatgtgccccgtcaggccgacttaattatttacaatcatggtcataacacggattacaacgtaaacgcgggggtgcaggctggtatgaatctgtccgctatgtatcagatgcttcagcggcaccccaacgccggagcaataatggtttcacaaaacccgcttcgggacagcaatcagggagcatcgcgtagtgctggcgctcggcaggccgcgattgcggcagggttcagtcttgtggatgtttatcagttgttcatggctgccggaaagccagctgactggtatctggataatgtgcatccaaacgctaccggagacgagaagatttttagcctggtgaaaaatttatttacctggcctgccactccagcgaaatacaccgccggattattgtatggaggggggctgataccgaatgcggacttttcttcctgggatgatgatgctggcgtgccggatggctggacgttaacagaatgtacggctttaaaggacacggtgaatttcgagtcaggtacctgtggcctcaggctgatatccacaggctcagggagtgcttacgcatcacgatccctgcctgcttctcttgtacgtcggctgcgaggacagacaatcgtggtgggatgtcgggtatacgttccgctggaaaatacccggtcaaatgcaggatatatctcgattgagggggtttctggcagcagaggttacggtattcctgcgcctggtggtcggggcggttttgtctggaaggcgtctgtggtgaccgtgccggtaaatgctgaggcgctgacaatcattgcaggtctggatacttcaggtggtacaccaggaaacacctgcacttttgatcgcatcacactgactgttggatcgattccacaggacttcatttaa

SEQ ID NO: 266418 - DNA, 1170 bp, Klebsiella pneumoniae
atgcctaaagataaaaatgatatacttttgctgtctactgctgattgggataatcctttttggacaaacaaacagcatgttgcaatagagttagcacgaagaggccataaagttttatatatagactctttgggtttacgagctccagggcttaacaaaaaagatatatctagaatattcaaaagaataggtaaagcaatcaaaccaccaagaaaagtgcgtgataacatatgggtttggtcaccgattacgctaccttggaataagtatcgaatcatacggatatttaataaattttatttaagtttctttattaaaatttggcttaagattctaaggttcaatagcccttggttatggacttataacccgttaacaacggaatttataaagccaaatgcttatagtaaagtaatttatcattgcgttgacgaaataaaagcacaaccaggaatgccaatagatattcttgaaagagaagaaaaaacgctattaaagtctgctgatgttgtatttgttacagcaccacaacttatgcagaatagaattaaatggaataaaaacatccattatttttctaatgttgctgatttttctcatttcaataaagcattaactgaaaattatgaaaaacctagtgaattaagtgatctcgataaaccgatccttggttttatcggagcagtaagtggatacaaagtcgactttaatttattaagtttcatagctgaaaatcgacctgactataatattgttgtaatcggtttagtaggtgagggtgatcctaatactgatattaatattttaacaagacataaaaatattcatttaataggacctaaaccttataacgctcttccccaatatcttaagttttttgatattgctcttttacctaataatctaaatgaatatacagacaatatgttccctatgaagttctttgaatatttagctgctgggaaacctatcgtgagtgtaaatttacctgcattaaaagattttacacatattgctaaaatttcatgtgataaactagattttttgcggtctattgatgctgttttacgaggagatatagtttctctagaagagagattaaaggttgctgaagaatatacttatcagtctagaacagataaaatgatgcgtataatcgaaggtaattag

SEQ ID NO: 266419 - DNA, 564 bp, Klebsiella pneumoniae
atgttaagtaaaattagactaaggtttctaatctcatttttgcgagttgttatattgaaaattagatatagaaaagccttggacatcaatattttcagggtttatatttctaatggatcgaaaattaagatctctaatggtggaaaaatcataataaaaggtagtagggatcgtgtatttttatctaaaaatactagtattcattgctctgggggggtattgactattgggaatggtgtttttttcaatgaaaataatcatttagtttgtcattctcgttttgaaattggtgatgattgtttatttggtcaaaatgtttgtttttatgattcagatcatgaatttaatgatgtttcaaaaaaaataagagaacagggctatataaaaggtaacataattatctctgacgatgtatggattggagcgggttcagttattacaaagaatacttatatagggaagcatagtgtgattggtgcgaattcagttgttcgtggtgaattgcagtcaaatagcatttatgcaggtaatccaactaaattaataaggaagataaatgcctaa

SEQ ID NO: 266420 - DNA, 1488 bp, Klebsiella pneumoniae
ttgaaaaaggcaattctctcattagtaagcggtaatattatctcaaaaggattaggtttatttagagagataattgttgctgccttatttggcactggctacattaatggtgcatatagggttgctcaaacaggtacgttggtgcctgtgaattttttagttagcgatagcttaactgcatttattccactttataaacagtttaaagaggaggatattaacaaagcgcaaatgtttttttggataatgcagttattatttcttgcgttttcaatattgctaacctcttctgcaatattatttgttgaaacatggttaagcattatcgccccaggtttagataaaacaacattagaactatcaaaatcaatgataataataatgagctttggaatccctttatatttgagctcagcattgataaattatgttgaaatggcacatggtgatttcactcctatgtccatcagaccatcaatacaaaattttgggatgttagtaggtgcgttatttgcctactatatgaacaacccagtatttttagcttggggatttacattcgcatattttgtatttttttgttgggtgttattacgaggattgaaaaaaaaaatacttcaattcccttcttcgtttggagtttcaatagttaaagaagttatatctaatttttgggtaactttacgcccgctgatattactgccttttatttatcaagggaatattgctaccgaaagagcgatagcgacgttaataagtattactgcagtttcagcgctagattatgctaaatttataacagaaacactgttattagttgtttcaacacctgttgctttagctgggcttgctacttggggtggaatggctaaagaggaaataagagataaactcgccgttacatttgaattgcttcttattgtatcagtaccattttctttatttctaggtgggttttctaaagatattgttactgtattatttgcaaggggccagtttgattctttatcaatagatgtcacatcaaatattcttttaggcatgtccttcggtttatgggcctatgtgataggatatgttttaattaaaggattaaatgctcaattaaaaaacaaggcagttcttgtaataatgtcgattagcttaataggaaatatactttttaatattatagcttataaatatttcaaggaaactacgttaggaatcgcatattcgatatctggcatattgatgtgtttctgttgcgtttataatctacaactttggaaggatgttaagaatacaatattttatatgtctataggagcaatgatttatttgttaatgatattttttaaattccatagcgataagcaaattgtttctcttatattgaatggattgttttttattttctattgggtttctttcatttcagtaatatcgccattaagagaaaaagcccttactattttaaggaggaaaaataaacacaatgttaagtaa

SEQ ID NO: 266421 - DNA, 1194 bp, Klebsiella pneumoniae
  misc_feature (187)..(196): n is a, c, g, or t
atgactaaaatagtaatgtttactcgttcattacctatgcatggattgggcggtatggaagttgtagcgtgggatgttgctcaggcattatcatcattaggatctgaagttaatattattacaactaagactaaggagttcaaaggacttcataaaattgatggtataaatgttttttttattgatnnnnnnnnnnttattgataatgtaaaatgtggaaaatattcaagaaattggtggaaagaatcaaagcgagtttttgatgagttctactcaaaacattgcaatgttgtatttagtgttagttctggagcctatggaattattgattataaaaaagagtaccctaacgtcagttttcatattcaggttcatggtagcgcttggggagaatttgtttcaaaaatcaagtctagaactatcaaaggctttctaacttcacctaaaaatatatggtggatgttaaaagattttaaacggtataatgaatttcatacagttattgctattggggaacaagttcagtcggacttaatacgaaaaccttactcatattttttggataaggaaaaattacatttaataaaaaatggaatagatagtaatttattttcttcaatgcaaaaaaatataaacattaaagaaaagcttaatattgataaaaataaaaaaattattcttactgcttgtcgtttacacccgcaaaaaggtgtcgcaaattcgataaatgctattgaccttattcgtgaacgtgatgattttgttttggtcgtagttggagatggtccggatttaaatagactaaagctactagttaaagaaaaaaatcttgaagataaagtattctttttaggagcactaaaaagatctgaactggctgaagtcgaagcagaaagtgatctttttctttttctaacagatagaattgaaggattacctttaaacgtgcttgaagcagcatctgtaggtttacctataatcttatccaagcaagtgaaattatttatgtcaaataatattactttagttaattcaagagacttcaaaaccattgcaaaagagattcagagaatattagatcttccctcggaaagtaaaaaaagatatcttcctgatgagtacactttacaatataccgggaaaaagtatcaagatttgctcgatagtataaaaacaaacggagagcaaaattga

SEQ ID NO: 266422 - DNA, 300 bp, Klebsiella pneumoniae
atgaaaggcaaagacgcaattatgcagtatctcgaaacacaccagacattcaccgccaaagcggtggcggatgagtatggattaagcgtcaactgtatcacgaagaacgcgctcagtctggtggagtccagaaaaatagtgcggctggataaggtctggcgaacggtgacttatcgtctggcgacgccggaggagcaggcgggaacagcgcgtagttgtaccaatacggtatttcgtgagtgccggcagagcccggcgatgaagcgggtactggctgtttacgggagaacatcagcatga

SEQ ID NO: 266423 - DNA, 690 bp, Klebsiella pneumoniae
atgacagcgcaatatttggaatttgttcgccagcaactaatagcggccaccgctgatctgagcggtgcgacgaaagggcaactggtagcttttgcagagaacgcgcatttcaccgctacagcgcgcagccggggaagaaagaaagtcgccgacccggtaaccggccgcatggtaaacccatccagcccgccaattcccggacagcagtcccgcgctaagggttcatcaatcgctctcgttcttcccgttgagtattcgacggcaagctggcgccgggctctgctgtcgctggaagagcatcagaaagcgtggctgctgtggaattacagcgacaatatccgttgggagcaccaggagacgatcacccggtgggcatgggggcaattcaacgaaaagctggccggcgtgcgcattgcaaagaaaatagtcgatcgcctgcgccaacttatctggctggccgcgcaggatgtcaaagccgagctggcagggcgggaggcgtatgaatatcaggcgctggcggagctggttggtgtagcaaagtccacatggacagaaacctacctccctcattggctggcgctgcgcagcagttttgtgaagcttgatagcgacgctctcatatcggtaacgcgatcacgttcacaacaaaaggcgacaaatttagatgtaagtcttgcaaaaccgaactga

SEQ ID NO: 266424 - DNA, 258 bp, Klebsiella pneumoniae; identical to SEQ ID NO: 157200

SEQ ID NO: 266425 - DNA, 270 bp, Klebsiella pneumoniae; identical to SEQ ID NO: 96505

SEQ ID NO: 266426 - DNA, 1047 bp, Klebsiella pneumoniae
ttgaacaattcagctatgccgtcacgtctgacggttgttttttctgcgagtggtgacaaaaacacgatcccggtaaattccacccctgaaacgttagctgatggccttgccgcgatggattcaggatttcctccgcttacccgcatcgctctatctgctggcggtaagccgccaaaggggcaggattttaatgggatttttaatgatgcctatactcgacttcaatgggagcaagccggaggtttttatacattcgactctgcattttcggcagctatcggtggatacccaaaaggcgcgattcttatcaattcagccagggatggattctggcaaagcactatcgaaaataacacgacaaatcctgatgctggcggtgcgggatggattaatgctcttggtggccgccttatcaacatccagatattttattcatccggaatatacacgccaaccagcggcacaaaaaaagtaatcgttgaaatggttggaggcggtggcggaagtgcggggtcgcgagctgcagggcccggacaaatcgccgttggcggggcaggcggtgccggttcttatgccaaaggatcattcacccaaaactttaatggcgtacaagttacagtaggcgctaagggagcaggaggaactgtaagcgaaccttacgcttcagaaggtggtacatcctcatttggctctctgctttccgccgcaggaggcgcggcagggcagccagcaggccctactagcagctttccgttttctacagtagcagctgttgtttcagcaggagctaatggcgctaatattattggcactcccgggcagggagcgtcagcatcaattgcagtcaacgaatcagttgtgattgaaagcccaggagggtcttcgcaatttggcgcaggtggtttcatcacggctttcaatgccaaaggaattaatggctcgggttatggagctggcggagggccatcaaaagtgaatcatgctggtgcagctgtggcaggcggtgatggttcgcaaggaatcgttattatttatgaatattcatga

SEQ ID NO: 266427 - DNA, 759 bp, Klebsiella pneumoniae
atgggcgtagtaattgaatctccggcatctaatggctggaaaacagcaagcagaatagaagttccatttgatgcggcatgggagggattcttttcttttggcgtcgatgcaaagacatctataagaaatcttattgcagggaaaagcgcactttccgctgttggagctcttgtctacggagataactacgttgatctcacgggtgcgcaaactgcttatttcctgactgatattataaacagctctgatatgacagtaatggctaccgcaatgccactggaagaaaaagggatcgcgatagcatcgaactatcaatctacaagggctgacgccactggattatgcattggcaccagtcttgcattcgatgttggatcaaacccttcagatggtaatgtaataacgcgattcaaccatgcgacgcttgtaagtggggtgtcaaccggagccgctgcagaaacgtcggttgccagccccataaatgaatggtatctggtcgccggtcgttgtcagaactcgaacagggttagaaatgtttataaccttacagcaggaacgtctggtactaatactcctcaattaaaccctgttgatattggcggcccgatgcggattggttctgcatacaacagccaatttccagggaaggtaaggttgtgtgaacttgctatttttagtgaatcactatctgatgctaactttgcggccttaactcaatttatgcggcaaagggctttaaccaaaggggttacagtttag

SEQ ID NO: 266428 - DNA, 222 bp, Klebsiella pneumoniae
atggggccagtctacatcgtcaaaccggcacacagtacgattcggagactggacatatttcaccacgtcgcgggttatggttcggtagatgaccttgccctcttctgtagcggcagcggccttttgctcaactggctggatagtcttttcggctttctcttttttcttcgccgcgagggcgttgacatggtcagcgtgagaattccagccagaccgccatga

SEQ ID NO: 266429 - DNA, 471 bp, Klebsiella pneumoniae
atgctggcaaataacgctggtctgaacggcctgctggaggcgatccgcgaagtggtggcgtcaccgcatgtggagctggccgttcacctgtttgccgaccttgcgctggcgacgtcattcctcggcgtctcgctcggcctgtttgattatctggcggatatgtttcagcgtaaaaacagcgtcggcgggcgtctgcagagcgggataatcaccttcctgccgccgctggcgttcgccctgttctatccccgcggtttcgtcatggccctcggctacgccggggtggcattagccgtgctggcgctgataatgccggccctgctggtcatgaagagtcgccgagagcatccgcaggctacctggcgggtcgccggcggcgcaccgacgctatggctggttctgctgtgcgggatcggcatcgtggctattcagttcagcatcgctgccgggttgttgcccgcggtgggataa

SEQ ID NO: 266430 - DNA, 1356 bp, Klebsiella pneumoniae; identical to SEQ ID NO: 227100

SEQ ID NO: 266431 - DNA, 204 bp, Klebsiella pneumoniae
atgatgctgtgcagctgcgccagcgagctatcgacgctgccaacgccatccccggatttgatgagccctccgtgcaaagcaagtgacgcagggaaggacaccgacgaagacctgcagtcagacgtcgaaaccgctcaatgcctgcgccaactgcggttagataaataccgttggcaggcctactaccgtgcagtgagtcagtag

SEQ ID NO: 266432 - DNA, 135 bp, Klebsiella pneumoniae
atgggcaaatcggtaactatgttgattatgttagttacgatgctgcaaaaaatgagatatcaccgccaaatggcacttcttatactgcatcagaaatttctatcaaacgtgttcctgatgggctgtgtcgagtga

SEQ ID NO: 266433 - DNA, 234 bp, Klebsiella pneumoniae; identical to SEQ ID NO: 161827

SEQ ID NO: 266434 - DNA, 321 bp, Klebsiella pneumoniae; identical to SEQ ID NO: 161841

SEQ ID NO: 266435 - DNA, 519 bp, Klebsiella pneumoniae
ttgatatccatagtcaatccagtagaaactactcaccttcaccagcgccttattgacgctatcaattggtttggggacgcggttacagattcaaatgtacattcgagtatcgtaaaatacgtatctgcaattgagcggttgttcttcggtaaattcgaagcagggcgtacaaaattgtttgccggtcgggttagggatgtgttgaaagctttcaattgtgatgaagagcatcatgtttacactaaagctctagaactatacaaaactcgttcggctttagtacatggtgaacaatttcgcactgaagatgaatcctttaacagtattaatattgcatcagaattaagtaggatgtgccttctatgctctgcacagctttactccatgatgctacaagcattcgaaaatcctaataatgcaaaattagaagaaatcatgaagcgcataaacgatgaagggttgaattggctggcagaggctgcagcattaggctgtgcaaaacactctccaatcagataa

SEQ ID NO: 266436 - DNA, 1023 bp, Klebsiella pneumoniae
atgattggtttgtatgatcgaaaagggattgactcacttagtttaaagttatcagcagttagtgctcttgaatcagatgaattagttaaaatagcttaccttgttcatatgaatggggcatttggcgcatatgacattattatgaatgggaaagaaactcctggaaaaggcgaaaaaatcccgactaatattgctttctataaccgactaattggtaatttaaaagataatgagatgataattaggtattattctattgatagtacatggaggaccgcttttgttgcatggatggtcaattatttcgattcaattatcgtacctgatcattaccgaattgaaccgaagatgaaaaattactccaccaaagatattattcagaaacttaattctacgtacattctaaatacggatttacctccagtaactattatgaattcgcagccaagaaataccccatctccttctgtaaacgttgaggggaatacatggagtaatccactttctgtttgccggattcgtactcatgctcttcctcgagtccgtagtgctacttttaagggatggagaactcgctctaatggacgtcgttatcaacaccagggcttggatatagaagctgcgccaaatacaccaatattttcagtagcagatggtcgcatcgcttttataattgatcctcctcgtagtgattatggcagacagttatgtattattgttcaggttgacgatcttccactagagaaggcgttgctttgtagatgtaatgatagtgaaattagtgaggtttattttttctacgcccatctgtctgcaattcattctggtttagagaggggagaccatgtacgttgtggtgaattattgggagaaactggttgcacaggtaatgccaatggaatgaccagtatagctttaggtgctcatctccattttgaagttagagtaaaagagagacctggtcctggtatagcaaacaggcttgatcctgctcctttcatcgatgggtttaattatccttaa

SEQ ID NO: 266437 - DNA, 1080 bp, Klebsiella pneumoniae; identical to SEQ ID NO: 214896

SEQ ID NO: 266438 - DNA, 315 bp, Klebsiella pneumoniae; identical to SEQ ID NO: 221259

SEQ ID NO: 266439 - DNA, 315 bp, Klebsiella pneumoniae; identical to SEQ ID NO: 221259

SEQ ID NO: 266440 - DNA, 483 bp, Klebsiella pneumoniae
atgactttcttgccagatggacatgttgccgttgctccaggccaacgccacgcagtagctgaagcggtaacaatttggctatcacctgcgccaatttttttccacgtaccggattggcacggaggccagtgccaatccggtgtgtggagaacttccggttcctctaacggtagttacagtaatcttggatcacacagaggatcatttactggtcgcaatacaggaagtggtacgctgtttgtttacgcctctggagggaatggtggttccgccgggggagattgcgctaacacatccagattgcagggatacgttgcaggggcattgattagcacaaatgcgagcaacaacccatcttatgggaagacagcattcatctcttttgctgtccctgctggcgcaacttatcagatcacctcttatccggcccaaaactactcttgtggctcaggggtattttcagtatttggataccaaacttaa

SEQ ID NO: 266441 - DNA, 315 bp, Klebsiella pneumoniae; identical to SEQ ID NO: 221259

SEQ ID NO: 266442 - DNA, 315 bp, Klebsiella pneumoniae; identical to SEQ ID NO: 221259

SEQ ID NO: 266443 - DNA, 303 bp, Klebsiella pneumoniae
gtggacaatggtatcgactggtttttcaatttcctatacgtcaagtactgttccactttcgacaacaacatcgcagagaacgccttacggggagtggccgtaggccggaaaaactggctcttcgcgggttccgacagcggtggcgaacatgcggcggtgttgtactcgctgatcggcacatgccgtctgaacaatgtagagccagaaaaatggctgcgttacgttattgagcatatccaggactggccggcaaaccgggtacgcgatctgttgccctggaaagttgatctgacttctcagtaa

SEQ ID NO: 266444 - DNA, 240 bp, Klebsiella pneumoniae
atgtttcctgaactgatttcttcgcacgtgcagcaggcgatggccacacaggcactcttgcacaaaaaaggctgtctggttaccgatttccggcagtccccggctcgtccggtactggaagtgtcctgtcctccggttgagcttctggaaaaagcgtttcgcattgtcgagcgtgataaatcgggaacgcgatcaatctgggtcgcttcgttcaatggttgtcggattatctggaggtaa

SEQ ID NO: 266445 - DNA, 288 bp, Klebsiella pneumoniae
atggaaaatcgccgtatgtggacaagaaaagaaattcagtttgtccgtgaaaatgccggaaaaatgaccgcgcaggaaatgggaaagcgtattaaccggacccgttcagccatttgtgcgcaggcgaaccgctggggaatatcagttcaggttcagaccgccagcgaccatgacgcatggctttgccgtgagctttataaagaggggctaaccattccggttatcgctgagaaaatggaattaagtaaccgagccgtttcaaatatcgtgttttcaggtgctaattaa

SEQ ID NO: 266446 - DNA, 618 bp, Klebsiella pneumoniae
atgaatactgcaaacagcatccctgagggatatcgcgtaaatgcacagggtcactatgtccctgagtcacagattaaaccgctggatatgttacgagatgaagttgtactgaacatcgtctctgctgcccgccagcaacgtcaggcactggctgagttcaaactcgaatcaatgtcaaaaattggcgactttattgacctgtctgcagctgagtatggcgttgaatatggcgggactaaggggaatgtcacgctggttagcttcgatggccgctataaactggtccgtgctgtgggtgagcaccgcgtctttgacgagcgcattcaggccgccaaaaagctgatagatacctgtatcagtgaatggtctggcggtgctgatgaaaaaatcatggcgctggtcgatcatgccttccgcgtgaataaacagggcaagattgatatcaaccaggtattagggttacgtcaattgaatatcgatgacccgaaatggaatgaggctatggatgcggtagcggatgcaattcaggttaccgggaccagtcaatatttacgcttatatgaacgccagccagatggtgtatataagcaaatatcgctggatttagccaagctctga

SEQ ID NO: 266447 - DNA, 498 bp, Klebsiella pneumoniae
atgaacaccaaaaatactgctatttatgatgcggccttatctaaatggggatttgaatctcaggtgctggtgctctctgaagaagccagtgaactcgccgcttcctgttcgcgttttctgaacaagaaaaccgacagcaccaaagtggccgaagaagccgcagacgtcgaaattatgattgaacagctgcgtcacaacgggatgggtcccatgattgaccatgaaaaaaatcgcaaaatgacccgactggctcaggttgtcggtgttggtgttgaatcacagctggtcagcccgttcggtccgtcagttcaggggctgcttgaagaagtttccgagcaactggaactggccgacacgctctatcgcgacacaaagaccagcaatcgttacgcagctgcacgggtacgaatggcagttagtctgctgatgcaggcggcgcaaaagatgatccgcgaacaacaattcgccgaccgccagcaagcgggagatggcgtatga

SEQ ID NO: 266448 - DNA, 555 bp, Klebsiella pneumoniae
atgaaccgtgcaaatgcaatccagattatccatatcgcaaaaaatcagctcgcgcttgatgatgaaacctatcgctccctgttagggtcagtggttcccggtaaagccagttgtcgtgatatgaccattgccgagcttcagtctgttattaaggcgctggaatccaaaggatttaaaagtaagcccaatgtgcgctcgaagcgccgcatgtcagcaccatcagcgacaagccttaaagtcagggctatatggaaaacaatgttcaacgacggttttatccgggacgacagcgatattgcacttgaccgttttgttcagcgccagacgcgcatccgtaatggtggtgccggtgtctccagtcttgaatggctacgaccagaaactgaagacaacctgcttgagagccttaagcaatggcacatcagggaaatgaaaaaggccatgctggccaatcacgcgcgtctcccggaaaaccctgtcaccggagaggaaagtcgggactatgacacaatctgcagcgcctacgctgaagcggccaaaaggtggaaaaaatga

SEQ ID NO: 266449 - DNA, 486 bp, Klebsiella pneumoniae
atgaaaaaaatatggggattgattatctttgcattggtatctaatacctctctggctgacactgcgatgccttcatcaaaggaattgctaaaaaattttgataagcttgggattgcagataagggcaaatggaaaaatggtgaatctccagatggtgttaaccttctgagctatcgtgtcgatggtgatatttactcacttaacccagagtttgcttcctctatatccatcaatagtgggaaaaagaataaagacgagtttttacattcggaaggcatatgcaaaaatttagtctttggggttgtgggtgaaaagagcaaagacattgataatgctgtgtcagacattgtttatggtgctgcaaaatcggctgaaagaactacaggggaagctattaaagacttctgggtcgaagcatcttttatttcaatagataaatatcccgctctagcttgtaaggtttcaaaacttgtaacttgggattaa

SEQ ID NO: 266450 - DNA, 408 bp, Klebsiella pneumoniae
atgtttaaatcgttgaataccgactggctgaaactggccttactccgggtatttcattccggctggacggtgatcattctggtagggctgtccctgcttttctgcagcttcaatggtcgtcaggcgttcgcggtctggtggttatctgttgccggtatcgctcttgtctgtgccagtatcggtatggggaacttgccatatcgcttactgcaacccacccgatctatcagcaaatgggccacggtgttgtcctggattgtctggggggtgggtgtcttacttctggtcattgctcccgtactggcaaagtcgccgttaatcattcttcttggcgcggttggggttctgacaggattccttttctccctctgggtctcgcgtaaggagccgtttaaatggatcctataa

SEQ ID NO: 266451 - DNA, 231 bp, Klebsiella pneumoniae
atgactaaagcgtttgatcgcgccagcgatctggaaatggaggagcgggaacgggtcttaaacagccatttaaaccgcgttaaagagcagccggacaatgacgggttttgtaacgactgcgggggagcgattccggctgaacggctccgggcgctgccctccgtggcgacctgcatcacctgccagtcaatcagagaaaacaggaggaagcatggactgggaagtcattaa

SEQ ID NO: 266452 - DNA, 303 bp, Klebsiella pneumoniae
atggactgggaagtcattaagggtaactgggccattatctgggcgttgtttatgtccggggtgaacgttatccagctcctgctggcgaagacatacgttaaacgcgaggagcttgatctcctgcgtacccgtcttcagggactggagaacaccatcgcgggtttgccgaatcagaaagacctgcatcagctgcagcttgaaatgcgtgatttacggggggaactacgggagctggcaccatcaatccgacaggtttcccgtatcagcgatctacttctggaaaacgaactgaaggaaaaataa

SEQ ID NO: 266453 - DNA, 288 bp, Klebsiella pneumoniae
atgcgtgacattctcgaccaggaccagcgcctggtcattctgcgatctcttatcgagtgcggcgacagcgccaacgagtcgattctgcagacgtgcctgcagacctatggtcaccgggtttcgcgtgatgccgttcggacccatctggcatggctgaaggaacaggggctggttaatctgaccgacgtctccggctgctatgtggccagtatcaccgggcgtggtgacgatgcggccaacggtctggccaccgttccgggcgtgaaaaaaccccgcgctaggggctga

SEQ ID NO: 266454 - DNA, 276 bp, Klebsiella pneumoniae
atgatggcaaaacaaaaaccgttacccgccgccgcgcggcgcactatcaggcagctggccgctgcgttcgtctgcgctgatatcgaggcgaacctgatggcaaagtttgtcgaagagaagaccggcaagccctacaatcgggatgcgcccgacagctacctcaatatgtttctgaattctgatcctgaaacccgccgtgtctggcagctgctgcagaaagacattgtggccacccgtaaaaattttgctgaccggatagctaaggagcgagcgtga

SEQ ID NO: 266455 - DNA, 840 bp, Klebsiella pneumoniae
atggctgaaacaacgattatcccgaaagaggcgctgtcctggctgaagtctaaaaagctgacgccgggctttgactatcgtgatgtctggaagcaggagcacagcatcggtttcaccgtggcgaagatgacgcagctcgatcttctttccgacgtcaaggcgctggtcgaagaagcgatggccagcggtcagtctttcgctgagttccgcgatgtcatcaggcccttactggtaaagcgcggatggtggggacagcagttaatggatgacccgctcaccagtgaaaccagactggtacagctcggcagcgacaggcgtctgcgtactatctacgacaccaacatgagaacggcccgcagcgcggggcaatgggaacgtatcgaacggacaaagcgggcaatgccttatctggtctatacacttggtccatcgcgtgaacatcgccccgaacatctccagtgggcggacctgtgcctgccggttgacgatccattctggcagacacatatcggacctaacggctggggctgtaagtgtggggttcgtcaggtcagcaaatatgagtatgaacagctgaaagagaatggtgtcacccgcaacgtgcagcagctcgatgccagtggccagccgaccggccacgtggttcgtcagaccgtaccactgcgcaccgaagctccggcgatcaaacggcgtaaatgggtcaataagcgtaccggtgaggaagagatggtgcctgagggaattgaccccggttgggattataatccgggaaccgggcgtcaggccgagctggagcgtcaactgaaggtgaaacaggacgtgtttgacagtaaccagtga

SEQ ID NO: 266456 - DNA, 969 bp, Klebsiella pneumoniae
atgccaaagcctgcaacacaactcgaatttctggccctgtgctttgagcttcccgacctgacggatgccagcacaccgttgccggaatggttgccgatgattccggctggcacttttactggccgagatggtcgttcatggattaatgacaatccagctgcagttattgccgcttcattcagtcatcccaaattaccgattgatatcgaacattctaccgagctgcttggcccgaaaggcgaagaggccccggcttatgcatggattgattccatgcgcgttaatgctgacggcagcattgatgcacatgtggagtggacaccagacggagaggctcaggtcaggggcaagaagtacctctattacagcccggccttccgttatctcgcaactggtcaggtgacactgctatccagcgtcggcctgaccaacaaacccaacctgtatttacccgcgctcaactcggagaacaccatgactgtacctgtacagattgccacggtgctggggctggctgcgacggcgtcaattgatgatgccgtgtcagctatccagaccatcaagaacagcgaatcggtcgcactgaaccgcgcacaaaacccggacctgacgaagtttattccggtggagacccatcagctggcgctgaaccgtgcggaaacagcagaggctcgcctgaaagcactggatgacaaaagcgccatagagctggttgatggtgccgtgactgccggaaaggttgccccggcgaaccgcgatatgtatctggccctgtgccgtactgaagaaggccgtcagcagtttaccgacttcatgaaaaccgccccggtactggtcaacgcagacccgaccaaagggaaagaaaacaagggccaggccgaactgaccgacaccgaactggcgatgtgccgcagcatgggcgtcaccaaagaagagtttctggccgctaaaccgaaacaggagcaataa

SEQ ID NO: 266457 - DNA, 273 bp, Klebsiella pneumoniae
atgaatgttacggcattgcctcataccgatgatgttcaggtgatggaggttcgcgccatttctgagcgtggtttctggcgctgtggccgattctggccacgccagccggtgcacgtctttgtcagcgatgacccggaaggcgataacaaggcgaacgcgctggaaggtgatgtggtcgtggagtgtttcatcagccacgaaaccgccgggcgcctcaaagctgagcctaacctgaaagtcacggtactgcagccggtggcggaggaagagtaa

SEQ ID NO: 266458 - DNA, 441 bp, Klebsiella pneumoniae
atgggcctgtacgttacccgtgatgacctgctggcaacagacgggtcgctggtctggaatatggccatcgataaagcgactaaccagttggatgaagcgaaaatcctcacggccatcgaagatgccgacgcggaaatcaactcgtttctggcgaaacgctaccagctcccgctgaatatcacgaccgtcccacgtccgcttcaccgggtagcgacatctattgccctttactggctgtcagagcgtgacaatcagatcaccgacctgattcagaaacgctatgacagcgccatcctgacattgaaagagatagcgaacggtacccgcgacctcggcctcccgactgatacccccgccccggagaccgataacggcaggatgattgttgtctctgacaacaaacggctgtttacccgcaacaacctgaaaggggtcctgtaa

SEQ ID NO: 266459 - DNA, 543 bp, Klebsiella pneumoniae
atgggtatttcagtcgaggtgtctggtgcacagaagctgcagcagatgcgcctggccatcgagaaactctccgacagttcgctgcagcaggaactgctggagagcatcggggccatcgttgagtcgcagacccgccgacgcatcagtgatgagaaaacctctccggctggcgcgcgctggcaggaatggtcagagtcttatcgccagacccgacacgggaatcagagcctgctgcaggggaacggcgatctgctcgacagcatccagtacatcgtcgagcgcggccacgttcgtgtggggtcgccgctcagttacagcgccgttcatcaggatggttttgacggcagcgtgtcagtcagcacccatcagcgtctcattcatcaggcatttggccgggcgctgaagcatcccgtatggcaaaccgtcggcgctcatacgcgccagatgaatatcccgcagcgcgagtatctcgggctgtccaacgcaaacagtgaagagctgatgcacgtcatcggcgatttctggaaagaggtactcccgtga

SEQ ID NO: 266460 - DNA, 609 bp, Klebsiella pneumoniae
gtgagcaatcaggaacgtccgccgctacagaccattggctcaacggtcaccgctgctgagaacattgtggcatggctgaaaccggatttactgggtgatcagcccgaccgcgtcagtgtgatcgagcgccatattggccagttcagcacacctgccgaggtgaaaacctacctgtcagatcgcgatggttgtatccgtctggcggcgcttcgcgttcgcaacattcgctatcaggcaggcggaacaaccggcgatgtcacatgggcggcttacatcatggccaccgatgcatgggggtactcacgtgatacccgctgtgaggtgcttgtcggtaagctggttcgccgcattgttcagcgcggtgcgcccaacggtatgaaagccgagcgtctggccacttccgtcagcgctgacaatatctattccggtgggcttaacgagctgggtatgaccatgtgggcggtaacgtgggaacaggaattccggctggatgaagaggtggaccttgcttcgctccctgacttcctgcgactgggggcaacactgcaggtaaatgacggtgaaacgtccattgaaggcacgattaacgtaagagatgcaaacccatga

SEQ ID NO: 266461 - DNA, 189 bp, Klebsiella pneumoniae
atgaaaaaacatattaagccagcccgcgaggggctgaaggtacgtaaagcgtcgggggagcacctctcacctgacggggagaacctccctatgagttcgtggtggcaccgtcgggaagctgaaggcgacgtggtcatttccaccatcccggttgaaaccgcaaagaccccagccgtaaaggagaagtga

SEQ ID NO: 266462 - DNA, 384 bp, Klebsiella pneumoniae
atggctgagttaaccgtaaccctgaaacatggttttatcaccggcaaaggcaccgaagatgaagcccgtcattccgtcgttaccttccgggagctgaattcgaaagacgttattgacgcgcagcttgaagcagaacgtgtggtgattggtgacaacggtaaagccgttgcctattgctccgaagtgctgatgggactggcgctgttgcgtaaacagattttaagcgttggtgatatccccggcccgttgtcgcttaaacagctgtacagcttccacccggaggaccttgaactcttgtccagcaaagccagcgcgatggacgacttactcgcggagacagcaaaccgggggcgaactgacgccgctggcgacggcgttcagtaa

SEQ ID NO: 266463 - DNA, 1809 bp, Klebsiella pneumoniae
atgtcaaaccgcctcaccactgaaatactcatcaatctggcaggtaacctgaccgcgaaggcccgccagtatggagccaacatgtctgaatttgcccgccgtaacgagcgggcaatgaacgtggttaaagccaccacggcggcggcaggtcgtggtcttgatgcattgggtaaccgctacaccaccctgattgccggctttgccggcagcgccatgttgcgagatttcgccgcgacagaccgccgcatcacccgtatggggctggctgcggagaagaccaaaaaagagatgtccgagatgttcagcggtatgcaggatgccgcgatcaaattccgtgtcgatgacagcgaagtggtcagcgctattgagaaagtcgggaccgtcaccggtgatatcgattacggctttaagaaccgtaacattatggccgcttcgctggcagcttctggttccgaaggtgaaagcattggtggcctcttttctcagtttacgaagttcaacctgaccgacgaaaagcagacactgcaggcaatggataccctgaatcagctcggaaaagaaggcgcatttgagctgaaggatatcgccgaacgcggcgtaaaagcgttctcaatgtatgccgctgccgggggaacgggcgtcagaggtgtgaaggacgtcggcgttgcgttggagagtgctgtcgacgccaccggcgacacgacgacagcctccactgcagttgaaaaccttattcgagatttgcaaatcccaaaagtcgtcaaaacactgcgccagaacggtatcaatgtttttggtaaagacggggcaatgcgatctctccccacgctgatgcaggagattgccaaaaaatccggtaacaaaggtgcagagaaacagaacgcccgcttactgggggccggtttcaatcaggacagtatcctgttgctgagtagtgtgacgtccggtaaaggcgcggagaaccttaaacgttataacggcgttgtagctgacggtcagggcattatgaacgatgccgcttatgctgctaaagacttcacctcggccatgtcatctcttaacaacacttggaaaaaatttgcgaacagcaatcttgcggagcccgtacaggagctggccgacgccatcaactcggtagaccagaagactgtccagaactggcttgagaccggtaagaatattgccatcgcggtcgggggcgttatcgccgcccgcaaggcgtttcagattggtaaaggcgcttgggagctgttcggcggtggcaaatccaaaggtattcctaaaggtgtctctgacgtgtttggttcaggagtgatgcccgtctacgtcgttaatatggggaatggaggcatgggtggcccagatattggtggtcccggaggtgggagaaagcccggacgcggcggttcgggacgtgcctactcagctctagggtcatcatggatggttggtccactagctgccacaatcccttttctgtcagagcctccccctctgactgatgatgataaggctagcatggtcaaatgggcgcaagaccgcgctaaaggcccgtctgtttggacaaaggtaaaagactggctgacttctcctaccacctccccagcgggatatcaggatccgtcaccgtgggcctcactgcagccgcaaaatcagccgggctatcccttccagcagcccgctgagctaaaaggtcgtatcgaggtctctgttaaagatgatcgggttcaggttaccagcgttaaagtcaatgcccccggtgtcactatgagtgcgtccagcggtgttcgtaatatggagcagcagtaa

SEQ ID NO: 266464 - DNA, 1872 bp, Klebsiella pneumoniae
atgtatcatctcgacaataccagcggcgtcccggagatgccggagccaaaggaaacccagtcgatttccacgcgctggtttggggaaagtcaggagcaaggcggcatcagttggcccggtgctgactggtttaatatcgttcaggccgagttacttgcaatacttgaacttgtagaagacacgccggataaaacgaaatacaaccagattgcaacggcaattaaaaatttttcaggcggaaatatcgactcggtctggagtacgctgaaaattgaaggtgcgcgtcgttcaggcctgacatggggaggcacgaccgaagatggtattaagtccataacgccctttatgtttggcggacaaggcaatagcccggatattgataatactgatgcagttcttaatgctgtcgcggtagccaaagagctgagttacggaatagatttacgtggcggtccctggcgaatctctaaaaccatcgatctcacaggtattcgacatattattactgacttttcgggacgctttctccttgatcctgaaaatttcagttatctgcatgatgcccgttttgctgtaacttttggtaacccggatacccgctggagtgatgacagggcggtgaatgtctgcgtcaacggactattacagatacagtgcgacagcagaaacagcctgtctaacgggattttcattaagggcgctctgataacgattgaagcaatgagagcgaccggattcaatggtcacggtatattcctcgggagcgtatgggattcagcatttaagtctgtttcagtagagctatgcggcaacattgcatcttatgcatttcagatttccgcctttggtgatacgtcaaactgtctgtggataggtcgtttacaggttgaacgggcctatcataaacagatgggtatcaacgttatccgctctgaaattcatacgattcatgctgagcggctgatgatactgaccacagatgatggcacaacgctttcaccttctggacttacctatcaaaattcaaatttattattgagtaatagcgtacttggccaggttgtactggatgcaatgtcttctgatgatgctggcacggtatcgataacacctgctgttacactaaatctgtatgcttcgtttgccagtgcactgtcaatgaataccagcatagtttcgagtacctatggtgactatgcagcgattacggcctcatcattccggggttactataaccatggacaaccaataactatctgcaatagccgcatgtcatattcggacggaagcggggtttgccgtatggtgaatggcgtgctgttcaattgcaccattgacaagctaattccacattatggaacaaacgggcttactgtcatatcgtccactattatcagtgattttgatattgccgctgatactgtgaataacatcacattttactcgtgtatgttcaatggagccgtgaagcggacgcagtctccggcaggaaagcctgtcacattcattgattgtaatctggcacagctgaattcgtactaccaacacaaagcggatttccgtggaggctatattgcgcaggtcaatctggcgagccgggctttcgtcaatctttctggcgtcagaggagccatattttcctatgtcgagggcggtgaccgtggctttacgacaaatgattgtatttttgattctgtgacgcgctgggggcctccgacgcatggttcttttcctgcctgcgttcgcacgcagcgactgggtaatatgaatatggttgataacaaagtggtgaccacagtggttgagtatatcaacactgcgaataatggagtctcttttgctccgttgcttacttatacaccaaccagctaa

SEQ ID NO: 266465 - DNA, 135 bp, Klebsiella pneumoniae
atgaactttgatcctgaccattacagcaaatacgcactgcgtcggtttgccgcggtagctaatctcatcgggttaatcgtctttgtcgttctgacctggggtatctgcatgattattgagtgggtaacagcatga

SEQ ID NO: 266466 - DNA, 846 bp, Klebsiella pneumoniae
atgcccagcttaggccagctctataacgataaagaatccgggttaactacccgtaaaacctacaacgtcccgatcgcctcaatttatgcggaagaaggttacaacgttcgcgaactgaatcaggcgcatgttgacgaattccgcgatgcgtttattgccggggaatatatcccgccgctggccgtagaagttactgagcgtggtgtgaaggtgatcgacggtcaccaccgctatcacggtgcgctcgctgctatcgctatgggccacgacattgtgcggcttgaatgcaaagattttgtcggtactgaagcagataagattgctttcatggtgacaagctcgcaagggctggcacttactccccttgaacgtggcgcggcatatcaccgccttcaaaatcagggctggagcccgtcagagattgcagcaaaggttaagcgctcagagtccgatatcctgcagcatcttcaattgcatgaatgtaccccgtatatcaagaagctggtccgtgatggctcaatgaactacgcaatcgcgatcggcatctctcgcgagcatggggtatacgcggatcgtgaagcctctcggctgatgaagaaggctgaagccgccggtaagaaaaaggttaccaaaagcattgccaatccccagtttaacgctggcaaggccaggaaattcctggagctgattgcatcctgcagcgaggacacaagcgaggggctgatcattgaaatcccaccagcgatgcgagctgaaataatttccatcctccgggagtttcgccacggtagcccaccagcagaagactccgcagaacctgctgatcaggagagtgatgcggcatga

SEQ ID NO: 266467 - DNA, 729 bp, Klebsiella pneumoniae
atgtccggaacacgtattttttgcaatcagattatctccgtcactgactggaatcacgactatgtcatcgtgccgtctgcactggaaagccagtcgcctctacccacgcttgcctgctttgatttactcaatcctctggataacagtggccatggttatacggtgagtccgggcggcgggcagattcgtgactggggccttcattatgaagatggctcgcttccgtccaaaacggatttttcaaaatcaggacagggcgcagtgtcttttgtcaccgcgtttaaattatctgcgctgagccgctacacgaacattatcagcaatcgtgtcgctggtggcggttttaacctttacttcaatgatggtctctacatgtcggttatttatccatccggcaatactgttattgtagatgagggcggtgtgattatgcctgaggtggataagtggtacgtcgcagccggaatattcgatccggcaaacaataatgtaagagttcaattcagtgatctgggtgtccaggttggaagtatcggtacaacatttccgccaaacgcctctttgattgagccactgatgataggaggcgctaccacaggggtgacgacatcctccatgactggcgatatcgcttttgtagctctgtatgacggcgcatttaccctggcccagcgtgaagcaatggttgttgtaggtcaggaagttttgcgtgagcgtgggcttatttaa

SEQ ID NO: 266468 - DNA, 777 bp, Klebsiella pneumoniae
atggttgttctttggttgcttgggcttgcactgagaagtcatcactattcacttgataagataattagctcttatttgttaattccttttactgatacagactcaacaaactttaatccgattctatctcagggttggacactaatatatgagatgctattttactgcatttttgctgtacttttattgtttaaactcactgaaaatagaatgataattttgacactttctgcttttatagttttgaaacaccttggccataatgatcttttgtcgaatgactttagccgttttcttgataactgggtgctctttctattccctttgggaatgttaattttcagattagaaggtaggttacgcgcattactatgtcatagtgttgtgcgtaataccatgcatttaataacgatcagtttgttttttttcgtgatttttagagatagcagctataacaaagaagtaaataacacgctcacagccatttttattttcatatcactcttcattgtaaaaatagacagtaaaccactatcagtattaggtgatgcttcatattcgatataccttacacatacatttattgtaatgacgtatggagttgtgtctaaaggtcattacttggatcgatgggtgttgctgttactttcaattcccgttatgattgcatctgtactttttggtgttgccgcttattatattgtagagcaaaaaatacagaaactcacctcaaatattttctttaataaaagaataactcactctatatcttcttaa

SEQ ID NO: 266469 - DNA, 228 bp, Klebsiella pneumoniae
gtggcgctgtcgcagctgtacagtaacaaacgggataaagcgctttataatatgaaacagagcgcgcgctgggcgcattttttcatcaccttgtaccctgaacatgaattattcatggatctggatgctctccatttcgattctttctggaaacgctggcgctttgcctggtacacctcacgcatccctgattccgagctgccggggcaggtcaactccatggtgtaa

SEQ ID NO: 266470 - DNA, 864 bp, Klebsiella pneumoniae
gtggattcaccgaccgagcgggagcatattatcgccaaagccgaagagattgcccggcgggcgcacatggcgcagtctcgccaccatgcgctggagtggctgctgctctgctatagcgatttagacgataaagacgcgctctggctcaccttgcagcgttcggtcatggaaaaagtgaagctcaacaattactacaccgcgtgggcgttaaagtttgcgctgcgcgatttcccggacagcgagtggatttacaatttcatctgccagaatgcgcaacaaaccgaatacggcgtgccgaaaatctattgcggctacttccagtacgcggggctatttggctttgaaaaagatgaagcgcagggcgccgtctggctcgatagtgtcgccgacattgaatacgaccataactggcgggcggcgataaaagattttcgctggctcggttaccccgaatatctcctgcccctggcccaccttggcgcccggagaaacatccccagcgcgcttaatcagctcggggtggaatctaatgccagagataacggaggcttgttgccgtacgatcccgccatcgccttcggttactgccagcaagcggccgagattttacgccagcacgtcgcgcagcgcgacgcagataataaatatcgcttgatcgccaacggcggcgatgacggctatgaacaggatctgcaggagatccattgccgcatggccaactgcagcgaacgtctgatcaaccaggctccgccggcggaaaagcgcgccgcttacgaaaaaaaccttctcgataatctctatctggcctcccgctatggcgataagcgggcctgggaactctttctgcttaatattgcggcgtaa

SEQ ID NO: 266471 - DNA, 444 bp, Klebsiella pneumoniae
atgctgctgatagccttgtttaccaccgcttattacctgcgcttacgcgccaaaaaaaagaataaacagctggttgccgcccgcatcgccgaggaaaaagaaaaggaccatcttaacgatctgcgccgcgatagccgaagacgccagtgggcgctggcgttagccgatctcctctcgcaccgcaatggcctgccgacaaaaggcgtacagctggcgttgaaacttgatgatgaccagcgccgccacctgacgcagcaggtaaaaaaagaactgggcttgcatcagcacctcgacggcgcggcgttacgccagcagatcgccgagatcctgcgctgctggccggcgggcatgggcaactcgccgcgcacgtttaccaccacatggcggcccagggccgggttcgcgacgcgctggcgttcgactgcatgcgcaccgcctttctga

SEQ ID NO: 266472 - DNA, 684 bp, Klebsiella pneumoniae
atggggatggtggcgcatgagttcagaacgccgctggccatcctcgaggcggcgctggaaaatctgcgcctgtgccccactgtgtccacgcagagcgcgcgcctcgatcgtatgcagcgagcgaccacccgcctggtgcagctcaccgataattgcctcgccgatgcccggctttcctccagagacctgcacgccgaccggcagaatgcggagctgctgccggttatctatatcgccgccacggtagtggatctgtcgctcaatcattatttacatgtcatctgcgaagggcaaactgtcgggccgcaatcgccttcgccggtgctgtttattgatagcgggctgctgtgtattgcgatcgctaatctgctagataattcagtcaaatattcggcatcaggtgaaataagaatcgagatttatcgcctgcaaaaagggtttgaaatacgcattggcgatcgcggccccggcatcgcgcctgaacaggttgagcatatttttgagcgctatcgacgcggcgaaacccatacgaccacaccagccggcaccggcctgggtctgtacgtcgcccgacaaattatacaggcccacgggggggagctgtgcctggcgaaaaataccgctgacgggtgcgaatttgcgctcacactgccgctggatggacagcagaaggacaaatcatga

SEQ ID NO: 266473 - DNA, 981 bp, Klebsiella pneumoniae
gtgttcaaaaatacgattacccgccatagcctggtgcacgagcagattgcccggatgtgcggcagcttccgccgcgactcgcatccgatggccttaatgtgcgccctggtcggcacgctggcggcgttttatcacgatgtgctggacgttgaaaacccggagcaccgggctctggccgccacccgcctgctgtcgaaaatgccgacgctggcggcgatgagctacaagttctctattgagcaaccggcgcagtatccacgcaacgatctctcttatgcgggcaatttcctgcatatgctgtttgccatcccggcggaaccgtaccagctgaatccggtgattgaacaggcgatgaaccagatcctggtgctgcacgccgatcacggccagtgcgcatcaaccaccaccgttcgggcggcgggctcttccggggcgaacctgtttgcctgtatcgccgcagggctcgcttcgctgtgggggccgacccacggcggggctaatgaagccagtatgcggatgctggaggagattaaaaccgttgatcaaatccctgcgttcctgagcaaagcgaaacgcgacccgcagccgttacgtcgtctcggattcggtaactctcgctaccgtaacctcgacctgcgagccgctattttgcgcgaaacctgtcaccgggtgctggaggaactggggatgtgcgatatgccattgcaggtagcgatggccctcgaagaggtagcgctgaccgacccgtacttcgtggaaaatggcctgtcgccgagcgttgatttctatacagcggtgatcctcaaagcgatggggctgccttcatccatgtttgtggtgatcaccgccgttggcagaacgctcggctgggtggcgcactggaacgaaatgcacgaagcgccgctgaatatttatcgcccgcggcagatttataccggtgaaaagaggcgggattacgtttcgcggcgtgaagggcgctga

SEQ ID NO: 266474 - DNA, 201 bp, Klebsiella pneumoniae; identical to SEQ ID NO: 230653

SEQ ID NO: 266475 - DNA, 342 bp, Klebsiella pneumoniae
atgactaaatcaaccataaccagagagcacttagaacaactcgctgataacaacactatctgcaaagtttcatgggatgagcggatcgaactagcacaaattgcgctggccgcgttggacagtgagccggtggcagaggtcaccggcgaagagcaccggcagctgcgtgacctggtcatgatggtgaagatgctctgcagaacggtgagaaagtacaacccggaaagccagcaggcggcaaatttcaccgcctatctccaaaaggaaggtctgatatcggcagcggattgtctgcgcgaaaccgatccgctggatactgagtcggaggatcgccgtggctaa

SEQ ID NO: 266476 - DNA, 801 bp, Klebsiella pneumoniae
atgaacgcactctctgttttctcgtttcaggaaaaccaccccgtgcgggtggttctggttaatggcgaaccgtggtttgtagcggttgatgtatgtaaggcattaggactaacgaatccgacgaagtcagtatctgcactcgatgaagacgaaaagcagctttttagcggtgactctaactttaagttagggtcagcaggaaaaggggcgcagtcattgataattttgaatgagtccggcctatacacactgatcctccgctgccgcgatgcggtgaagcagggaacgacggcctggcggttccgcaagtgggtcaccaacgaggttctgccagctattcggaaaagcggtgaatacagctacgtcgaacccgcgccaaaaagcgccggtgaaccattggactggcggcaaaaggaagaattacgcggcctgataaacgatatagcccaaagttttcagtacaggaacgcgtggatcagtggcgtctggctggcgcttcgtcgcgcctgcaggaacccttcacctaacccgattacggtcgacgatctcccggctatcattgccgaattacgccggatattagcggcggcagaaacagcgctgggtaatatgcgagcttacgaacgggagctgctgcgcaaagtcgttcgcggtggccatcagagtatgtcgtgcggggagttgccaattaccgatatcaatacggaaatggagaaggtgctgccagcgcatttcgagctggccatcaataaactggaggccttatccacaaaattagaggctcctgccgtctcttcctga

SEQ ID NO: 266477 - DNA, 165 bp, Klebsiella pneumoniae
atgttcaaatacaggttcgcggcgatctgccgtaccgataaaaaatcccatattcatcatctgtccaccatcgcctcatccgagcgtgaagcccgtcgtcagttcgccagccgttttgttctcgttctgtcagcccgtatccgggttagcggggtggccgcatga

SEQ ID NO: 266478 - DNA, 1134 bp, Klebsiella pneumoniae
atgcctgaagaaacattgactgtcgtaggtggtggtaataacagctgtaatgttagctggggtggtggcaatggtaacaacggtggtgctggctattctggtaaatacggtggtactagctatgaaggtgcaactagtatgttgaagttgaatgaccgtgttttaattcagctttatctttgcaatccgctcaacccagattatattggagcaccttggggcagtgataaagatgcagaatcaattatcagagctaacagagataaagcaggaaagttcaaggctaatattcagaactggaaaacaagcggtacaggttctttaggtagccctgtagttgggaaatcttatagctcaggtgatgtagatacttattcggttagcttcggaaaagaaaaatacaatgtcctgtataaccgtaaaaaagactcttttactacagcttatgtcgatggcggcgcaaataaacctgagcatagcatgaaggatcaggctattgccgttgttaaactttaccttctcaacgaaagtcaggcatcggtaatcgatactacatcgggaattattactgactctggtaaaactcttagcgggaaattaggtgataaatacaacactctggcgaaagaagctgctgacaatataaaaaacttccagggtaagaaactccgcagttttaatgatgctatggcatctattaatgaactagctaacaatccaaagatgaagttaagtcaggcggataaaacagtcgtttctaatgccctcaaacaaatggatttgtcagcactagctgaccgattcaaagggttagagaaagcctttacttggggtgatcgacttcttaaagccgagaaaatcagagacggtgttgttactggtgttaccacaggggactggcaaaagctggcgtttgaggttgaagctatgtacctcagtggtgttgctggcgccgtagcgttagggattactactgccatgattagcacagtcgcagtcgctttgtcacttccatctgtagctgtctctgcgcttactgttgtggccgtcattggcatctctattctcacatcttatatcgatgctgataaggccaaagcactgaataatgcagtgcttggcttatttaaataa

SEQ ID NO: 266479 - DNA, 525 bp, Klebsiella pneumoniae
atggaagggaaggggctgttcaaatattcattaatttcattactattagggataatcccaataataataatattttttattcatttcagcaatgaaagctcacacatcatttcatacctttttgatattgcaaatggatatcaaagggatttttcagaacaatatttagccgtgagcactatagcttctgcatatactaaaaccgcaccatttttcgtcatattaatgtatataatttgctggaacaagtttgatataaaaaccatcaaactcgatttgaagcgatggcttaaacttctgcctggtgtactccttttaacggcaggagcatactatttaacatatgtaggtgtggaaaatatgtctgatagtatgtatcgcattaaaagaattattgctggcaatgagtactttctattaatttactacattcttttatttctgactaattatttttttatttggttacttttgatttatttatatcttttaaaaggtctgcctttttttcaaaagcggagataa

SEQ ID NO: 266480 - DNA, 351 bp, Klebsiella pneumoniae
atgatttaccgcaagggatgggtgccggttttgtttcggcatgagcttgagcgtaagttaaaagagcagggtttcgaaaactggaaagagatatgtaattttctttgcggtgaaggggattactacgccgaatcagccaaaatgccagagcaatacgattaccaggtggtcgacaataccaaatggatggcaagccgtgacgcgacgttctggcagcgtcttaaccgcctgtggttcgtgccgctgtatttgttgaccatcccgttccagtggcttatccgtggccgtgtcgggtttgcaactacatcaaaaacagctgcattattcagccggataaccgggttgaagtag

SEQ ID NO: 266481 - DNA, 297 bp, Klebsiella pneumoniae; identical to SEQ ID NO: 180607

SEQ ID NO: 266482 - DNA, 738 bp, Klebsiella pneumoniae
atggaacttgaacgaatccgcgcttgtgtggctacggccctttcagatctgcattacctccagcgaggaattttagaagttcagcttgagcagttacgtcttgccaactccggcaggtttactgataagccaacccgggtcattcaaatgggcgagaataataaatacgagatctcggtcgcggctgagcaggttcgttaccatgttgggaaaacgtttaagcaatcctcaatgctgctgactgaacttgattttcagacggctagttggcgcagagccattgagcagttaaatcgtgaggaaattgcctggctgcattattgctatggctgtaagcccaattttgaaaatgatgaagttatatgccagtggctatggctggattttcttgtcgctcattcaaagcctgatttcaaaaaaatgaaagaggcgacaaagaaaaagatgcgcaatttaacttattacgccatccagcaggttaaggcttcaatattacgcggagaggatgtggacccgctgcgtgaggatgagcatataagtcttttgcttaatatcaccgtcgatagctggcgtaaggattataaaaaacgctggctattaatgaaatcacgatgcctgcatctgaatagcatcgcgttatttaacgcagcggagaagcgcagtgaaatcatcaaccgccattgtacaggaagtgccaacgtgcctgtgccagcagattatgcacaggaagtccggtaa

SEQ ID NO: 266483 - DNA, 135 bp, Klebsiella pneumoniae
atgaacgccgaactattcaactacagcttgaaaacgctacaggtgctgaacgttgtcgcagatttggttttatcagtggcgctgtttggctttgggtacggtcttcttaacttgcttgagtggtggcttgcatga

SEQ ID NO: 266484 - DNA, 333 bp, Klebsiella pneumoniae
atgacagatatcgcccggctgattaacagcattaagcgccgcacgtcctcagcaagagagcttggctacgatgtcctgttcgtggcactcgatgatttggatgtcctggctgattcgctggagacggcgctgcgtgcaaacgccgcccaggccgctcacatcgagcagctgcagggcataaaacaccagctggaatcaaagttagccaagccggtgcagttgccaaaaacaaacggctactggactgagccagaacaggcgtatgaagaagctattacgttcgctaagaggcaggttcgtctggctggattccggtgtgagggagatgagtag

SEQ ID NO: 266485 - DNA, 294 bp, Klebsiella pneumoniae
atgtggcgaggaaccgaccgcagcagaagccagatgatactgactgagtatcgccacgactataaaaccaaagactccaaatccgtttacctggtgcggcatagcagccgctcccagcagactgttctggagcaattcctgatggtagagcgtgatagttttgggcgatttaccccgactatcgaactgaaagactttccgagtgggcttagcgaccgcgagtcgatgctcaaacttgccgactggctgcaccgcttgggcgtggcgattgaagataactggagccaaccatga

SEQ ID NO: 266486 - DNA, 477 bp, Klebsiella pneumoniae
atgaacagtttaaaacgtatggctaaagcctggttgctgatgaatggtgccttcgtccttctcgtgatggcgacgcaaccagcgatggcaaatgagagccaaagtcttggtttggatctggattcaattctgagcgcccttcctgctggctgggccagcggcgtaactgccgtatttatcgtgctgtatgcggtggcgcagctgcgcgccgtactccccccgtcagtgaccaaaaggattcccacggtggtcatgaaaattctcgacctcgttgccgcgaactatgcccacgcccggaacgctgatgcgatcagcaaagttgcgcgggatgccgggaaagccaaaggcccatcagatgttgattatcgtgtgatggtggaaacggccaaaaacaatggagagcttcgtggaagccggattgagagtgctggcgattatcctggagatgatcgcccaggcagtaaaagcccgcaatga

SEQ ID NO: 266487 - DNA, 300 bp, Klebsiella pneumoniae
atgaagatttatattgctggcccgatgaccgggcgcgagaactttaaccgtgaggcatttaacaaagaagccgaacgactgacccgacacgggcacaccgttttaaacccggcaagcctgcctgatggactggagcaacgcgaatacatggatatttgttttgccatgctccgttgcgctgatgcgatcctgatgctccccagctggcagacctcctccggtgctacggcggaatatcattatgcctacaaaatggcgcttccggtttataccacggttcactatccgccggtcgcataa

SEQ ID NO: 266488 - DNA, 639 bp, Klebsiella pneumoniae; identical to SEQ ID NO: 230651

SEQ ID NO: 266489 - DNA, 1164 bp, Klebsiella pneumoniae
atgtcgcttattaatttactgcatgaatgtatcagccgcgggcaggagatgacgcaggccattgctatagctcaatttggtgatgatagccccgaggctcgccgtatcactcgtcgctgggggataaccgaggttgctgatttaatcggcgtttcgccgcaagcaattagggatgctgaaaaaaatgggcgactaccaccacctgattttgagttacgcggccgcgttgaacgtcgcgccggctataccatcgaccagattagccatatgcgcagcattttcggcaatccgaatcaacgtcctgcagacaaaaatccagctgtgttagctgttatgtcgcacaaaggcggcgtttataaaacctcatctgcagtgcatgaagctcaatggttagctctgcaaggtcaccgagtgctactcattgaaggtaacgatccgcaagggaccgcctcgatgtatcacggctatgtaccggatttacatatccatgccgaggatactttgctcccgttttaccttggtgagcgtgataatgcggaatacgctataaaaccgacctgctggccaggtctggacattatccccagctgcctggcgctgcaccgtatcgaaacggatctgatgcaataccatgcccaaggaaaactacctcatcctccgcatctgatgctacgggccgctatcgaatccgtatgggataactatgacatcatcgtcattgatagcgctccaaacttagggacaggtacgattaatgttgtttgcgcagccgatattatcgtcgtggctacccctgcagagctatttgattattcatccgttctgcagttcttcaccatgcttctggaccttcttaaaaccgttgatttaggtggttttgagcctgttgtacggctgttactaactaaatacagtctgaccactggtaaccaatcgcgctggatggaagagcaaatcagaaatacatggggatcgatggtcctgcgtcaggttgtccgagtgacggatgaagtaggaaagggccaaataaaaatgcgcacagtatttgaacaggccgcgaaccagcgttcaacgcttaatgcatggcgaaatgcagtctctatttgggagcctgtttgccaagaaattttcgatgacttgattaaacctcgttgggaggactaa

SEQ ID NO: 266490 - DNA, 1146 bp, Klebsiella pneumoniae; identical to SEQ ID NO: 246014

SEQ ID NO: 266491 - DNA, 309 bp, Klebsiella pneumoniae; identical to SEQ ID NO: 230657

SEQ ID NO: 266492 - DNA, 12159 bp, Klebsiella pneumoniae
atggcaaataacataattaaagggcgcaagggtggcggctcaaagcagcgtacaccgacggaacagccggatgatttacagtccgttgcgaaagccaaaattctgctcgcattaggtgagggtgaatttgcaggtggtttaaccgggaaagatatttatcttgatggcaccccgcttgaaaatgctgatggttcgcaaaacttcagtggcgtgtcctgggaatttcgccccggcacgcaggctcagacttatattcagggtattcccggtactgaaaatgaaatcagtgtgggatcggaagtttccagcaagacagcctggacccatacctttactaatacccagctttctgccgttcgtgtccgcctgaaatggccgtccctgatgaaacaggaagatgacggcgacgtggtgggcaataccgtcaagtatgcgattgacctgcagaccgacggcggcgcctggcagacggtgctggaaaccgctgtcacgggtaaaaccacctccggttatgagcggagccatcgtattgatctgccccaggccggcagtacctggacgctacgcctgcgtaaaatctctccggatgcaaacagtgtcaaagttggcgacgtgatgacgctgcagagctataccgaagtgattgacgcgaagctgcgttatcccaacaccgcgctgctttatatcgagttcgactccagccagtttaatggctccattccgcaaatttcctgcgagccgcgtgggcgcgtgattcgtgtgccggataactacaatccggaaacccgcgaatataccggcgtctggaccggcgggttcaaatgggcctggacggataacccggcctggatctattacgacattgttatagctgaccgttttggtctcggtaatcgtctgagcagcgccaatatttcgaaatggacgttgtaccagattgcacagtactgcgatcagctggttcctgacgggcgcggtggtgacggcatggagccgcgctatacctgtaacgtctatgtccaggaacgcaacgatgcttacaccgtgctgcgagactttgccgccattttccggggcatgacctgctggaacggtgagcagattgttgtgcaggctgatatgccgcgtgatgtcgattttacctatacgcgcgccaatattatcggcaaaccccgttattcgagcagcagcagccaggttcggtacaccaacgccctggtttcctggtctgatccggataatgcttatgctgatgcaatggagccggcgtttatcccggaactggtttcccgctacagttttaaccagctcgaaatgaccgcgattggctgtacgcgccagagcgaagcccaccgtaaggggctgtggggcatactgaccaacaataaggaccgcatggtcgaaattgatgtggggctggacggtcgcattcctcaacccggttatatcattgccctggcggatgagttgctggccggacgggtcaacggcgggcgaatcagcgcggtgaatggccgggtgattacgctggatcgtgatgtggatgccaaacctggcgaccgcctccagctaaacctgccatccgggatctcacagagccggactattcaggctgttaacggacgccggcagattacggtcacaacggcgtacagtgagacaccagaacgggaatgcgtctgggccattgaatccgatgacctcttcctgcagcagtaccgggttacaggggtaaaagagaacagcgatgccaccctcacgatcaccggcgtggcacatgatccggataaattcgcccgcatcgataccggcgctattatcgaccagcgcccggttagcgtattgccggcgggcaaccagtcacctccagaggatattgtcatcacatcccgctcggtcgtgaatcaggggatcagcgtcgaaacgatgcaggttaactggtcagcggtcagcggtgctattgcctacgaagcgcagtggcgccgtaacgacgggaactggattaatgtgccgcgcagctcgaccacctcgtttgaggtcagcggcatttatgccggtcgttacctggttcgcgtctgcgcgatcaatgcggcggagatctcgagcggctgggcgtattccgaagagaagaccctgaccgggaaagttggcgaaccgctgccgccgttggcgctgacaaccgtttcactgaccgcaggtattgaaatccgctgggagtttcctgcaggagcagaggatactcagcgtactgaactgcagtacagcccgaaccagaacggcaacggagcactgccgctaactgatttggcgtaccccggtaaaaagtatcagcagatgggcctgcagattgccacgcagttctggtaccgcgcgcgtctggttgaccgcctgggcaatgcctcgtcatggaccgactgggtgcagggaatgtccagcgataacgtcagtgattacttccagcaattggatgaagccattaaagatacggaaacgtatcagtcactggtgaaagagattgatacccgggccgtggccgaagaggtggactcggcaattgaagcagcgaaaaaggacgttgcttcacaggtaacggatgcgaagcaggaagcgcagcaactggtgcaggaaactagaaatgacatcgaacaggccctggcggatgaggcgctggcgcgggccagtgctattgctcaggaatcggctgaccggacagcagccatcgcgcgcgagtcggctgaactgtctgatgccattgcccgggagtctgctgaccgggcaaacgctattgcacaggaatcggctgaactatcggatgccatcgcccgggaagcagctgatcgagcttacgcgctggcagatgaagcccgggcccgggcaacggcgatttcagatgccgtgaaggatgaagctgctgcccggagtaaggctattgctgacgaagcacagaaacgtaacgatgctatcgctgcagaaaatgccgcccgagtgaaagccgtatctgagcttgacaccagaacagccgatgcactggcaaatgaaacagctgagcgtattagtgcggtgtccagtgaagcgaaagcgcgtgcggatgcattgttgaatgaggagaataatcgcgaagccgcgatccgttccctcaactcacagctgcagacggctacagagtcactggcacaacaaatctcccaggttgccgccggtacgggcgaacagtttgatcctctgaatatctggtattttgataccagcaatgagggctggaccgaagatgacaatggttacacgccaatgatcgtcacggatgatggatggttgaaagcggataacggtacttccagtgcccgctccccgaatgatttgggcatcgatgccgccgcctaccgcttcatcaagcttcgcctgaaaaaagtcggtaacccggcatggaatggacgcctgctctggattggcgcggacgaatccggctgggataatgcgcgttcagttgtgattgatgagccggaatatgacgttaacgatacggcgacggtcacgctgcatgatattccgtggctgccatcgcagcgcatccgtcgtttccgtttagatctggcgcagggtcagaatgaagagaattacttcttaattgactggctggccgtgggacgtccgacgccgggggccggcatggccgcgctgcagaacgagcagcttgcccggacgcaggcggacgcggcagaggcggcaaacagacaagacctggctgttcagctgcgaggctcgtatgacggaaatgatctgaccaaagtcagttctggtctgatttatcaggaacaacaggcacgagtcacaggggacaaggccgaagcttccgcccgacagtctcttgagacccggatcaacgacagcctgtcaacgataaaccagtcccttgatacgctgaatacagccgatgaggcgatggcatccgacatcaccggcctgaagtcatccctggccggaaaggccgatgcgtcggcgctgacgacgctgaaaacgcaggttaccacgcagggggacacgttggcttctcagggggccagtctcacgaacctgcagaatagcctgaaccgcctcagcagcgatgtgagcaaaaaagcagatgctgccgctgtccagtcactgcagaatcaggtaactcagcaaggtaaggatatcactgccgctaacagcagcatcacgaacctgaaaacgtcgctcgatacgactgacagcaatgtggcgaagaaggctgacgcgacgacagtcagtgacctgacatcccgtgttacatccgcggaaggaaaagtgtcgagtcagggcaacagcattacccggctgaacaattcgctgaacaatgttatcgcggattccgacgctgcttccgccattccaggcaaccttatcgtcaacccgtcctttgaacgtggaacggacgggtatatcggggttagtgcacagagcacggtggtggcagtacaggcgccgcgaaccggtacacgtgcactaaaagttgatcctggcagtgttgccccgggtcagactatcgactttgttaagggtcgcacttacgaggtaggtgtttgggttaagcagatcgcgggcacgacggacaatggcgccggcaacaataagttaagaatcggcaacagcgcaggtaatccagtactggaggttccgtataccggagctggtacggactggacaaaatacagtaagcgctggaaagcaacggaaacagcccgccttccagtaacactgaataactacctgacagccggaaatcgttattttgatgacttctatgtcatcgatgtgacagacagcgtcaatatagacgccaacgcctctgctatcgcttcagtccagaatacggtgacgcagcagggtaaggatattacgtcacagtcatccagtatcacagatctgaaaaacagtctaaaaacgacggatgcgaacgttgcgaagaaagctgatgctgccgctgtacagacgctgcaaaatacggtggagcagcagggcagagatatcaccactgcatccagcgatatctccggtctgaaaaacagtctcagcacgacggatgcgaacgtggctaaaaaagcggatgcttctgccctgggcgcgctgcagagcaccgtgacgcagcagggtaaagatattacgtctgccggtaacagcattacgcagctgcagaacagcttagcctcaacaaacagcgcggtgaacaaaaaggccgatgctcaggcattgtccgcattgaccggacgcgtctcggatgccgaagggaagctctcctctcagagcgatcagttgtccacgctggaaaattccctgcgtctggggagcctgatttcaaacggcagtctggacaacgacgccaccttctgggcggactccggctcaggctctgcgtttgtatatgaggccgccgaaaaagcgctgcgcaccaccacaggttctatccggatcgccaacaccacacgtattcctgtggaagtcgggatgacgctgacactcagctttgagtttaagacgacagagaccatttcggccatttcgtctgattcggtgggtttcattacggacctgaacgatcaaacgaactggctggtttcccaggcatcatggcttacagcggtcacgacagaatggcagcgacagaccctgacatttacgatccccgataaattcaccgggcagtatgtttaccttcgttttgctgcggggggctggtctccgtcgaacagagcccggctttacctgaaagatatcgaggtttattcctcaaccgggatcgccggaaaagcagatgcctctgcagtgagtgaactctctagccgtgttgagacggcggaagggagcatcacttctcagggtaacagtctgacgaatctgcagaacagcctgaacaccaccaacgcaaatgtcagtaagaaagccgatgcaagcgcactgcaaagtctgcagaacactgtgacacagcaggggaaaacgctctcctctgcctccagtgatctgtcttccctgaaaaatcgcctcgacaccaccgacgggaacgtggcgaaaaaagccgatgccactgctttgcaggaactgaaaagcacggtggagaatcagggcagggcgctgaacagccagagctcacagctcgtgacgctgaacaacagcctgtccgccaccaggaacgatttgagtaagctggcggcggatgttgatacggccgggaaaacaccgggcaaccttctttccaacgccagctttgagcgcggtacagaaggctggagtaacgacggcaataactggcaggtctatgccgcacaggggccgcataccgggaaaaacatcattcgcatgatcaccgccggcgatgcgatgctgacgcagtcttttgtcgttaaaggcgggcggacgtatcgtgttggcgtatgggtacgacgtaatgccgctgtcgtgattgctaatgccgggaataccaaaatcagcctgcgtgacgcgaacaatgttgaagtgaaaaacgttctgctgacactggaaaatatgggtaatgcctgggcggacgtaagtctggaatatcgtgcaccggcagacgccaccatgcagatttcactgcgcgcatcgctgagtgcgggtgaggtctacatggatgatgcgtatgtcgtggatatcactgatgcggttaacattgatgccgccgctgcggcgaccactgctctggaaaaccgagtttcgaaaaacgaaagtgcgataaccagccagagcaccagtctgacgaatctgcagaacagcctcaacaccaccaacagtaacgtcagcaaaaaagctgatgcgacggcgctgacgacgcttcagaacacggtgaagcagcagggggattcattatcgacccagagcggcaccctcacgaaactgcaaaacagcctgacgaccacgcagtcagatctggattccgcaaaagcgacactggcgaaaaaagcggataccgcagccctgtcttctttacagaataccgtgttgcaacaggggaacacgctgacctctcaggcttctcagctgacccggctgaacaacagtctgacaacgacacagtccgggctggatgccgtgaaagctgatgtggatgccagcgcgccgggaaacctgctggtaaacagtacattcgaacgtggacaggatggctggaacggctggacttctcaggcctccgttgttgagctacagcaaccacgtagtgggaaaatggcgctgcgtctggcacctgcttccggcacagcggcattgcagcagaatatttcggtactgggtggtcacacttatgagctttccgcgtggacgaaagtggccgcaggcaccactatggcgcccggctctgcgggcaataacaaattacgtatcgggaacactgacggatcagcggtagcggataagcagctcgatcctgctacgatttccacgacaacgtggcagcagaccaccctgcgttataagccggcgacggaccgcatcatcactgtcgggctgatgtattacctcagtgccggtatccagtattatgacgacgtgacattcactgatatcaccgaccgcattgatatcgatgcgaatgcgaacgcaacaagtaatctggattcacgggtgaccgcggcagaggggaaggtcacatctcaggggaattcccttgtttcactgcgtaacgacctgacggcagtacagtctgatatcacgaagaaagcggacgcctccgccctgcagaatctgcagaataccgtgtcgcagcagggggatgccctcagctcgcagagcgatctggtgacgatgctggaaaacagcctgtcggaaggcagtctgattggtaacggcagcctgaaaactgatgcctcgctgtgggaagattcaggtactggctcgggcttcacctgggatgcgagcgagaaagccatccggacgaccacgggctctgtccgggtggcgaacatcacacgaattcctgtggaagcgggtgtctctctgacggtgacgtttgaatttaaaatgtcggaagccatcacggcgtacagttcggacacggtcgggtttatcgccagtctcagagacccggtaaactggctgacctcacaatccccgtggctggacggcgtcaccacgcagtggcagagccggactgtcacgctggacatcccggcaaccttcaccggacgctatgtttacctgcgttttgcagccggcggctggtctccggctaacagtgcacgactttacctgcggaacattgatgtcacctcggctacgggcgtggcgaataaagcggatgcctcggccgtcagcagtctgtccggccgggttgataccgttgaggggaaagtaacgtctcaggcgtctgatttgacgaacctgcgtaacagccttaacacaactaacaacaatgttagtaaaaaggctgacaccaccgcgttacagagtctgcaaaacaaagtggagcagcaagggaatgatatctcttctgccggcagccaaattactgaactgaatgccgcgatccttgccgcgaaagcggccggggatgattacatcccgaatccgtcgcttgacccggcttataaccgcatggggtataccgtgcaggcctccgacgctgatggcgttcctgcagggtgtccgtttgcatatgtgatccgtcttgccagtcgtgaccatattcccgacatcaacaatattgccgtcacaccgggcgacgtttttgaaatgtctgcgctggttgcgtgcggtgcaggcagtgccgactttaatttttacatcggtcgggcaaccaccgttaccggcgatgtcaaagcgaggtcctccggtggcaacacaaaagccacagcagcatggacgcgcgtgacatggcgcttcaccgtaccgtccgacacgaatctgatgcgaccgttcctgcaggtgaaccagagttctccgttcggcaccatctggtatgcaactgactggcatctgcgcaacgtgacggcggcaaataaggcacaaaataccgctgacaataccgcctctgccgttgagtctctgacgacgaaagtcacccagcagggtgatacgctcagcagcatcgggagccggaccacgacgctggaaaatgggctaaaaacgacgaataccagtgtcagcaaaaaggcggatgcggataccgttcagacactgcagaacacggtaacgcagcagggtaaagacatcacggcggcgaacagcgcaattacgaagctgaccggcgatctgtcgacgacgaatgccaacgtcaacaggaaggccgatgcaacggcgctgtctacgttgcagaacaccgtaacggatcagggccaaaagctggcctctcagggcagcagtctgacgcagctggcaaataccctgagtgatgccatgaccagtctggccgcggatggcaaaattccgggaaacatgatctccaacgggtcatttgaacgtggtcaggatgcgtttaccggatggaacaatgtgacctcagttatcgacgctcagtcccccaattttggcagcaggattttgatgtgtgctgcggggcttgccgggatcacacagaaagtgcctgtcgtcaaaggcaacacctataaaatcggcgtgtttgcccgcgctcaggctggttcggtcatgcaggacggaaacaataacaaactgcgtattggcggcacgagtttgctgtacgaccgccagtttgacaccgcgaatctgccaaccggctcatcatgggttgagctgaccggcacatggaaggcgacggtcgacgggatggtcgatgtgtcgatctattcgtcccttaaatccggcgcacagtatttcgacgatttctatctggtcgatgttacggatgaggtgaatatctcagccaatgccggggctatcagcggtctgactacgcgggtgacgaacgcggaaggcaaagtgacaagccagggcaacagcatcaccagcctgcagaacagtcttaatacgaccaacagcaacgtcagtaaaaaagcagatgcagaagcactgcaaaacctgaaaaacacggtgacgcagcaagggaaggatatctcaacccagagcagtaatatcaccagtctgcagaacggcctgaacacggcgaatgccggcatcgacagtctggttgccgataatgacgcgtcgaaaagattcgtcggtaacctgttggccaacccgtcatttgagcgcggtctgaccggatacagtggcggtggtgcttttatcacggtgattgatgcccagtcacccaacaccggcagcaggattttgtcctgcggtacggggactggcgcagtctctcagtccgtggatgtcacaaaagatcgcacctataaaatcggtgtttttacccgctgtcaggctggttccgttctcgatgcccagggtaataataaactgcgtattggtagcagcagcctattgtatgaactgcagttcaggcctgccagctcatcatgggttgagctgaccggtacatggaaagctacgataacgggcaaagtggatgtctcgatcaattcctcactcaaatcgggtaatcagtatttcgatgatttttatttcatcgatatcactgacagagtggatctcgatgcgacaagcaacgcggtcagtagccttacttcccgcgtcacgaatgcagaagggacgatttcaagtcacaccggcagcattacgaacctgaataacagtctcagctcgctgaacaaaaccgtttccgggaaagcggataccagtacggtacaggcgctgcagaataccgtgacgcagcaaggcaaagatctggatgcaaacgccagtagtctcacatccattaacgcatctctgagcacgctgcaaagccagggattaaatccctgggtggacggttcattcgagtcatatgctgccggtaagagcctctatggtgatacggccatagtaacgacagacgtttcccgtaacgggtcgaaatctctcaaaatcacccgcaaagcgggcgaaaccggtaacagtgataaaatgctggggaaatggctatctgttcgaggtggcggtaagtaccgcttctccctctgggcatatatggacagcgatatgtcggcgccgaacgcatggagtgcaattgttggcctctatgcgcgcggtgagaatggtggagccaatcagtggccgggcgcggttaccataaatgagacgaacatcacccgtggaaaatggacattcctgacaggagtcgccagcgtggccgccgaccgcagtatcgctcagatgtggatttccactcgcggtccatcgggcggcgccgggttctcgctgtatttggatgatatcaatattgtcgatgtgaccgatgctcaggcagcgcagaccgatgcgagcgcggcagcgaatgcggtgacgcagctgacagcgacggtcagtcagcagggacgtgacatcaccgcacaggctaagcagttcacggagctgcagagcagccttaacagcactgatgcccgtattgcccggcaggacgaaactatcgcagccaatggcctggcgatggcgaatggttttaaccagatgcgcagcatgattggcgacaacagcgccgcgatcaccactacgaataaaaccgttaccgacctggaaaaatccacgacggaaagtatgacgcaactgacgtcgcaggtaggggatatgtcggcctctgtccagcagacggcatcgactgtggcagatctgaacgggaaactgagtgcgcagtggggagtgaaggttggcacgtcctccggcggtaaacactatgtctccggtcttcagctggggatggatggcagtggccagtcacagtttctggtgcaggctgatacgttcggggtatatgtccctaacggcgataaaagcaatctggtcttcggtgtcgacgggaacggtgcctatatgcagcaggctatggccaggaacctgacgattaactttggccagatttctgacagtctgcagtcgactgactaccagccaggttccactggctggcgtttgcctaaaagcggtgcttttgagatgaacggtaatgtcccaggagaaggacgcgttcagcttgattcttctggtctggctgtttatgaccagaacggtgttctgcgttgcaaaatagggagaatttga

SEQ ID NO: 266493 - DNA, 594 bp, Klebsiella pneumoniae
atgaaagaaacaatgaccaaaataatactttctggagtattaggtaaaacttttgggaaaattcactaccgtttaattagcactgttcatgaagcagggcaggcattatcggcaacgataccaggcttcgaaaaattcatgattaccagcaaagagcgtggactaacctatgcggtatttaagggtgaaaaaaatattgggaaggatgacttaggatttcctgttggtggtgaagtcatccgaattgttcctgttttaattggtagtaaaaaggcgggactgcttcaaacaattcttggagcagttattattgttgcctctgctgtcggctcttactttgttcctggcaaccccgtgtcagcatttggttataaaatgggggctgctatgatgctcggcggcgttgttcagatgctctccccacagccagcaggcctggcccgaaaagaatccgctgacaataaagcgtcctacgcctttgggggcgtgacgaatactgcctctcagggatacccggtccctttgctttatggcaaacgccgaattggcggagccattatatctgccggtatttacgtagaagaccagcaataa

SEQ ID NO: 266494 - DNA, 3336 bp, Klebsiella pneumoniae
atggcagacgtcgcatctttagcggtcgggctgcacctgaacgcagccagttttaaatcccagctgctgggagcgtatggcgatgcggagaaccagtcacgacggtttaaccgtaatgcccaggcggacgcgaaaaagacggaggacgcctataagaaggtcggtctgtcgatatccgggatggccagccggctggcggggctggcaggagccggcctttccatcggtacgatcgtcaccacgtccagacaatatggacaggcattatcagacctgcaggccatcaccggtgcgactgctgctgaaatgaaagcgctggatctggctgcgcaggaaatgggacgcacgacagagtacagcgccagccaggccgccgaggcgctaaagctgatggcgtcggctaaaccggagcttttaaaaacgtccgatggactgcagaaggctacgaacagcgcgcttatcctggcgcaggccgccggcacaacgctgcccgatgcgaccagaacgctggcgctctccttaaaccagtacggggcgagcgcgcaggaggcggatcgttatatcaacgtgctggccgccggcgcgaagtacgggtcgtcggagattgtggatacagcggccgccattaaaaatggtggcgtcgcagccgcacaggccggcgttggttttgagcagctgaatgccgcgattcaggtgctggcagagcgtgaaattaaaggcggtgaagccggcacggcgctgcgtaacgtcatcctgaatctggaaaagggcacggacaagagtctcaagccgtccgtggttggtctcagccaggcgctgaccactctttccgggaaaaatctctccacggcccaggccgtaaaactgtttggcgtggagaacctgaatgcggcgtctatcctggtccagaaccgttcaaggcttgatgagctgaccgcttccctgaccggtaccaaaacggcgcatgagcaggcatccatcagggttaacaacctgaacggcgatttgctgggtctgagcagtgcgtttgaagggatggtcattaagatcggccagagcagtaacgggccactccgcagcgggattcaggttgccacggaggcactgaacagcctggcagacaatttcaacaccgtctccagcgtggcgctttacagtctgatccccgtgctatccacgaaactgaccgcagggctgcgggagaatatcgcggcctggcgggaaagccaggcggcggtaaaagcgcgggcgcaggctgatgcggatattgcccgcaaaacgctggattcgacagctgccatcctgaaacagaacgacgctgagtttggccactaccggcagatggagcggacggctaaacagtacgggatgaatatcagttaccaggatgagtttacccggcttatccggcaggaaactgagcaaacgaacctggccagccaggcgaaactgaaactggcggcggcaaaccggcaattgtcgatatcagcccgcgcggcctccgttgcggtggggctggcaagaggcgcattaaatttaatcggtggtccgttcggcgccgcgatgctggccggttcgggcctcctttactttcatgagaaagcaaaggaggccaggcagtcagccattgatttaaaagatgccgttgtcgaaaccagtgaagcgctgatgcgcctctcgcttaaccagctaaatgtgaagcagttcgacctggaggatcagtacgaaaaccaggtcgtgcagcgtaaccagctgatgaaagagattcaggatgccgacagtcgtatcgacagcctgaaagggtttgaccccttcggccagctggaaggggtaacaaaaggccaggcgcgtgcacgggcggatctcgaaagcgttaacgagggactccgcaaaaccgaggaaaacattaagcgtgtcagtgatgcaaaaacactggctcagctgggtttatcgggaaaaataacctcccttacggacgatctgaaaggggcgttaagcacgccccccaaagagaccggagatggaaatccatggggcggcgatggcggtaccggcacggggaaaggcagtaagtcccaggtcgaccagttcaaaacgctgcggcagcaaattgaagaagcccatgcatccagcctggccagaattaacctgcaggaaaaggacagcaacagggagctgcaggaagcggcgaagaaaaatggcgccagtgatgctgacctgcagcgcgcgctgttaatgaacgcagagaattaccagaaacagcgactggatctggccgcgcagtattcccccgcccaggaaactctgcgaaaagagcaggaagccagccgggacctggctgagcttttcaaagcccgccttcttgatgaaaaagagtaccaggccgcacgaataacgctggccagagataccgcgaaagagctgctgcaggcgcatgccgatgaaatcgctgcgccggcactggatatcgccggcgaagttgatccactggtctcgctgcgcaatcagcttgcgcagcggcaggcattgctgcaggcgtactaccagggcagcgcgatcagcaaagaacagtacgaaatgctgatgcagaaggcgacgaaagaatccgccgatgcgcagtatcagacgtcgctggagttataccgatcacagggagaattccagagcctggccgtcgggttatttgaaacggcccatgagcgctcaagcaacttcctgacgagcatgctgacgcggacgagaagctttaaggagaacatggctgacctgttttcctcgctcacgcagtcgatcataaaaaacctcgttgatatggccgctcaggcactggtcaccagttccgtcatgcaaaccattatgggcgtggtgggcgtcgggaccagcgttgtcacgggcgctgcgggcgcaggctcggggacggcgatccagaatgccgccagtaacttccagttcaacgccaaaggcggcgtttacgactcgccgtcgctgagcgcatacagcaaccaggtctacgactctccgcagttcttcgctttcgcaaaaggggccggcgtatttggcgaggccgggccggaggccatcatgccactgacgcgtgccggcgatggttcgctgggtgtacgcgctgtcggtggtggtcagaacgccggcgcgtcggaagggccaaaagtctatatcacgattgaaggcggaaacacctcaacgcaggcgccgtctggttttgagcagtttggccagcagatcggctcgtttgtggagaaaaaatacagggagctgatggcgcaggatatgcgccctggcgggatggtctggaatgcagttaaagggcaacgctaa

SEQ ID NO: 266495 - DNA, 339 bp, Klebsiella pneumoniae
atgagcctgaaaccgggtgatatgaactgtcgcattgcgattagctacgttcagtccggtcgggggccgctgggcgaaccgctaccggaaaagcaggttgaatcgggaaaagcgtgggcaaagcgggagctggtatcggggcggaaagtccgcacgctggatcagcagcaggtggtggaaacctgcctgtttacggtctatccgggtgtgctggttgatattgactggaaaatcacgacgaaaaatctggtttataccgtccgtaatatcgaccgcaaaacggaccggatcattatcacgggggaggctgacgggcggcatgatagagctggcgattaa

SEQ ID NO: 266496 - DNA, 315 bp, Klebsiella pneumoniae
atggctgcgaaaaataaagcagtggagccggaagaaacggtcgtacaggacaaccatacgaccgagaccgcacaggacaaccatgcgactgagaccgcacaggataaccgtgcgaccgtggtcgcacaggcagaacgtaaatccgttgtgttcctcggtccgcatagccgttattcccgtggtgatatcgcgtggtttgaaggatcgcacgccgaagagctggttaagcgccgtatcgcggtatggccgaaggatgccgaacgtgcgctgaaaccgaagccgggagacagcgattttgatactgaaattggatga

SEQ ID NO: 266497 - DNA, 366 bp, Klebsiella pneumoniae; identical to SEQ ID NO: 25155

SEQ ID NO: 266498 - DNA, 123 bp, Klebsiella pneumoniae; identical to SEQ ID NO: 8077

SEQ ID NO: 266499 - DNA, 765 bp, Klebsiella pneumoniae
  misc_feature (747)..(756): n is a, c, g, or t
atgtcactaacttcgtataaaaaaacagaaaaagataatgatgaaattgatattggtcggcttataggtgagttgattgatcatcgaaagttgattattgcaattacatctttatttactcttgttgcacttatctatgccctatttgccactccagtttatcaagctgatgcattaatacaggtagagcaaaggcaaggcaatgccattctaaacagtcttagtcaagttctgcctaatactcaaccacaatcacaaccagaaatcactcttctccagtcaaggatgatattgggaaaaaccgtagacgatttaaacttgcaggccaggatcaaacaggattactttcctgtttttggtcgtggctgggcaagattaaccggagaaagtgaaggttccctctcaatttcaagattatatttgttttctgatagcaaaaaaatacctaagatagaagtcgtaattaatgataaagataattacacggttattggtgatggctatgaaataaaaggtaaaaaaggtgaactggttgaaggaaaaggattatctcttaaaattgatgatttcaaggcccaaccgggtaccaagtttattgtatcttatgtaagtcgcttgcaagcgatcacggatctacaagaatcattggaggtacttgaagagggcaaaaatactggcatgctaacagtatcatttgttggcgagaatccagataaaattactgctatcattgatagcattagtaannnnnnnnnntgtccataa

SEQ ID NO: 266500 - DNA, 675 bp, Klebsiella pneumoniae
atgagtcaggactatctcgcccgtatcgccgcgctggaagaagaacttcgccggaaagacagccagctcagtctcgttgccgagactgaggccttcctgcgctctgcgctgacccgcgctgaagaaaagatcgaggaagacgaacgggagatagaacacctgagggctcagatagaaaaactgcgccgtatgatgttcggcacccgttctgaaaaactgcgccgcgaggtggcacaggccgaagcgctgctgaaacagcgcgaacaggcgagcgatcgttacagtgggcgggaagacgacccgcaggttccccgccagctccgtcagtcccggcaccgtcgtccgcttccggaacatcttccccgtgagatactccggctggagccggaagaaacctgctgcccggcatgtggcggtgaaatggcgtacctcagcgaagtcagcgcggagcagctggagctggttgccagcgccctgaaagtgatccgcacagtgcgggtaaaaaaagcctgcacaaaatgtgacggtatcgtggaagctcccgcgccgtcacgtcctgtcgagcggggtatcgccggaccgggtctgctggcccgtgtgttaacagccaaatactgtgaacatctgccgctgtaccgccagacggaaatccttgcccgacaggggtggagctga

SEQ ID NO: 266501 - DNA, 615 bp, Klebsiella pneumoniae; identical to SEQ ID NO: 206189

SEQ ID NO: 266502 - DNA, 708 bp, Klebsiella pneumoniae; identical to SEQ ID NO: 206188

SEQ ID NO: 266503 - DNA, 906 bp, Klebsiella pneumoniae; identical to SEQ ID NO: 206187

SEQ ID NO: 266504 - DNA, 276 bp, Klebsiella pneumoniae; identical to SEQ ID NO: 206186

SEQ ID NO: 266505 - DNA, 303 bp, Klebsiella pneumoniae; identical to SEQ ID NO: 206185

SEQ ID NO: 266506 - DNA, 1542 bp, Klebsiella pneumoniae; identical to SEQ ID NO: 38675

SEQ ID NO: 266507 - DNA, 369 bp, Klebsiella pneumoniae; identical to SEQ ID NO: 38676

SEQ ID NO: 266508 - DNA, 1512 bp, Klebsiella pneumoniae
atggctatttttcatcttgattttaaaattgtgaaacgttcagaaggtaggtcttccgttgcgaaggctgcctatcatgctcgtacacgtataacagatgaaagaacaggtgatacgtatgattatagccgccgtaccgatttatatgggcatttcatattagctccagttaatgcaccggaacatatcataaaagactctacagcattgtggaatgaagttgaacgggtcgagcgtcagcaaaatggtcaaacagctcgttatttcgatgttgctattcccaccgagttaaacaatgacgacaagaaaaaacttgtccttgagtattgtcagaaaaatttcgttgataaaggcatgattgccgatatcgcttttcatgatcttgatagcgataacccacacgctcacgttatgttgaccttaaaaaccattggcccggaaggttttggtaaaaaagaaagaagctggaacgacagaaaaatgtctgtcctttggcgtgaatcatgggcatctatggctaacagctatcttgctgctgctggttcatcagaacgtattgatcatcgttctcttcaggcccagcatgaggaagcgttagaaaaagcagcagtagctttagataatgaagaaaaagcgttatggcttgctaaggctgctgaaacaaatcgtcctgcaatgaaacgtatccacagcgctaaatggcgtagtaaggctgctcaggagcaaagagccgcagaacagacagttcgtgatgcagcgaagcaggaagcggttgaagtctataaaacattcagtgaacttgatcttgaaatcgtcgttgatgtcagaagcttcacagtggctgctctggctgaaccagaacaaatcgtattacctgaaacacactccggctcttctactgatgagaatcaaagacctgtattggtagcaccagctcctcatactcgtatgcgtggcgttaaatcttaccgtgataaaacaaaagtcagtaaggtcgctgcaggtaagaaaccatcagtcagtatttctgattctggaacaaatactatcctgaaaccatcctcctctcaaaacccaaacagggcatccagaagcgcccctgaacgtgttaagaggaaaacagctactccgcgtcaggataatatttttaaacgcttcactgccctcttagttgattttatcagggataaattcatatgggctaaaacagacaaaattaaagttgatattatcagtgaagaacatgataaacatattgttgaaaactatgtatttgatgaagtgttaggtcattatgtttctcgtactgaatatgagaaagtagctaaatttaacagtgaggattataagcctacaccttcagagataaaacgcttccctagtcgtcctaagcacgaacgagtcaatgcagataataacatgaattttataccgactgtttcaacaataaatgataaaaatcatactcctcgtttaaggccacctacacgccgtggcctagataaactatag

SEQ ID NO: 266509 - DNA, 948 bp, Klebsiella pneumoniae
atgattgctttgaagaagaaattagacgttatagagaaagttgttccatcagggagtcgtgttatttatttagatatcccattacatctcaatgtcggagatttgttaatttataaaggtactgaacagttttttcgggaaaagaaatatcaaatattggctagacgtactgataaaggtagtttaaaatacgtccagtctttaaggagcctaccagaagatgttattatacttctgcatggaggtggaaattttggggatttatatccaaaacatcaaattttacgtgaagaagtagtcaaggcgtttccaaataataaaatcgtttacctgcctcagacggtacattttaaagatcagcaagctttgaacgattcagcaaaaataatacgtaaacataaaaatttaactatcttttgtcgtgatcttaacagcgaaaaattgcttaaagagaagttttgcgataatgttattatgtgtccagacatggctcactcattatggcaaattttccctaggcaaaataagactcaagttgctcgcgatacgctatggatgttacgcaaagatattgagaaaaccgatctatcaggccttagtgatgctcctgaatcttctatgtatgaggattgggaagatatttgctcgaataaggatcgttttataatgagagctcttgtcaaagctgaacgcataaataatatcgctggaagatacattatccctacgtcccagctctgggggaattatactgatcagcttgtaaaacgtgtcaatgaatacttcctttctcataagattgtcgttacttcaaggatgcatggccatattttatgttgccttcttgatatgccaactaaacttctcgataattcctatgggaaaaactctacatattacgatgcttggacgcataccgttcctaattgcgagttagttaaagtatga

SEQ ID NO: 266510 - DNA, 996 bp, Klebsiella pneumoniae
atgataagaagatcaagaagaaaccgtaaaacccgttacagacaggtacggttccttaatcgtgtaagaagtaaacataaaggatggttggctccatccgtccagagccgtgtagataatatagtggaatggtctaagcgtttcattcgttacgttactgttggttttataactgtagaatcggttaagtttgatatgcagaagatggaaaacgctgatgttgacggtatcgagtatcagcgtggcacgctgtttgattatgaagtaaaagaatatttgcttgagaaatataattatagctgcgtctattgtggagccaagaatgtgccatttgaaaaagaacatgttatcccacgtagccgtggaggaagtaacagaataagcaatctggtgttatcctgtaggtcatgtaatgagaaaaaagataacttgccaatcgaggagtatttaaaggataacccggcgttattgaaaaagataaaagcgcagttaaaaagctctttaaaagatgcggcagcggtcaacataacccgcaaacaaatcgtaaaagaattagaaaatttaaatgtgcctgttttgacaggaacgggagcggaaacgaagtataacagagtaagtcagggatataagaaggagcattatatagatgcgttgtgcgctggcacaacgggaactaaggtatatataccatctactttaaaaccattgttgataaaaaaggaaagaagaaataacaggcaaatgtgtttagtggataaatacggttttccaagaggaaaagcgaaaggatctaaaatagtacatggatttaaaacaggcgatatagtgaaagctgtggtgttgaaaggaaagaaaaaaggaacatataaagggaaagtagcggtaaggtcaagtggaagctttaatataaaagtaaaacagggcgtagtagaaggtataggctggaagaactgcgtaatgctttaccgtttcgatgggtatagctatgcctattag

SEQ ID NO: 266511 - DNA, 618 bp, Klebsiella pneumoniae
atgcttgcaaataactttttggcaacagaatcgtgggaggcactgttagcagcttatctggacagagatgttggtgcttatatagatgaggtaagaaaaccgtccgggccaacgacatgggatattgaatggatcggaattgaccgtcgaagctcggtttatcgcgcttacaagcgtcagaacatggaaaaaggagaagatttttcggcctattttaatcgcgagtggttcccgactggtgagtttgacatagaaagtaactgcgatgcttcaggcttcattaaaggtgataaagaacgctggagtatcagtggtgatgttcacgaaattaaaaatatgtctgtaatcctctatattaaacagacgttgatgacttcgtcgaaggacggattgttgaagaagaacgcatcaggggtgaagagtgccaagcatagctgcttcgtctatggtgatacctcgttttcattcagcgaggttatggaggctatcttcatcagtggtctgttcttctatgcgccaagagacgccgccagcagccttgatgatctgaaagcaagtctgtctgggctggaagaagaactggccgaagtatctaaaacggcgctggtagccaaatga

SEQ ID NO: 266512 - DNA, 345 bp, Klebsiella pneumoniae
atgtctctgatattcaaaaaacttaagaccaaaggcattatcatagataaagatggcgatctatttatgaactccaatatatttttaaaaggtcaagcccatactattaacccgaaacaacgccccaatgtaaaaaaggcacagggatttaacgcaaacaacgaaccagcatttgataatgtctatgcctataaccaagcgaatgattcagagaaagagcaaataaatagcaaggaaaccgtcgttccagacagaacatcagatactgacgtcaacgaagcagcgctaccactattgctgcagtttcctaaaacagcagaaccagcttatgattatgctgaatag

SEQ ID NO: 266513 - DNA, 207 bp, Klebsiella pneumoniae
atggataattcaggacgtgaatatgaagagcttgtcagggatatacaacattcttttattagagcctatcccaataggcgtttattcaagacaataatgccgcaggaaaaattcaggaacgcctcacagttttcgatcttattatcccaacgagtcagaagccgacgtaagcggttcatccagctgcgctttctctccactacctag

SEQ ID NO: 266514 - DNA, 963 bp, Klebsiella pneumoniae
atgcgtctatcattttcaggccgggtggcggccgcgctgatgctgctggcgctgggcggctacgcgacagcgcaggagcggcttaccctgcgtatcgccgatcaaaaaggcggcatgcgttcgcagctggaggcggccaacgccctgcaaaatctcccttacgacattaagtgggccgagttcccggccgccgcgccgctggcggaagccctcaacgcgggcgccgtggacgcggggatcatcggcgatgcgccgttgctcttcgccctggccaacggtgcgccggtcaaagctattgccgtggataaaagcaacccggcggggaccgcggtgctggtatcccccggcagcacgttaaaaagcggcgctgatttaaaaggcaaacgcatcgccaccggtaaagggtcgattggtcatttcgtggcgctgaaagcgctggagcaggcggggatttcaccgaaggaggtgcagtgggtgttcctcggcccggtggacgccaaagtggcgttgctaaacggttcggtggacgcctgggcgacctgggagccctacaccacccaaatggtgaagaccaacgaggggcagatcctggtgagcggcaaagggctgctgccggggaataccttcctcgcggcaacggattccgcgcttaacgatccgcaaaaacgcgccgcgctgcaggattatctccagcgcctggccggcgccgagcgctgggcctacgctaatctccacagctacggcaaaacgttgggggagatcatccgcttcccggcggagatcgcccgcgcgcagtttgccaaccgccagtcgcagtggcagccgctggccgaggaaacagtggcccaacagcaggcaacggcggacttttatctcgccaacggcctgatccgcacccggctggacgtgaagccgacctttgaccgccgttttagcgtgcccgccgccgaggtgacaccatga

SEQ ID NO: 266515 - DNA, 909 bp, Klebsiella pneumoniae; identical to SEQ ID NO: 125639

SEQ ID NO: 266516 - DNA, 576 bp, Klebsiella pneumoniae
atgaataaccctgatgaatattttcaggcagggattattgtttttaatgtcaaacaaatggtcgaagaaaatacttttgctgaattgatgcgggtattaaaggcaaagaaatactggttcctcgaccaggatatcatgaataaagtattctactctcgagtcacatttctgccattagagtggaacgtttatcatggtaatggcaacacggatgatttcttccctaatcttaagtttgcaacgtatatgaaatttttagcagctcgcaagaagcctaaaatgattcattatgcgggtgagaacaaaccatggaataccgaaaaagtcgatttttatgacgactttattgagaacatcgttaacactccatgggagatggaaatctataaacgtcagatgtcgttagcggcttcgattggtttaacccatagcgagccgcaacaacaaatcttgttccagaccaaaatcaagaacgtactgatgccttatgttaataaatatgcaccaataggcacctcaagaagaaacatgatgactaaatattattacaaagtacgccgtgctattcttggataa

SEQ ID NO: 266517 - DNA, 2220 bp, Klebsiella pneumoniae
gtgcgtgatgatgaagtggtttacgtcgaaacggataacaccggcgacgaccgctacggcgaccatcaggtccgcgcctgcctgcgcgggcgttcgattcgccggcgcatcaatcatccggatcgccttaactatcccatgaagcgcgtcggcaagcgcggagaaggcaaatttgtccgcatcagctggcaggaggcgctggataccctcgccgaccgcctgaagagcgtggtagcgcagtatggcaacgaagccgtatacattaactactcttcagggatcgtcggcggcaacatcacccgttcgtcgccttccgcgtcgccggtggcgcgtttaatgaactgctacggcggctcgcttaaccagtacggtacctacagtactgcgcagattgcctgcgccatgccctacacctacggcagtaacgacggcaacagcacctcggatattgaaaacagcaagctggtagtgatgttcggcaacaatccggcggagacccggatgagcggcggcggcattacctggtatctggagcaggcccgcgagcgctctaacgcgcgaatgatcgtcatcgatccgcgctacaccgataccgccgccggtcgggaagatgagtggatccccattcgccccggcaccgacgccgcgctggtggccggtatcgcctgggtgttgattaacgaagatctggtggaccagcctttccttgataaatactgcgttggctacgacgagaaaacgctcccggccggggcgccggcgaatggtcattacaaagcctatatcctcggcgagggcgacgacgggatcgctaaaacgccgcagtgggcctcgcgtattaccggtatccccaccgagcgcatcattaagctggcgcgcgaaatcggcatgagcaagccggcctacatttgccagggctgggggccccagcgccaggccaacggcgaactcaccgcccgggcgatcgccatgctgccgatcttaaccggcaacgtcggcatcaacggcggcaatagcggcgcccgcgaatcaacctacaccatcaccattgagcgcctgccggtgctggaaaacccggtgaagaccgccatctcctgctttacctggaccgacgccatcgcgcgcggtccagagatgaccgccagccgcgatggcgtacgcggaaaagagaagctggatgtgccgatcaagttcctgtggaactacgcgggcaacaccctcatcaaccagcactccgacatcaataagacccacgaaattctgcaggatgaaagcaagtgcgaaaccattgtggttatcgacaactttatgacctcgtcggcgaaatacgccgacctgctgctgcccgacctgatgaccgttgagcaggaggatatcattcctaacgattacgccggcaatatgggctatctgatttttattcagcccgccacctcagcgaagttcgaacgcaaaccgatttactggatcctaagcgaagtggcgaaacggctcggcgacgacgtgcatcaacgttttaccgaggggcgtacccaggaacagtggctgcagtatctgtacgccaaaatggtggcgaaagatccggcgctgccggcctacgaggatctgaagcgaatgggcatctacaagcgcaaagacccgaacggccacttcgtcgcctatcgcgacttccggcgcgatcctgaagcgcatccgctcaaaaccccgtccggcaaaattgaaatctactccagccgactcgcagagattgccgcccgctggcagctggagaaagacgaagttatcagcccgctgccggtctacgcctccacatttgaaggctgggacgatccgctgcgcagccagtatccgctgcagctgtttggtttccactataaagcgcgcacccattccagctacggcaacgttgatgtattacaagcggcctgtcgccaggaagtatggatcaatccgcttgacgcggaaaaacgcgggattaaaaacggcgatatggtgcgcgtttttaatcagcgcggcgaagtccgtcttccggcgaaagtgacgccacgcatcatgccgggggtctcggcgatgggccagggcgcctggcacgacgccaatatgaccggagatcggatcgaccatggcgcctgcatgaataccctgaccacccaccgcccgtcaccgctggcgaaggggaatccacagcataccaacctggtcgatatcgagaaggtttaa

SEQ ID NO: 266518 - DNA, 231 bp, Klebsiella pneumoniae; identical to SEQ ID NO: 112534

SEQ ID NO: 266519 - DNA, 237 bp, Klebsiella pneumoniae
atgacgatttccgctcaggtgattgatactatcgtcgagtggattgatgataacctgcatcaaccgctgcgtattgatgatatcgctcgccatgccggtattcgaaatggcatctgcaacggctgtttttacagtacaaaggggagagcctggggcgctatattcgcgaaaggaagctgctgctggccgcccgcgatctgcgcgacaccgatcagcgggtctacgatatctgcctga

SEQ ID NO: 266520 - DNA, 147 bp, Klebsiella pneumoniae
atgagtcaacaggaacgggcaactatccttctcattgacgaccatccgatgctgcgcaccggcgtgaaacagttgatcagcatggcgccggacatccaggtgattggcgaggccagcaatggcgcgcaaggtattgagctggcctag

SEQ ID NO: 266521 - DNA, 177 bp, Klebsiella pneumoniae
atgaaaattcgttcacaagtcggcatggtgctgaatctcgataagtgcatcggctgccacacctgctcggtgacctgtaaaaacgtctggaccagccgggaagggatggaatacgcctggttcaacaacgtggaaagtaagccgggcgtcggtttcccgaacgactgggaaaactag

SEQ ID NO: 266522 - DNA, 195 bp, Klebsiella pneumoniae; identical to SEQ ID NO: 210511

SEQ ID NO: 266523 - DNA, 294 bp, Klebsiella pneumoniae; identical to SEQ ID NO: 102300

SEQ ID NO: 266524 - DNA, 1053 bp, Klebsiella pneumoniae; identical to SEQ ID NO: 7184

SEQ ID NO: 266525 - DNA, 867 bp, Klebsiella pneumoniae; identical to SEQ ID NO: 7185

SEQ ID NO: 266526 - DNA, 378 bp, Klebsiella pneumoniae; identical to SEQ ID NO: 221245

SEQ ID NO: 266527 - DNA, 282 bp, Klebsiella pneumoniae; identical to SEQ ID NO: 136386

SEQ ID NO: 266528 - DNA, 708 bp, Klebsiella pneumoniae; identical to SEQ ID NO: 211553

SEQ ID NO: 266529 - DNA, 498 bp, Klebsiella pneumoniae; identical to SEQ ID NO: 211551

SEQ ID NO: 266530 - DNA, 912 bp, Klebsiella pneumoniae; identical to SEQ ID NO: 211550

SEQ ID NO: 266531 - DNA, 912 bp, Klebsiella pneumoniae; identical to SEQ ID NO: 211549

SEQ ID NO: 266532 - DNA, 1680 bp, Klebsiella pneumoniae; identical to SEQ ID NO: 211548

SEQ ID NO: 266533 - DNA, 225 bp, Klebsiella pneumoniae; identical to SEQ ID NO: 211547

SEQ ID NO: 266534 - DNA, 192 bp, Klebsiella pneumoniae; identical to SEQ ID NO: 211546

SEQ ID NO: 266535 - DNA, 624 bp, Klebsiella pneumoniae; identical to SEQ ID NO: 136377

SEQ ID NO: 266536 - DNA, 432 bp, Klebsiella pneumoniae; identical to SEQ ID NO: 211544

SEQ ID NO: 266537 - DNA, 1488 bp, Klebsiella pneumoniae; identical to SEQ ID NO: 211543

SEQ ID NO: 266538 - DNA, 768 bp, Klebsiella pneumoniae; identical to SEQ ID NO: 211542

SEQ ID NO: 266539 - DNA, 987 bp, Klebsiella pneumoniae
atgtcactgcaaaacttaacccgctttccgcgcctggaattgatcggcgcgccgacgccgctggagtatctcccgcgtctgtccgatcaccttgggcgcgaaatttttattaaacgtgatgatacgacgccgctggcgatggggggcaacaaactgcgtaagctggagtttctcgccgccgatgcgctgcgcgagggcgcggataccttaatcaccgccggcgcgatccagtctaaccatgtgcgtcagacggcggcagtcgctgcgaaactgggactgcattgcgtggcgctactggaaaatcccatcggcaccagggcggagaactatctgagcaatggcaaccgtctgctgctggatctctttaacacccaggttgagatgtgtgatgccctgaccgatcccgccacccagctcgatgagctggcgacccgcattgaggcgcaggggtatcgtccgtatgttattccggtcggcggctccaatgccctcggcgcgttaggctatgtggaaagcgcactggaaatcagccagcagtgcgaagacgcggtggcgatctcgtcagtcgtggtcgcctccggcagcgccggcacccatgccggattggcggtcggccttgaacagctgatgccgcaggcggaactgattggggtgaccgtgtcgcgctcggtcgctgaccagttgccgaaagtggtggcgctgcagcaggccgtggccaacagtctcgagctacaggcgaaggctgaaattatactgtgggatgactactttgccccaggatacggtacgccaaacgaagatgggatggccgctgtgaagctgctggcgcagctggaaggtattttgctcgacccggtctataccggcaaagcgatggccgggcttatcgacggcatcacgcagaagcgctttaaggatgaagggccgatactgttcgtccacactggcggagcgccggcgctgtttgcctatcatcctcacctctaa

SEQ ID NO: 266540 - DNA, 669 bp, Klebsiella pneumoniae; identical to SEQ ID NO: 211540

SEQ ID NO: 266541 - DNA, 753 bp, Klebsiella pneumoniae; identical to SEQ ID NO: 211539

SEQ ID NO: 266542 - DNA, 216 bp, Klebsiella pneumoniae; identical to SEQ ID NO: 154564

SEQ ID NO: 266543 - DNA, 324 bp, Klebsiella pneumoniae; identical to SEQ ID NO: 160891

SEQ ID NO: 266544 - DNA, 558 bp, Klebsiella pneumoniae
atgctcatccaattacccgagccaagcaataaatctgagtttatgactatctcagaattaacaaaatatcgtcttatcgaatcaggtaagaaagtaaaagatggaaaccccgactggaatggtgatgtcggttttcgtgtgtttaaactcgatacatctaacatccgtccgtgggaagcgactgctgaaagtttgtcagaacagattgatgcctatgtaagcccaatccttgaaggccgtagtgaagaagatttactcacagagttaatgctaaaacgtggcatcgacctgagtgtaaacattgaaacccgtcagtttgatggattaaccgtttcttgcgttgacggtggcaaattgtttacctgctttgccaaacaaatccctgcatcttcagtagaagaactgaccaaggggatcatcgactggcataagagtttaaaagttgggaaagatacggtctgctatttccttgatgatgcgtttgaaaataacgttgctaaaacaaatctttgcgccattctggaacagcatggcctgactaacctgcacagcctgtaa

SEQ ID NO: 266545 - DNA, 195 bp, Klebsiella pneumoniae; identical to SEQ ID NO: 215003

SEQ ID NO: 266546 - DNA, 465 bp, Klebsiella pneumoniae
atgattaatgctcaaatcgtcccggccacggctgcacatatcgctgaaattctcccgttagtgcgcgccgctgacctgcaggagttttctgcaaccaatggctggagcgccaggcgagtgctggagtgcggactcaaaacctcaacattctgctgtgcaggtctggtgaatggcaaggtggtgacaatctttggtgtggcgccggcgtcaatgattggtggaagtggtatcccctggctggttggcactgattcccttgaaaaatatcagcgcacattcctgcgccgctgccggaaagtggtcaatgcaatgctgacggtttacccgtatcttgaaaactatgttgatgccagaaaccacgtcgcaaaggcgtggctccactggcttggttttaccctggaagacccggcgccgtatggcgtgcaaggcctgccgtttcatcgattccacatggagagaaaataa

SEQ ID NO: 266547 - DNA, 540 bp, Klebsiella pneumoniae
atgtgcgaaccagcaacgatcgccgccggcgcgacattagttataggtgcaatgtcagcctacaaccagaaccagcaatcaaaatatcagtcagcggtagctagccagaacgcggatattgctgaagcacaggcgcaggatgccgttaaccggggaaacattcaggcggcagaggtgcagcgtcggaaccggcaggcagcgggaacccaggcggctacgatgggcgcaacaggcgcagatttaagcactggtacatcactggacattttcggtgacactgcgcagtttggcacgcttgatgcgcttacaaccgtgaacaacgcacagcgtgaggcgtatgggtatcaggtccagtctgttaattatgacgcagaggctaaaggtgttcgtagtgctggcaaagccaatgcaaccatgaccctgctgtctacaccgcttaaagcgtttggtgcatacaaaacattcggtgggacgtgggatcctttcagtcaggaagccgcgccaatatctgcggccgtcggcaccaaaaccggtcgataa

SEQ ID NO: 266548 - DNA, 126 bp, Klebsiella pneumoniae
atgtacctttctcgcggtattaacattataaataatagtagcaatagcgatgaacaaaccaagcgaaaccgcgactgcacttactatctgagccacagccatggcaaattgcatatcttcacttaa

SEQ ID NO: 266549 - DNA, 552 bp, Klebsiella pneumoniae
atgtgcggcatcaaattgcctgccgacctgtatcagaacactgtgggctcacgcaacaaaaagggcagcgacgggacgaacgcccggatcacactgcgcaacctgcacagcgttatcaacaatccgtccatcgagctggccgcagcccagaccgtcgatattccgggagacgcggcaaactggaccactgattacctgaacagtgattacagctggataccgcggattaccctggataattgcatcccggcaattatccatactcctggcgcaaaagctgttgtcgatattcatggcggcaagctggcgcgggtctacaccaacggcaatggcaaccgctgccgggtcaccagtgctgatattgagctgatccctgatgcgtcgggtgtgacctatttcgctgcagataaaacgctggtgacgggctgttcatggctgaacccggccagtggcgcaacctatccaggcacattgcgtggttcaggaaacgaaatgatcggagaaagtgctaaagcaccaaaccttcctgcaaaagcttttattgaggaataa

SEQ ID NO: 266550 - DNA, 333 bp, Klebsiella pneumoniae
atgaacgagcagctaaagcaacaactgcatttacagttacagcaaatgctggaaagtttgttagcgcagattgcagcacaaacgagtgatgtgcaagttgtcgaacttgaccaatcacgactcggacgtctttcacgtatagatgcattgcaaggacagcaaatggaattagaaactgcgagacgcaagcagcatcagttacaagttattgaaggtgcattattgcgcataaatagcgatgaatatggcagctgttttgtctgtggtgaagatatcgatttgaatcggcttatgtttgatcctaccgtgactcgctgcattaactgttcgtag

SEQ ID NO: 266551 - DNA, 621 bp, Klebsiella pneumoniae
atgtccaaagttggttatgctcgagtgagttccacgggtcaaagcttagaagtgcaactgggcaagttacatcgagctgagtgcaataagatatatcaagaaaaacgcagtgggaggacggctgaacggtctgaatttcaatcttgcatgagttatttacgtgaaggggataccctagtggtaacccgactcgatcgtcttgctcgctcagtcgtccacttagcccagattgcttcgcgttttcaaagtgaaggtattgatttgctcgttatcgatcagaacattgatacgagcacttcgactgggagactcatgttcaatatgttggctgctattgctgagtttgaaaatgacttgcggacagagaggcaagctgaaggtatcgcaaaagcacatgaaaatggagttaaatttggtaggcctgtaaaacttacggacaccttaaaacaagcaatttatgataaaagagctgagggggccactattggtcagcttgccaaggagtatcaccttggagaagcttctatttatcgggcaataaattcagttaagcaatcaattgtttccccctactcgatagatgttaaagagctgcgagattatggaaaatataaaacgtga

SEQ ID NO: 266552 - DNA, 213 bp, Klebsiella pneumoniae
ttgctcaaagctcaacaagctccaatccaaattaataaaaatggcaagcctgtggccgttgttatttcagctgatgcataccaaagtatcgagacactaaaattacatttgcttcaatccaaagcggtgaaagccataactgacatcaaaatgggcaatttggttgatggtaataccttttttgatgagctggccgcagggcagtatgactaa

SEQ ID NO: 266553 - DNA, 135 bp, Klebsiella pneumoniae
atgaatgtgtttagcttcccttattcaagtcatgtcatctattacatccaacatgagcatcaattcgttgtatttgggatcttacataaaagtatggttccacttgcacatctcgcggagcgggaaattatttga

SEQ ID NO: 266554 - DNA, 3081 bp, Klebsiella pneumoniae
atgaaaaatgatgttcggcggctatctattttgtcaactgatgaaatagatgaactgtttggattacctcatttctcagatgatgatcgtcgattatattttgacttaagtgctaaagagcgcgagctattcgacaatacccgaacgttttctgtggcagcccatttagtattgcaactgggctatttcaaagccaaacggcagtttttcagttatgaacaagaatcgtcagtactaaatgacttggattacattgccgcgctgtactttcccaccaaaacgctttcaagactgaaaagtccctcaagaccgattagggctgaacaacaacgagcaattcttgatttattccagtataaacaatgtgataatgaggtaaaagttgatttggaagataaagcacagcgggttgcgatgttatcgacacaacctatctttatctttcgtgaattaacccaatacttagcattacaccgtattgtcatgcccagttatcggtatatgcaagagatgattggtagagtggtggcttatgaacgcacccgtattgctcgattacttagcacttgcatgacttcacttatcgatcagcaattagcggctttgcttcgggctgagtcaggagtatttcgcgtcagcgcattaaaacatgaagctaaagatttcagttataaagaattgcgacatgaagtcgcacggcggcagtttttccagcctctacatgagtttgccaagcagttcctcataacagcggggatctccaatgaaagcggcaagtattatgcttctatggttaagttttataccacttataaacttcaacgcatgaaaaaagagactgcacagttatatctgctgttttttgcttttcatcggtttcagcaaattaatgacaacttaattgaagcattgctccattgggtcgatcaatacgagaaacaggccaagcgtgccgctgaagaagcaatgaataatgcggttaccaatgcagcgaaaaatttacaggctgcgggtcatgtattgagcctgtttacggatgacaccatcaccgatgacacacctttttccattattaaagaaaaagcctatgcattgcttgaacaagagagattcccattagttgctgattacttacgcaatattgctttcgacaaaacggcatttgaatggtcacattacacaaaattatccgccacattcaaacgtaacttaaggcaactttttactgatctggattttgccggacgtgtagaagactctcctttgcttgaagctatcgcgtttttacaaaacttattgcgcacagaaaaatcaccaaggcaaactgaccctaattcatttccgactgagattattcctaaaggtttacgccgatatttgtttagtaaagagggcaaaacatttaaaacgcttgatgtagatcgctatgagtttttggtctatcgcctactacgcaactcactggaagcgggtgatgtgtacgttaaacatagtaatgaatttcgccgctttgaagatgacttaataagcgatcttagatggcaggataaagaacgagtattgcaagatattggtgcacccattttattggcccctatccaagatactctggctgtatttcatactatgctagcagcacgttatagtgcgattaaccaacatatttctgatggggtcaacaaacatattaaagtaattggggctgccgaaaagcgtcgttggaagctgctttatccgagcagtgatgaatccgttaatagcgatttttacagccagttaccaggaattggtattgcggatctactgtggtttgttgcgggtaatactggatttttaaatgcatttacccatgtattagatcgttatgtaaagcatgaagctgatccccgtgaaattttcgcctgtattgttgcgatgggaacaaacatggggttagcaaaaatggctgaggtttcaggccttagctcagcatcaatggcggggacatcaagaaattatctacgcttggagacattacgagcggctaatgatgcgattagtaatgcgaccagccagctacccgcatttcatctctatgatattcaggacacacttcattcaagtagcgatggtcagcggatagaaacgcaaattaacacccttaacgctcgatattctcccaagtattttggtttacagaaaggtgtcagcgcctacacgttggttgcaaatcatgttcctataaatgcaaagattattgggactcacgaacatgaaagccattacgttttcgatttattgcataacaatacctctgatataaagccagaacggcattccactgacacccatggcaccaatcaggttaatttttggattttgcatgcatttggatatcattttgcacctcgttatcgtgatttgcataagaaaatggatacgttagtcggctcacaacatcccaatgagtgtggtgactggctaataaagcctgcccgaaaaaccaacgatgaattgattgaacgtgaatggcccaatattcaacggatcatggcatcgctagctcaaaaagatgttactcaagccacgattgttcgcaaactctcgagctattcgcgtcagaatcagaccaagaaagcattatgggagttggaaaacatatgccgaacgctatacattctcgactttgtcgacgatgttggcttacgtcaatgtgtacaaaaagcattaaatcgtggcgaagcctatcatcgtcttagacgagcagttgcatttgttaacggtggaaaattcagagtaaaaacagaagaggagcagcaaatatggaatgaatgctctcggctcatcaccaacgcggtcatttactacaacacagtgctgctatctcgtgtctatgaacagaagcaaacagtaggagatcaaaatgcactggctcagcttcacagtatttcgcccgttgcatggcagcacatcaatatgtatggcaattttgagtttagtccatcaacctcaaaaatagatatcgatgcattggttgctcgatatgctgaaccagaatattggaagcaagcgctgattgagaacgagaattcaagtgagtga

SEQ ID NO: 266555 - DNA, 195 bp, Klebsiella pneumoniae
atggctaactcaattcctaacaacggacgcgccgtgatgatgcgcaatcgccgcaccggagccgcctggctggtcagcttcgactatcgcgacggcagctactggcatgagccgcagggcaatctgcgccacatccgccggccatacgcttcacgcagcattgagccgaacctggtaccagccgggacgcattaa

SEQ ID NO: 266556 - DNA, 600 bp, Klebsiella pneumoniae; identical to SEQ ID NO: 227469

SEQ ID NO: 266557 - DNA, 663 bp, Klebsiella pneumoniae
atggccagcaccgtcagcaccgatataggtcacacatggctcaccgtcttcagcaaccgcagcaatctgcttcagaatcggagcgaccagctcataggcttctttctgcccaccaggcatgatggaaggccctttcagagctccctcttcaccaccggaaacaccggtaccgataaagttaaaaccttcggcagacagctcacgattacgacggatagtgtcctggaagaaggtgttgccgccatcaatgatgatgtcgcctttgtcgaggtaaggcttcagggaatcgatagcactgtcggtgccagccccggccttcaccatcaacaggatacgacgtggtgtttcgagggattcaacaaactcttgtactgtgtagtaaggaaccagtttcttgcctggattttcggcaatcacttcttcggtcttttcacgggagcggttgaaaacggagacggtataaccacggctttcgatgttcagcgccaggttgcgccccatcacggccataccgacaacaccgatctgttgcttggacattacatactcctgtcaggtgtggtcactgcgacacgttcgcagcttaaatgtgatgataatgttagcccaaagtgcaataagctcatagtgaaaattatcaaattgccacaaaatgaaacgtag

SEQ ID NO: 266558 - DNA, 180 bp, Klebsiella pneumoniae
atgaaatacaccttctttatcagtacgcttataggtgtgcgcaccaaagtaatcacgctgagcctgaatcaggttagctggcagaactgcggaacggtagctgtcgtagtaggcaattgcggcagagaacgtcggtaccggaataccattctgcacggcataagccaccacatcacgtag

SEQ ID NO: 266559 - DNA, 573 bp, Klebsiella pneumoniae
atgacctgcttattcgcaccttccctagttcaaactaatcgattgtaccttcggcctgtaatctcatcagacttaaacgatctattcaaaatttatggtgatcccgctacgaacacttttaatcctgcgggaccatatccgaacattgatcatgcaaaaatggttatgaatcgctggctcgaccattggcaaactcatagttttggaaactgggcaatttcgcttcttactaatcctgaaaaaatcatcggttttggcgggctgggaattcgtaattatgacgatatagttatcaataatcttgggtatcgcttatctacagaggcttgggggaagggtctggccacagaatttgccatatacgcgataaaatttggatttgatgttattaaattaaccgaaatttcggctgttgttcgagagaatcatctggcgtcacagaaagtgttacagaagtcggggttaagatatgtcaaagagattcatgatgttaaagatgcacctccaagccttctgtattcaatatcagtggatgagtggttaagaaatttagaagtgaacgcatccgtttaa

SEQ ID NO: 266560 - DNA, 348 bp, Klebsiella pneumoniae; identical to SEQ ID NO: 226812

SEQ ID NO: 266561 - DNA, 462 bp, Klebsiella pneumoniae; identical to SEQ ID NO: 226242

SEQ ID NO: 266562 - DNA, 306 bp, Klebsiella pneumoniae; identical to SEQ ID NO: 139665

SEQ ID NO: 266563 - DNA, 234 bp, Klebsiella pneumoniae
atgaagaaaacgctcgacagttttatggacagtgtcagccagaagcagctgacagaggcgcagtcaaaagcgctctctgatcggtttaacgacgcgctggagaagagtctggcggagtatcagcagcagcatcatgtggtcattctggtttcacctgccgtggttcagggcgcacccgatgtgacccgcaacatccagcacgacattgcccgccggatgaaaggagaacagtaa

SEQ ID NO: 266564 - DNA, 252 bp, Klebsiella pneumoniae; identical to SEQ ID NO: 30842

SEQ ID NO: 266565 - DNA, 297 bp, Klebsiella pneumoniae
atggacaggcggatcggtgactggcgcttgctggccgtcgagtatgatcatgataactgcctggacgaagacgaaaccgacaggctggatcaggtcctcgatgccattcttattcgcgatgcgcgattctgcccgatcctgctcaccctggttaacgagcgggaggaaactatcaggagcgcaggggttatcgctgatcagctgcgttttacggacactccggtccggcgctggtttgatcgccgggttttaagggaaatggtgagagaggcccgcgccagcagaactcaggagtga

SEQ ID NO: 266566 - DNA, 297 bp, Klebsiella pneumoniae
atggacaggcggatcggtgactggcgcttgctggccgtggagtatgatcatgataactgcctggacgaagacgaaaccgacaggctggataaggtcctcgatgccattctgattcgcgatgcgcgattctgcccggttctgctcaccctggttaacgagcgggaggaaactatcaggagcgcaggggttatcactgatcagctgcgttttacggacattccggtccggcgctggtttgatcgccgggttttaagggatgtggtgagagaggcccgcgccatcaaaactcaggactga

SEQ ID NO: 266567 - DNA, 603 bp, Klebsiella pneumoniae
gtggttaaaaatgtcaatcctgtacttgttgccaaagattctttttatctctcaggtgcttataagaatgaatattatggattgctaaatactgattcaggaacagtcattcccaagcttaaaactagtgattttgataaggctaatgataccataagctatatagcaaatatcagcaatggtgacctgttttggttaaaaagacgttattcctatagattatataattcacaaggcttaatgcaattagagggatattataatgatgtcaagcctttttatggtgaccatgcttgggtcgtacttccaaatgaaagtaattgggttttaattgattattttggtaatgttgttagtgaagcttgggggaagattgaaaccattgcttatggtaataatatcatcacctatgcatataaagatgatgatgatcggaccatgtatattttagattcatctggagatgttgattacattgaaaggaagtatgatatttggcaggaaagaaagtgtgataaaaccatctctgtgttatatgatgataaaaatagagttatttggccaaaagatcctttaattgaatgtttaaatgggttggattga

SEQ ID NO: 266568 - DNA, 924 bp, Klebsiella pneumoniae; identical to SEQ ID NO: 226163

SEQ ID NO: 266569 - DNA, 177 bp, Klebsiella pneumoniae; identical to SEQ ID NO: 266521

SEQ ID NO: 266570 - DNA, 753 bp, Klebsiella pneumoniae; identical to SEQ ID NO: 221243

SEQ ID NO: 266571 - DNA, 600 bp, Klebsiella pneumoniae; identical to SEQ ID NO: 227469

SEQ ID NO: 266572 - DNA, 918 bp, Klebsiella pneumoniae
atggccattaatagtggcgaattaaagggattgctcactactacttgtatagagaaaggtaaaattagtgatgtggcaggtttagaaaaaatagaaatagataataaaaatgaacttatgcccacattgttaggcataagtctttatagttctattcaagccagtctatcctatatatctcaactctttactgatataagaaaccaccaaattatcgaggaacaagccagatttgaaagaatttctgaaacaatagtagatagttttagaagcatacctgatatttcattagatcgttcgatgagggatgtttatttaacgcgaatcgttaaaaacaatgacgattgttttgaactgtatgcttcacaaagaatacaattcgcaaagcttttgcaatcagagccagaatactattctaccggttacaaccattattacaatagcaacaacggccaacgattttatcctgatcgtttttttataaataacgtattaacacatcctgtattcgcagtctttgaacgattagtcgctggcagaatttgtgaaattgttattagcggtaacttttccgatagcaatattcaaagacacaaagatttcatatatagaatccaaaccaagctagaagaacttatgaaataccggttatgtgctttcgaacgcttcactatggaacaaaaaaacatcatcgatgaagatttaaatttaactggccatgaccgaaaagaattagaaaaaaacctagccgaacacattaatttcgttaaagaaattaatgagaaaatattttcactattaaaaaacaagcttgatggatttaacgtactaacacaccttatggatcaagatgagataactatatatatccttgatggaaaattattaataaataacttcaagtcaaccccaaattaa

SEQ ID NO: 266573 - DNA, 294 bp, Klebsiella pneumoniae
atgacaatttccctgcataatccccggacaagcgcccctaacaccgcagcggcgaccagcatatccccgctggacccgtcaggctcctcaaaaacgaaattttctaaaaccagaacggatatttatcagaccgttaccgacagcatcattgcagcgctagaagccggtgtgaaaccttggtcatgcccgtggcagcgtgtatccggcatgtctggtctgccatcgaattacgccaccagcatagcctacagcggtatgaatatcatgttgctatggtgcagtgcatcaaaatag

SEQ ID NO: 266574 - DNA, 963 bp, Klebsiella pneumoniae; identical to SEQ ID NO: 266514

SEQ ID NO: 266575 - DNA, 696 bp, Klebsiella pneumoniae
atgatcactccgctgccgggcgcgattgagctgaaggccggctccgcgacgcgtccgttcttcggtgtccagccggtgctggtggataacgaaggcctgccgctggatggcgccaccgaaggcaacctcgccatcgccgactcctggcccggccaggcgcgtaccctgttcggcgaccatgagcgctttgagcaaacctacttctccactttcaaaaatatgtactttagcggcgacggcgcgcgtcgtgatgaagatggctattactggatcaccggccgggtggatgacgtcctgaacgtctccggacaccgtctggggaccgccgagatcgaatcggcgctggtgtcgcacccaaaaatcgccgaagcggcggtggtggggatcccgcataacatcaaaggccaggccatctatgcctacgtgacgctcaatcacggcgaagaaccgacgccggagttgtatgccgaagtgcgtaactgggtacgcaaagagatcggtccgctggcgacgccggatgtgctgcactggaccgattcgctgccgaaaacccgctcgggcaaaatcatgcgccgcattctgcgtaagattgccgcaggcgacaccagcaacctcggcgatacctcgaccctcgccgatcctggcgtcgtggaaaaactgctcgaagagaagcaggccattaccatgccatcgtaa

SEQ ID NO: 266576 - DNA, 1110 bp, Klebsiella pneumoniae; identical to SEQ ID NO: 212492

SEQ ID NO: 266577 - DNA, 258 bp, Klebsiella pneumoniae
atggccctgaaaatattatcatgcatcgctttggtacttgccatgatcatgatcctaacgcatttctccccaagcaatttgcttatacagttaccactaattctaacgaaacatggggtgagggattatctatgtttcacaatcctaacgctaagcatcccgtacctgaagcgctatttccatcaattgctcaccattactatgacaatggtcaaattgtcagccacttacctgaatttcatccttattcgtcaatga

SEQ ID NO: 266578 - DNA, 537 bp, Klebsiella pneumoniae
  misc_feature (509)..(518): n is a, c, g, or t
atgagtcttgacgattggttttttgataatcttacatcaacaaataaaaaattaaatttcgttcgtaagaacgatgaggatgttgttcagtattatgttccaccaagtgatggaaaaatactaagcgataactggatggatatttctttaagcggaaatgaaactattttcgacaccgaaaaaaatactgatttgttagaacgaatcatcaactggatttgtagaagttctaacgatatagttttagactttttcgctggttcaggaacaactggccatgcagtgttgaaaagcaattcaaaaaataatagtaacattcattacatgctcatccaattacccgagccaagcaataaatctgagtttatgactatctcagaattaacaaaatatcgtcttatcgaatcaggtaagaaagtaaaagatggaaaccccgactggaatggtgatgtcggttttcgtgtgtttaaactcgatacatctaacatccgtccgtgggaagcgactgnnnnnnnnnncagattgatgcctatgtaa

SEQ ID NO: 266579 - DNA, 819 bp, Klebsiella pneumoniae; identical to SEQ ID NO: 226152

SEQ ID NO: 266580 - DNA, 672 bp, Klebsiella pneumoniae
  misc_feature (652)..(661): n is a, c, g, or t
atgagtcttgacgattggttttttgataatcttacatcaacaaataaaaaattaaatttcgttcgtaagaacgatgaggatgttgttcagtattatgttccaccaagtgatggaaaaatactaagcgataactggatggatatttctttaagcggaaatgaaactattttcgacaccgaaaaaaatactgatttgttagaacgaatcatcaactggatttgtagaagttctaacgatatagttttagactttttcgctggttcaggaacaactggccatgcagtgttgaaaagcaattcaaaaaataatagtaacattcattacatgctcatccaattacccgagccaagcaataaatctgagtttatgactatctcagaattaacaaaatatcgtcttatcgaatcaggtaagaaagtaaaagatggaaaccccgactggaatggtgatgtcggttttcgtgtgtttaaactcgatacatctaacatccgtccgtgggaagcgactgctgaaagtttgtcagaacagattgatgcctatgtaagcccaatccttgaaggccgtagtgaagaagatttactcacagagttaatgctaaaacgtggcatcgacctgagtgtaaacattgaaacccgtcagtttgatggattannnnnnnnnntcttgcgttga

SEQ ID NO: 266581 - DNA, 837 bp, Klebsiella pneumoniae
atggcatttgtcaccacccaagacggcgtcaacatttactttaaagactggggaccaaaggaagctcagccgattgtttttcatcacggctggccgttaagcgctgacgactgggataaccagatgttatttttccttgccgaagggttccgggtcatcgctatcgatcgtcggggtcatggccgctccgatcaggttagcgaggggcacgatatggaccattacgcggcggacgtttcggcggtggtggaacatctggatctgcacaatgcggtccacgtcgggcactccactggcggcggccaggtcgcccgctacgtcgcccgctacggtcagccgcaggggcgggtggcgaaggcggtgttaattagcgccgtcccgccgctaatggtgaaaaccgagcagaatccgggcgggacgccgatcgaggtgtttgacggtttccgcaaagcgctggcggcgaaccgcgcccagttctatctcgacgtcgcctctggcccgttctatggcttcaatcgtgatggagcagagatatcccaggggacgatccagaactggtggcgacaggggatgatcggcagcgccaaagcccattatgaaggcattaaggcgttttcagagaccgaccagacggaagaccttaagtcgatcactttgccggtgctggtgatgcagggagatgacgaccaggtggtgccctataaaaatgcgtccatcctgcaggacaagctgctgccgaacagccagctgaaaatttatcctggcttcccgcacgggatgcacacctcccacgccgatactatcaacgccgatctgctggcgtttatccgcgcctga

SEQ ID NO: 266582 - DNA, 168 bp, Klebsiella pneumoniae; identical to SEQ ID NO: 212485

SEQ ID NO: 266583 - DNA, 1449 bp, Klebsiella pneumoniae
  misc_feature (1347)..(1356): n is a, c, g, or t
atgcacggttacgatgcgcctatctacaccaacgtgacctatcccattgcggtcaatccgccgtatgttcccacggagaatccgacgggttgttactcgctcacatttaatattgatgaaagctggctacaggaaggccagacgcgaattatttttgatggtgttaactcggcgtttcatttgtggtgcaacgggcgctgggtcggttacggacaggacagtcgtttgccgtctgaatttgacctgagcgcatttttacacgccggagaaaaccgcctcgcggtgatggtgctgcgctggagtgacggcagttatctggaagatcaggatatgtggcggatgagcggcattttccgtgacgtctcgttgctgcataaaccgagcacgcaaatcagcgatttccatgtagccactcactttaatgatgatttcagccgcgctgtactggaggcagacgttcagatgtacggcgagctgcgcgatgagctgcgggtgacggtttctttgtggcagggtgaaacgcaggtcgccagcggcaccgcgcctttcggcggtgaaattatcgatgagcgtggtggttatgccgatcacgtcaccctacgtctgaacgtcgaaaacccgaaactgtggagcgccgaaatcccgaatctctatcgtgcggtggttgaactgcacaccgccgacggcacgctgattgaagcagaagcctgcgatgtcggtttccgcgaggtgcggattgaaaatggtctgctgctgctgaacggcaagccgttgctgattcgcggcgttaaccgtcacgagcatcatcctctgcatggtcaggtcatggatgagcagacgatggtgcaggatatcctgctgatgaagcagaacaactttaacgccgtgcgctgttcgcattatccgaaccatccgctgtggtacacgctgtgcgaccactacggcctgtatgtggtggatgaagccaacattgaaacccacggcatggtgccaatgaatcgtctgaccgatgatccgcgctggctacccgcgatgagcgaacgcgtaacgcgaatggtgcagcgcgatcgtaatcacccgagtgtgatcatctggtcgctggggaatgaatcaggccacggcgctaatcacgacgcactctatcgctggatcaaatctgtcgatccttcccgcccggtacagtatgaaggcggcggagccgacaccttcgcaaccgatattatttgcccgatgtacgcgcgcgtggatgaagaccagcccttcccggctgtgccgaaatggtccatcaaaaaatggctttcgttgcctggagagacgcgcccgctgatcctttgcgaatacgcccannnnnnnnnngtcttggcggcttcgctaaatactggcaggcgtttcgtcagtacccccgtttacagggcggcttcgtctgggactgggtggatcagtcgctga

SEQ ID NO: 266584 - DNA, 504 bp, Klebsiella pneumoniae
atgaccagtgacatgctttttctggcacgttcagagcatggtctgctgcggctggataaacatgatgtggatctggcagccgaactgaatgaattacgtgagttgttcgagcccctggcagacgaaacaggaaagacaatcacggttgaaggagagggcgttgttgccggagacagcgatatgctccgacgtgctttcagtaacctgctttccaatgcaatcaagtattctcccgataacacctgtacagcgatacacattgagcgtgacagtgactgtgtgaacgtgatgattacgaatacgatgtccggccaggttcccgctaatctggaacgtttgtttgaccggttctatcgcgcagactcatcaaggttctacaacacggaaggcgcggggctgggattatcaattacaaggtcgatcattcatgctcacggcggcgagctgtcagcagaacagcaggggcgggaaattgtgttcagtgtgcgtctgttaatggattaa

SEQ ID NO: 266585 - DNA, 501 bp, Klebsiella pneumoniae
atgctccgccttgctattgaaacggtcgctcatgactatgatgtgattgttatcgacagcgcaccgaacctcggtattggcacgatcaatgtcgtatgcgctgctgatgtgctgattgttcccaccccggcagagctgttcgattacacttctgcactgcagtttttcgatatgcttcgtgatctgctcaggaatgtggatcttaaaggctttgagccggatgtccgtattctccttaccaaatacagtaataacaatggttcgcagtcaccgtggatggaagaacaaattcgcgatgcatggggaagcatggttcttaaaaatgtggtacgtgaaaccgatgaagttggtaaaggccagatccgcatgagaaccgttttcgaacaggcgattgatcaacgttcttcgaccggcgcatggcgaaacgcactttcaatctgggaacctgtttgtaatgagatttttgatcgtctgattaaaccacgctgggagattagataa

SEQ ID NO: 266586 - DNA, 1341 bp, Klebsiella pneumoniae; identical to SEQ ID NO: 180751

SEQ ID NO: 266587 - DNA, 570 bp, Klebsiella pneumoniae; identical to SEQ ID NO: 164821

SEQ ID NO: 266588 - DNA, 570 bp, Klebsiella pneumoniae; identical to SEQ ID NO: 164821

SEQ ID NO: 266589 - DNA, 876 bp, Klebsiella pneumoniae; identical to SEQ ID NO: 213968

SEQ ID NO: 266590 - DNA, 876 bp, Klebsiella pneumoniae
atgaatcacaccaccacacaggctgtcagcgtcgacattaccccccatagcggcgcgggagaggtcatcccgtctttgcccgtcgagcgcattgtggcgcagcgtaacagtggcgtggcggcttttctggaagccataaggctgctacgtgacgcgcagaaactcatttttgaagcatccgggcgcgggtggatctcaggcatgaccgaaatcatcgaacgcagcctgtcagccgactgcagcaccacgcgggaagccgccttaaaacgcagtatctgccgttatgccgatcgcgacatctggacgcgcctgatgaatgacacgggtatgtttacgctgatgagcgaggcgcagcgcaaggagtgggacacgcagctctacagcgacgactgccccgaaatcaccctcgacaacgtgatcgccacgttccgggcgcttaacgccagcaagggagaaacgtttgagcagggcgtgattgacgtgttccgcaacctctcatgggactataaaacgcataacccgtgctttctgggaaaaaaaattatcattgatggtgtcctggataatcatcgcgggctgtatttttccgtgcgcacgtatgcacagaaccgcatcgatgaccttgcccgcccgttctggatcctcgacggaaagaccatacccgataatcgcgtctccgagggggcaaacctgagcgcgtttatcagtcagggcggtgcgaagagcgtgggggaggtgtttacgtgcgagtatttcacggtacgcacatacaaaaaaggctccgcgcacgtcacctttacccggccagacctggtggagaaggtgaacgacattatcgcgcggcactatccgggggcgctgccgccggtggtctga

SEQ ID NO: 266591 - DNA, 231 bp, Klebsiella pneumoniae; identical to SEQ ID NO: 112534

SEQ ID NO: 266592 - DNA, 228 bp, Klebsiella pneumoniae; identical to SEQ ID NO: 229829

SEQ ID NO: 266593 - DNA, 876 bp, Klebsiella pneumoniae
atgaatcacaccaccacacaggctgtcagcgtcgacattaccccccatagcggcgcgggagaggtcatcccgtctttgcccgtcgagcgcattgtggcgcagcgtaacagtggcgtggcggcttttctggaagccataaggctgctacgtgacgcgcagaaactcatttttgaagcatccgggcgcgggtggatctcaggcatgaccgaaatcatcgaacgcagcctgtcagccgactgcagcaccacgcgggaagccgccttaaaacgcagtatctgccgttatgccgatcgcgacatctggacgcgcctgatgaatgacacgggcatgtttacgctgatgagcgaggcgcagcgcaaggagtgggacacgcagctctacagcgacgactgccccgaaatcaccctcgacaacgtgatcgccacgttccgggcgcttaacgccagcaagggagaaacgtttgagcagggcgtgattgacgtgttccgcaacctctcatgggactataaaacgcataacccgtgctttctgggaaaaaaaattatcattgatggtgtcctggataatcatcgcgggctgtatttttccgtgcgcacgtatgcacagaaccgcatcgatgaccttgcccgcccgttctggatcctcgacggaaagaccatacccgataatcgcgtctccgagggggcaaacctgagcgcgtttatcagtcagggcggtgcgaagagcgtgggggaggtgtttacgtgcgagtatttcacggtacgcacatacaaaaaaggctccgcgcacgtcacctttacccggccagacctggtggagaaggtgaacgacattatcgcgcggcactatccgggggcgctgccgccggtggtctga

SEQ ID NO: 266594 - DNA, 231 bp, Klebsiella pneumoniae; identical to SEQ ID NO: 112534

SEQ ID NO: 266595 - DNA, 876 bp, Klebsiella pneumoniae
atgaatcacaccaccacacaggctgtcagcgtcgacattaccccccacagcggcgcgggagaggtcatcccgtctttgcccgttgagcgcattgtggcgcagcgaaacagcggagtgacggcgtttctggaggcgataaggctgctacgcgaggcgcagacattcatttttgaagcatccgggcgcgggtggatctccggcatgaccgacatcatcgaacgcagtctgtcagccgaccgcagcgccacacgggaagccgttttaaaacgcagtatctgccgttatgccgatcgcgacatctggacgcgcctgatgaatgacacgggcatgtttacgctgatgagcgaggcgcagcgcaaggagtgggacacgcagctctacagcgacgactgccccgaaatcaccctcgacaacgtgatcgccacgttccgggcgcttaacgccagcaagggagaaacgtttgagcagggcgtgattgacgtgttccgcaacctctcatgggactataaaacgcataacccgtgcctgctgggaaaaaaaattatcattgatggtgtcctggacaatcatcgcgggctgtatttttccgtgcgcacgtatgcacagaaccggatcgatgaccttgcccgcccgttctggttactcgacggaaagaccattcccgacaaccgcgtctccgagggggcaaacctgagcgcgtttatcagccagggcggcgcggcgagtgtgggcgaggtgttcacgtgtgagtatttcacggtacgcacatacaaaaaaggctccgcgcacgtcacctttacccggccagacctggtggagaaggtgaacgacattatcgcgcggcactatccgggggcgctgccgccggtggtctga

SEQ ID NO: 266596 - DNA, 330 bp, Klebsiella pneumoniae
  misc_feature (187)..(196): n is a, c, g, or t
atggccgggctggaaaagcagcgtgagcagtatgctcatgcggtagaggcgttatccgaccctgaacgtacccgcttggttctggttgcacgactgcaaaattctacgctgcaggaagtcgcccgcactcatgaggaactggctgagattggcctgaaaaatcaatatctggtgattaatggtgtgnnnnnnnnnnacatgacgccctggccgcggcgatatggcaacgtgagcaggaggcactggcaaatcttcctgccggtttatctgagctaccgacagataccctgttactccagccagtcaatatggttggtgtttcagcattga

SEQ ID NO: 266597 - DNA, 1278 bp, Klebsiella pneumoniae
gtgaagctgtcggccacggcccggccggtggccgtgcaggagctggagtccgaactgcaccagctgcggcgtgaacaggattacgtggccgcgcgcaagcagtacgaccaggccgccgagctcgggaagcgcatcgaagccaaggaggccgagctcaagaagctcgtcgaggactgggagcgggagcgggcctccggcagtgccgaggtcaaggcggaacacgtggcgcagatcgtctcgcgcctgaccggcatcccggtcaacgagttgacggtggaagagcgcgaaaagctgctgcacttggaacaacggctgcacgagcgcctggtgggacaagacgaggcggtccgtgccgtggccgatgccgtgcggctgtcccgcgccggcctgcgtgaaggcagcaaaccggtggctaccttcctgtttctgggcccgaccggggtgggcaagaccgagctcgccaaggcattggccgaatcgatctacggcgatgagcacgccctgttgcgcatcgacatgtcggaatatggcgaacgccataccgtggcgcgattggtgggcgcgcctccgggctatgtcggttacgacgaaggcggtcagctcaccgagaaggtgcggcgcaagccctacagcgtgctgctgctcgacgagatcgagaaggcacaccctgacgtatacaacatcctgctgcaagtgttcgacgacggtcgcctcaccgacggcaagggccgggtggtggatttcaccaacaccatcatcatcgccacgtccaacctgggttcggacatcatccagcgacggctgaaggcgcgcggggcggccggcgaggagtacgaaaagaccaaggccggagtcatggacgtgctgcgcggccatttccggcccgagttcctcaaccgcatcgacgagatcatcgtcttccatgcgctgggcaaggaggagatccgccacatcgtcggcctgcagctcgatcgcgtggcgcgcagcgccgccagccagggcgtgacgctcactttcgatcagacgctgatcgaccatttcgcggaagaaggctacaagcccgagttcggtgcgcgtgaactcaagcgcctgatccgcagcgagctggaaactgcgctggcgcgcgagatgctcggcggcggcatcggcaagggcgatcacgccagcgcacgctgggacgacaaggccgaacgcgtggtgttcgaacgcaaagagccaccgcagaccccggccgagccggagcagccggatgccgcgaaggcgagcgacgcatcttga

SEQ ID NO: 266598 - DNA, 231 bp, Klebsiella pneumoniae; identical to SEQ ID NO: 112534

SEQ ID NO: 266599 - DNA, 558 bp, Klebsiella pneumoniae; identical to SEQ ID NO: 25303

SEQ ID NO: 266600 - DNA, 429 bp, Klebsiella pneumoniae
  misc_feature (407)..(416): n is a, c, g, or t
atggcgcgcgacggcaagctcgacccggtgatcggccgcgcgcaggagatcgaaaccaccatcgaggtgctggcccggcgcaagaagaacaacccggtgctgatcggcgagccgggtgtgggcaagaccgccatcgtcgaagggctggcgcagcgcatggtggcgggtgaagtgcccgagaccttgcgcgacaagcgcctggtggaactcaacatcaacgccatggtggccggcgccaaatatcgcggcgagttcgaggagcgcgtgcagaaggtgctgaaggaggtgaccgagcaccagggcgagctgattttgttcatcgacgaggtgcacaccatcgtcggtgccggccagggcggtggcgaaggcgggctggacgtggccaacgtgttcaaaccgatgatggnnnnnnnnnngaactcaacctga

SEQ ID NO: 266601 - DNA, 171 bp, Klebsiella pneumoniae
atgacgggagatcttgggctgggactcatccagcgccgtgcagaaatcgcagacgcacagttctcccagctccctgagcagcaggacaatacccagacgggtttcatcggacaggtttttgaaaagcttaagggctgtaaggggcattattcctcctgttcggttgcgtaa

SEQ ID NO: 266602 - DNA, 339 bp, Klebsiella pneumoniae; identical to SEQ ID NO: 251061

SEQ ID NO: 266603 - DNA, 1140 bp, Klebsiella pneumoniae; identical to SEQ ID NO: 226841

SEQ ID NO: 266604 - DNA, 276 bp, Klebsiella pneumoniae; identical to SEQ ID NO: 237174

SEQ ID NO: 266605 - DNA, 876 bp, Klebsiella pneumoniae
atgaatcacaccaccacacaggctgtcagcgtcgacattaccccccatagcggcgcgggagaggtcatcccgtctttgcccgtcgagcgcattgtggcgcagcgtaacagtggcgtggcggcttttctggaagccataaggctgctacgtgacgcgcagaaactcatttttgaagcatccgggcgcgggtggatctcaggcatgaccgaaatcatcgaacgcagcctgtcagccgactgcagcaccacgcgggaagccgccttaaaacgcagtatctgccgttatgccgatcgcgacatctggacgcgcctgatgaatgacacgggcatgtttacgctgatgagcgaggcgcagcgcaaggagtgggacacgcagctctacagcgacgactgccccgaaatcacactcgacaacgtgatcgccacgttccgggcgcttaacgccagcaagggagaaacgtttgagcagggcgtgattgacgtgttccgcaacctctcatgggactataaaacgcataacccgtgctttctgggaaaaaaaattatcattgatggtgtcctggataatcatcgcgggctgtatttttccgtgcgcacgtatgcacagaaccgcatcgatgaccttgcccgcccgttctggatcctcgacggaaagaccatacccgataatcgcgtctccgagggggcaaacctgagcgcgtttatcagtcagggcggtgcgaagagcgtgggggaggtgtttacgtgcgagtatttcacggtacgcacatacaaaaaaggctccgcgcacgtcacctttacccggccagacctggtggagaaggtgaacgacattatcgcgcggcactatccgggggcgctgccgccggtggtctga

SEQ ID NO: 266606 - DNA, 231 bp, Klebsiella pneumoniae; identical to SEQ ID NO: 112534

SEQ ID NO: 266607 - DNA, 324 bp, Klebsiella pneumoniae
atgaaatggcgttactctctgcgctggaaattaccatcaccgtgtcccggtccgcatgaactggcatccgaagtggtggaggccggacagcctgcgcctgaatccattatgtcgcgctgggtggcgggcgccgggtatgcggtgtgcgtggattttcccgatgagcggcagattaagcgctggagtgatgagcgcaaagccgctgcgcgtcgaaggaatcttgagcgtcgggtcaacaggatggcgcccctgtttgctgaggaactgattgagagggagcttgaggggcgaccagactatttccggggaaaatctcagacctga

SEQ ID NO: 266608 - DNA, 228 bp, Klebsiella pneumoniae; identical to SEQ ID NO: 229829

SEQ ID NO: 266609 - DNA, 837 bp, Klebsiella pneumoniae; identical to SEQ ID NO: 266581

SEQ ID NO: 266610 - DNA, 507 bp, Klebsiella pneumoniae; identical to SEQ ID NO: 214891

SEQ ID NO: 266611 - DNA, 258 bp, Klebsiella pneumoniae; identical to SEQ ID NO: 246307

SEQ ID NO: 266612 - DNA, 876 bp, Klebsiella pneumoniae; identical to SEQ ID NO: 266605

SEQ ID NO: 266613 - DNA, 231 bp, Klebsiella pneumoniae; identical to SEQ ID NO: 112534

SEQ ID NO: 266614 - DNA, 876 bp, Klebsiella pneumoniae
atgaatcacaccaccacacaggctgtcagcgtcgacattaccccccacagcggcgcgggagaggtcatcccgtctttgcccgttgagcgcattgtggcgcagcgaaacagcggagtgacggcgtttctggaggcgataaggctgctacgcgaggcgcagacattcatttttgaagcatccgggcgcgggtggatctccggcatgaccgacatcatcgaacgcagtctgtcagccgaccgcagcgccacacgggaagccgttttaaaacgcagtatctgccgttatgccgatcgcgacatctggacgcgcctgatgaatgacacgggtatgtttacgctgatgagcgaggcgcagcgcaaggcgtgggacacgcagctctacagcgacgactgccccgaaatcaccctcgacaacgtgatcgccacgttccgggcgcttaacgccagcaagggagaaacgtttgagcagggcgtgattgacgtgttccgcaacctctcatgggactataaaacgcataacccgtgcctgctgggaaaaaaaattatcattgatggtgtcctggacaatcatcgcgggctgtatttttccgtgcgcacgtatgcacagaaccggatcgatgaccttgcccgcccgttctggttactcgacggaaagaccattcccgacaaccgcgtctccgagggggcaaacctgagcgcgtttatcagccagggcggcgcggcgagtgtgggcgaggtgttcacgtgtgagtatttcacggtacgcacatacaaaaaaggctccgcgcacgtcacctttacccggccagacctggtggagaaggtgaacgacattatcgcgcggcactatccgggggcgctgccgccggtggtctga

SEQ ID NO: 266615 - DNA, 231 bp, Klebsiella pneumoniae; identical to SEQ ID NO: 213969

SEQ ID NO: 266616 - DNA, 876 bp, Klebsiella pneumoniae; identical to SEQ ID NO: 266605

SEQ ID NO: 266617 - DNA, 261 bp, Klebsiella pneumoniae
gtggagtatgatcatgataactgcctggacgaagacgaaaccgacaggctggataaggtcctcgatgccattctgattcgcgatgcgcgattctgcccggttctgctcaccctggttaacgagcgggaggaaactatcaggagcgcaggggttatcactgatcagctgcgttttacggacactccggtccggcgctggtttgatcgccgggttttaagggatgtggtgagagaggcccgcgccatcaaaactcaggactga

SEQ ID NO: 266618 - DNA, 426 bp, Klebsiella pneumoniae; identical to SEQ ID NO: 104046

SEQ ID NO: 266619 - DNA, 195 bp, Klebsiella pneumoniae; identical to SEQ ID NO: 215003

SEQ ID NO: 266620 - DNA, 327 bp, Klebsiella pneumoniae
atgctgcacgaaacccggcagtacggcattccggcgacactgcgtgggctcgtcaataacgacatgagaaccaccactgacgcggtgctgcagctggtgaaggatggcgttaccgacggggtgcagattgacccgacactatacacacagtacggcatccggagtgtgccgtctctggtggtacggtgtcaggccgggtatgacgtggtacgcggtaacattcacgtcaaacaggcgctggagaaagtggcacagaccggtgactgcgcacagctggcccggcaaatacttgatgcgcactcgaatgccgccgggagccagccatga

SEQ ID NO: 266621 - DNA, 324 bp, Klebsiella pneumoniae; identical to SEQ ID NO: 160891

SEQ ID NO: 266622 - DNA, 195 bp, Klebsiella pneumoniae; identical to SEQ ID NO: 215003

SEQ ID NO: 266623 - DNA, 147 bp, Klebsiella pneumoniae
atgatcgctatattctttcttggcggtgtgcaaatgctttctttaggtattataggagaatatgtcgggaaaatttatatagagacgaaaaatagacctaaatatttcattgatgaaagcgtaggtaatgatagcaatggaaaataa

SEQ ID NO: 266624 - DNA, 885 bp, Klebsiella pneumoniae
atgaaaatgaacgtaacggacaccgtaaaacaggcgtgcggtcactggccgcgcattctccctgcgctgggaatgaaagtgataaaaaaccgccatcaggcctgcccggtgtgcggcggcgctgaccgtttccgctttgacgataaagaggggcgtggcacatggttctgtaaccagtgtggcgccggtgacggcctgaaactggttgagaaggtgttcggcatatcggcatccgaggccgccgggaaggtgaacgccgtcaccggccatctgccgccggtggccccggaggtgatggcggccgcagacgccggaacggaggccgagcgcaaagcagcggccgcgctggccgtcagactgctggagaaaacgcgcccggccaccggcaacgcctacctgacccgcaagggctttgccggtcgtgagtgtctgacgctgaccacgtcgcacaaaaccggcggcgtggcctaccgcgccggtgatgtggcggtaccgttgtatgacgagtccggcacgctggttaacctccagcttattaatgctgaggggctcaagcgcaccctgaagggcgggcaggtcaagggagcatgccatctcatcgacgggcagaaacaggccgggaaacgcctgtggatagcggagggctatgcgactgcccttaccgtgcatcacctgaccggggaaaccgtcatggtggcgctgtcgtccgtgaaccttctttctctggcgagcctggcccgcagaaacacccggcctgtcagattatcctcgccgctgaccgtgaccttaacggcgacggccagacaaaagccgccgcggccgcagcagcctgtgagggcgttgtcgccctgccgccggtgttcggtgactggaatgatgcggtga

SEQ ID NO: 266625 - DNA, 354 bp, Klebsiella pneumoniae; identical to SEQ ID NO: 223602

SEQ ID NO: 266626 - DNA, 876 bp, Klebsiella pneumoniae; identical to SEQ ID NO: 266605

SEQ ID NO: 266627 - DNA, 876 bp, Klebsiella pneumoniae; identical to SEQ ID NO: 266605

SEQ ID NO: 266628 - DNA, 231 bp, Klebsiella pneumoniae; identical to SEQ ID NO: 112534

SEQ ID NO: 266629 - DNA, 462 bp, Klebsiella pneumoniae
atggctgccggaatgagtcgcagggagcccctgtttgacccggaggcggtgttcactcttccggccacgccatcttccctgcagctgcccctgtttgcggatgcctgtgcggcgggttttccgagccctgccggggattatgttgagcaggagctggatttaaacagcctgtgtatccgccatccggcagccacttatttcctgcgcgccagcggagagagtatgaaagacctcggtctgtatgacggcgacattctggtcgtggaccggtcggagaccgccgtggacggcgatgtggtgattgcggaagtggacggcgggtttacggtaaagcggctgcgtctgcatccccgccctgccctggagccgatgaatccggcttatccgacgctctggccggaagaactcacgctgttcggggtggtgatgcacttcattcatcgtacccgcgcccgcctgtaa

SEQ ID NO: 266630 - DNA, 762 bp, Klebsiella pneumoniae; identical to SEQ ID NO: 49919

SEQ ID NO: 266631 - DNA, 195 bp, Klebsiella pneumoniae
atggctaactcaattcctaacaacggacgcgccgtgatgatgcgcaatcgccgcaccggcgccgcctggctggtcagcttcgactatcgcgacggcagctactggcacgagccgcagggcaatctgcgccacatccgccggccatacgcatcacgcaatatcgagccgaacctggttccagccgggacgcattaa

SEQ ID NO: 266632 - DNA, 504 bp, Klebsiella pneumoniae
atgggaatcggcccaccttgccgcgcgccggtgccgtgtgggaatccgcccaccttgccgcgcgccggtgccgtgtgggaatccgcccaccttgccgcgcgccggtgccgtgtgggaatccgcccaccttgccgggcgccggtgccgtgtgggaatccgcccaccttgccgggcgccggtgctgtgtggaaatccgcccaccttgccgcgcgccggtgccgtgtgggaatccgcccaccttgccgcgcgccggtgccgtgtgggaatccgcccaccttaccgggcgccggtgctgtgtggaaatccgcccatcttgccgggcgccggtgccgtgtgggaatccgcccaccttgccgggcgccggtgctgtgtggaaatccgcccatcttcatgacaaaaatttgtcaaatgacaggctcatgtgtgctgatttatgtcagacgggattttgcttatcaattattgagaacagaaattttcctgaatcatcaatactatacttag

SEQ ID NO: 266633 - DNA, 195 bp, Klebsiella pneumoniae
gtgggctcggagatgtgtataagagacagggttataaccgcgttccgcattttcgcggcctgcattattgctttcggttgtttcagcccatccaccttttttatcaatggagaaataaccatcatgaacgtctttagcatgttctggatgagaagggagcaaatctttatatgcggggcttttgatcacttttag

SEQ ID NO: 266634 - DNA, 1752 bp, Klebsiella pneumoniae; identical to SEQ ID NO: 214305

SEQ ID NO: 266635 - DNA, 669 bp, Klebsiella pneumoniae
  misc_feature (463)..(472): n is a, c, g, or t
atgacgccgttacgcgtttttcgtaaaacaacacctttggttaacgccattcgcctgagcctgctgccgctggccggtctctcgttttccgcttttgctgcacaggttgatatcgcaccgggatcgctcgacaaagcgctcaatcagtatgccgcacacagcggaattaccctctcggttgacgccagcctgacgcgcggcaagcagagcaacggcctgcacggagattacgacgtcgagagcggcctgcaacagctgctggacggcagcggactgcaggtaaaaccgctgggaaataacagctggacgctggagcccgcgcccgcgccaaaagaagatgccctgaccgtggtcggcgactggctgggcgatgcgcgtgaaaacgacgtatttgaacatgctggcgcgcgtgacgtgatccgccgtgaggatttcgccaaaaccggcgcaaccaccatgcgtnnnnnnnnnncctggcgtcagcgcgccggaaaacaacggcaccggcagccacgacctggcgatgaactttggcatccggggcctgaacccacgcctcgccagccgctcgaccgtcctgatggacggcatccccgtcccctttgccccttacggtcagccgcagctttcactggctcccgtttcgctcggcaacatggatgccattga

SEQ ID NO: 266636 - DNA, 819 bp, Klebsiella pneumoniae
atgctgaccgagctggcgatgcaaaccgacaaaggcatcgtgctggccagcgccttgatcgggcacctgcggcggcagtcggtcattctgcccgccctcaacgccgtcgagcgggcgagtgccgaggcgatcacccgtgctaaccggcgcatctacgacgccttggccgaaccactggcggacgcgcatcgccgccgcctcgacgatctgctcaagcgccgggacaacggcaagacgacctggttggcttggttgcgccagtctccggccaagccaaattcgcggcatatgctggaacacatcgaacgcctcaaggcatggcaggcactcgatctgcctaccggcatcgagcggctggttcaccagaaccgcctgctcaagattgcccgcgagggcggccagatgacacccgccgacctggccaaattcgagccgcaacggcgctacgccactctcgtggcgctggccaccgagggcatggccaccgtcaccgacgaaatcatcgacctgcacgaccgcatcctgggtaagctgtttaacgctgccaagaataagcatcagcagcagttccaggcgtcaggcaaggccatcaacgccaaggtacgtctgtacgggcgcatcggtcaggcgctgatcgacgccaagcaatcaggccgcgatgcgtttgccgccatcgaggccgtcatgtcctgggattcctttgcccttcgatttcctgcatcgcatcggcgagagctacgccaccctgcgccgctatgcaccggaattccttgccgtgctcaagctgcgggccgcgcccgccgccaaaaacgtgcttga

SEQ ID NO: 266637 - DNA, 504 bp, Klebsiella pneumoniae; identical to SEQ ID NO: 226164

SEQ ID NO: 266638 - DNA, 1059 bp, Klebsiella pneumoniae
gtgagtagcagtatcgttgatcacctacgactccagttggtgcagtcgatggcaatgatcaggttgatgatctctaaacaatggtttgagcctgccgattcccggcagatgcattactccacgctgctacaccagattcttgcaattaccgcacaatggggtggagttcgtgccgaccagctctggtcacaactatgccagacagggccgttcagaaatgtagatttaaacgatttcaaaagcctgcttaaacatatgggagcatgtggcctactcactcaacttgctagcggcgaaatggttgttggggcagagggggagaaactgactaaccattacactttttatgccgtgttcaatacaccagaagagttccgcattatcaccggaaacagaacccttggaacagtgcctgtggactccccactgctaccagaccaacacatcatcttcggtgggcggcgctggaaagtgacagagatcgagacagagaaaaaagttatctatgtagaggcaaccaaaggcggtcagccaccacaatttagtgggggaggtatgtctgttcatgatgccgttcgtcaggaaatgctcgctatctatagggaaggtgattaccgcatagcaataggtagcaagaaagtagattatgccgatactgccgccagaaacctatttgcggaaggctgtagtaactttcagcgttttaaacttcaaaatgagtgttttattacgagtggacaacactgttacgtaataccctggatgggggataaagttgtcaatacgattacagccttgctcatacgttgtggttttaaagcaaattcatttgctggcgttatagaaatcgataactccagtgtagcttccgttcagcacgcgctgaaagaaatgctgttgtcaggcttgccatctgcatttgatcttgccacagatgttccagaaaagtacttagataaatatgacgagtatttaccagagtcccttcttgcgaaagggtatggtgcaaaggcgtatgaaacagaaggtacgcgcatctggttgcagaaacatctttag

SEQ ID NO: 266639 - DNA, 348 bp, Klebsiella pneumoniae
atgatcccgctaccaacaggcatcaaaatctggctggttgccggtattaccgatatgagaaacggcttcaacgggctggctgcaaaagtgcagacggcgctgaaagacgaaccgatgtccggccatgtcttcatcttccggggccgcagcggcagtcaggttaaacttctgtggtccaccggcgacgggctgtgcctgctgaccaaacggctggagcgcgggcgcttcgcctggccgtcagctcgcgatggcaaagtgttcctgaccccggcgcagctggcaatgcttctggaaggcatcgactggcggcagcctaaaagactgcttacgtccctgaccatgttgtag

SEQ ID NO: 266640 - DNA, 906 bp, Klebsiella pneumoniae; identical to SEQ ID NO: 6034

SEQ ID NO: 266641 - DNA, 609 bp, Klebsiella pneumoniae
atgacgctgccgttggcgccaacgatgcccacgaagatcatcactataccaaagagagggcgcagcaggggttcgctccagagaaaagcgacgccggcgcgcatggagagagtcgccgtcgtggtcatcgtccgagcggcacgcgcgggaagcacccacgcgccgagcagacctgcaaggacggagcagaacgccgtcagcccgagcgttggcgcagcgccaagcaggccgattgcggcccccccaagggccgggccacctagaatcgcgacgttcccgatcaccgctttcagtgacgagacgcgctcaacggagagcccggcgacgtggccgagtttgggcagctcactgtcctgcgcggccataccgggtgcgtcgaacgcggcaccgagcaccacgcaagcgatcagcccagtgttcgagagggcgccaacggcatcgagcagtgggatgctcgccatggccacgccgcccaccacacccgagatcaatgcgacgggcgcgcgcccgaaccgatcgacgaggccaccaccaacccacgcgccgatgatggtcgcgatgacgctgctagcggccgtggcgcccgcccaggccgcgctctttgtatga

SEQ ID NO: 266642 - DNA, 687 bp, Klebsiella pneumoniae
atgggtgagccggctgatggaatcggccaagcccatgacacgcaaatcctcgttcgcaatatgcgcgatttcgtggccgagcacgccggtcaactcgcggggcgtgaggctacgcagcaggccgtcggtcagcgcgatggccgcgtgatgcttcgaaccggtggcgaaggcgttgacgaccccgctgggcacgtagtgcggtaccggcacggtaggcagcccggcccgcgccgccagttcgcgcaacacagcccaaagatcgggcgcttcatccgggtgcagggggcgtgcgccatacagccgcaaggtcagcccggaggcggccgccggttcaagcagcagggtgaaccccgcagccgcaagcgccagccaaagcccgccgtcacccaacagcaggctgccagcgacggcggcaattccgagcagggtcagcaccaacagcacggtttgcaggcgattgtgccagcgatgccgcgcgccgacattctgcgcgtggcgcagatcacgactgatcatctgagctttccccggctgtccggtcatcgcgctcgcgcagcagccagtaagtcgccccgagggccagtgtcgcgcctgcaagcgccgcgaccttggcggggccggtctccgggtcgaggatcacgaatttacgcgccagggcgatcagcccgatcaggatcaccgtcttga

SEQ ID NO: 266643 - DNA, 201 bp, Klebsiella pneumoniae
  misc_feature (138)..(147): n is a, c, g, or t
atgtactatttaaaaaacacaaacttttggatgttcggtttattctttttcttttacttttttatcatgggagcctacttcccgtttttcccgatttggctacatgacatcaaccatatcagcaaaagtgatacgggnnnnnnnnnnctgacaaactcgggctgcgcaaatacctgctgtggattattaccggcatgttag

SEQ ID NO: 266644 - DNA, 348 bp, Klebsiella pneumoniae; identical to SEQ ID NO: 266639

SEQ ID NO: 266645 - DNA, 423 bp, Klebsiella pneumoniae
  misc_feature (257)..(266): n is a, c, g, or t
atgggacaggatccctcggtcgctctgctgcggctggaaaaaggcgaagtggatattgccggcgacggcgtaccgcccgcacagtttctgtcgtttaaaaacaacccggcctataagggcctgatggtcaccggcgaccagttgcagaccggctacgtgacgatgaaaaccacgctgccgcctttcgataatctcaaagtccgccaggcggtgaacatggcggtcaacaaagatcgcatcgtgcgcatcattaatgnnnnnnnnnnattaatggacgcgcggcgccggccaaccagccactgccacccgccatgcccggttatgacaaggcatatcagggtttcagctacgacccggcaaaagcgaagcaactgctcagcgaagcgggtttccccaacggttttgctaccgaactgtacgtga

SEQ ID NO: 266646 - DNA, 1035 bp, Klebsiella pneumoniae; identical to SEQ ID NO: 209959

SEQ ID NO: 266647 - DNA, 189 bp, Klebsiella pneumoniae
atgcttgatatgaaatttgttattgggttgttgttttttgatttgattgcgaagattccggttaatactagggcagtggccaacaaaagaatgtatataaaagtgattgttattcttcttgtgctaatacttcttgtgtttaactcttttaaagtttctaaggaaggtgcgaacaagttcctgatatga

SEQ ID NO: 266648 - DNA, 390 bp, Klebsiella pneumoniae; identical to SEQ ID NO: 245499

SEQ ID NO: 266649 - DNA, 519 bp, Klebsiella pneumoniae
atggatatagcctatctgtccgagattgacccgacctgggtggacagcagcctcaccaccattctgaatccggaagccatcctgtttgccaaccccatcgcacagggggcgtgcgcggctgacgctatggccagcgcgtttcatatgccactcgatattctgttctggtgtgccggctctcagggttcgatgtacccgtttagcggctgggtaagcaacgagtccagtccgctgcagtcctcgttacttgtcagcgagcgcatggcgtacaagcttcaccggcagggacaaattatggagagcatcgggaaggacaaggcggtctgctatgagtatccgtccccgatcatccccaaagagcgctggcgctatcagatggtgaacatgtacccggacagcggccagtgccatcccgtggggcgcagcgtgatgcgctgggaggccggtaaaaatccacccaacacccgtaagaactatggctatctgatgtggcgtaaacgcaattgtgtctttctctga

SEQ ID NO: 266650 - DNA, 639 bp, Klebsiella pneumoniae
atgaaattaatgaatctgtttatggtcatgcttttgctgaccggacgagcggtgttggctgaaacctcctctgttacagacagagaatggctgaagcagcaggagaccctcagcgaacagctgcgccagcatccggataaacagctgcagcaggagcttgaggcgcaaatcaaccgtaatcctctgcccaaatcagaccgccagtttatcgataatctggtcagccagcagaaagcggcgaatcaggaaaagccggcagaaggggcgctgtactttgtctccttctcgatacctgaagaggggctgaagcggatgctgcacgaaacccggcagtacggcattccggcgacactgcgtgggctcgtcaataacgacatgaagaccaccactgacgcggtgctgcagctggtgaaggatggcgtgaccgacggcgtgcagatcgacccgacactgtacacgcagtacagcatccggagtgtgccgtctctggtggtacggtgtcaggccggatatgacgtggtacgcggtaacattcacgtcaaacaggcgctggagaaagtggcacaaaccggtgactgcgcacaggtggcccggcagatgcttgatgcgccctcgaatgccgccgggagccagccatga

SEQ ID NO: 266651 - DNA, 1281 bp, Klebsiella pneumoniae; identical to SEQ ID NO: 223550

SEQ ID NO: 266652 - DNA, 780 bp, Klebsiella pneumoniae; identical to SEQ ID NO: 56175

SEQ ID NO: 266653 - DNA, 963 bp, Klebsiella pneumoniae; identical to SEQ ID NO: 266514

SEQ ID NO: 266654 - DNA, 924 bp, Klebsiella pneumoniae; identical to SEQ ID NO: 226163

SEQ ID NO: 266655 - DNA, 348 bp, Klebsiella pneumoniae; identical to SEQ ID NO: 248286

SEQ ID NO: 266656 - DNA, 195 bp, Klebsiella pneumoniae; identical to SEQ ID NO: 215000

SEQ ID NO: 266657 - DNA, 162 bp, Klebsiella pneumoniae; identical to SEQ ID NO: 196661

SEQ ID NO: 266658 - DNA, 480 bp, Klebsiella pneumoniae
atgattccgcgaccggtctgtttattaataacaaaaccgtcggttttatgtttgaggcgcgtcctttacccggtgcggataaaagtatcgtcgccacactggagcatttactgcgcagcaaacttccccggggcgtcccggtcagttttcatctggtctccagcaaactggtcggcaatgatatcgactatggtctgcgtgaattccgctggagtggtaaacaggctaagaagtttaacgccattacccaggcctactacctccgggcagcggagacgaagttccccctgcctcctgatctggatttgcccctcacgctgcgtaactaccgcgtgtacatctcctgctgcgtacccaggaagaagaactccaccacgcaaattgtcgagatggagaaccagattaaaatcctgcgggcgtcactgggcggtgcctatattccgacgcgtatccttgatgcgtccgggctggtcgaactga

SEQ ID NO: 266659 - DNA, 147 bp, Klebsiella pneumoniae
atgacgcgctgcatgcgtcggacacatgccatgcgtaccttgcgtgctatctgttcgatcgcttttgctggctttccgactattttacagaaaattaaattaggcagcatgaccgtaacaacgtaccggttgaaggtcatggcttaa

SEQ ID NO: 266660 - DNA, 1965 bp, Klebsiella pneumoniae
atggcagaagtaccgttaccaactcccaccgacaaccaggtaccaagcactgatattcgggacacagtttatgctggcgccatgctggataaggttgtcaccagtaccgacctgaaatacaccgatcgcctgggcggtgagcactacaccgtagatggtatcaaggcggaaggggataaagtcgttgaagaaacgcggcagaacctgatccctcttagccggcagtatatgacacttgcggcagcgcaggcagacattgctaatataccagtcaattcagctatatatgttcgtaatgctgatggcacatctttggcggatgaatacattaacaactccggtatattgactgcgactggtcgaaaaatgccatcacagcaaatgttggatgccgtatcggaaactgcaaatgattcgagtgattttctggccactgctcagaccgggttatattttggtaataatgaaacaatacctttagttatagacagtagtaatagactaatactcggctatgactctcataaagacgaggttattggggctggtatgatcaccagcgaaagggcgaaatcaatcagcgatagcgcaattgatgagcgagaggcaaatggaaatactggtttgtatgttggttcaggcactatcattcctttaatgattgatggcaacaatagactaatacttggctatgatgcagaaaaagactctgttgttggcgcgggattgaaccagtccaaaattaccccagagaggaaaccgcttccattagaattaagaccaatagcaaaggctgttaaccatacattagggtatggtcaatcactttctattggagccactgcaacaacaattatttctagttcgcagccgtattcaaatattactttttcaaccggtcctcgggcagcaaataacgatgtttcatcgcaaaaacctcttgtggaagataataccagccctgcacctgacggcggcactaatcgcggggaaacattctgctcgggaatggctaactacgccctaacgctagcagccattgataatggaatcattccatctacacacgttatttttgccagcaccgcaggtaagggggggactaaacttgcaaacctgattaaaggtacagcctggtataatgataacttcctgctgcatgtgactggtcagtatgccttgaaccatgactctgcggtgcatatcattccgattgctcagggggagaccgatcttgaccagtcgccgcctacgactgctgccgcatggcgcgctatggctgagcaattccagattgatgctgagtcagatattaaggctgttaatgggcagacaagtccggtttttgttcaatttagccagtgttcatacaaggccgcacttagtccaaatatctgcctgtctcaactggatttggttcaaaaaaataaaaaattcaggcttgctactccgcagtaccatctgcctcgggcagcagatggtacgcatcttactagcgttggctataaatgggatggggcatatagaggaagagattacaaggagttaatgtttgatggtattgagtctttatatatcaacccagtctctgctacgctcaggggtaacgttttaacgttgaagtttgatcgcataagggttcttcccttgaggctagataacgaaaatctggcagcaacaacagattatggatttagagttaacgactcaaatggaaaagttaatataatgtcatcaaggggtgccgatgataccatagtttttgagttagcaaccataccagtcgggaatactgttgtcaggtatgctcttgactatctgggggaaggtttgaatatagtaaacggtgcatcaggcaaccttcgtgacagtgatacttcttttatcactatcaacaatgtcaattaccctatgtttcaggtggctcctcacttcgaacttcaagttattaaggttggtgaataa

SEQ ID NO: 266661 - DNA, 777 bp, Klebsiella pneumoniae
atgtctagttttgtattgcggataaatgcatttagtagtgatacatctatgccaattattaatgaatctgacttatcatttaatcaattgccacctgttgaaagtgatgcgtgggagttttttgctctggatggcactgactcatcattgataggaactttaaataatcgcgccttaaccaagcaaaacacagttacatcaggtgataatttctttactcttgctattgggagcaatgttaaaaatgctcttgttagcacatttgcggatagccgcatacaaacccaggcattagtcattcgtttcccttcgctgccgaccaactccttacaaattccattcattgctggcgccatgaataacagcgcgggttcaggactgtatcttgatccaggctcttcattatcattgcggcggcagttcaggccatcaataactgcatcagagcaaccgtatgcatccctggctaacaaatggatatttgtggcattgtcagagaatggtgatggctctcatatggatagcactctgttctgctcaaacggaacaacttcgccatactcggtagagcgtacagatgctattgcgaaagttctggcatcaactggtatcggtgttggccatgtaaactatgtcacgccagcagaacggccaacaattaacatggatgtggcagagtatgccatttttgatacggcgaaatctccctctgatctcattcagatgtataaccgcgcaaagagacggatggcagacagggggataacattgtcataa

SEQ ID NO: 266662 - DNA, 351 bp, Klebsiella pneumoniae; identical to SEQ ID NO: 248555

SEQ ID NO: 266663 - DNA, 609 bp, Klebsiella pneumoniae
atgcttacctaccatcaatcaatttttaaaatgattatggcaaattggctgaacagcgatcatgtcatcatcgatactgagaccaccgggcttatggcttctgatgaaattatcgagatcacgataattaatatgcgtggtgagattctgttaaacaccctggtgaagccgagccgccctattccgccagaagttaccaaaattaataacatcaccaacgaaatggtcgctgatgcgccagcatggcgcgaggttttcccggctgcgctgaaaattattcgtaagcataaatggctggcatggaactccagttttgatgcccgcctgatggtgcagacctgcctgcagaccggattttttgatgacctaaagcctcacctcatcacctccatcatcatggccattgagacgcgccacattgacgccaaagcggtttatgaccagtggtatggggagttcgacgagaagcgcaaaaacttcaaaaggcagagcctggctacagcagctgcgcgccacggcatttcaaccgctggcgcccatcgcgcgcttgccgattgcctgatgatcctcggcgtgctgaaacaggtttgccagccggaggtcgcatga

SEQ ID NO: 266664 - DNA, 246 bp, Klebsiella pneumoniae; identical to SEQ ID NO: 180600

SEQ ID NO: 266665 - DNA, 219 bp, Klebsiella pneumoniae; identical to SEQ ID NO: 180588

SEQ ID NO: 266666 - DNA, 1062 bp, Klebsiella pneumoniae
atgcctgatcgctcaagtaatccgcccaatgcatatcaacaactcaataatcctggcgcagcaatcactcagctgaccagagacattgctgagaacaatgcaaacacgacccagaagagtatttccagcattggtaccctggcctcaggacccgtattagagctttctgatagtgctcaggatgtgctgtatgctctttttttccgaggcgcactcgtatctggtgatattccttcaaaagctggcgcctccgcactgcgttctctgggatttgccgagaccggccatacagccacgccatacaaaggggaagactatttcacctggctgactcctgcggggtatgcgttcgccattgggtatctggttaacactcgcttcggcaaacatcctgcaaatgcaatagcttccgggcagccatcggttcatccagaaggattaagcattcacaaagccatgattaaaggggcgatcagaagcgcagcccatgtttgcggcaataccatcgagcaggaaacgctgtcgaaggttctggccaattcactgcataacgtttcccatgagaaagctggcgatgttgctgaacaactggccagggccgttaagtctgcgtttagtgcgctggggaatgcatccagtgaacaggacaaggtacgacctaaagaatcggacttatccgtcggtactttcaaaatttatcgcgatggaaaggtgaagatagcttcaggctctcccttaacggctgaaatagaaaccgagcgtgaagatcgcaaaatagcagggaccattaatttaaaactggagctggatacctctgatgccatcgaaggcattaatgggctgagcaaagaaatttcagatcttgttgatactgctattgccgatgcgctcaagccgggaggacggttgtgggaggccattcgccactccagcggagagtccctcagcacgcgtgtagataatcttgaatctagttaccacgccgcatgcgctctgattagtgatttgtctcgccgtatttcagaacgtatcactggtgacgtccatgccagcccggtctaa

SEQ ID NO: 266667 - DNA, 1710 bp, Klebsiella pneumoniae; identical to SEQ ID NO: 206999

SEQ ID NO: 266668 - DNA, 315 bp, Klebsiella pneumoniae
atggctgcgaaaaataaagcagtggagccggaagaaacggtcgtacatgacaaccatgcaaccgagaccgcacaggataaccgtgcgactgagactgcacaggataaccgtgcgaccgtggtcgcacaggcagaacgcaaatccgttgtgttcctcggtccgcatagccgttattcccgtggtgatatcgcgtggtttgaaggatcgcacgccgaagagctggttaagcgccgtatcgcggtatggccgaaggatgccgaacgcgcgctgaaaccgaagccgggagacagcgattttgatactgacattggatga

SEQ ID NO: 266669 - DNA, 330 bp, Klebsiella pneumoniae
atgattaatcagcttcgtctttatacaataaacccggatttacgtgatgaatttctggcaagatttgaaaaacacgcggccagaatcatgagggataagtatggttttaatatactggctatgtggttatccggtgaaagtgccagactccggtttatatacctgctttcatggacagacaaaacagtcatgaacgactcatgggcagaatttatggcagatgaagaatggcgtacaataaaaaaacaattctgggaaaccacgcctgaacccgtattatctatagaggatattgtgctggaagcggccgggttttcatctccattataa

SEQ ID NO: 266670 - DNA, 639 bp, Klebsiella pneumoniae
atgattccaacaaagtatgatctgcatctgtttaccgattatatgcagccggtcaacctgtcctttaaccagtatttgcttttgacggaggagcccgtcctgttccatacgggcagcgcccagcaggcggcggccctcctgccgcggctggaggcggctctcgcgggccggccgctccggcatatctttgtctcgcattttgagtcagatgaatgcggcggattagcggcgctgctggacaggtacccggacgcctcggtcatctgccccgaggttaccgcgcgtcagctgatgggctttggatatcagtgcagcctggacgcgaaaaaaccgggggagcatattgtaacggattcctttgacctggagtttatcggatatccctctgaaatgcacctttgggaggggcttttggcctacgagcacaggcgcaaaatcttcttcagcagcgatttgatgatgcgctggggcgaaacgggcagcgacctcgttcactcaagctggaaggatgaggtgggcggcatcacggccgaacaggttccgagcccgcaggggcggctccgcctgcaggaggatctcatgcgcttttctccggaattgatcgcgacgggacatggcccggtcgtcgatttaagctaa

SEQ ID NO: 266671 - DNA, 378 bp, Klebsiella pneumoniae
atgttagacaaaaagcttttagaggtgctcacctcgccgccggacgcggcagtcgccatcgttacccagggcaaggacggcccgcacgttgtaaactcctggaacagctatgcacagataaccgaggatgacaagatccttttccccgcgggccggatgaacgaaaccgaacagaacattcgggccaacaacagggtgaagatgacgatatgcaaccgggaagtgcagggaataagctataagggtacaggatttcttgtgattggcacggcggagtttgcggccaaggggccggactacgacacggtcaaggcaaaattcccgtgggcacgggcggccctggcgattaaggtcgaatccgcggagcagacgctatag

SEQ ID NO: 266672 - DNA, 2217 bp, Klebsiella pneumoniae
atgaacacaaaaagatttgagcttgctcttgaaagacttaaaccctcagactggagggagttcgagaaattagccagtgcctttttggcatcagaatttgatgtatatattagtacggctgcgaattctggtgatggtggtagagatggagaattatacagcacagatgaccccaaggtaatggctcaattttcagttacagatgattggaataaaaaaataaatgatacaataagaagattaaatgttacctttcctgatacattggtattgatttacatgtccaatcaagaaataggtgcattgggagattctttaaaaaaaaccgctagaaagaatcataacatatctcttgatattagagataagaactggttttgcgagcgtgtgaatttaaatcaatcaaatcaaattaaggctgaagaactagccaaaggatttgtagatccttatttggcaacatatgatattataccaaaagttagcactgaattgagtaatcctgagtctatcgctgcattgacgtatttaaatctacaatggcaagatgatataagagataaaggtctaactaaaactgcttttgaagcaatggtacgctccgcattaattggaactgatagcaacaacagaatgaaaaaggatgaaatttgctcaaaaatatttaaaatattccccagacactcgccccaagaattatctatatatatagataaagccataaaaaggcttgggaaaaccgtaattaaatcccaccccaacaatgaatattgtctatcccatgaagacactcttagatttaacgaatttaaagcagaaaaaataatagcggaaagcgagcttaaatccgcaatagaaaaaataacacttcaggtaaccgctaattctttagatgaaaacgaagtgaaagaactatctctttgcctgcgcaatcttactgaaaaagttctatttgagagaagccaatcctttgcaatggccgtcgaatcaggtaaccttactgcacttgcagataatgacttcaagacgacaattatgcaagaaatttcaatctcaaaatttaaaaagaaaaaagatgttgattggttttctatattaaacattggaattagagaaactcttctgagtgataacccgtctattcaacaacatctcaggtctttagctgattcatacacactaatggcattccttcaaatcacgccagacgtgcagaaagccgttgaaaaaatgttttctaatggaaacctttggttagatacgactataattttaccattaatttcagaaacattgctaaacgatgaagagaagactggaagatttaccagaatgatagcagcggcgactggagctggtctaagattatacgtaacggatggagttattgaagaagtagaaaggcacatgaatcggtgcttgacctgctcacgaatgccaagtagagcttggaatggaagtatcccgtacttactagagcgctacattttctctggaagaagtgtgggttctttcgcgacatggcttgagaactttcgtggtccatctcgtccaatggacgatatttttgactaccttcttcaagaattcaatatacataaacgaagcctccaagatgaataccctaaaacttcagaggagttaagaagagcacttgttctaatttggaacgagagatatgtccgtcggcgagaaaaatacaatgttgatattgatgaaatgactataacacggcttataaaccatgacattgaatgctatgcaggtgtattagcactacgaaaccaagaaagatcctcaccatttggatatagttcttggtggcttactttggataaacaaacgtttgaccttaagcgcaaactacaggatatgatgacagagactccgcctgactcgccggtcatgagcgcagattttcttgtcaattaccttgcgattggacctttaagaaggaaagtaagtaaggccgatgaagcgaacttgccacttctaatgatgatagataatgctactaaattaacacctgagctagttgttgaggcggaaaacatacgtaaacaattcattgatttaccagagcggatgatacgaaggaatgtgagagacagtttggataaggcgaagtcatatattggccctctttccaaagcaggaatggaatccggtcttgatgactttgccgatttaaggcttacccagaatagcgatatttaa

SEQ ID NO: 266673 - DNA, 501 bp, Klebsiella pneumoniae
atgtacataccgcgacctgcaaagcttctgttccagcacgacgagggctgggaacgcttcctcgagaagaatggccatcagctcaccgactggaccaaactctccgtcgagcgcatgctggcctgcgggacatgcgccatgggggtacgacgctattgctgtagttcgcctgactgtactcactcacgctttctctgccagacttgcaaatccaaagcctgcagcagctgcggcctcaagggcaccgagcaatggatcgccgaacagcagcacattctgcccgactgcgactggcagcacatcaccttcaccatgcctcacctgctgtggcctttcttcaacaacaacttgccgctgctcaacgacctgtttcgctgcgccacccgtgccatgctcaggcacgcgcgcaagtgggcatcgaggtcggcatcttctgcgccctgcacacttaggggttctagggattttccgtccaaatgcgacattcagactgctaagtga

SEQ ID NO: 266674 - DNA, 1023 bp, Klebsiella pneumoniae
atgaatgatattattgaacatgaagatgaccatgagcctactggtaaagctaaagggggaaaggcaagggctgccaagatgaccccagaggagcgaaaagaagcagcaaagaaaatggccgaagccaaaaaagctaaagccatgctccctacagttgcaaatgaagggtacttgcgtgttggcgatgcagaactggaagtggccgtgcttgataatggggagcgggtcgtatctgctgcatcagtatttacagcccttggaaggactcgcagggggaataaaaaacatcttgaagatcaaaggtttatagatgggatccagacacccgcatttatggatgcaataaaccttattccatatattaatcaagagcttaagggcgtgatctctcgcgttgaattcaagacgaaatctggaatgattaaggatggatacaatgcagtaattcttcctcttgttggcgatttataccttagggcgagagaggatggagcgataaaaaataaagaacagcttgcagtcgctcaaaaagctgaagttctcgttcgatctctagcaaaggttggtattattgctcttgtagatgaggcgacaggctaccaaaaagagagagagcgagatgcacttgcgaagctgcttgaagagtttattgccaaagaaatgcgcccctgggtcagcacctatccaccagaatttttcgaacagttatgtcgattgcgaaacgttccattcaaagccaatatgcgtagaccacaatatttcgggcatctagttaataacataacttatgaccgtatggcacccgagctaagaagcgcgctgaaagaagaaagagcaaaaaccaagaaaaccggggcaaaaatgcatcagttcttatcagatggaactggatacagcctccttcagaagaggctaaccggggtaacaaccctcatgcaagcaagcgatacatatgaagaattcatagaattacttgatagagtgcatcctcttctgaagatagaagatattgatactcattga

SEQ ID NO: 266675 - DNA, 810 bp, Klebsiella pneumoniae
atgctaaccaccctgatttaccgcagccaggttcatcctgaccgcccgcccgtcgatctcgacgctttagtccatcgcgccagcagtaaaaatttgccccttggcatcaccggcattctgctgtttaacggcctgcagtttttccaggtcctggaagggactgaggaggcacttgagtcgctgttcagcgaaatccaaagcgacccgcgtcatcgcgacgtagtggagctgatgcgcgattactcagcctaccgacgttttcacggcaccggaatgcgcatactggatctccggctgtttgaaaccgatggcgcgctggaggaaattctgcgctttagcacgtttggggtcaccgaaccggtcaacgaccggatgttccggctgcttagcgccttcattgccgacggcggccgctattgcctgcccgagccgctgcagccctctcgctggatgatgatgcccgcgtcaggtacggccgcgccgcagcacctgcccggtcaactttgccagtttgctctgcaggctattgtcgagccggctaaaaagcgagtttcttcctttgaggctctgatccgcagcccaaccggcggctctcccgtggaaatgtttgccgccattgcggcggaggatcgctaccgttttgatcttgaaagcaaagcgtttgcattcgctctcgccggccagctgccgctcgggaaacatcagctggcgattaacctgttgcccggatcgctgtatcaccaccctgacgccgtaggctggctgatggacagcctgctggcggccggctcagaccggatcaggtactga

SEQ ID NO: 266676 - DNA, 633 bp, Klebsiella pneumoniae
atgactctgatgactctgacggctctgatgactctgacggctctgatgactctgacggctctgatgactctgatgactctgatgactctgaaggctctgacggctctgatgactctgacggctctgatgactctgacggctctgacggctctgacggctctgacggctctgacggctctgatgactctgacggctctgatgactctgacggctctgatgactctgacgactctgatgactctgaaggctctgacggctctgatgactctgacggctctgatgactctgacggctctgacggctctgacggctctgacggctctgacggctctgatgactctgacggctctgatgactctgacggctctgatgactctgatgactctgatgactctgaaggctctgacggctctgatgactctgacggctctgatgactctgacggctctgacggctctgacggctctgacggctctgacggctctgatgactctgacggctctgatgactctgacggctctgatgactctgacggctctggcggctctgatgactctgacggctctgatgactctgacggctctgatggctctgatggctctgatggctctgacggttctgatggttctgtaa

SEQ ID NO: 266677 - DNA, 1260 bp, Klebsiella pneumoniae
atgaacctttcggtagatggggtagtgggcagtgatggggtatatgtaaaacccgccgtagaacttgaacaagatgatgcagtacttaacgagattaaccagcagttagaaaaactgtttgaccgatgggcatacaatccagaccgctttagcattgatggagcattgagtttcgacttattccagcagacggtcgagaagattcgggtacaggatggggaatgttttattcgaatccatacaaataatggacagattcaaattgaaattatcgatgctgcacgattaacacagcttaataatcagttcatgtctaatggtaactatattagtaacggtattgagttcgataagtaccatcgtccggtgaattactatttctgtactttcaatcctgttaactatcagttcaatacaactgattacgaagttattcccgcaaatgaaatttgtcattacttcattgccgatatacaggggcaggaacggggcattcccgatatggttgctaccagtaaattaatgaccgacttacagaacttcactgaagcggcattaacggcaaaacgtgtgagtgcttcgagtatggcatttatcacgaacaacagtgataccactcaagtagatctcattgatgacaatcgtgaggaagtcactcctgtatatacagagtactttgaagcgggatttatcggtgaacttggtgaaggtcaggatattaaaacgattacgccaacaaatggtgtcgatggaattgatgtttttacgaacgaattgatgaaccaaatcagtatgggtcttaacgttactaaacaagcactattatctgatacctctaatgcatcattcagtgcagcacgacttacagaaaaactccaggttacgacattccgtaccagaacaaatgtactcatcagtaaagtactgaagccaatttatgccgcatggctgaaaaatgaaatgctacacaataatacattaaatcttagtttctcagattttgatgatcttatttgtgctcgttttatttctcagaaaccaatcagtcttgatccagtgaaggatattcaggctgaagtcatgcaactcgatgcaggtcttaaatccaaaacacaagttatcgcagaactgggcggtgatccagtgaaggtattagcggagatagctaaagaaaaagaagagaatattaacaaggaagttaaccagaatggaaataaggaacaagaagagggagctaacgatacccctacaggcgattaa

SEQ ID NO: 266678 - DNA, 357 bp, Klebsiella pneumoniae; identical to SEQ ID NO: 82574

SEQ ID NO: 266679 - DNA, 1098 bp, Klebsiella pneumoniae; identical to SEQ ID NO: 82577

SEQ ID NO: 266680 - DNA, 378 bp, Klebsiella pneumoniae; identical to SEQ ID NO: 82578

SEQ ID NO: 266681 - DNA, 810 bp, Klebsiella pneumoniae; identical to SEQ ID NO: 236711

SEQ ID NO: 266682 - DNA, 1437 bp, Klebsiella pneumoniae
atgcgcttttcactattcttaaatcattttgctttagctttgagtctctcaatagccacgagcatgttttccaacgcccaggcccgggtatacgagtacacctttacagatatcaatggggcgcaaaaaagtgtccctgaaagtgcgccctatcttaatccacatgggaattttaacgctctcctcattggtggcttggaccaacaaatccgcttaaccgtaactcgcgatgctgataacagtgctgtttacagcacaacaacaagtatcatctctgttgatgacaggatttcttccgctaatggaaatatgttttacggaaagactgtcactattccacctatcagtgatggtcgttacaccataaaatctgagattttagactcaaaatcgaccgttgtttcaacaacatcccatccttttataatagatacggtaggccctacgtctgataacttctctgtaccatggattcctgggtacaacatggttgtaacgggacctcgctgggaacttggccaaggtcaagaatctgccataaatcttgcaattaagaatatcaatgatctatctggttttgataaggctattgttcaaataataaaaccagatggatcaatacaatccagctatacgatggcctacgacgatgggtcaagagctgctacagcccctataactaaaggtggtggagcgatagctaaagctacatggatgccagtgtcggatgccgatgtagagtttcgctttcgagcattcctttatgataaagccggaaatgttactcaagtccccgaccaaaaatttgtatttgattcttctgcaggtgaatatgagctatttgcagttgcagaccccaattcttcaactagtgttgttcccggcatttcgtctggctacattaaatattcagcagggatgactgttaatactaaccctgttactcttgtgtacaagattcccaaacataattatagggcttataacaaagctggtttatccttcggttctttgcttactgaagataatagttatgtatatataaaacaatccaccccagttggtacatcatttactattcataatggataccaatacggaggaggtaacgcttcgtataatgttaagttaagttcaatcgctccgaaatccccatcaataaaatcctactcagcaaacttttcaacaattggcgatttttctgctggcacaatgaaattcacaaacatagattttccaggtgagtatcaaagtataactgtgtttgtagaccctagggattatgtgcagtcattttataaccttacacaaggctacgaagtttgtactattgagcccggagaaagttcttgcactggtcctttttcatacgcaataaataaggggaatggttacatagctcatttgacctgctccccgttgattaatacaccgtga

SEQ ID NO: 266683 - DNA, 156 bp, Klebsiella pneumoniae
atggaattagcaatgattcattatatatccaaagagcagttgattactatgacggtctctactccactaacgaccgtgctccaagaggagagatttactttcccgctggtatctattgtattggagacacaatcactgtccgaaatgggcccataa

SEQ ID NO: 266684 - DNA, 741 bp, Klebsiella pneumoniae
atggaacaaaaccaacctgcacaaccttcacgccggacaatcctgaaacaaaccctggcggtttctgccttgtctgtcactggacttgcagccttatcggtaccatccatctcttttgccgcatcactgagtaaagaagaacgtgacggtatgaccccagatgcagtgattgaacattttaaacagggaaacttacgtttccgagaaaatcgcccggcaaaacatgattacctggcacaaaagcgtaacagtattgcgggtcagtatcctgcagcggttatccttagctgcattgactcacgcgcaccggcagaaattgtactggatgcagggatcggtgaaacgtttaactcccgtgttgcagggaatatcagtaatcgcgatatgttgggtagcatggagtttgcctgtgctgttgccggcgcgaaagtggtgttggttatgggacatacacgctgtggtgcggtacgtggcgccattgataatgctgaactgggtaacctgactggcctgctggatgaaattaaacccgcgattgcaaaaacggagtacagcggcgagcgtaaaggtagcaattatgattttgtcgatgcggtggcacgaaaaaatgtcgagctgaccatcgaaaacatccgcaaaaatagcccggtactgaaacaactggaagaccagaagaaaattaaaattgttggcagcatgtatcatcttactggcggtaaggttgaatttttcacagtgtaa

SEQ ID NO: 266685 - DNA, 222 bp, Klebsiella pneumoniae
atgcgggctgaggtaatggaacattacggactgacacaaccaatagatcaggctggttactatgaaaccgctcaccataagcagcttatcaaggatatccggggggctatccatgaagggcggttaattgccgtttgtggtgtggttggcagcggcaagacggtcaccttgaggcgtttgcaacagcgactcagggaagaaaataaaatcaccgtggcatga

SEQ ID NO: 266686 - DNA, 348 bp, Klebsiella pneumoniae; identical to SEQ ID NO: 230009

SEQ ID NO: 266687 - DNA, 1380 bp, Klebsiella pneumoniae
atgaataaaaaatttttatcgatatccattggcttatgtctgatagcaggttcggcagtagcgaaaaataaccacctgacgctggaacaacgaatggagcagcttgaagcacggcttgccactgccgaaagccgggcgaccatcgcggaaacgcagatgcgagaattacagaataaacaaaatgcctctatccaggtcgcacaaaatacggtgtcggtaataagccagccccctattgcgaagagtaaaaagaatatctcttctcctgagcttaaattatctggctttggcgacctgaaaatttatggcgatgttgaatttaatatggatgcggaaagtaaacatggccttctggcgatgaccaacgctgatgttggcagcgacccaacctacgacaactgggatttaaatggccgcattctgctgggttttgacggtattcgcaaaatggacaaaggctattttgccgggttctccattcaaccgctggcggatatgacaggatcgatgaatcttgatgatgccgttttcttctttggtcgggagaacgactggaaggtcaaagtggggcgctttgaagcttacgatatgttcccgttaaatcaggataccttcgttgagcacgcggggaataccgccaacaacctctacagcgacggccatggctacatctatatgatgaaagaggggcgcggacgctctgacgcagggggtaacttcctgctgagtaagcagatagacaactggtatttcgagcttaacactctgctggaggacggcacttcgctgtacaacgacggtagctaccacggccgcgacatggagcagaaaaagaacgttgcgtacctacgcccggtggtttcctgggcgaaggatgagttctccgttgccgcggcaatggaggccaacgcggtgcaaaacgcctacgggtataaagatgcgcagggcaactttgtcgatcagtccgatcgtaccggctacggcttgaccatgacctggaacggcctgaagagtgacccggatgacggcgtggtggtaaacctgaatactgcatatatggacgccagcaacgagaaggatttttcctccggggtgaatacgctgtggcggcgctttgaactggggtatatctacgcgcacaacaaaatcagcgattatgctggggtgatttgcgataacgactgctggattaaagacgaaggtacctacaatattcataccttccacgcgtcgtataaaattcctaacgtgatgaatatgcagaactttaatatctatctcggggcctattactctattctcgatagcgacaataagctgagtcagggtgacgacgacgatcgctatggcgcgcggttgcgctttaagtatctcttctga

SEQ ID NO: 266688 - DNA, 876 bp, Klebsiella pneumoniae; identical to SEQ ID NO: 30085

SEQ ID NO: 266689 - DNA, 210 bp, Klebsiella pneumoniae
  misc_feature (195)..(204): n is a, c, g, or t
atggcaccaatcgctatcaatccaataagtcgctcgagattcaacgcattagccacttatgcccgaaacccacaagttaaatatcattctaatgagttagaatggttcgaaactatcgatggaaaagtgttaggcacgttattgttagatacaattgataatgactacgctggaataatacttgcccgagatctnnnnnnnnnnaaataa

SEQ ID NO: 266690 - DNA, 219 bp, Klebsiella pneumoniae
  misc_feature (6)..(15): n is a, c, g, or t
atgggnnnnnnnnnngagatggaaatctataaacgtcagatgtcgttagcggcttcgattggtttaacccatagcgagccgcaacaacaaatcttgttccagaccaaaatcaagaacgtactgatgccttatgttaataaatatgcaccaataggcacgccaagaagaaacatgatgactaaatattattacaaagtacgccgtgctattcttggataa

SEQ ID NO: 266691 - DNA, 996 bp, Klebsiella pneumoniae
atgtcgctgaaagccattgctaaagaacttgggatctcggttacgaccgtcagccgcgcgttaaacggctatgatgatgtgtcgcaggagacccgtgctcgcgtcgaggctgaagcgcagcgtcgcggatatcggccaaacacgttcgcgcgtcgcctgaaaatgggcaaaatcgacgccgttggcctcgtgttccccgtgcgccccgcgccgctgaataacaacgtttttctcgaaatggtgggagaaatcagccacgaactggcgcgctatgagattgatttactgctgatcgccgatgatgaacacgccgataagcacgggtatatgcgcatggtgcagagccgtcgcgtcgatgcgctgatcgtcgcgcataccctagacgacgacccgcgcctgaatcagctgctctcttccggctttccttttctcgcgctgggccgtagccgcctgccgcagccctacgcctggtttgatttcgataacctggcgggcacgtaccgcgccacccgccatctgattagccaggggcatcagcgcatcgcgctgctgagcgagaataacaatcaggcgtttattacccagcgtcgcaacggttacctgcaggcgctgtgcgaagcgggcctggcggaaacctggctgcgcagcgtgtcgcccacccgccgcggcgggtttcaggcaacgatggagctgctgcgcttgtctgaaccgccaacggcgattgtcaccgactgtaacacccatggcgacggcgcggcgatggccctggctcagctcggacgcctcaccggctccgatcgcgtctcgctggtggtttacgacggcttgccgcaggacagcatcatcgaaaccccggtgggcgcggtggttcagtccacccggcagggcgtgggccgccagatagccacgatggtccgccgcttaatcgccggcgaggatctggtctcgcttcaggtgctatggcagccggaatttttcccgggtgaaaccgcctga

SEQ ID NO: 266692 - DNA, 1044 bp, Klebsiella pneumoniae
atggcggccggtcagcggggtatagcccggcagcgccagcacccagtccgggtgcgcccggtacagatcggaatccgggttaatcatttccggctccacccagataccgaattccatccccagcgatttcacgtgatcgataaccggcgtcaggccgtaggggtattttttctcatcgagataccagtccccaagcgccgcccagtcgtcgttgcgccctttaaaccagccgtcatcgataataaagcgctcgacgcccagggccgccgcttcgtcggccatacgcatgatgtagtccgggtcgtggtcgaaatagatcccctcccaggtgttgagatgcaccgggcgcggcttgttgcccgggaagcgaataatccgttcgcgcagataacgatggaactgctggctcatgccgttcagcccgttcgccgagtagctggcatacaggtacggcgtccacaaggtttccccttccgccagcgccatttcgcccggcagatagagcgcctcggcctgcagatagcgacggccatcggttttcacctccgcccgcaggcgatggttaccgctccaggccagatgtacgccccagacttcaccctgcatctcgctaaaggcgcggctgccggtgatcagggccgggaaatgttcgtgagaggtgcgcccgcggcggttctccagcacaaagctgtcgtgctccagcgtcaggcggtgaggctgaaactcgcggatccagcggccatggaaagccatcacctcgcgagcgcgttcggcgaccggcaatgtgaccgccaggcgatccacctgccatgggctggcgcgcagattggtcacgccatggcgcacgctcagcacgccgctggcatccagcgcgatctcgctgtgcagacgcaggccggcctgcggatcttcgctgaccagggtcagcgtctggccctcgtgccgcacttcgctggtggtgaacagcggagaggcatccagaccctgacgatggccttcaatgcccggcgcgccaaacaggccatggcccagctccgccattaa

SEQ ID NO: 266693 - DNA, 711 bp, Klebsiella pneumoniae
gtggcccgtttcccgcacattgaatttgaatcctgctcctccgggggcgggcggatcgattatgaagtcctcaagcgcagccatcgcttctgggcgtctgacaataatgacgcccttgagcgcaacaccatccagcgcggcatgagctacttcttcccgccggaggtgatgggcgcgcatatcggtaatcgccactgtcatgccaccttccgccagcacagtatcgccttccgcggcctgacggcgctgtttggtcatatgggacttgagctggatccggtgagcgctgatgaagaagagcgcgccggataccggaaatatgcggccctgcataaacagtggcgcgacgtgatccatcacggcgtgcagtggcggatggatatgccggacgctaccacccttgcccatggcgtcgtcggcccggataaagcgcaggcgattttcctcgtcagccagctggcgatgccagactacaccctgatggcgccgctgcgcctggcggggctggaggcgaacgcccgctatcaggtgacgctcctcgatcatccgaacattcagatcaccggcgagggcggccacaccatgcggaagctgccggcatggatgacgacgccgcagacggtgagcggtgagtggctacagcaggcggggctggcgctgcccatcctcgacccggaaagcgccattctgattggcctgcaacgcgtgtga

SEQ ID NO: 266694 - DNA, 291 bp, Klebsiella pneumoniae
atgtatttaaaggcgcccaccagcaggaacggcacctccagcgcatggagcattttcaacgctacgacttccgcggcggtggtggcgaaggaagagccaatcattcttgccgccatcaccatcccggcgatcagcagggtattcttcgctccgatacggttaataatccacggcgagctgaacataatgatggcgttacatatttctcccgcggtggtggcgaaaccaaaggcgcgggtgcctgcttccggggtcgcaaagaacgatttaaagaaggtggcgaactgctga

SEQ ID NO: 266695 - DNA, 135 bp, Klebsiella pneumoniae
gtggtcgtcgagccgccgctggcggtcgccggctttgagatgctgatgctgtggcacgagcgctggcaccgcgacccggcgcatcaatggctgcgtcagttcattgtgaattcactggaggaacagacatgctga

SEQ ID NO: 266696 - DNA, 129 bp, Klebsiella pneumoniae
atgcggaagctgccggcatggatgacgacgccgcagacggtgagcggtgagtggctacagcaggcggggctggcgctgcccatcctcgacccggaaagcgccattctgattggcctgcaacgcgtgtga

SEQ ID NO: 266697 - DNA, 477 bp, Klebsiella pneumoniae; identical to SEQ ID NO: 243797

SEQ ID NO: 266698 - DNA, 423 bp, Klebsiella pneumoniae
atgaataacgaaaacggattaacaccaagccagttggcagaacgtaacgcaattctggtaactgaaattgagaaatgccgcgagctttctggctgcccggctgacgtagacctgcaggactgggtaaagatgctggtatcagagttaagcgttgtagaagaaattcacaacagcgctgtattcatcactgatgaactctatgacgcaagttctaaggaggtgcaaggcatcattcgctctttggcctgcatgaaaatgccagcttacgctagtctcgtagccgggattaaggctgatggggtggaggagtttgcagcgcatcttcgcgctaattataacgggtcatcagtttgcaaaattattgcgctcggagccgatgatttcgccaagcagctgcgcgagggggacggcaaatgcgtatga

SEQ ID NO: 266699 - DNA, 303 bp, Klebsiella pneumoniae
atgcgtatgaaagtttatattgctggccctatgacaggctacaaggatttcaaccgaccagcattcaatgcgtttgccctgaagctaagcctggatggatatgtagtgctaaatccagccatcctccctggtggacttgaacagcgtgagtatatggatatctgctgcgcaatgattcgctgtgccgatgcggtttttatgttgcggggatgggagggctcagaaggcgccgttgctgaacacgcactggctaaaaagatggggctgaaaatcatcacagagcagcaggagcgtgcagcatga

SEQ ID NO: 266700 - DNA, 879 bp, Klebsiella pneumoniae
atgttgaggacgcaatacgcggccgcgatcggctgcgcgcgcgggaacgcgcttgatgaaatcatgcgggaggtctggacgcgatacggcgcgggccagctcaccgacgacgaggccggggagcttacgacgctcgcccatgggcgccgggccgccttgcgcggatcgggacaggaaacctttagcctggtcctacctcccccggccgcgcgttgcccgacgccagttcgccggcgcagccatttccgggggcggtcggagggccgcatatggcggccgacgacgcgcaaggacgtgcaggcgatcttgaaagcggctgaaatctacaacgaggccggtttgcgtgagaagggcgagcgcagcggcccgcttggatcagtggcgctcgacgtgctgcggctgttcgtcaatctcatcgacttccgcaccggccggcttgagccgtcaatcagcacgatcatggaccgcttgggccgctcgcgggatacgatcgtgcgggcgctgaagaacctgcgggcgcatggtttcattgactggctacggcgctacgaacctaccgggaacgaggggcgcggcccacaggtccagcaggccagcaacgcctatcgcctgtccctgccggaaaaggcccagcagttccttggccggttcggcaaggccccgcccccgcctgccgatcatggacaggatcaacaggcttggagcgaggcaatcgacgcctacaagaacaccctactcctcgatgagcgaacgcagctcgacgccggcgacaacgcgctcggaaaggctctcgtgatgttggcaaagggtgtgatgaaacgtgagtccgataagcagactgaatccccatctgatctttatctaagaggcggaacataa

SEQ ID NO: 266701 - DNA, 270 bp, Klebsiella pneumoniae
atgaccgctagcaccaccatgacgattcgggttcggcccgatgtgaaagaaaagctcgaccggatcgcgaccgacacgcagcgaagcaaatccttcctcgccggcgaggccgtcgccgcttatgtcgatcgcgagcttgaaatcatcgacggtatcaagcggggcatggccgatgcggcggctggccgagtgattccccacgcgcaggccatcgcggaaatgcgtgaggttatcgaggaagcgaagcgccggaaagctgcgcgcggatga

SEQ ID NO: 266702 - DNA, 306 bp, Klebsiella pneumoniae
atgaggccggttttctggtcgattgaggcgcagcgggataacctcgaaatcctgcgttatatcgcagaggacaacccattcgccgccgaacgggtcgtggacgcgatcgaggaagccgggaacaagctcggcgaatttgcgaccggacggcctgggcgggtgagcggaacctatgaaaagtccctcgcccggcatccctacatcatcgcctatgagctgcgggacgtggcgggccgggaaagcgtcgtgatcgtgcgcgtcatccacacgtcgcaggactggccggccgaggaatggccgcactag

SEQ ID NO: 266703 - DNA, 624 bp, Klebsiella pneumoniae
atgaacgtcattgcgtttttgagccagaagggcggcagcggaaaaaccacgctttcggttcataccgccgtggcggccgaggcgacaggcgaacgggtttgcgtcattgatgcggacccacaggaaagcgcgaccgcatgggcaagcgcgcgggaagctggaacgccgatcgtcgccacggcgcaggccggggaactggacgcggcgcttagggcggccgagggcgagggtatgaccttggccgtagtggacgccccgccccatgccgccccggcggcaggccagatagcccgtaggtcggagctggtcttgattccggttcgaccgtccgcgtttgacctcgctgcggtcccggccgccgtcgagatcgtgacggcggcgaaggtgcgcggcgcgttcgtcctgtcagcctgcccgttccgcgcgcccgagatcggagagacgcgcgcggcgcttgaagcctacggcctgccgatcgttcccggcgagattaccgaccggcgcacgttcgcccgcgctgtcacgaccggcagtgccgtgacagagttcgaggccgaagggaaagcggcggaggaaatccgggctttgtgggcgtggatcaaggacacgttagagcgtaaatag

SEQ ID NO: 266704 - DNA, 297 bp, Klebsiella pneumoniae
atggcaaagaaagcaaccggccttgcggccttcacccgcccgaaagccggcgcggcagccaccagccttgcagcgatcgaggacgaccgcccggccgtggaaatcccgacgccgaggcgaaagaggggagggggcgagactgtcgcacttacggtcaaggttcggcgatcggactggcagcgccttcgccagctcgcggatgcagagggaacgacaattcaggcgatggccgaggccgggctgacggcggtgctggcacagcacggattgccgccgatcgaaccttatgcacgttga

SEQ ID NO: 266705 - DNA, 2976 bp, Klebsiella pneumoniae
atggcgcggcggaagtttctcaaaattcaggatcaacaggagctgttcggcgtaccgaccgatgaggatagtctgatccgtcactacactctatctccatcggaccggctggagatcgaagtccgcaggcgaaaacataaccagctcggctttgctgtccagctttgcatgatgcggcatccgggccgggctctcatggtgcacgaaattccgccgagggcgatgctcaattatatagccgaacaattggatgctgatccggagagtttccgttcctatgccaggcgggaggaaactcgccgcgagcatatcgcgcatttgctttcctattttggaaaacgaacagcaacagcacaggaccggcgcgccgccttactatccgccgtcgaaacggcgaccgcaacggacaagggccattctattgcccaagctattgtcaccacgctgcgggagcggaaggtgttacttcccgcacctgacacaatagagcggatcggctttgccggccgcgtaatagcccgccgtcgcgccgaggctgccctgatatcgggcctttcagccgaaaagctccaatccctcgatgatcttttgacggttgatcccgagatacgacagacgcgattccattggctgcgatctgcgccagatgctccgggagcaaccaacctggtcacgctgaccgacaggatcgctttcatccgcgcgctcgatatcgatccccgactacaagcccgcatccactccggtcgctgggagcagatggtccgggagggcgatgtgacaccggcatggctttccgccgacttcaacgccagtcggcggcgcgcgacgatcatcgcgcagatcatcaagcttgggcaaaagctcaccgacgccgcagtcaccatgttcatcaagctgatcggcaggctgttttcgcaggcgaataaccgcaagaagcagcgccatgtgaacacccggatggagacggctaaggcactacggctgtttctcgacacgatatcggctcttcagtgcgccaatgacaatgatgaagatgcaattgaaacgctcgaccgccacgtcggctggcatcgcttggtgcaggcaaagccgacgcttgcggcgatggtggaagacaatgacgcctcacccttgcttattgcagctgagcaatatgccaatgttcgcaattatgcaggccggttcctcctgaccttcacattccattcaagtcgtcggtatgatcctttgctggcagcgatcgaaacactcagatccctttacgcggaaggaaggcgcgtgcttcccgaacgtgtcccgatcgctcatctcggcgcggcggagcgtaaactgatcttcgggcaggcaaaggccgatcgccgtctctatgagattgcaacactggcagcgttgcgcgagcggcttcgttcggccgacatctgggtcgaaggcagcagggcgttccggccgataaatgaaaatttcatgccccgccctacttttaccaagctgaaggaaactgaccagcttgggctcggtgtgcagcgcgacggggtggcttggctcaccgaaatgcaacaattgctggacttcaatctgaaacgtctcgcccatcgcgcccgcaacggcaaacttgaaggcgtccgtctcgatgccggaaccctgattgtaacaccgctggcgagcgaagtgcccgctgcagccgatgaactaaatatcgaactcagcgaaatgtatccgcttgtcgaagtgccggatctcttaagagacgtgcatgagtggaccggctttgccgaccagttcacccatgttcgaacgggcgattcaccgcaaaacattccggccatgctcgccggcacgctcgcggacgccaccaatcttggcccgaaacgtatggccggagcctccaaggggatcagcgcccatcagatcggatggatgcgcatgttccatgcccgcacggaaacctatcgcgcagcgcaggcatgtgtgaccgacgcccatgcgcgtcatccccacgcccagctctggggaacagggacgaccgcatcatctgatggtcagttcttccgggccagtgatcgtgccgccaaacgcggtgatatcaacctgcattatggcagcgagccaggctcgaaattttacagccacctttccgatcagtacggctatttcagcattctgccgatcagcccgaccgagagcgaggcagcctatgttctcgacggcctgttcgaccacgacaccatcctggagatcgaggagcactttaccgataccggaggtgcgagcgatcatgtatttgccctcttcactctgatcggaaagcgttttgcgcctcggctgcgcaatctcaaggaccggaagttccatactttcgaaaaggccgactcatatccagcactggccaaccatatcggcgcgccgatcaataccgccctcattctggaacactgggatgaccttctccatctggcggcatcaatcacgacacgctctgttgcgccctcaatgatcctcaaaaagctggcggcatcctcgaaaccgagccagttggcgaaagccctgcgtgagctcgggcgcatcgagcgatccctgtttatgatcgaatggtattccaacccggcacttcgccggcgatgtcaagccggtcttaacaaaggagaatccgcccacaagctcaagcgggccgttttcttccatgagcgcggcgaaatccgcgaccgatcgttcgaaagtcaggcattccgtgcctcgggcctcaaccttgtcgtcagcgccatcgtccactggaataccgtttatctcagccgtgccgtagcccatctgcgtcaaagtggtcgaactatccccgacatattgctcaagcatgtctcgccactcagctgggagcacataaatctcaccggcatctattcctgggacaccgagcagcagatgcccgaaggcttcaggccattgcgacttcctggaagaatcctccgcgctgcatga

SEQ ID NO: 266706 - DNA, 483 bp, Klebsiella pneumoniae
atgccacgcacctttgcctatgtccgtgtctccacgaccggacagaccaccgaaaaccagattcaggaaatcgaagcggccggcttccacgtcgagccacgccgtatagtcaccgagaccatctcgggcagcgtcgccattgcgcagcgccggggtttctcgcgactgatggataaactcgaagccggggacgtgctcatcgtcaccaagctcgatcggctcggccgagatgcgatcgatgtcagtacgacggtcaggaaactggaggagctgggcgtgcgggtccattgtctggccctcggcggcgtcgatctggcgagttccgccgggaagatgacgatgagcgtcatcaatgccgtcgctcagttcgagcgtgatctgctgatcgaacgcacgcagtcgggcctcaaacgagccaagtcggaaggcaagaccctcggccgtcccgctcggctcggcactgttgcaaatagtcggtggtga

SEQ ID NO: 266707 - DNA, 216 bp, Klebsiella pneumoniae
atgaaagatgttttagacactttgcgccaagtgcgtgaaaagagcaaacacactgtagacaatagctctttgaaaaaactggatgatgcgattctgacccttgaaaagagaatcgaggagaattctagaggtcacacagccttagattatctttcttatatcgctaagatctttgctttaattaaacttctgagcggtgattctgattttcattga

SEQ ID NO: 266708 - DNA, 357 bp, Klebsiella pneumoniae
atggaaatcattgaaccacgccgtctatatcagcagcttgccgctgagctgaagacgcgcatcgaacaaggtgtctaccttgtaggggataagctgcccgccgagcgcttcatcgccgatgaaaaaaacgtcagccgcaccgtggttcgtgaagccattatcatgctggaagtggaagggtatgtcgaagtccgcaaagggtcgggtatccacgttatctccaaccatccgaaataccagcaggtggccgatgaaagccttgagttcgccaactatggcccctttgaactgctgcaggcgcggcagctaaggaaggtgcgaataagcaggtcatttcttcccaagctgactcgctga

SEQ ID NO: 266709 - DNA, 228 bp, Klebsiella pneumoniae; identical to SEQ ID NO: 105755

SEQ ID NO: 266710 - DNA, 219 bp, Klebsiella pneumoniae; identical to SEQ ID NO: 36185

SEQ ID NO: 266711 - DNA, 693 bp, Klebsiella pneumoniae; identical to SEQ ID NO: 36184

SEQ ID NO: 266712 - DNA, 480 bp, Klebsiella pneumoniae
atgaatcactgtccggatagatttgccttcatgcataagctcgaaggcgtcattgatttcatccagtgtcatcgtatgggttacaaatggctcaaggtcaatatcccccttcatggcatcctcgaccataccggggagctgagtgcggccttttactccgccaaacgcggaacctttccatacgcgcccggtgaccagctggaaaggacgggtggaaatctcctgtccggcccctgcgacaccaatgacaacggactgcccccacccacggtgagcactttccagcgctgcacgcatgacgttaacgttaccgatacattcaaaggtatggtcaataccccacttgttgatatccagcagaacatctttaatcggtttgtcataatcattcgggttaatgcagtcagtggccccgaactgacgggccaggtcaaattttgtcggattagtatcgatagcgaggcactgttgcaaagttag

SEQ ID NO: 266713 - DNA, 762 bp, Klebsiella pneumoniae
atggatatgcaggacgataaaaaattaaagaaattagtaaaaggattggctgataccacatgttctgtattgctaattcctgatatcttcacatttaacatccttcaatcacgtactgaagaagttaatggtgtccctgttgtaccgttattcgacactcccctaaacggcataaacagtgttttgaaaagactggaagatattgtcctttctttgataattttgatattaatatcccctgtattgatagtcattgcatgcatagtaaaatattcctccaaaggacctattttattccgacaaacgcggtatgggatggacggaaaatctatacaagtatggaaattcaggactatggttgtacaagagaacggcaatgttgttacgcaggcggtacgtggagatgtgcgtgttactaatgttgggcggtttttaagaagaacatcacttgatgagttaccgcagttttttaatgttttatttggtagcatgtctattgttgggccgagaccccacgcggtggctcataatgagcaatatagaacattaattgaagggtatatgcttaggcataaagttaaaccaggaattacaggcttagcacaaattaaaggatggaggggggaaactgatacacttgaaaaaatgcaaaaacgagtggagtatgatcttgaatacattcgtgagtggagtttatggttggatttaaaaattatatttttgacggtgtttaaagggttcgtcaataaatcagcatattaa

SEQ ID NO: 266714 - DNA, 210 bp, Klebsiella pneumoniae; identical to SEQ ID NO: 36182

SEQ ID NO: 266715 - DNA, 723 bp, Klebsiella pneumoniae
gtggagcagcgtggggcggtaagcattaacgagctgacggagatcctcggcgtgtcccatatgaccatccgtcgggacgtcagtaaactggaggagcaggggctgctggtcagcgtctcgggcggcgtacgcgccgtcagccggctggccgcggaacccagtcatctggtgaaaagcacgctgcagagtgaggagaaacaggcgatcggcgcgctggcggcgagtcatatcgctaaaaacagttgcatctatctggatgccgggactaccaccctggcgctggcgcgggcgatcctcgaccggaacgatctccaggtggtcaccaatgattttgagataacccagctgctgatcgatgccagccagtgcggcgtgatccacaccggcggcactctgtgccgggagaaccgctcctgcgtgggcgaatcggcggcgcgtacgttacgccacctggctatcgatacggcctttatctccgccagcggctgggacagtcgcgggatattcacccctgatgagaacaaggttaccgtcaaggagaccgtcagccaggtcagcgcgagaagcatcctgctgtgcgacagttcgaaatacaatcaggtggccacgtttatggcgttacctttgacccggttcaccaccatcattaccgaccggcatctttccgatgccgccgccagtcatatcgcccggcacgcctgcgaggtgctgcgggccggataa

SEQ ID NO: 266716 - DNA, 432 bp, Klebsiella pneumoniae
atgatgatctcatatcaggaacttgttcgcaccttccctaaagccttttattccgcgggagacaaattatttcaacccggagatgacgccgtcgcttcgatgcagacgtattcagtggctcagttcctgcagccgtttactctcaacccggcgaaggccagcagcgattatctgggtaaatgggtcaaggtacgcggggtgattgtcgacattcgtcggaagagcggtatcgccggcagctactattttatcgtgaccatgcgagatgaacagaataaaacggataaacgtcttacctttaattttggctcgcataacagcgcagacgtagaggctttaagcaacggcagcgtcgccacgatcgtcggccaggttcatcaggtgcaagattccacgatcccgacgctacagaatcctaaggtggttaaataa

SEQ ID NO: 266717 - DNA, 1392 bp, Klebsiella pneumoniae
atgagtgaggggaaattgccggaagggtgggctaccgctccagtgtcgacagtcacaaccctaatccgaggggtcacatataaaaaagaacaggcactcaattatctacaagatgattatttgcctcttatacgtgcaaacaatattcaaaatggcaagtttgatactacagacttagtttttgtgcctaaaaatcttgttaaagaaagtcaaaaaatatctcctgaagatattgttattgcgatgtcttcagggagtaaatctgtagtcggaaaatccgcacatcagcgcctaccatttgaatgtagtttcggcgcattttgcggggcattgcgtcccgagaaacacatatccccgagttttattgctcatttcacaaaatcttccttttatcggaacaaaatttcatcgctttctgctggcgcaaatattaataatattaagccagcaagctttgatttaataaatctaccaatcccgtcacttgcagagcaaagaatcatcgccgaaaaactcgatacgctgctggcgcaggtagatagcaccaaagcacgtcttaagcaaatcccgcaaatcctgaaacgttttcgcaaggcagtgttaactgctgcagtgaatggaacactgacaacggctcttaggaacagtcatagcctcattggctggcatagtacaaatctgggggccttaattgtcgattcctgcaatgggctggctaaaagacaaggattaaatggtaatgaaattactattttgagattggccgattttaaagacgctcagcgtataattggcaatgaaagaaaaataaaattagactctaaggaagaaaataagtattcattagaaaatgatgatattttagttataagagtgaatggaagtgcggacttggctggtcgatttattgaatataagtcaaacggcgatattgaaggattctgcgatcattttatacgtttacgcttagattcaaataaaatcatgtctagatttttaacttatattgcaaatgaaggcgagggtagattttatctacgcaatagtttgtcaacaagtgcaggacaaaatactattaaccaaacatcaataaaaggacttagctttttacttcctccattaaaagaacaagccgaaatcgtccgccgcgtcgaacaactcttcgcctacgccgacaccatcgaaaaacaggtcaacaacgctttaacccgcgtcaacaacctcacccagtcgatcctggcgaaagcgttccgcggcgagcttaccgcccagtggcgtgctgaaaaccctgatctcattagcggtgaaaacagcgccgccgccctactggaaaaaattaaggccgaacgcgccgccagcggcggtaaaaaaaactcgtgtaaaaaagcgtaa

SEQ ID NO: 266718 - DNA, 273 bp, Klebsiella pneumoniae
atgaccaaagagcaacttgatttcatagtcgcaatgattgcaggccagcaaacggcaaccgtacatctatcactgatgtttgctgagcaggctggagtatcaaaggacctggtcgcggagtctttccgccaaaccgctggactgctgggacaagatgtaatgaacagagaaatcattgttacagtgcttaaccagatagccaacggtatcaatacatctacaacagagcaccagaaaaatattgaagagatggtcaagaacgtcctgcattaa

SEQ ID NO: 266719 - DNA, 414 bp, Klebsiella pneumoniae
atgaacgaagattttgaattgcaagaagtattgtcttttaaagtcaaagactcagatttatcatttttgaatggcatagtaaataaagcagactttgggattggaatcacattattcgttaaaggatgcgtaattactggttcactaatctcggggagaaaatactatagtattgtctctgataatttgaagtcttccggtgcagttggagaagccctgtctgcgtactttgagacaaagggtagggacggctatacaagtactgacccggattttgaatatcctaataatttcttgcatttagagaacgtaagaattcgtggcggcagtggggtcattggatctttgagtgacgccatgctaagagtgaaaatagaagaaattgatggccacttcattggaaatattagttaa

SEQ ID NO: 266720 - DNA, 603 bp, Klebsiella pneumoniae
atgacaccgcgtcaacgccgacagtacaacgcaggattacaaaccgtagccgctgccccgcgcaaaagctggttaggccggttcacccctttgagcggtattcaatcgccctggattaaatcactgctaacagtctggggggagggtatgcggggaagtccttcacctcgcaaacccacaggtcattcatgctggcgcggcctcagggcagagcgatggtcggataaagcaatggagcgttttaccgcggcgattgagcaagcccggagtgaaggtttccgtgggcagcaggcattaaatcgggcgcacgctattttatggccacagcctgccaccagcgcgatagattcagctatgcgtgaagatgacgttaaatttatggaaaagtgtgtgctgtctgcatttgagactggtgatccggtttatctcgttggagttaactattacaccacacgtaaaaaaatctctgatattacccgtgagctaaaacaggtggcgccgtggctaacggacagcgaagccagaaagcgaatgcgctggtgcctggaaatattcagggcaaaagtatttctttcggtctggcgtgaaattcatggggattag

SEQ ID NO: 266721 - DNA, 204 bp, Klebsiella pneumoniae
atgaagaagagctggtttctccatgagcaactttcagagtctcaggctctggagctggcagaacgctaccggaaaaagaattatctggtcgagaaaagtctgtcgagcgattttacctcctgggaaattcgtgtgctgttgccggaattcaggaagccaccgcggattaacagaacctacacacaaaaaatgtggagggactga

SEQ ID NO: 266722 - DNA, 393 bp, Klebsiella pneumoniae
atggcgcaaaaatacttactatctgatgcggaacaggctggcgatcatgttgatggcgctggtctttctttattccaaaatctgacaccacgacagcaggaagtttttgatctgctggtggcgtttatcaatcagcatggctacccgccgacctttcaggaactggccgggctaatcggcgttagctcaccaaatgctgttgcattgcaccttcgtgctttacagaaaaagaacttcataaaattatctcgcggtgtttcccgtggaatttctgtcgtcggaagaaaggaaccggtacttgccgtgcagctgctgcaggaaatgatcgctgatgaaccgggggcgcgtgagcgtgcgctggaattcctgcgagtgtacgaggcccggccatga

SEQ ID NO: 266723 - DNA, 258 bp, Klebsiella pneumoniae
gtggctaaaaaacaacaaatgccgaacaccggctatgtagtaatcagatgcgatgacggggtaattgttgcccgtctcacttcttttcccgtatgtgagcgcgctttaatgtaccgtcgcggtgatactgtttcgtttatgtctctgcagcccgatgagatcgtggggactctctcgctgttttcgcagatgattgaaagagcaaaggccggagggggttaccagattcctccgggctctgttacactcccgtcatag

SEQ ID NO: 266724 - DNA, 234 bp, Klebsiella pneumoniae
atgaaagtggaaatcacaattgatcgtcgcaaaaagctaccagagggcgctgtcccggcattagagaaggagctgctgcggaggcttgaccaaaactttaacaactgcagtttgatcattcgccgaaccggtgctgatggtctgagtgtgtttggtgggatggatggggacaaaaagcgggtggagcaaatccttcaggatacctgggaaagtgctgacgactggttctattga

SEQ ID NO: 266725 - DNA, 345 bp, Klebsiella pneumoniae
atgactgatattacccggttgttagccagcctcaagcgccgctcagcccatgcaaaagagttcggccacgacgttctgttcgtaaagctcgaagacctcgacgcgctgggagaggctctggagaaggcgcagcagcgcattggcgaactcgagcgcgaagtggaatcttttcgcccggtcggcgtaatgagtgagaaagcgtatcaccgtctcgaaaacagccaatcacgcttcattgctctgtggccacggcctggtatctatttgccgcgtaaacgccccgatgatggtgtcgttgtttatgcgcaaacggtggtctcatcaatcaacaagaggaagggatga

SEQ ID NO: 266726 - DNA, 300 bp, Klebsiella pneumoniae
atgaccaaaaaaatcaaatccaaatatcgcaatgaaataaccgcctttgaattcctcagggctaatccggatatgacgtccggcgaaatagctagagcaatggggcgtagtggcagctctgtcagtgggcaggttagacaactggcgggtaccggacggattgtccagacgggcactaaaaacggttctccaatgtggagagtaaacgatttgccgtttggttgcggtaacccgatcagaatgaggttcgaacaactgctgcaggcacaacgttcgaaaggtagggagttcgcagcatga

SEQ ID NO: 266727 - DNA, 1053 bp, Klebsiella pneumoniae
atgttgcaacagaaccaaactatgacgcaatcaatgggccgaccaagaaaaaatccaaaagataaccagcttccaaatcgtgtaaccaaaaacaaatatagctatgtctggaaaccaaagggaacaaaaaggagtatcacgctagctccaatagtaggaaccacaatgtctaaattatgggctcgatatgaagaagaaaaagcaaaacaatgcgatattatgacatttgcaaaactctggagtctgttcacttctagcccagcatactgcgcactatcgccacgaactcaaaccgattaccgtcagtacgaaaaaaatcttttgccggtctttgggaaaatgcgcgctgacgatatcaagattgagatggtacgtatttatatggataagcgcggagagcgcagtgtgaaccaggctaaccaggagttaggcggcatgtcgcgggtttatggttggggatacgagcgaggctatgtaaaagggaacccgtgtaaaggagtaagaaaattcacactcaaaccgcgtgaagtttatgtaacagatgaagagtatttagcgatttacgaggaggcagtacctgcactgaaagtaggcatggagatcgcctacctttgtgcgactcgtctttctgacgttttatcgcttcagtggagtcaagttcgtaaagaaggattgtttattcaacagggtaaaactggcaagaagcagttgaaagcgtggactgagcgactgttccatgctcgtgacttagcggttaccctcggaggctcagaatacgtggtatgtagcagtaaaggggaaaaatactcaaagagtgggtttagtgacttgtgggaaaaagcgcgagcagctgcatctgaaaagttaggctataaaattaaatgtactttccatgatctgaaagcaaaaggcatctcagactatgacggttccagtagagataaacagcttttttcaggacataaaactgaaagccaggttttagtttatgacagaaaactttcaatatcccctacattagatttaccaccaatagataagaatcctaattaa

SEQ ID NO: 266728 - DNA, 624 bp, Klebsiella pneumoniae
gtggctgcaaaatctgacgggctacttgcgatagtagcccaaaacacatgggtttttaattttgtaggtatcatattagtttttgtaggctggtttgtggcatacaataatgctgcaaaactagccactcgttctgaaagcaaatcgcttgttgatgccttatctaaattaattaacgaagttaatgatttatccattaactattggcttgattcatctaaacaacaaaaatatgaaaccaagaaagttaatggtataaagattaaacaaaaattaaaacatgacgagtctttatctcaaactttcattatgaatgtgtttactaagatgacacagtctttgaaatacattgaacttcttgataagagaagtattcatattgagagctcatttattacagattttcttattaaagttacacttgattgcgaagttgctcaccgcatgccctcgcaggaaagagctgctagagtgcaggaaatcttgtctctttctagtgaagccatgaatcaggtttatacacaattccaattaaatcatatgccttcaaagccgctaaatattgttggctcaatcaaggccaaatggtcaatagttagcgactggtataaaagcattaattag

SEQ ID NO: 266729 - DNA, 327 bp, Klebsiella pneumoniae
atgattaagatcgtcatagctagggacttttcaaaaacgccttttggtcgatttgtaagcgatagcccctatagtgctgaaaaatttcgcaaagatttcttggtgcctgctttacgtagcggagatcaggaagttgttgtcgattttaacggcattgctttgggggttggttcttcttttcttgaagaggcttttggtggactcgttcgtaaggaggggttaccgaaatcaggccttagaaggcgtttagtgatcaagagcgaagtgccattttacaaggaacagattgagcgttttatcgagaatgctgagccagaaagaaggtaa

SEQ ID NO: 266730 - DNA, 924 bp, Klebsiella pneumoniae
atgaccaagctagtttgtccgaaaagattgtgtgtttattctgacgatgatcggctagccaccctcaattttctcaaaatgattgatctcatcgttataaaaaatgacggtgaattgactatcgacttatcaagtgttgattacgcaagtgccgcagctactgtcttgctttttgctatcgtcagtagggcacaactgcttacaaaatcgccagggaagattcgtttcaagtttcctaaaaaagaagaaaatccaaacggtcatcggtggatcgtcagtacaggtctttcggctgctttggtttcaaatactttagcgaaactcgagaagttaactgatgagaaacgattgtaccaatccggggtggaaccgtttgaccattggctaaaaacggtcatgacgctgcaagaaaaagcacttcttgagcctgatgcatttgcgctcatgagttctgcattgaacgaagccatgctcaatgtgtcttatcatgcgtatgaaagtgaagaattcgacgcccagatagcacaacttgggggaaaacgctggtggcagtgttcttggtatagccgggaaaaaaatgctgttgtctttataatctgtgacttagggttaggcatacatcagtcgtttgctccgtcagcagcgcaaagcttgttaggaagcgagacgaaatcggtcgctagagcgttgtcttctggtcaatctcgacacttaaacgctggacgaggcaatggttcagaggatataaaaagacctataggatcaggctgcgcagagtcggaaagactgctagttttaacaggccatgcaagataccgctataattcaagtgatggaataccgatatgtgagcggttacctgaacacataccaggaaccttaatcgagtggtctttggttccgaggagaggagaagatgattaa

SEQ ID NO: 266731 - DNA, 552 bp, Klebsiella pneumoniae
atgccggggatccttgggcagtttacccgccaccatccgcaggtgcggatagtcgcgagggtggatcgcaatggcccgctgcgccaggcgctggcggaggagacgctggatctggcgctgctgtggcaaaccgaagatcagggtccggggctgggccgctgttcgctggcgtggattgcgcatcctgactttgacgttcgcgcgctgctggcgtccggcgagccgctgccgctggtgatgttcgacagcccgtgcctgatgcgttcccgcgccattgcctgtctcgatgccgctgggatcccctggcaggtggtgttcgtcagccacagcctgagcggcatctgggcggcggtgcaggccggcctggggctgacggttcgcacccgcatcggcatgcccggcaatctgcgccccgccggcggactgctgccatcccctggcagtctggccgtcagtctgcaacaaaccccgcgtcaggaaccccattccgccgcggtcgcgctgctcggcgaactgatgaccgaggccctgcaggggtgggttgaaaggtga

SEQ ID NO: 266732 - DNA, 1395 bp, Klebsiella pneumoniae; identical to SEQ ID NO: 195824

SEQ ID NO: 266733 - DNA, 684 bp, Klebsiella pneumoniae
atgaacatagatgacctcaagggtattagtttatataaatatttcaatcagttgcaattcgccgaggacttctgtaatggccatttaagattgggcactcttcatgggtataaaaaatgtgaggatgatttacggggagataaaggtgagggtgattttacattcaaggaattcacgaaaattgtcaacggttcgccaagtgaagaagaagcacaaatcctgcaaagatttggcattggttattctcacgttgaggatgttcaaatctctatgaaacctacttttatgtccacaagtgatcgctgggttctatgcactgcgacacagcaacttgacaaaaaagagcgagaaatatttggagagtattgtataaatatcaatgctcatgacttactgtctgggcttattgaaggaattcaaaagcactataaattttataaaataaatttcgattatgtcaaatatgccgacagaatagcagagcacacggaggttctaaatatagagccagcattcatcaaaccggcctatccttttggaaaccaacatgagttcagatttacgattttagccggaaacaatttaatacggagaaatggcattgcacacatcgataaagatgaatacgaaccaattttcattgattcagaaataatagccaaatcatgcaataaggcttactaa

SEQ ID NO: 266734 - DNA, 723 bp, Klebsiella pneumoniae
atgggcatgattttacgcaccaacactgacaccttgagcatttcagatcctgatggggtaagcctccctttcgatactaccggcctggcgtattttaatatctatggcaagggaaacctaacggcaaactatgccagcggcggcgcccctgctgccgtggttggctccccaacgctcagtggtgaatggctgcatttgacgggtcagacaaactacctgacaactgctgttgccgatagcactggtttcaccactatcggggtggcaaaatggcccggttcaacggggtcaaacagggcgcctatcgtatctaactacaacgggactatcggtaaaaccctttcgttcctgggaaccacgcaactgcagttttcagccccttacaccaataacagcacatctgtagatggtaacgtttcgcggcagtttaacgtcgcggttaacacgcctttgctggttatgggacgtactggactggtagcgaaccagatgacaacgcgtgatattaccggtggtactaatgacgcttacacgccatctggccaaactgcgaagaatggcacccagccgttctatatcggcggcgcgcctacctctataggcaatatcgcactggaccttggtgccctgtttatttttaaccgtgccctgtctgataacgatgtgctgtcggtatcctcttacctgcgcagctactacgcatctaaaggaatcactatttag

SEQ ID NO: 266735 - DNA, 447 bp, Klebsiella pneumoniae
atgcttacttgttttgatgtcgccgactacttcttgtcgcgctgtgacgaggagagcggagacactatttccaatctgaagctgcaaaagcttgtgtattatgcacaaggtttttctttggcgctgctaggtgagcctttgtttgaaaataagatagaggcgtggatgcatggcccggtagtgcctgagctctatcggaagtacaaatcctttggcaactcggcgctgccaccgccggactcttttgatgctgataaacttagcgaagaccagcttggtttgctggaagaagtttgggatgtttttggtcagttctccgcatggaaactaagaaacatgacccatgaagagtccccatggaaatcaaactacattgatggcgttggtggttttgagattagcttcgatgacatggctgagtacttcgccacgcgggtcaatcaataa

SEQ ID NO: 266736 - DNA, 228 bp, Klebsiella pneumoniae
atgttgtatgattgtgtcgcttgtaacacttctacacacatatatagcatgctaaacccaaagttcgtaatgttctcattgcggttggctgcattcttctcagtgcttggccttgtcgctcaggtttttggtgttatcaaagtcgacatgatgctgatagttgttgagttcctgatgttaggggtttggatgcagtacgaacgcgagaaaagcaataataaaaaataa

SEQ ID NO: 266737 - DNA, 1272 bp, Klebsiella pneumoniae
atgaaaagtattgaagagaaaatatcagatttagagtttagtaaaacaagaacgtatttccaagaggtttacagtagttacaataatggaaactatcgatctgctgttgtaatgctttggtcggtaatggtttgtgatgcaatttacaaactagaaaaattagatgtcgtttatggcgacaaatctgcaaagcgtatactgagtcaaataagcaaaatgcaagatcaggatccattgtcgccttcatgggagataaagcttttcgagatgttatttgaagagaagtcaatgataggtactcctgaaattgtaaatataagagaattgcaaaaaaaacgacatctttgtgctcatccaataatgtcagaagaaagggttttatatgagccaaataaagagactgtgaagagccttatgctgaatgcgctcaatgattttctgttatataaagcatattatgataaaggtgtatttgatgttttggtctcaattcttgaaagcgagagcgcgtactatacttcaagaaaaaacgttgagaaattgatttcttcttatcagccccgcatggcaccccatgtaatataccaagttttcaagagtttttgggcaatatcattcagatcggaaaacgataaatgtaatgagaatagacaacaaaattcaatggcagctgtagcattggcaaaatatttattaaaagaccctaagcagctcgaatcaataagggacgatgttgattatttttctaggatttcaactaatattgaagttgttaaatatttatttgttaacctatgtcaaattcctaaaatgttccaattgctttctgagccaaccagggagcgtctcatggaatttaggaatcaagaagaaaaagaaaatgcatcggaatcacaaatagcatgctacattgcttcaatgtttacatttggtgacatggctgaatacattgattttatcaaagctaaaattgctgactcaaccatttctaaactggataaaaatattatggatttcatatcgtcttattatgaaggttatgaaaataataccggttgcatggatttattagtggagtacgtactcaattcgtggtcctatgatatggctgattccagatttgattttttatttaagtattatatcgaaaacttaaatgcagaacaaattgataaaatattatctggctatgaaaagaattcccaaataaaagatagaagaagagccgcggaagatagaagaacattacaagcccaaagagataaactttga

SEQ ID NO: 266738 - DNA, 339 bp, Klebsiella pneumoniae
atgatcataacaatccgtgaacaggtgctggcagccctgcgcaacaacccgggcctcaattctgcgcttctggcctccctggttggcatgaccagcaaaaagatatcgggagcgattagctctttgctggctgatgggctgattgcctgtgaggggcgctacggccaacgcatttaccgattgaccagctacggcatgcgctacgcggccgacaccgtgcccgccagaaagattggcacgacgcaactggtgcagcgcaccgagagaaacgtgatctgccaggagtgccgcaacagcgcggctatgaagcgagtactgatggcttgggggaggaaatga

SEQ ID NO: 266739 - DNA, 855 bp, Klebsiella pneumoniae
atggaattgctcgaaaaaatcgacgctatcgaaaaaatgctggaggttctcggcagggctccagagcagcttcctaactgcgagaccgtctgcgaaacggtgctgtgcgagaaccatggcgagtacgaacagcgcaagcgcgtgcttaccagcagcctgatcaaactaccgtcaccgccgactcgctgcccgggctgcctgcgcgatgagttgaccttcctgtatgacgagaaaaagcgttgggaagaccgcacgcgccagcagagcatcgatcgcctgttgcgccagctcgaaatccccgagcgctttgtgacgtgcacgctggaaaactaccagtcggttggtaaagagtcagagcgcgcgcttcgtgtttgccaggcttatgctgcgaagtggcccgagcgcctgaagcagggtggcgggctggtgatgtgcggaaagccgggaaccggtaaaaaccacctcgccctggcgattgcccgctatgtcatcgagaaccatcagagtccggtaattttcaccaccgcgctgaagattgcccgtgagttcaaatcaacgtggtcgaaaactgcgacgcgctgcgagaacgacgtgatttcgcacttcacaactccggacctgttgatcatcgatgaggtcggcgtccagttcggcagcgaagccgagaagttgatcatgttcgaaatcatcaacacccggtatgagcggatgaagccgaccatcctgatcagcaaccagaccaaagaagaactggcggcgttcgtgagtgagcgcgttattgaccgcatgagcgacggcgggggatgcacgctgtcattcacctgggattcttaccgttccaaggggacagtgtga

SEQ ID NO: 266740 - DNA, 852 bp, Klebsiella pneumoniae
atgtcaaataccgcagaaattctcaactttcccgatgtagtttcgggaatacaggagcaacgcgtggccgatacagacgatggatacacccgtctggcaaacgagttgtatgaggagcttatcggcgcgaacctgactaaaaatcaggccaaggtagctcatgctgtttgccgcaaaacctatgggttcaacaagaagatggaccgcatagcagactcacaactttctgagctgaccaggcttcctcgccagaaggttaataccgccaaaaacgagctcattgcgatgaatgttttggtgtccgacggcatgctgatcgggcccaacaaaaacctgagtgagtgggtaattccaggcactaagcctgcgccaaaatgtcaccatagtagtgacagtgtccctacggtggtgacaaaaagtgtcaccaaaacagtgacagacatgtcaccaaaatggggacacacaaaagacactattacaaaagacaaaaaagacattattaataaaccccctaaatcccccaaaccggcttcgttcgatccggctggtgttgaccttcctgaatggctgtcagtttcagtctggaggtcatgggtagattatcgtcgtgacctgaagaaaccgatcaagtctcagcagacggttactcaggccatcaacctgcttgaacgttgcaagtgcagcggataccagcctgaagaaattatcaaccagagcattgctaacggctggcagggtttgtttgagcctaagggtgccaagcagccttcccgtgctccttctcgcgtatctgagaacttcgctggcaaagactacggccagactgaaatcccatcatgggcgagggactga

SEQ ID NO: 266741 - DNA, 543 bp, Klebsiella pneumoniae
atgcaatcacttgcgtatcaacacaataccggaatacacccgggagcgatgataaaccgcgctcaatctaaggcggcgccggaccacgacaagatccgcgatgcggtacgtgcatggtcgtcggcgctggacaatcaggacgtggtgtcagcgctgatcatcaacgaataccgggagcagggcgggaccgccatcagcttcccggaagacatcagcagggcgcgccagaaactttttcgctttctggataaccgtttcgactctgagcagtaccgcgagaacgtgcgccagctgacgcccgcaatcatggccgtgctgccgctggaatttcgtaaccgtctggcgccgaagaacgacacgatgttgctgatcgcctctgcgatgaaagagtgtgccgaggctaagcaggcagtgctgctggacgcaccagagcatcagaagctgaaagaggtaagcgagggtatagcgtcgctgttccgcctcatgccggagcaggtagggccgctgatgacgatggtcacgtcgatgctgggggttatgtga

SEQ ID NO: 266742 - DNA, 222 bp, Klebsiella pneumoniae
atggaaacaatttctcaacgcctcaagcaaaaacgtgaagagatgaatctgtctcaggaccagctggcaagactggcaggtatgaaacagcaatcacttcaggccatcgaggccgggactactaagcgtccgcgttatttggttgagctggctcgggctctcaaatgtgaacctgaatggcttctttttggcgatgagccgaataaaacaacagccgcttaa

SEQ ID NO: 266743 - DNA, 633 bp, Klebsiella pneumoniae
atgagccttgcggatcgcgttaaacaaaaaagaattgagctggggttaacccagacggaggctgcagagaaggccggtattcggcagcagtcatggcagagcattgaagatgggaaaactctcaagccacgtaatataattggaattgccaaggcgcttaaatgcgatgctgattggctaatgaacggcggcgcatttatgccgatggcagagatcaacagcaggagagttccgttgataagctatgtacaggcaggagcactggctgagaaaaaccctatcgaggccttcgatggcagccttgaatacatactcactgatctggatgtgtcccagcacacttttgcgttgcgcatagaaggcgactcaatggagccagatttcaaggcaggtgacgttattatcgtcgaccctgaggttgagccaacgcctggggaatttgttgttgcgaagaacggcggaacacaggcaaccttcaagaaataccgcccgacctgggtagaccatctcggctgccagcactttgaactggtcccactcaatgacgactaccctgtcattaacagcgatcaccagcctttaaccattatcggtgtaatgattgagcaccgcatttaccgccgtaaacgctaa

SEQ ID NO: 266744 - DNA, 249 bp, Klebsiella pneumoniae; identical to SEQ ID NO: 200700

SEQ ID NO: 266745 - DNA, 2697 bp, Klebsiella pneumoniae
atgccaacagtgccaactgtacaaggccgccaggttgaaagccgcggcgtgcagaccggaggttttcaggccgtcgctcagccaaatatcagcgatgcgctgggcgccgctggcacccaggcgcttgacgtattcggccaggataaacagcaagcgtaccttgcactaacccaagatgcgactcaaaggctttatgctgttgggagcggattgatggatgaccccaaggaaggtctgatgactctccaggggaaaaatgccattggtcaggctcctggatatatccagaaatttgataacgagatacaaactattgctgtcacgctgcctgagtccgcacgaaatgtgttcttaaagcatgctcaacagcagcgaatgcaatttgccactcaagcagagcggcacgaattagcacaacgtaggcagtatgagtccggtcagcaagacggttatttatccttgcaagctcagcaagctatatcaaatccacagttgttcaaccaatcagctttgaatgccagagcctcaattatggcttatggtcaagcgcatggacaaagtcccgaagagatcgaatcaaactgggttcaatggcgtgagcaagcaggaaagcaggcaactgacgctatctatactgctctgtaccagagaaaaatggggccggatggcagaattgaagtcactaatactgcatcagaaggccaattattttctgcgatgatctggcatgaaagtggcggaaatcagttcagcaaagacggcgcaccgctggtatctccgaagggggccgttggcgtggcgcaggtcatggaagataccggaccggaggctgctcggcttgctggcgttgagtgggatcgtgataaatggctgaacgacccacgctataacgcgaagcttggccaggcctacttcggcgcacagatgaagaagtatgacaataacccggttctggcggtagcggcgtataacgctggacctggtgcagtagatggatggatcaaaaagtttggcgatccgcgcactggtgctatcagtaatgagcatttcgttgctgcgatcccttacgatgaaacccgaaactatgtggcgaaagtcacaggcagtgctgtaggcattccgcaggatgcaacaatggagagtttaatgtctcttccatcatggaatgccatgaatccttcaaataaatcagcaatgttaagtaagtgggcaggtctctatgatatgcaggccgcggctggtcgtgtttcattgcagagtcgcatgcaggatgacatggcgaagctggaggccgggcagtcggtaaatccgatctccgagcgggaatggctggcggtgatgcctttgcaggccagcccggcggaacgcattcagatgcgcgagtcattccagaagtatcagcagacgatgcagttgcagcctgtctaccagactattgtcaacggaacagcgcagcagggtattacagcggtccagtcgatggtgccaaaggaaggggaccctgatttcaaatttaagcaggcgctttacgccactgcccaggccaaacttaacgcagtgcagactgcgcgtgaaaaagacccgggaacgtggctgcaactgaactcccccgtggttaaaaatgcttttgagcagtaccagaacaatcaggcatccggtgaatatctggcttcacgcattcaggcagaaaaagaccggcttgggatccgaagcaaaagtgtattacctgcgagcatagttgacgggatatcggcaaaagttgatagcggcgatatgaacttttctgacctgaaagggattatctctggctttggccgttacggtgacactgttgtcgcgcagttgcagccaaaaacaaaagcagcagtaagggttgctacagcgataaacgaccctaacgctgctgacacgatgtttaccatccgcaatgtgaagactgaagagctgaagaagaacgctggagaacaagccaaaggtgtagacgcggcctggaactctctaatttccgcagcatcgccgacatttagcctacagcgacaaggtggagcggaaacgcttgctgatatcaatgagcaaggtaagcgcctggcttattactacatggcatcgggggaagatgctcaggcagcaacagaaaaagcctataaaaaaatgatcggcgatcattatacggtcactgagacatggcgaatgcctaacagcctgggactgaaagagaataatgttaccgacggtctgagtaatatcgtcaatagcctcaaggtagatgatattggcagtcggagtatgttttatattccatcaatgacgccagagcagaatgccgcgaataatcttgcgcagatacagaatagcgctgaatgggtgacagacgaaaatgaacaaggtgtttatctgacagttaacggcactcctattctggatcagcatggcgctcctatccatgtgagctttgctgatgccagcaagtctggaattgcaaaaccaagtacaaccggcgccgttcttaactggatgggcgaaaaacgaaaggttactccaccctctgagttctatacaccaaatgttaatgccactatgtccgatgccttcagggtgatccagggtcaggatgggatgaacctacagccccaaaaagagccggacacctcgaggaatgtattgcgcgatgctcttaatacacgaggaggccaataa

SEQ ID NO: 266746 - DNA, 267 bp, Klebsiella pneumoniae
atgaaagagttaacactgaacgaaatggactacatctccggcggctttaacctgttcggcgcggccagcggcttcgccagcttcgtcgccaactcgggcatcggtttcacctcatttgtcctcacctctggcaacgcattcgcctcgttcgtctgcgacagcacaatggcgtttggttccttcctgaccggtcagtcaaattgggaaacctttgtcgataacgccgccagcgactggagcagtttcctgaacaaagcatcagcctaa

SEQ ID NO: 266747 - DNA, 2823 bp, Klebsiella pneumoniae
atgaccgaagatgaacttatcgaactctcctctcaacctgaatcgccagtattggagttcaaaagacaatggtattgggatgattccacctcagcagcagagatgcaaataaagtggggagagtttctaaaagatttaatcgcaatatcaaatagttatatcggtcatagtggcctcaaacgtcatatgataataggtttggatgagtcggataaagcattccatcatgttgatatttctaatattaagcagcttaaaaatctggctactttcaaatccagcataatggaaaagactgagcgcttattgaaactcaatgttttggattttaaaattaatattattgatgttgattcaaaacaaatattagtttttgaagttaacgcgccaaaacatttaattgaactgaaatcatcattacaaacaaaaaccagagcatttgatgaaggtgctgttctcatacgaaaaggacaaagtaatgatgaagtcagaatggctacctttgaagaaatgtcgctgttaaaaactgagttcaaagatgccgtcaataataacgtgcccgcttattcgactcctgttgtcaagaaagataggagtattgggaatacaattgagttatttataagcaagaattcaaattattctttagatatagatagtttaaagacacacaaggactgggagcaaaatataatatttgagcactatcagttgaatgatatctttaataatacgattagatttatttacattcatgaagatgcgagccaggcaaaaacctatagatttttgagacagcataatatcatcacaaatgataacattaagaacataatgatattaactgaaaggccgacaaatatcagcgctagcaaacgaaaagaaaatttaatcgggacttttaagaccgatagaatactttttatagatgagtttggttatcaatatctttataaaaactgccttgaagaatttaacaaatttagcctccctatatatattgaaagtctagttgataacggcgaaggagaggttgaatctgctcattctgtattaaaaacatggtataaaagagggaatgacccactctttgtagtaaaaggccatgggggaattggcaagacaacattagcgaaacaatttttagattatgttcatactgaaaatccagagtctggaattctttttatagattctaacgatattataaatgagttatcgcggttgagtgatagctcagggaaaattgacgatgtatttgatttttatcttgcgcagtatggatattatgaatcaagccaagataagttttcgaaagatttgttaaaattatcattagataatggcagcctaattattgttctagatggtctggatgaagttattgcccgactgggcgaaaagtttaaagttagttcctttattgaatctatttacgactctaaactttcgagtatagagcgtagtaagattttgataacatgccgtgagcatttttgggacagttcgagtgaaaatgaaaggaaaatacctgaaataactttgaagccttttagtaaagaactagctattgatttcttttctcaagcgttaaataaagataaaggcaaagtagataaggccatggagttggcgggtaaaatagcaattcaacaaaataatgataattctcaaattgattactatgttccatatgttcttgatttaattgtctatctagtcaagcaggatgctgatgtttctttgaaaggcaaacttgatagcactattttaaatttggattttcagaatgatttcattgttggtagtgtttgtaatcgtgagatcaaaaaactcgaagcgcttgatattgatgcacaaataagactgttgacttatatcgctctttctgaagacagttcgattagtatatacgatataaaagcgatacttaagagtgaaatcggtattagtgcagatgattctttagttgagaagataaaaggccatccattacttactttatcatcaaatggaaaaaagataatctttagatatgatttcttcaatatttacttcaagtcactctacttatctatcttccttaaaaataaaaacatttcaagttttgatgagggggttaaggagcttgtcagtggctatgtgcggtataacaatgactttacgcgagggatatgtgaaaggttatgtattgatgaggatgtaaaactattcttaattgaatgtgtggaaagtatctctactaatgaaatgaccaatgataataaatctctcatttcttcactattcacaattcctttgacatatttggttgtttcgaatgcaacaaatgctaatgtagaagttagaagctcattaatgaaggattttttccaaaaacaaaattctatattgggatttagagtaattaacttattcggttatgaaaaaaacaaaccaaactttgactttagaaatttaacattcattgattgttcttttgataattatgagtatttttgggattgttatattgatgagggaacaaggttttattcatcagaattcaagaatattaatccaagggatggggttaagccaatattttttgatgagacgtttagttctgattgtgatattaacgacataaaaagcacacttgaatttagaaaaattgaagttgataataaaaataaagacattcgagatgaattgatttctttcttcaaaatattccacgaacgtggtaatttttatcctaaaaaacaacaacatgtaaaatctaaattatatgcatcaaaattactccctacgttgcttaaaaatagagtggttgaaccttag

SEQ ID NO: 266748 - DNA, 2022 bp, Klebsiella pneumoniae
atgaagatggaaaaaatggctgaatcgataaatgtctatccgggtaaacatacttctgttagagaagaccattttagtcaccaagagagagatataattaatgtgttgtcgaaagaattttacgttacgaacggtggagggataataacactaacatcaaacagtaagtataaatatatacttttacgcccgaccgatatttacatagaaatgtttaacctcgatagagaggtaatagttctctttagcgactatacaaacttccaatcacgtacactggatgcttttgagcaggcagcgaaacaactctcatctttgagagttgataaaacctgttatattttgataagtaaagatctaaacatagaagagaacattagtgaacttatcaaaaaggagcctgaaacagcaaatatagttcccttcacatatgatgaaacgcaaaaagcaaattccgatggttacttttttagaaacagagttcagaaatatttatataatcgagatcttttttcatttgaagcaccgttgaaaagtgattggcttttcttcggaagaaatgagattatattatctactattaatcgcatgaagggggggaataattctggcattttcgggctgcgaaaaactggaaaaacgtcattaattaatgccatatccagaaatctacaaaaaaatggtgaaattgttacaaccatagactgtcaaagtccatctgttaataaaagaaaatggaacgaggctatctattatgtatgcaagaaaacgaaagacgataactatcttcaatcttatcttccagaagaaattgaatttactgagaagaattctgctgacattttagcgaaattcgtcagagatgttaataatgaaagagggaagaagttatttttgattttcgatgaaattgagaatatttctagaattacatctccaacagaacactggagtaaaggttctgattttctttatttttggcaaacaatgagaacagtttttcagactgtaggtataaatttagcgtatttgattgttggcacaaatccttcatgcatagaaacgcctagaatagatagttctgataatccactgtttaatcatttcacgcctacttatcttccaggttttgacattcgctctacaagagacatgataagaagaatcgggaaaagaatgggggtgaattttgaggaagcaatatatacaaatatcaacgaagaatatggtggtcatccgtttcttattcgtcaagtttgtagcataattgcaagaaggacttttagtcaaaaaaaacctatcagcataggtaagatttcttacagggatgctgtaaaagattttggagaaaatagttttaattacttagaaatgattataggtgtgttaaaagaacactatagtgaggaatatgaacttctcattactctagcaaatgaagataacgaaatttttaaagagaactctagcaaaaaacaaaattcattggcacatcttttgggttacggtattttaggaaaagataacgatagctattactttatcattgattccatgaggcgttatctgttggaaataaacaaatacaggaaagttgaaacaaatatagaacaacggtgggctgaaatatctgaaagacgaaatgcagttgaaaaaaaactaagaacaataataaaaacaactttaaagtcgatgtatggagaacaattagcgaaagatgcagtgcttgacatattgggtaaacaaagaaaacatgaatatatttctaaatctattaatgagatttttgacccaaatttatctacaatttacttcgaagatttaaggaaaataatatccaaagagtgggggtcatttgagaatatatttgaaacctcaaaaaaagaaactttcgagtccctgggctttataaataaatataggtcagatgctcatgctaaagacataacgcctgatgagtttactatattcaggcttagtattgaaaagattgagaatgatatagcgcgatatttttcctaa

SEQ ID NO: 266749 - DNA, 567 bp, Klebsiella pneumoniae; identical to SEQ ID NO: 247093

SEQ ID NO: 266750 - DNA, 603 bp, Klebsiella pneumoniae; identical to SEQ ID NO: 238559

SEQ ID NO: 266751 - DNA, 174 bp, Klebsiella pneumoniae
atgagccatatggagcgtaactcggtgcgagcggcgtatatccataaagcggaacatctggatgagcgcaagttgatgctgcaatggtgggcggactttctggattcgaaccggaagaaaagtatcagcccgtttgattttgcgaaaattaataaccccatgctgaccagatga

SEQ ID NO: 266752 - DNA, 681 bp, Klebsiella pneumoniae
atgctggcacttggggtttaccctgaaatcacactggcggatgccagagcgcgtcgtgacgaagcgcgtaagctgctagcgaatggcgtcgatctgggtgacaaaaagaaaaatgataaggttgaacagagtaaagcacgaacctttaaagaggtagcgatcgagtggcatggcaccaataaaaagtggtctgaagatcacgcccatcgtgtgctaaaaagtctggaagataatctctttgcagcgcttggtgaacgtaatatcactgagttaaaaacgcgcgatttattagcgcccattaaagacgtagagatgtctggacgtcttgaggttgctgctcgtcttcaacagcgcactacggccatcatgcgttatgcagtgcaaagtgggttaattgattataacccggcacaagagatggctggggaggttgcttccagtaatcgacaacatcgcccggcgctggaattaaagcgcatacctgagttactcgagaaaatagacggctataccggcaggccgctaacccgctgggcaacagaacttaccctgcttatctttattcgatccagtgagctgcgttttgctcgctggtcagaaatcgattttgaaacttcaatgtggaccatccctcctgagcgagaacacagtgaacagtgcgctacgggcgataggttatga

SEQ ID NO: 266753 - DNA, 1047 bp, Klebsiella pneumoniae
atggcctttttcgtccagcgtcagctggacttcatccagactacgggagaggttttcttccgcaatatcgccgaactggaagcccggcagcgcagcgacggcgtcgcgcagcgggcgcaggaacagcttgccctgcagctggttgccgctggccggcgcgccgtagagataagcgccgctaacgccaaaggtgacgtcggcatccggcgcgactggcgcggcctgcggcgtcaggttcagggccatgcgttccggcataaagtcttcaacgtggaaatcccattcgcgcggctgattgtcgccggcgctggcgcgaatgtgccacatgccggtagccgcgccgctgtcgagcggataagtaaactggtacaggccattcactggtttgctcatcaccgagcggatcacctggccgtccggctgaaccacctccagtttcaccggctgctccgccagcggcttgccgtcgctatcgcgcaacagcgcattaaggatcaccgtttcgccgggacgatagagatcgcgcgggccaaacataaagaactgtttgctaaagccgggcgcgcctgcgatagagaattccgccagatccaacgccggcagcttgaggtcgagcagcgtggtctgcccctctttgcgcgccagcagcagcgcggcttctttatcggtttgcagggtgacgtggccctggctgtcgcttttcgcttccgccagggtctgccctttggcattgagcaactgcacctcaatgcccgactgggcggcgccgttttccagactctgggtaaaaacgtccagccggttatggtagcgatgcgccgagacgccgatatcgctgagggtaaacagcgtcgccgcgttgctgtagctataacggcccgccgggttcatgaccgccacgtagacgccaggctgctggagcggcttgatatcgctcagcggcagcagcagcttttcgcgagtattacgcgccgggttgagatcgaagcggccggtatagaccagatccgccatcttcagcagttcatcagattcccagttgcttaa

SEQ ID NO: 266754 - DNA, 744 bp, Klebsiella pneumoniae
gtggcgattccaggttttatccaccgggatcgacaggtccatcccctccgccgggacgtcaatttcctgccaccacagcggcccttcgctggattccaccattgcgtagcctttacccgccgccggggcggcgatgtgcagcctgatggtgtcgcccggtttatagctcggtttatccagcttcatggtgacccggtcaggacgcgccgcgccggcgccttcgctgttatcctgccagctgtagcccgcccagaagcgcacgctgctgaccacgtcgtccggtcctttcacctccaggcgataggatccccactccaccgggaagctcactttgccgatctggccggcctgcaggtccagcgactcctcgccctcctgcagatctttttgatcgaactgcgactgccagccttcgctgtcggaccagttccagtagtagtcgcgccgctcgcggatcagccgcacctggagaccggagatcgcttttttctcgcctttgacgtcggcatagacgatatcaaacgcggcgttactgttttcatccaccaccggctgtttgacggtggtatcggtgcggtaatcgtaaacgtccttcagcgtaaattgcgggcggatccccggcagcgcctcggcgggccagatcggctgcttaaccgtacgggtcaccgggcgaccgccggattccagcaggctggcctgcaacaccacctgcagcggcgaatggctatcctgccactggcttga

SEQ ID NO: 266755 - DNA, 510 bp, Klebsiella pneumoniae
atgaaaaagcaatgggaaaagctggaagcctggcttaggataaatcatccttcactgttgggtgatctcaatcccccggctagcgatgcagacatcctggagctggagcagaggctcggaatggcattaccaacggattatatcgcctgcttgaaaattcataacgggcagaaaggaagagacgggtggctgttcaataacagggagtttctgtcaacgcaacaaactttgatgagctggtcggcatggaatgacttactcgatgaaggagatctggattataaagtttctaggccagacgcgagtatacagtcaggctggtggcgaaaagcgtgggtcccctttgccacagacggctgcggtaattatctctgccttgacctgagcccgtccgcctctgggcagtatggccaagtcatcaatgtctttcacgacgtccaggacagaactcgggaggcgaccagtttcaccgcatggtttgaaaatttagtcggtaataagcaggattga

SEQ ID NO: 266756 - DNA, 291 bp, Klebsiella pneumoniae; identical to SEQ ID NO: 139257

SEQ ID NO: 266757 - DNA, 1140 bp, Klebsiella pneumoniae; identical to SEQ ID NO: 30086

SEQ ID NO: 266758 - DNA, 1767 bp, Klebsiella pneumoniae
atgaacaccacactgacatccgcagatctcgatccccgtcggcaggccatgctgctgtactttcagggatatcgcgtagcccgcattgctgaaatgctgggcgagaaagttgcaaccgttcacagctggaagaaacgcgacaagtggggtgactatgggccgctggatcagatgcagctcaccaccgccgcacgctactgccagctcatcatgaaggagcacaaagaagggaaagatttcaaagagattgacctgctggcgcgccagtcggagcgccacgcgcggatcggcaagtttaacaatggcggcaacgaagccgacttaaaccctaacgtcgccaaccgcaacaaaggcccgcgtcgtcagccggaaaagaacgttttcaccgatgaacagattgagaagctggaagaaatcttccattcctccatgttcaactaccagcgccactggtgggaagccggaaaaaccaaccgcatccgcaacctgctgaagtcacgccaggtcggcgcgaccttttactttgcccgtgaagccctgattgacgccctgcttaccggacgtaaccagattttcctttccgccagtaaggcacaggcccacgtctttaaacagtacatcatcgacttcgccaaagaagtggaagtggagctgaaaggcgatccgatggtgcttcccagcggggctacgctttacttcctcggcaccaatgcccgcacggcccagagttaccacggcaacctgtatctggatgaatatttctggataccgaaattccaggagctgcgcaaagtggcttccggtatggctattcacaaaaaatggcgacaaacctatttttccacaccatccagcctgacacacagtgcttatccgttctggtccggtgcgctgttcaaccgtgggcgcaacaaagccgataaggtggacatcgacctgtcccacagcaatctggcccccggcctgctgtgcgcagacgggcaataccgccagatagtcaccgtggaagatgctgtgcgcggcggatgtaacctgttcgatctcgaccagttgcgcatggagtacagcccggacgaataccagaacctgctgatgtgcgagtttgtggacgatctcgcgtccgtgtttccgctcagcgagctgcaggcgtgcatggtggacagctgggaagtctggaccgactttcatgcactggccctgcgcccgtttggctggcgcgaagtgtggatcggttatgacccggcaaaaggtacgcaaaacggcgacagcgccgggtgcgtggtggtggcaccgccagccgtgccgggcggtaagtttcgcattcttgagcgtcaccagtggcgcgggatggacttccgcgcccaggctgacgccatcaaaaaactgactgaacagtacaacgtgacatacatcggtatcgactcaaccggcgtcggtcacggggtttacgagaacgtgaaagcgttttttcctgccgtccgggagtttgtctacaaccccaacgttaaaaacgctctggtactcaaggcctacgacattatcagccaccgccgtctggagtttgacgccgggcacaccgacattgcgcagtcattcatggcaatccgtcgcgccaccaccgccagtggcaaccgcccgacgtatgaagccagccgcagcgaagaaaccagccacgccgatctggcgtgggcaacaatgcacgcgctgtttaacgaaccactgcagggcgagtccgccaataccagtaatattgtggagattttttga

SEQ ID NO: 266759 - DNA, 204 bp, Klebsiella pneumoniae
atgaaagtacgtgcgcatcagtatgacacggtggacgcgctttgctggcgtcattacgggcgtacacagggtgtcacggagcaggtactgaaggcaaatccggggcttgccgaacacggcccctttttacctcacgggctgcaggtggagctgccggacattccgaccaccaccaccgtgcagaccgtccagctatgggactga

SEQ ID NO: 266760 - DNA, 189 bp, Klebsiella pneumoniae
atgatatccgccagctgcgccgcctcgctggtcggctgctgggtgatgaccgctatcggggcgcccagcgaccaggcgtggcgcatcgccccccacacccatggcgtcttgccgctgacggtcagcgccagcagcatatcgcggttgctgaagtccagcgactgcagctcaaaggcgcccaggtcataa

SEQ ID NO: 266761 - DNA, 564 bp, Klebsiella pneumoniae
atgctgattggttatgccagggtctcaacagtggaccaaaacctcgatttacagaaaaatgcgctgatccgcgcagaatgtgagctgatttttgaagataaatcgagcggtaaaaacacgaagcggccaggtttaaagaaggccctaaagcgcctcaaaaaaggggatacgctggttgtttggaagctggatcgattaggtcgacgaatgtgggatttgattaagctggtgggggagttgcaggagaaggggatttactttcgtagtctcacagacagttttgataccggaacgcctgctggccggtttgtcttccatgttatgggagcactggctgaaatggagagagagctaaacatcgaacgtactcgcgcaggtctggccgcagctcgcgaacgtggaaggattggcggtcgtcgtaaaatcatgacccgcgctatcatcaatcgggcggaagaaatgttaatcgctggcgcgaaccggcagcaggtagccgatgtgatcggggtgggggtgaagacgatttataaatattttccggctcaatgcagccagtcgaattga

SEQ ID NO: 266762 - DNA, 240 bp, Klebsiella pneumoniae
atggctattaccctgcatcaaaaagaaatcatgattctcatgacggaccccaacttaaaagtgccggtccaacataccagcttcccttttgagcatccctacaaaattgattcggctatagagcagctatatcggatgggatacattaatgcagtgcagtcaaaagcggaatttcattggatcgccacttcaatcacgccaaaaggttatgtctttcttaaagaggcagggttgatttaa

SEQ ID NO: 266763 - DNA, 288 bp, Klebsiella pneumoniae
  misc_feature (18)..(27): n is a, c, g, or t
atgtcttatctcagatcnnnnnnnnnngcgacttttaagccaaaccataaaataattatttgtcattacgaatcaatgaagatattcaaaggttttattaacatagctcttgcttacactatcaagttcaattttcgccaagactttactataatcagacctctgtacgatgagagcagaattaccaaatttatcttccattactccgtaaataatatcaccatttttaatatcaaatcctccagccatacctcctccgcgagtaacatcgttgctatctttttctag

SEQ ID NO: 266764 - DNA, 135 bp, Klebsiella pneumoniae
atgaggaatcaggtttgcaatatgctgttaaggaatttaataagtcaccattatatctttctcccggattttcatttaacgaagccgatcgtgactattatgaagagctatatacttcatttgagctatttttaa

SEQ ID NO: 266765 - DNA, 498 bp, Klebsiella pneumoniae
atgatggatggccgcatcggtcatatcagacaagcgtttgaaacgaatggactgcttaatatccagataatggcgtattcagcaaaatacgcgtcgaactattatggtccttttcgcgaggcgacgaaatctgctgtatcactgggtaaacgggacaaaaaaagctatcagatggatccggcgaatgcaatggaagctatgcatgaaattgcccaggatttgcaggaaggggcagacatggtgatggttaagccgggcatgccttacctggatattatcagggaagccaggaaaacttttgcagtacccgtctttgcctatcaggtttcaggggaatatacgatgcatatggccgctttccgaaatggttggctggacgaagaaaaaacggtgcttgaatcacttatgtgcttcaaacgcgccggggcggatggaatactgacttattttgccaatacagtagcccagttgcttaatcaacataaacgggaatattga

SEQ ID NO: 266766 - DNA, 936 bp, Klebsiella pneumoniae
atgagtattgcagccaaacaaaccttatgccccggcatgctaccggatattcagtccactaagggtgacggtgagggagagtcattatcctgggttggcatggagcaaattgacctgccgatagacatcgcaggcaggccggtatcagcaaaggtcaatgccggcataaaccttctcagttcacctgaagctgaaaaggggatccatatgtctcgcctttatcttcttctggacgaactgacacaaggggaaatcacaccggcattattgcaacatgtgctgaaagcatttctggtatctcatcagggacgtagtgatgaagccagtattgagatttcaggggatttgttactgtcgcgtaagtcgttaaattctaatcactccggctggaaagcttatcctctgactctgagcgccgaactcaggcaatcttttacggttaccctcaaagtgggtatcccttattcgtcaacctgcccggcttccgctgcacttagccgccacgtcgcgggtttgcagtttagcaaagactttggtaaccggatcgacaggctcccggcagcagaaatagccgactggcttgttgagaaaggaatgccggcaaccccgcacagccagcgaagctgggcatggatggatatccgtcttaatcctgaagcaaaatcactgcctgtgcttgagctgattgattatgctgaagttgctctcgggacagccgtgcaaacggtcgtcaagcggagcgacgaacaggcttttgcagtggctaacggtcaaaatctgatgttttgcgaagatgctgcccgtcggctcaataatgtttttcgttgtgcatccttttgtgaagcatttgatatcagggttgaacatcaggaaagcctgcatccccataatgccgttgcccgtattcactggaaaggaagtaaaaatgttacgtaa

SEQ ID NO: 266767 - DNA, 852 bp, Klebsiella pneumoniae; identical to SEQ ID NO: 227445

SEQ ID NO: 266768 - DNA, 1002 bp, Klebsiella pneumoniae; identical to SEQ ID NO: 227444

SEQ ID NO: 266769 - DNA, 957 bp, Klebsiella pneumoniae; identical to SEQ ID NO: 135621

SEQ ID NO: 266770 - DNA, 273 bp, Klebsiella pneumoniae; identical to SEQ ID NO: 250847

SEQ ID NO: 266771 - DNA, 207 bp, Klebsiella pneumoniae; identical to SEQ ID NO: 74992

SEQ ID NO: 266772 - DNA, 207 bp, Klebsiella pneumoniae; identical to SEQ ID NO: 235318

SEQ ID NO: 266773 - DNA, 1095 bp, Klebsiella pneumoniae; identical to SEQ ID NO: 235317

SEQ ID NO: 266774 - DNA, 267 bp, Klebsiella pneumoniae
atgcacaccgctttttcttccccgtcttctgcccctgccgcgccgctgatgccggtttctgataccgttcaggagcgctttattcgcctgcccgaagtgatgcacctgtgcgggctgtcccgctccacgatttacgacctcatcagccgggaggctttcccgaaacaaatctcgctcggcggaaaaaacgtggcgtgggcgcagtcggaaatcaccacatggatggctgaccgtatcgccgaacgtaaccggggttatgacgcatga

SEQ ID NO: 266775 - DNA, 945 bp, Klebsiella pneumoniae
atggcggcttccaccgccgccttgcgcgggtcgaccggatcggcggccggggcgtccaccggcgcggcctgctgttcggctttacgcgctttggcgcgggcgatagcggcttccaccgccgccttgcgcgggtcgaccggatcggcggccggggcgtccaccggcgcggcctgctgttcggctttacgcgctttggcgcgggcgatggcggcttccaccgccgccttgcgcgggtcgaccggatcggcggccggggcgtccaccggcgcggcctgctgttcggctttacgcgctttggcgcgggcgatggcggcttccaccgccgccttgcgcgggtcgaccggatcggcggccggggcgtccaccggcgcggcctgctgttcggctttacgcgctttggcgcgggcgatggcggcttccaccgccgccttgcgcgggtcgaccggatcggcggccggggcgtccaccggcgcggcctgctgttcggctttacgcgctttggcgcgggcgatagcggcttccaccgccgccttgcgcgggtcaaccggttcggcggccggggcgtccaccggcgcggcctgctgttcggctttacgcgctttagcgcgggcgatagcggcttccaccgccgccttgcgcgggtcgaccggttcggcggccggggcttccaccggcgcggcctgctgttcggctttacgcgctttggcgcgggcgatggcggcttccaccgccgccttgcgcgggtcgaccggttcggcggccggggcgtccaccgacgcggcctgctgctgcgctttgcgcgcccgggcctcagccttacgcgcttcgcgggcggcaattgcctcgctgttgtcaggtttggcgccggcctggatcacgatcggctgcgcggcatcgcgctgtttatcccgtacccgggccagggcggcgctaatcgcctcctga

SEQ ID NO: 266776 - DNA, 516 bp, Klebsiella pneumoniae
atgagcagcgttacgccggaagaagttggttcattttttttatcacttatagttcctattataacaggtgctgtagccgctggttttacagcatattttgcgttgaataggttttacagggagaagtggtgggagaaaaaacacgcttcatacaatcaattaatagatacattattcgaaataaaggctatttactcctacgcatttgacttggggcatcagcattatcatgctgatatgagaggtaatgttccccctgatggtgtggttgactgggataagtatcacagacttaatgctcagttacatcggttttatgtgctttccccaatatcattaagtaataacaccagagatttattgagtaagttttttgccaaatctgtggactcggactataaaatacatgaagaaggttttcctgattttattgcctataacgaaatgtctgaagctgctcaggaattaattgatgcaatcgttctggatgcggaatcagaattaaaattcaagtaa

SEQ ID NO: 266777 - DNA, 597 bp, Klebsiella pneumoniae
atgataaataacatacagttattaagggccttggcagtgatgatggttgttctttaccactcatccggaaccttaaacacatatgattttgattttgtagacaatacggcaatagaccgctggggggcatatggagtagatgtgtttttcatcatttccggttatataatggccatgattgatcataagaaacacaaaaccccatggcagtttgcgaaagacagaatcaaaaggattgtacctttatattggattttaacgcttgcaatagttttcctccagttaataatacccaatgcattcaatacacttaccctatcactcaatcatgtagtctcatccatgttattcataagtgggtatgcaaattatgagtatccttcgctctatgttggctggagcctggagttggaaatgctcttctatgcaatattctctatgtgcctgtttataaataaacggaatctaagactagccattatatgctccataatatggattttatccatttactcggtaatgaagcctatagcaatcgaatttaccttaggaatggttctgtattatgcggtaattatcgttagaaaaaaattatag

SEQ ID NO: 266778 - DNA, 2889 bp, Klebsiella pneumoniae
atggttaaattgctgttgcagggctcatccggcccggaggttgtccagttacgcgagcgtctggcgaaaacgctgggggcggatgcgaagatgtttgcattgccgtcgaatagcgacacgttcgatgccacgctcgcctcggcggtccgacactggcagtcgaatatcggcatcatcgccgatggcgtcgtcggtccctattgccagagcctgttggcgcttatcaagctgcctgcgtttgcgctgcgggcagatgaggtgcagcatttattccccgccaccaaaccatccaatgtgctgcgctatctgccgtacgtcgcggcagcgttaaccagcgaaggactcacgacgatcccgttgatcctggccgccctggggaccatccgcgcggagaccgaaggctttgtgccgatttccgaatatccctcgcagttcaacacgctgccagggctgccggcgttcagcgcctacgacgcagggaccgacaaaggcaagaatcttggtaacatcaaacctggggatggcgccaggtttcgcggacgtggtttcgtacagcttacggggcggtcgaactaccagaaatatgcttcccgcataggtgtggacattatcggctctcccgatttagctaatgcacccgaggtggcggcggtactgttggcgatgttcctcggcgatcgtcgagaggcgttaaccacggccctgacagccacgccccccgactatcggaaagcgcgcaggctggtgaatggcggggcgcacgggctggatagtttcaaaaaagtcttcacgcttgcagcggtcttgccagcggttatgcagcagaccagccagatacagagcgcgggagctggcagagggagcagacagcaggcgggcgccgccgcgatcgcggccccggcagagggaccggttctcaatgcgtcgaaggatccgcttgatctgcgcgatcgtacctatacgccgccgccggtgagcctaccggaccgctttccggttgataaggatatcgccacgctactgaccgtctacacccaggcgcagctgatcctcgatcaggggcgggaaggcgcctgcacgggttttggcttagcctgcgtggtgaactatttgcgctggcgtaaagccggtttcccgaaaaaactcgattcagtgagcccccgcatgctttacaactttgcccggcgatacgacgaatacgccggggaagattatgacggttcgagctgccgtggtgcgcttaaagggtggttccatcacggcgtgtgtctggagtctgactggccttaccgggagcaggaaaatatcccgccgcaatacggatacgcggagcgcgcggtgaatacgacgctgggggtctactatcgtattgatatcaaaaatattaccgatatgcaggccgccatccatgacgtgggggctatctacgtttccgcctttacccatgagggctggcagacggtcccgacagcgaaaaaggcgcccaccaatcatgactcgctggcggtcatcgcgttcaatggcaagcctactaaaacgggcggtcatgcgtttgctctggttgggtttaaccgcgacgggtttatcgtacaaaactcctggggtacagagtggggatgcggtggcttcgcggtactgagttatgccgactggctgaccaacgcgatggatgcctgggtggcggcgctgggcgtgcccggcgtggtgccagggcagcttgcaacgggttcgccagcccttgccacacaggccgccgcgggtaatcacccgcagtggtgggacgaaaccacggcctatcagcacagtattgttatcggcaacgatggtcgggtggaccgctacctgacccaggacgagatgacgcgtacgctgatgtatcagggatgcgtattgcccgatcgttggtttcgcttacaacacgcagagactaaacgcttagtcatttatgcgcatggcgggctcaacaatgaggcggggtcgattgcgcgggcgcgggcgatgggacgttacttcactggcaacgattgctatccactctttctggtgtggaaaacagggatcctggagtccattggcgatatcttctccgaccattttcgccgtgaaccctcgcgcgcgggtggcgtgcgtgaggcattgactgaggcttccgatctgctgattgaggaaactattggtcggccggccgcgaagcctctgtggagtgaaatgaaggagaacgctgaagttagttgcgtttcaggacgcgcaggcgatctgctggtgacggccctgcaaaagttagtggaaacctgggggaaagcgcttgaaattcatataattggtcactcggcgggcagtattattctcggccatttcgtcgatctgttgtcatcccgcggcctgggtgacgctctcaagtctgcgcatctctatgcgccggcatgtacggtacagtttgccaaccgacactatgccccgcatgaattgctgatgaaacgtatgtatcttcatatcttgtccgatcgcattgaacgagccgacaatgtggcagctatttatcgcaagtcgctcctctatttcgtctccaacgcgttagaaggggatcggcgaacaccgctgctgggaatggacaagatacacgataaaaactactcgggttgggacggttcgtcgagcaccggggaagcattgcgtaactggcgtcatgctgcggctgaggcggggctggaaaagcgcggccgaaccaacatcattgatatcgataaggtccgtggcggcccaggcgtgatgatcgatgcttaccacggcagtttcgataacaacattgacgtgatcagcctgaccctgcaacgcattgttgagaataaccagctgaacgtaccggtggatgatcttcgcggtttttag

SEQ ID NO: 266779 - DNA, 546 bp, Klebsiella pneumoniae
gtgtctggaaatataggggcaaatccactgtcagagtcagagtcgctgtcggagtcggagtcgctgtcagaatccgagtcactgtccgaatcggaatcgctgtccgaatcggagtcgctgtcagagtccgagtcgctgtcagaatccgagtcgctgtcagaatccgagtcgctgtcggagtcggaatcgctgtcagaatccgagtcgctgtcggagtccgaatcactgtcggagtccgaatcgctgtcagagtcagagtcggaatcgctgtccgagtccgaatcactgtcagagtcggaatcactgtcagagtcggagtcgctgtcggagtccgagtcgctgtcggagtccgagtcgctgtcggagtccgagtcgctgtcagagtcggaatcgctgtcagaatccgagtcgctgtccgagtctgtatcagaatcggcatcggcatcactttcgctgccgccagggtcggtatcgctgtctgagtcagaatccgaatcactgtccgcatcagaatcagtatcatcgttcggagaatgcgacgaatga

SEQ ID NO: 266780 - DNA, 699 bp, Klebsiella pneumoniae
atggatattcaagggtattttactaaattaaatgctgaatcccaaactgtcttcgaacagtctatatctcaaaaagagactctaggtaaattacatcatttgtcttcgtgtatatacgaaatgtcaaatgttttgagagatcctcaagaaaaaagaattttagaaactgttagtgcccaattagaatcatcaaactatagtttgattgtaggtttatatagacaagcattttcatcacttagacttgcacttgaaatgggactgggagctatatatttttcagctagtaaattagaaatgcatgaatggcttgatgggagaagggatattaaatggtcaagaataatagatgaagagaatggtgtttattccaaaagatttattatggctttttttcctgatttagtgggtgatgccgaaatatatagaagaaatgcaacaagtatttataggaagctgtctgagtatgttcatggcaacaacgaaacatggataaatggaagtatcaaaatcatatataaaaatgagctattcgaacaatattgtcagtattaccagtgcgtgactgaatctatattgttcgcagccacatgtagatatgcgaaaagttttgatgatactgagcgcgaatctttgcaattcttgccagaagattttaatcatatagaaaaaattagagaattattcggtagatcatag

SEQ ID NO: 266781 - DNA, 168 bp, Klebsiella pneumoniae
atgccattccgtatgcgttatatgcgcttgcagccgggtttcttgttacatttttttctgtccccaatgtacgaattaatatacggaaatatcgagatattcctgctgaaatgtcgtatgcaccgggagaacacattaagggagggcaagaatgatgccacgcattaa

SEQ ID NO: 266782 - DNA, 315 bp, Klebsiella pneumoniae; identical to SEQ ID NO: 106978

SEQ ID NO: 266783 - DNA, 684 bp, Klebsiella pneumoniae
atgctgtttaactggaaagatcttatcacacccattgtgaccgtcactgcggtctggctcggggccaaactcgcgttaagtaatgatatgcgtaagaaagtgctagagctcgaaactaccaagttggagcggttggcatttgagtgcgacagctgtgtgaacaatctgcacatgaactgcatgagaatctataaaattattgaagatttatccggggaatataccaagagaatcaccttggcggaggttactcaatgcctggaaaaatcagctgaagcaggaacagtaatcgatactaaagctggacaacaatttcagaatacgctggaacttcaccgtcaggccgattttgaagaatggaaaatactcatccttccactgctactacatattaacaaggtacttgcctccccatcgctggccaacgatgactgtacgaaagaactcagccgcctttactggaagccagagcaatcaaaaagctacaatgaagagcttgccgtgctggcaggcccattgcctagctatcggcaacagctgtttaaacgcatcgccgatgattaccaagcattactgcaacccgcaccgcttaatatatgggtgattacacgtaaaacttgccactcaatccgggatttcgtcaaatacaccccgttagcgtcgcgaaataatatgcggcaatga

SEQ ID NO: 266784 - DNA, 1194 bp, Klebsiella pneumoniae; identical to SEQ ID NO: 5196

SEQ ID NO: 266785 - DNA, 387 bp, Klebsiella pneumoniae; identical to SEQ ID NO: 12817

SEQ ID NO: 266786 - DNA, 1308 bp, Klebsiella pneumoniae; identical to SEQ ID NO: 5199

SEQ ID NO: 266787 - DNA, 1941 bp, Klebsiella pneumoniae; identical to SEQ ID NO: 107003

SEQ ID NO: 266788 - DNA, 1182 bp, Klebsiella pneumoniae; identical to SEQ ID NO: 5201

SEQ ID NO: 266789 - DNA, 954 bp, Klebsiella pneumoniae; identical to SEQ ID NO: 5204

SEQ ID NO: 266790 - DNA, 1110 bp, Klebsiella pneumoniae; identical to SEQ ID NO: 107024

SEQ ID NO: 266791 - DNA, 858 bp, Klebsiella pneumoniae
ttgtcaattaaaaatataaagcgcattattacggcctggaaaccatctacattcgaaacgtacaaaaaaacttttgaaaaatacggtggtagtgtaaacatgcatccggatgttgtttcatactttatgatacatcatgactggaagtttgatttttttcactatgaaaaagatggtgatatcaaaggctcatattttctgtgcaatggaaaacaaattgggataatggcaagaaggtcttatcctctttcatctgatgaggtattaattcctttttccccacatgcaagatgtttttttccggataaaactaataaattatcaattataaataaacaaaatattatcaatgcaacatggacacctaaatttgaaaaaactcgccgaaatgaaatccagagatttatcaggaatggcggagagattaagtgtataagccagttatccgataaagaaatatccagctcttatatatcactttttcattcccggtttggaggtaccctaccttgctacgaatatgataatctgttaatgtttatttctcacttacgagaacttatgtttggccatgtgctattctgggataataaaccgtgtgctattgatatagtactgaaatctgaaagctcatgtaatgtttattatgacgttccaaatggtgcagttctgaatgatgagaattgtatgaaactaagtccgggaagtgtccttatgtggctgaatatagataaagcacgaaggtattgtcaggataataataaaaagatgatatattctatcggtgcattcagacctgaatggaaatataaactactatggtctgttccctgtaaggttggtaaatgcttatgttag

SEQ ID NO: 266792 - DNA, 645 bp, Klebsiella pneumoniae
atgaacgggaacgaaaaaacggtctccgtcaccctgaccaatgagaacaaaacgatgccctttctggcccagtcctgggtggatgacagcaacggcagacgaagcagcatgctgatggtgctgccgccgctgcagcgaattgatggcggtcagaaaacacaggtccgcatcatgcaggtacaggggaccgggctggataaactgccggcggaccgggaaacgctgttctggttcaacgtccgcgaaatcccgccagagccggagacaacgaatgtcctgcagctggccctgcagagcaggctgaagctgttttaccgtccggttgccattaaaaaaggcagcaatgacacctcagagaaaaaactgacggtggagcgggagggagggaagctggtcctgaaaaatccgtcgccttaccacatcaccctcgcctggctggggaccacccgtcgtgagcgccttgagggcttcagcgagggggtgatggtctccccgctgagcacgttgccggtgaaggccaccctgccggccgggtccacccggctgtgggtggggtacgtggacgactacggcgggctgcagatgaaccagtacacctgtaacgcgcagcgttgtgccatgtcactgcgggagacaacaccatga

SEQ ID NO: 266793 - DNA, 1047 bp, Klebsiella pneumoniae
atgacagtacggagacgccttctgccggcggtgttgtgcctgctcgccgggtacagcctcacggcagcggcatacaatacatcctcctcctgcacaggaacgggcaacacgactttttcgttaccgaacctcacctttaacacgaaccagttgcctgcggtcggagcggttttgtatacctccccggcgtatcccgtgtcgtataagtgtacgaccgaactggacagccaggccaccttcgctcctatgctgcagagactgggggattttgataaagtcgttgaggcacttgagagtgctgggctgggtctggatatcattctgcaggaagcggggcagcccgaagtgacctggtcctggtacgacatgacgaaaaatcgctataaaatcttcggcgccaccatgccatccaacgccactgatattttccgttcggccactttcaggctgagactgtttgtaagaaagcctatcaccagcgcgaagattgttcagttctctgccctgagcgccttcagcatcataccctccctattcaattattcccggggagtactcctgacatccactccgttttccatccgctatatgccggacaactttggctatgtcagcctcagcaccaccacggtcaatctcggtcacatctacacgaattatcagaatccggccaaacgggccagatttgaggttacggcgggtcagcggatgggcgtcgggggacccgagggcgattttaccatccccctgcagaccacgtttaccgccaccggtaagacgctgaccgataacggtcaggcggcccgcatgacaaccgaggatggtcaggcgaacggactgaagctgagcattctggacacgtcttccggcgacaagctgacctttgggcagccctccgacctgggcaaactgaaatccggcggaacaggcatcctcgccacgccggtcagtaaagactatacggcactgctggaacaggatgccggtacgccgctgagaacagggcccttctcagcgaatgtggtggtgactgtgacgtacaactga

SEQ ID NO: 266794 - DNA, 477 bp, Klebsiella pneumoniae; identical to SEQ ID NO: 209141

SEQ ID NO: 266795 - DNA, 843 bp, Klebsiella pneumoniae; identical to SEQ ID NO: 209140

SEQ ID NO: 266796 - DNA, 459 bp, Klebsiella pneumoniae
atgttacccgaagatatcgtacactcgcttgcagactggctttcaaaaatgaatgattcacagaaaattgctgcactgaatagcctgcaacgattcatacactatcatggcccgtttcgcaatgaacccgtcggttgcgtccagtggataccagctgagtgcgtgatagcaaacgactataatccggataccataagtccggttgaacgaaaaatactggagttgtcattgctacaggacggctttactcaacctatcgttgtcactgtgggacgggctgaagaacttcattatcacgtgatggatggctatcagcgttattttctcagccagaaaccactattacgtaagaggctgcgtgggcatatccccgtgacaattatccgccctcaagatgatgctattttctcgctgatggcggcggttactcgtgaacaggtgataatcaataccaaataa

SEQ ID NO: 266797 - DNA, 711 bp, Klebsiella pneumoniae; identical to SEQ ID NO: 209138

SEQ ID NO: 266798 - DNA, 1719 bp, Klebsiella pneumoniae
atggctatcaagaagaacgaactttactcctccctttgggcgagctgcgacgagttgcgtggcggaatggatgcttcacagtacaaagactatgtgttgaccctactgtttatgaagtacgtctctgacaaagctaagggcaacccttacgcgatgattgaagtgccggaaggtgcaagtttcgacgatatggttgctctcaagggcaacaaagaaattggcgaaaaaattaacaaaaccatcagattactggctgaagctaatgacctgaaaggtgttatcgacattgccgacttcaatgatgaagacaagctgggcaaaggcaaggagatgatcgaccgcctttccaagctggtggcaatcttcgaagggttggatctctcagccaaccgcgttgacggagacgatctgctgggtgatgcctatgaatatttgatgcgtcactttgctacagagtcaggtaaatccaaggggcagttttacacccctgcagaggtgtcacgcattctggcgaaagtgattggcatcagcaaagagacaccacaagatgctaccgtttatgaccctacctgtggttcaggctcactgctgttgaaagccagtgacgaagccggtccgaaagggctgaccatttatggccaagagatggattatgcgaccagcgcactggcacgcatgaacatgatcctgcatgacaacgccaccgctaaaatctggaaaggtaacaccttagccgatccacattggaaggatggcaacgataaccttaaaaccttcgactttgctgtagctaacccccccttttccaacaaaaactggaccagcgggctggatgctgcgaacgatacttttgaccgttttgtctggggtacaccaccagaaaagaatggtgattatgctttcctgttgcacatcatcaagagcctgaaaagtaccggcaaaggtgctgtgatcttacctcacggcgttctgttccgtggcaatgccgaagcgcgtattcgtgaaaatctgctcaaacagggttatatcaaaggcatcattggcctgcccgctaacttgttctacggcacgggtatcccagcatgcatcattgtcatcgataaagaagatgcccagctccgagcgttcaacgctaatggcgagagtcagcaaggcatctttatgatcgatgccagtaagggctttattaaagacggcaataaaaatcgcctgcgcgcccaagacatccataaaattgtcgatgcgtttaatcgcgagcaggaaatcccccgcttcagtcgcatggtcccgctgtcagaaattgcggccaacgacttcaacctcaatatccctcgctatatcgacagcagcgatccggaagatctgcacgacctttctggccatttggctggtggcattcccgatcacgatattgatgctctcagtgcttactggaacattttcccgactttacgacaggatctattcgaacccgcccgccctggctatagcaatgcccgagtcgaggcaggtaaagttaagagtactatcctggcacatccggaatttgcatctttcagagatggagcactgataccctttgaaaattggtatgcagaatgtcgacttgatgaaattgctcgtggtgattcgccgaaacagcttattgaagagattggcgagagtctcctagactggccccctgaatctccagacaaccaatatcacttaaataagtga

SEQ ID NO: 266799 - DNA, 1035 bp, Klebsiella pneumoniae; identical to SEQ ID NO: 106991

SEQ ID NO: 266800 - DNA, 957 bp, Klebsiella pneumoniae; identical to SEQ ID NO: 106992

SEQ ID NO: 266801 - DNA, 1230 bp, Klebsiella pneumoniae; identical to SEQ ID NO: 106993

SEQ ID NO: 266802 - DNA, 561 bp, Klebsiella pneumoniae; identical to SEQ ID NO: 106995

SEQ ID NO: 266803 - DNA, 291 bp, Klebsiella pneumoniae; identical to SEQ ID NO: 22960

SEQ ID NO: 266804 - DNA, 1245 bp, Klebsiella pneumoniae
atgagcatgttggcggtgtcgtcatcgaaagacgatataaacttggctaatgtagtgtcagtaagggatgagcggatactgaagtctgctttgattttcggagctaacgctagcggaaaatctaatctcatgaagacaatatctttaatgaaagatattgtcctgcattctgtgcaagctatcgaaagtggcattacgaagaatgtagtaccttttttacttgatgaggcggggcctactaaaccatctgaaatggaaatgacttttattgcggatgggattaaatacagatacggattatctgtatttcaagggaagataaaagaagagtggttgtactacacgccaaaaacaagggagactattctctttgagcgagatggtcaacttattgaaataaataaagcagcatttagcgagtcaaatctttttataaaggatggggtcattcagaagacaagagaagatgttccctttgtttctgttgttgctggatttaatggggagcactcaaagcgtgttgtgaattggtttagtaatgtggtatttctttctggttctaacgaaggaatgtttactggaattaccatgaagcttataaatgagtctgaagattttaaagcttggctaaaaaaaatattaccagcctttcagattaatgatatttatcttgatgaagttgcgcctgaatttccgtttggcaacataaaaacagatgatgataatttaaaaaatttattcagctcgattcagaattttgcaaaaaatcaaaaagtattttctcttagagtcgtgaaaaaaactgctaatggggagatttcggttcccattgattttgaatcagaggggaccaaaaagatagtctatctccttgggcctatttataacgccatgattaacaataacttattgttggttgatgagttcgattcaaagttccatacccttttatctaagtttttatttaggatatttcatgcgcaaagtgaagggtttagccaagtaatcgctgcagttcaggatgttaatttaatgaatactgattgctttagacgagaccaaatttggtttgttgacaaggatgtaaagtcagggagtagccatctttattctttggttgagtacaaagagaaacaaagatcattgaagccatcatatgggaatgattatttatcaggtgcttttgatgcaatcccgttgtttgataatcttaatgaatttgaaaagctaatgcctgagggatga

SEQ ID NO: 266805 - DNA, 429 bp, Klebsiella pneumoniae
atgacgcaaattggctgccagcctctgtcaaagcgacctgatgatatcgagccgctgtttcatcactatttgcaaaaaacctgtcaacggctgaatcatcccgtcccggaggtggatgctggtctgttgaaggggatgatgcgccgggtgtggccaaataacgttcgcgaactggcgaacgccgccgagctgtttgcagtgggggtattaccacttgcagaaacggttaatccgctgatgcacatcggcgagccgacgccgctggatcagcgggttgaggacgtcgaacggcagatcatcaccgaagcgctgaatatccaccagggacgtattaatgaggtggcggagtatctgctgataccgcgtaaaaaactttatctcagaatgaagaagtatggtctgaataaagagcactacaaaggggtttag

SEQ ID NO: 266806 - DNA, 990 bp, Klebsiella pneumoniae; identical to SEQ ID NO: 227362

SEQ ID NO: 266807 - DNA, 486 bp, Klebsiella pneumoniae
atgatgattatgattgttatcttatcttatatgctatttaaaattcttaagtcaaagaaaaggcttcagcataagtatgatgaggtatttaaggcttttcatattgcggattcagagtacaccggcggcctaaaagatgtttacaaaaacttatctttaagcaatgctcagttgcagttccttgctgtttacttcaatcaagacactgtccagtttgatggcagaaatattgtgtgcgaaaaagaggatgatgttcagtatattctttcacttatatcagacagccatttttggttggacaaatccatgaaaggaataaatgaagtggtaaataatacggacgtaataaaagatattaaattatctctatcaccgttcgcttcgttgggtgagctgaaggttatagatgatgaatttaaactgaaaaataaagagtttgatgggtttgctaaacttaaagttaagtatgatgtaaaaagggggtga

SEQ ID NO: 266808 - DNA, 810 bp, Klebsiella pneumoniae; identical to SEQ ID NO: 74982

SEQ ID NO: 266809 - DNA, 258 bp, Klebsiella pneumoniae
atgcggcgcatggtcagtcgcgataacgtcaataatgccttcattaacgcctctccagagggcttcctgatgaaaagaggattttacggatggattacatttgagcttatgccccagcatttcataatcgtcataattaaaaaacaggtgatgaacgcaggcttcagttgtaatggttttctggcgcagcgcctccagcgtgggagcagcatcaaagagagcgagttcatctgcggtggtgatatgcaggacatgtaa

SEQ ID NO: 266810 - DNA, 495 bp, Klebsiella pneumoniae
atgaagcgtatccacagtgccaaatggcgtagtaaagcagctcaagagcaaagagccgcagaacaggctgttcgtgatgctaccaagcaagaagccgttgaagtctacaaaacattcagtgagcttgatcttgaaatcatcgttgatgtcagaagctttacgattacacatcttgctgaaccagaagagattgtattaccaaaaacaagctccagtttttctgccaatgaaacgcaaagacctgtacttgtagcaccacctcctcatactcgtatgcgaggtgttaaatcctatcgtgataaatccaaagtcagtaaggttgttgctggtaagaaaccatcagtcagtatttctgattctggaaaaaatactattctgaaaacatcctcctctcaagccctaaacagggcatccagaagcgcccctgaacgtgttaagagaaaacaggctattccacgtcaggataatatttttaacgcttcacaactcttgtaa

SEQ ID NO: 266811 - DNA, 591 bp, Klebsiella pneumoniae
atggccgtgccctggggaaatttacagctggatgaattgctttccatgccggattacgattttcatcgggtggcgttacttatcgatgagcttcaggatgccattgacgcagttttgccggatgaaaccgataaaaaatacgatatttcgtggagggtcattgaggatgaccgtccatttcatccgcagcggctgtgggatacctgccatcgcttcatgggcgcaggcgtttaccgcagcaaggggtttttctggctaccgggaagggatgacctggcattattgtggaaccaggcagcagggagcatcaatctcgaattcataagctactggaaagccggggtcctgactcacactgataattcattgacaaaggaagaacgcgcagctatccgtcagcaactggcaaaaatgccgggcagatttggtgaccggcgctgccgcctgactgttattggcgagagcggcgaaattgacgattttgccctcgcattgcgccagtgtttactcactgaagaggaaattctctggtggcagcagggggggattttccacgatccctggcccacgaaagtggcccggctggcttaa

SEQ ID NO: 266812 - DNA, 123 bp, Klebsiella pneumoniae
atgttcttcctcacggcgctcatccacgataacagagagtttttccagcatctcttccagcgtttccagatcagtttcacgagcctgtgcgcgaagtatacgaatattgttcagtacctttaa

SEQ ID NO: 266813 - DNA, 1392 bp, Klebsiella pneumoniae
atgttaaatctgaaatcttttctccgtccggggcgtttacgtccgggtacactcccgaccgttgaggcgataaacccctctttgcccccgggctactttctgcccatgacggccagcgaactgctggcgacaacccgccgtcagcaatggctgcaatcgctctgggattattcgtccctgccgaaagacatgtatcgccagtattaccttgcaccgctggagcattgtgtaacgctgatgcagcagtttcctcttacggaaagtgggccatatgcccgccccggggggatggctgactatatgctggaaacagtgtcgtatgcggcgcggttgtcgaaaagctacatgctgccagttggcgcaccgccggaagagcaggcggcgcagagcgcggcctggaatgcggtggtggtctatgcggctatgttgccttcgcttgagtatctttgtcatcttcacgttgagctggagaacggtaaacgctggtttccgttactggatgcgcctccagaaccttatcgctttcgttttgaaccggaacagtctccggaacggctgcaaagttttggcgcaaagctggcgtggaagattattcctcctgaagcgattggctggctgagtagctggccggaggccatcaagaccctgtcaacgtacctgactggcttccgggcgcagtcgggtgtggtcaatgccattgtgtctgaggctatacgcctcactgccggagcgccggaaagtgagacactggttgcaccggcggcaatagttccagtcctggctgaatcattgcagggtgattcgctgctgtccggattagctgatgatgtgccagagctggttgcgtcgtactccgaagaggaaaaccttctggccgcagaatctgtttcgctgctggatgttggccagctatccccggatgggcaagaggaaccggatgatactgatgcattgctggtgatgatgggctttgccagcgctgatgcagcagaaaccggagaaatcacgccatccgccgagttgaacgatcccggagaggcattctggcaatggttggtcacaggatgtcgtgccggtagtctggttccgaacaaacctgacgggcggattcacttggttgccggttacgtgtttctgcgtgcgccggggatttttcaccagtatctgacggagacgaacgcgccgggagaggataaggctcggcttcagaaagcgtttgagcggctgggccatcaccggcaggataatggcacgatgtatacctgccagttgtaccagaacgagcaacgggaagggcgctttcagaaactgagcggctacctggtacttgccagcaaggtctatgacagcgataacaatccaggggataacccgttattgattgttatataa

SEQ ID NO: 266814 - DNA, 1362 bp, Klebsiella pneumoniae
atgatgaaagagaaaaaaacatccctcaccaataatgagaatgaattcgatataacggttttcccctcaattgtggaaaagagcaaataccaagactcactgctcgccagttccaccgacgccagcaaggctctagaggcactgacgaagaactctggcgtggatgcactcctcaaaaaccatgattcactgtttgccggaaccacagccgccagcaaggcattcgaggcaatgacacgcaactccgttgcgaacactttcctcaaaaaccatgattcactgcttgccggttccactgccgccagcaaagcattcgaggcaatgacacgcaactccgttgcgaacactttcctcaaaaaccatgattcactgcttgccggttccactgccgccagcaaggcattcgaggcaatgacacgcaactccgttgcgaacactttcctcaaaaaccatgattcactgcttgccggttccactgccgccagcaaggcattcgaggcaatgacacgcaactctgttgcgaacactttcctcaaaaaccatgattcactgcttgccggttccactgccgccagcaagacattcgaggcaatgacacgcaactccgttgtgaacactttcctcaaaaaccatgattcactgtttgccagctccactgccgccagcaaggcattcgaggcaatgacgcggaactctggtgtggccactcttttcacaaagcaaagagaatcatttacccgggattattttactacgagtattactcaacacttagataaattaaatccaaccgagattcaaaaactacaggaagctgctattctattttcgcgctcacctcaaggcgcagccgttattgcaaccaatatcaatacagtagaaataacagagcccgacgcattaacaaaattaaaaaaatacatcgaagaaagccctgttacttcacattttaggaaattacctttattagtacagcttatcatcatttatcttgtaatgactatgtcctctgttatttccgataaaaacaaagagttagcaatttatttaattgaagaatcacaacaatattttagcaaagcagtatcaccaaacgcccatgttaagaaattgacaaaacagttacccaatgaaattgatgtaagtacattaaaacatatcagaataattaccggcgaaaacgtccgattacggaatagaccatcaatgcatggtgatgtattggtcacgttgcaaaaatacacacctgttatcgttatcgataaaagtgatagaaaatggctatatatacagctatcacttggagaacaaaagatctatggctgggtcaatcgttcctataccaaagcattaaatcactaa

SEQ ID NO: 266815 - DNA, 936 bp, Klebsiella pneumoniae
atgacgaagaaaactaccaaccgcaaatcagccccacggcaggatttgttccagaccgtaaccgacaagattattacggcgctggagaacgggacgacgccctggcgtaaagcgtggcaaaccgggaaggagggtttgcctgctaatgccatcactggccggaactacagcggtattaacgtgatgctgttatggatcgatgccgccgataagggatttcactcaaatcgctggctgaccttcaaacaggcgctgaatgcaggaggtaatgtccggaaaggtgaaaaatcgacgctggtgacgctgtttaaaccgttccagaaagaagctacggataacagcggcaagccggtgtttgatgagaacggtgaggtggtcatgcgggatcgctgttttatgaccagcttccacctcttcaacgttgagcagtgtgaaaacctgcccgataaactttgcccggcaataccggttttgcccgacgtggaacgtattacccgggcagaacagatagcaacctgtagcggcgtgtctgtgatacatcgtcatcaggatcgtgcgtattaccgcccgggtgttgaccacattatgatgccggaagccgctcagtttgattcggcggaagactattacagtacgttgttgcatgagctggtgcattccaccggtcatgcttcacggctggcacgtgaaggcacagtttctacgtcgcagaagtttggcgatccaatttatggatttgaagagctcatcgcggagatgggatcagcctttctgtgtgctgaacttggcattaacggcgacttgcaacatgacagctatatagcgtcgtggctgcaaacgctgaaggaagacaaccgcgctgtatttcgtgccgctcgctttgcccgggaagcgtttgaatacctggtgttgcgtgagcaagcgctggcagcataa

SEQ ID NO: 266816 - DNA, 336 bp, Klebsiella pneumoniae
atgacagaccagataaatagcgtattttctgctgaagatttatgcgagctggcaaaacttgaaggtgatttgttggttgtagccgcattcgaacgtctggatatcggaacacaaccggatgaggataacttcacggataatcagtggatgattgccagtctggcccgaacttttgcacggggatgtgctggcgatttgccgcgttatgcgcacccttcatgtaaagctcttttcgatgaggttatagagcttgccagaacagtatgtccgggagcctgggattattttttcaaggcaggcctggatgaatcgttagctatggctgcgatggactga

SEQ ID NO: 266817 - DNA, 399 bp, Klebsiella pneumoniae
atggataacgtcgcgatgatcaacatgcagcccgttccctttggcctggttcttctgaaatatctgcatactccacgtcgtgtggctccgttttttgcgtgggctaagcatctgggtgatgaatatgaagaaaccagccggtgggaaggtcgggcgttgtcaaacaacggattctatcttgcccccaactcccgtctgacttatggcgtcagtgtggtcgggaatggctatgaaggcaccatgacggcagaagcttttggtatcactctgtcgttgtttgccctcgggcagatcgccaatacgacggaagaggacagcgatatcctgctttactacgctttgcgtgattatgcgttggatcactctgaatcggccgaaattatggccgcgatagactga

SEQ ID NO: 266818 - DNA, 195 bp, Klebsiella pneumoniae
atgaaaattcagcttgaactgaccgatgacgaagctctggcattgtcgcatctgactcaaagtctgacatggaacacgatgcgtgactttgtcatgactaacagcgaatgcgatgaaatgcttgatgcggtccggaaattagaaagaacgttgacggaacacggcttcaggcaccagtacggttgtcttgcttaa

SEQ ID NO: 266819 - DNA, 282 bp, Klebsiella pneumoniae
atgactcatcgcttatctctggcatttacgcctgtttctatcacgctcccggcctgggaacacgctattgaagtgtttgatttttcccagtgggaacgtcggcaatttgcgctgattaaagcttcgcaggatgcctggaaccatcgctcagatcccgacattcagcaggtgacattttcgctggcgttgtttgtccgtctgggaggcgaaactgccgaacggactcaaaactttgtcgccagatacgttgacgatgcactggttgtaaccctaggagaatga

SEQ ID NO: 266820 - DNA, 891 bp, Klebsiella pneumoniae
atgtcgaaattaagtaagcagctggttacgctggcaagacagggaggtggtgggttcaagactatcgcagatcgttcaaagatcgcctcccgtgtagcggagagaatagctaaattaaatattcagatccgggatgtgaagcatataaaaaccaatcatattgagctgtatgtcaagagtcgtcaggccgaagggatatctaaaagaacaatgcagaatgagatggctgcaatcagaaatatgctgaccgttgccggtcggaaaaaacttgccgaccctggtcatgaaaaattaagtaattcagccctcggattagcagacgccagtcgtgacggtactaaagtcgcaattagtagcgaacgctatctcgcagcgttcgcttattcagataagcaaaacgttggcgtagcagcggcaatgcaggttgctcgttgttttggcctgaggacagaagaagcggtgcaatctgttaaatcattaaaaacctggcaacgtgcattatcgcgtggtgatgatcgtgtcaggatcgtatttggtacaaaaggaggacgaccaagagatacgacggttatagatcgcgataaaatgctaagtgctgttaatcatgctctgaaagttgctgctgaacagaatggtaagctggttgataaacctgatctgaaatcagcaattgatcgttatcggaatattgtcagagatgcgggattagtgggtaaatatgcgcctcatagtctgcgatatgcctgggcgggtgaagcgatggaatatcataaaagcaaggggatgagtgacgatgaggcaaaagcaatggtgtctatggatctgggacacggtgatggccgggggcgctatattgaacgtgtctataataaacctgatgttgaggaataa

SEQ ID NO: 266821 - DNA, 609 bp, Klebsiella pneumoniae
atgatatattacggaaaagtagtcaaatatctatctaaaggatatggttttattgaaggtattccatttacgacaagtaattttgttcagcgtgatcttatggtgttttttcatattagagatattaagagtgaaaactcccgaaatctaattaaaaataataattacgatgatttttatttttggtactcaattaaaaaaacggtaaaaggaatttcagttaacaatatatggagttgttatactgatattcctgatgaagaaataactcctttactgaaagggattgaatttcattctgatagatatgaatcaaaaaatggattgtgtttattagaagcaaaacaagtaatgcattacattgagattttcaagagtgaaaaatgtacggagcaaaaacacgtcaatgattatatagatcgcaatggtttatggcaccaatttggtgaaatggctagctataatgatcacggggaatataaaaatataccgggaataaccccagcattttatgggatagtaggccagattataagaatgaaaaaaggtaatggaaacccattgaccgcatctaggaaaatgtctgatagtcctattatattaatgtga

SEQ ID NO: 266822 - DNA, 522 bp, Klebsiella pneumoniae
atgactgattttcaatggttggtatccacttttactgttattccctgcatcctcactgcaggggtgacttggttagtaacaaaacaaaaaaataaaaaggattataaaaaactgattgatttcgctagcacatcacatcgctcagcactcctatcttttgagcagatgccattaatgatgtgcgttcattatcttaaggaagggaattctatgatgatgtgtcacggtatacaggccggggtcgaggccattgctggcttggtgaaggatgaatatgcaaaagaagtatcagatgttattaatgcaacgcctggtttattagaaactatttacagtaaggctgagggatatttgcaggaagctgcacgctacgaggaagttgcaaataaagcatacaatgacagaaaggaaagaggaattaagctaccggtagatgacatagatactttggaatctctccgcgaagaaataagagaggagggaaagaaattatatacggccctcacaactgatgatgcataa

SEQ ID NO: 266823 - DNA, 513 bp, Klebsiella pneumoniae
atgggggatttaggttggctattaagcgtgtttaccgtagttccttgcgttattgccagcggtgttatgtggtatgttatgcagcgccgcatggtaggaacccgtgcaatgaatgagcgactatttgcagagcgctatatagatcgggaagaaaagttaatgcttcagtcattgcgttactacgtggaggccgcaggtgcagcagaaaccgcaggtgtacaaaatagtatcatccaattatgcgaagtaatagactcggagaaagctactggagccgaaaatttgaaggaagtagcgacgggtggcgcgtggcatctggctaaacgggctgaaaatctggtaatggaagcggcgaagatggctactctagcgaaggcgactcgtgaggagcgtattaagttggtggctaaaattccagtggatcgcgatgaagctctaaacgctatttatgaggaatgcgcggcgctacacgataaagtgatcgctgcttttaatgtagagtatgctaggtga

SEQ ID NO: 266824 - DNA, 1530 bp, Klebsiella pneumoniae
atgacggctgacagctatctggaaatggtgctggtctttatgggctggctcatcaataacgcgttgtggatgattattaccaccacagggatttttgctattccgctggcgtttaaaatcgccggtgtctggctgaaagttcgggaagagggggatgatgaagggaataagggggcgctggcgctgccgagaatggagcacgttctgtatgtcgcgtttgtggtgatcatgttctgtgcgatgccgatgcaggatatcgatatcacaacgatgaagtttgatcgcacccgttctgctcaatgtggcgtgaatgtacctaaaccggatgaatccggctatgggccgctaattgcagagttcaacggccagacggcgaaaatcccggcgtggtggtatctggtgcattccctgtccaaaggggtgactcatgcggccatcgcctcaatcccctgcgggaatgacttccggttgctacgttttgaggttcagcacaccaagttgatcgatcccattatccgggaggaagttcaggagtttgccagccagtgctatgcgaagtcgtattacaaactgaagaacagtaatccgaaactgaccgccactacgattgactcagttggttggattggttccgattattttctcaatacttcagggtactacgactattacacctcaacgtcgccgcgagctgcgtggccgtatagtgaaagccgggatagtggatatcccaatgttggccgtggcggctatccaacctgtaaagactggtggagtgcatcaagtaaggggctgaaaagtcgtctactggaaagctttgataccaggacggtcaatatgatgaaggcaaaatcccctggtaactgggaagaaagtctgttgcgctggctggtgagtccacagaacacgcacctgtctggcgggggcgatacttacatgatgggtaatcagcaggggcagggaacgggcatcgataccggcattaagcaggcgctgagcggtcttggtgcgctttctgctcaggtgacgcagctcccggcgtttgatgcccttcggcaggcactgccgatggttcatgccgttttgctgatggctatcgtggtgtgtatcccactggtcatgttgttcggggcttacgatccgaaagtggtggttaccattacttttgcgatgtttgcgctgatatttgtgccgttctggtgggagcttggcggctggctggatgacaagctcattgagctgatgtatgccagctacaaaggatacacgaacagctttaataactggcttgccagtaccggctcggatggttggatcatgaatctggtgctgggggcgatgtatgtggtgctgccgatgttctggtttggggctgtaggttggagtggtgctcagataggtgccgttgtttcgtctgcgattgcaaaagcatcggaaggatcgcaacaagcaggggctaaaggtcctggagtggcaggtgaagtggtaaaaactgttgctacgaaaggtgcttcggctgggaaaaaataa

SEQ ID NO: 266825 - DNA, 333 bp, Klebsiella pneumoniae
atggacgctattcgtaaaccactctggcagcgggtattacgggtctcgctgttttgtgttgtcgccattctggccctcggaggttttagcttcacgctgctgcattttgtaggtagcgaaacggaactgaggacgtggctgcttcagataaaaacgccgcttctgttctggcggctggcgctatacacggttatcacgtttttctggttgcaccgtgtccggggctatttcctgcgtcactgtacccggcgctttcaggtttaccggctggagataatgacggtttgcctgtttgtgatgattgaaatcaccagttcgcgttgggggatgtga

SEQ ID NO: 266826 - DNA, 1416 bp, Klebsiella pneumoniae
atgacgaataaacgcatagtttttgcaggcgctctgatgggatgccttacgctgagccttccggcccgggcggttttcgatctggataatgatgtgattaacaccgattccagtaaggggttgaaaggagctgttaacgataacctcttttatactatcggcggtgggaccgtgatatcgcagccgcccagtaataacaatatggaaaaactgggcatggggattagctggaacagcgatctaatgtgcggcaattttgacattaatacgaccgtcaaaaaccagctaaatggcgtgaccagcggctttaaggacatgatgagtaacgtgatcagtagtgccactggcgcggtagcaagtttgcctgcgatgatcatccagcgggcaaacccgggcttgtatgaactgctgactaacggtgtgcttcaggccaatgtttcgtttgataaagcccagctcaattgtcagaacatgtcgaagaaaatggcggattacaccatgtccagccagtggacgcaggcggcgataggggaagagttcaaaaatatcgtctccacgacgccggatgcggtggcggcggataaccagctaaaaacctccaccggcaaagagggggtaaagtggattggtgggcaaaaacgaggtggcagcggccagcctgcgattaaacccacgcatgacctggcaaaagcgggcttcaatattctgaataagcaatcagttaccagtagtggcagcgtcagcggatcggcctgtaatggttctttgtgcaagaagtataagaccagcgaagaagcggcggaagccgttgttaaagtgctgggggacagggcgattcgtacctgttccgaggccagcgattgcagcagcggcggagtggaaaacgaacctggtgcatcaactgccggcgtcggtttttcaccgatgctggaagagactacgcaggagaatctggaaatccttgtgaagctggttaacggaaacctgacgcccaatgcaactaatctggcgacgctgaaaacaggggatatggtcgtctctcgcggtgttattcaggcgctgaaggatgacccggataatgcagctttggtacagcgccttgccagcgaactggcgatgtcagagaccatttctaccgcgctgggtatgcgccggatgctgatggccggtcagtcggaaccgaacgcggcggatcagacaatggcgcttgatgagtccgaccgtcgtttggagttcctcgaccgtgaggtgctggcgctgaagaatgaaatggagatccgcaaagcaatcagcaacaactccattcttgtcaccctgacgcgccaggaaagccgcgaggcagatcatggtctgcgtcaatcggtgcagcagaatgatgatgccatgcagaacctgaatcagaaggtggaggaataa

SEQ ID NO: 266827 - DNA, 951 bp, Klebsiella pneumoniae
atgaaactatttcgaccacaccggctggggattacactgatgttgggttgcgcagttcaaccctttgcggccggagcgattaactccgcgcagatcattgccagcgcgttgtccccccaatgtctggaatacaagattgtcggtatttgctactggctgctttgtactccttatggctgcacggtgaagacttccaccaaagtgcgtcactacattcccaatgccgtagtctccagctacaaccagacgggccgtaacccgtggacggaaatgtcgtttctgggaaccggcctttccggtattgccgaagggggaggcgcgaacgagcagaaacgcgttgagcggaaagataacctgcaatttaaaaatacggatgttatcggccatccggctctggccgctcccgtcttcaataagttcatggggcagatgggatatacctgttccagctctgccacggcgttgatgccgtatcttctcagtacccttgatgcggtgatgtggcgctccggcctgccggagtcgttttatccggaagcgctgacgcccgggctgcgagaaatcggctccacaactggcggcaatatgtggggtaacgtctatccccgaagcgggtttgttactcaggttgatgactataaagcggcggcggttgtcgcgcagcgtgcggcggatgttgtcacccgtaccgggcaaatacacgtttatcaacccatgacggccagtgccagtcctggttactggcctccctcgccggtcacggaaaatactggtacccgcaatcacaaatggcagcagctcacgccgtcgctgtccacatcctgcgcggcttttccggacagccccaatcccgtttcaaccgatggcaattacgcctgggggttatggcaaccctacagctgctgtaagcgtcgtggtcagacgttcctctacagcatcgattatcaataa

SEQ ID NO: 266828 - DNA, 399 bp, Klebsiella pneumoniae
atgacaccttcaaagttcttgatcccgctgctggccgttgctgttcagacaccggcagcgaccattgtctacaccgacagccatcatcccccattaaatgcttccagcggtcaggtgatttacctggatgccccggataatgtacaacgccagctgtttggtgagttgcctgctgatccagttcaggcggaacaggttgcaaaaaccatcatccagtcaccggactggcagcaaaaacagcaacaaatcgggcaggcgtaccagggcgtactacaggcatacagcctgaagctggcgaagtatcccgccgtggtgttcgacgaccgttacgtggtttacggcacggcggatgttgcagtagctgaagcccgccttgctgaatttcagggggagcggtga

SEQ ID NO: 266829 - DNA, 681 bp, Klebsiella pneumoniae
gtgagagatcgcaatggattcagagatataattagtcaaaaaaataatgaagcaaaaatttctaggttagaggagcgaatacagcaggcatggtccatttatcatggatcttttgtagataataaagatacatttatcgaagcgttagttagtatattagattgtgaattaaacgatgtggatgttagaagttttgactctatgatttcaatattgcaagacttcaattatccggttgaatcttatatcaaaaagtatagtgaaatattaggggctacacgagatttttcagatgcaagaagtaggatgattctacgggatattaggagtaaacctcttcgtgaaaagattaatgaattaattgagggtggaaaaaaccatactattgacgaagttgcggaagcattgatgaagtcaaatggttgggattctgatgtaattgattatctatcacaagtatcagtggaggaacttgttggttggatgaagtcgaatccaattgaattaatcgataaaattagatatggtttgctcaaatttagtaatgtgcaatcatctgatccaaaatattcaatcataaccaaaaatgtcaccgctgctttaaaaataattgccagtgaaaatgacttcaatagatttagaatagagaatatgtttggtattaagttggacggcgtttaa

SEQ ID NO: 266830 - DNA, 1029 bp, Klebsiella pneumoniae
gtgattaatttagaacaatcattagaagcatttgtcaaatctgaacaccgtgtgatggttattaaaggcgattggggtgttgggaaaacatatgcttggaataagtatatagaaactcacggtggtagtttgactcaaattgcatattcttatatatctctttttgggaagaattctcttcaagatattaagaagagtatttttcattccgcgaaagcgatcagttcaaaagaacaggtcgaaaatgagatgagaaaacagttagaaactgctagtagtctatttaatcatgtgccttggttaaaagataatttatttgtgacttatgtaaatcaggcttttttctggattaaaaaagctgttgctaaaattggagttgtgtctcggcacgctgattcaattccatacgtgaacaaagcactaggtgtagtttctactcttgagtatgctttggttaataattatattatttgctttgatgatctggaaagaaaggggaacggtctaagtgtaaaggatatcatgggtttaattgatgagttagcacaaaggaaaaattgtaaaataattcttgtctttaatgaagattctctttcagacgaaaatgataaaaaaacatttaaagaatatagggagaagattgttgacctagaattaaaatatgatcctgtcgtaaaggataattttgattgtgtttttgcaaaaagttattccgattatgagtgtatatttaatgtttctgataagttaaatattaggaacattagagtgctaaaaaaaataaggaatgtaattaattccttcgaaccttttttatctgatgctgacaatttggtccgaaatgagtttgtattgcatgtaacattactttgctggagttactacacccacttagacgatctttcttatgaagagtttcggagattattaagggataagtcgtggttgagttttgctggtaaaaaagaaaatgaatacacatcagcagaaaagttatacgccagtctagcaagttctttagatatgtga

SEQ ID NO: 266831 - DNA, 384 bp, Klebsiella pneumoniae
atgatgcggttcagatccactgtgctggatttagtggacggtaatatttccagtaccggcgtgttgtttgatgcgccgccacagggcaatccgcgaatcagccagcaccatcatgcgcaactggcggaattatgccgccagacccgtcagcgggtaggggagaaggcgacatttacttattcaccccaccgcgtggccgggcataactgcctggccgttcaggtggtgggtaagacgggaacggttaacctgctgctgacggttactggcagtctgcgctggcctacgatggatgattatgggcatggcgtgcgctggtatatcaatatgcctgatgctgtggatgtggtttatttggttagagagttagctaatcttatctga

SEQ ID NO: 266832 - DNA, 2769 bp, Klebsiella pneumoniae
atgttcagtttattcaccaaaaaacagccgcagccggtggacgatgaatcggtgctgccgtcacagaaaaagagtggcaggctgacgcaggacggcgtgcgctcgctgtaccccaataacgcctcgtttatcgatttcctgccgtgggtggaatacctgccggaaagccagagcctgctgctcgatgatggtttttcggtgggcgctgtgtttgaagtggtgccggtgggaaccgaagggcgcaccggcgaacgcctggaagagatccgcgatatcgttgaagatgcgctccaggacagctttgacgagcgggacagccatccgtgggtcgttcagttcttctgtcaggatgaaactgatgtgacagagtacatcgataagctgcgcggctatgtcaaaccgtgggcgcagggaacggcatttaccgccgcgtatctgcatgagatggaacgtcacatgcgcggcatcgccgtgccgaaaggtctgtttatcgataaagctatcactggcgcaccgtggcgcggccagcagcgtcgtacccggatggtgatttatcgctatgtgaacccaggagtgaatgagccatattccccggaagagcaactgaatcaggtctgcgcgcgattatcttcggcgctggccggggcggggatagtgaccgcaaggcaaaatggcgagcagatccacgcctggttgctgcgctggtttaaccccgaacctgactgggtggataaggacacgctatacagcacggcagcgcatgttgacacccgcaacggtgagctgccagtgcttaacgatttcagcgagaccctgatgtttacgcctccgcgatcagatgtagagaatggtgtgtggtggttcgatgagcggccgcataaagccgtcagcatcgatcgcattcgtcgtgccccctcggtcggccaccttaccggcgaaactcgtaaaggggagaatatcaacgcgctgatggatttgctgccggaagggacagtgatttccctgacgctggtcgtgcagccgcaggatgtgctggaagagcgcttcaaccatttggcgaaaaacgccattggcgagaataccgaatccgaacgtgtgcgagccgatgccgatacggctaaaagctatctgggtgaacggcacaaactgtaccgcgccagcatgaccttctttctctccggggcgtcgctaaaagtcctcaacagccgccagcgcgatctgacggccattcttctgaacgccgggttgcagccggtgaaaccggaatacgacgtcgcgccgctgaacggttacctccgggcgctgccgatgtgttttaatccgacgctggataagaagaactggtacacccgcctgacatttgttcagcatatggcaaatatgctgccggtatttggccgtgacactggcaccggccatccgggatttaccttctttaaccggggcggtgcgccgctgacgttcgatccgcttaacagcgccgaccgttccaaaaatgcgcatctggtcctgtttggcccgaccggttccggtaagtcggcgacgcttaacagcctgtttgcccagttgatggcgattcaccggccacgtctgtttattgctgaagcgggtaactcgtttggcctgtttgccgactactgcgcggagctggagctgtcggtgaacaaagtcagcatcaaaccgggctgtggtatttcgctggccccgttcgccgatgcatacaagctgattgaagcgccggtgaaaaccgttgatgaaagcgagctgagtgaccgtatagaggtagatgaaacggacgatggcgatgcggaggaagagcgcgatattctgggtgagctggagattgtggcgcgtctgatggtaaccggtggagaagcaaaggaagaggcgcggctggaacgtgccgaccggggcatgatgcgcgaggcaatcttggccggggcacgtaaagcctggaatgaagaacggcagatgatcaccgccgaccttcaggatgcgttttacgctttcgcgaaggatgagtctcgccccgaggttcgtcgcgaccgggcgcagaacatgggcgaatcgctgggcgtatttatgcagggctttctgggtgagttgtttaatcgccctggacagaactggccggaagcggatgtcacgctgattgacctaggcacactggcgcgtgaaggctatgaagcaccgctggcagtggcctatacctcactggttaataccatcaacaatatcgccgaacgtgaccagtttctggaccgggagatcgtcttcccgactgatgaggcgcatatgatcaccacgaacccgctactggccccgtacgtggttaaggtggtgaagatgtggcgtaagctcggcacgtggttatggctggcaacacagaacctggaagacttcccggccacggccaaaaaaatgctcaatatgattgagtggtggctgtgtctggtgatgccgccggaagaggttgaagagatagctcgctttaaaaagctcaccgccgagcaaaaagcgatgctgctctccgcgaccaaaacgccgcgctgttacaccgaaggggtagtgctggcaagccgtatcgaggcgctgttccgtgctgtgccgccgagtctctatctggctctgggtatgacggagaaggatgagaaggcggcacgtcgggcgctgatgattgagcacggtatcagcgagctggatgctgcgaagcgtattgcgcaccaactcgatatcgcccgtgggattgccacgaaggaggcagcatga

SEQ ID NO: 266833 - DNA, 402 bp, Klebsiella pneumoniae
atgaaaggatacggtttattcatgctggtcgcgttgttgctaagcggttgcagtacctccaaagatgaaatgctgccgcccggcgacagtaccatgctggatatgtggcagaacaaagccagcagcgcccggaacacgacagaagcccggagcgtgctgcgtcgggggctgaaagatgcggatctggcgacccatcagtcgctggaagagagctatacccgcgatgcgcacaatgaaattcagcagctttttccgcgcctgcccaatccggatatggtgatttatatctacccgcatatggcgggaaatgaaccagcgccagtgccgggatacagctcggtgttctctttttacagccgggtacagtatgcgctgccgggtgaacgattggaggcactctga

SEQ ID NO: 266834 - DNA, 1467 bp, Klebsiella pneumoniae
atgcagattaagtcgaataccctgctgaaggttattgtgccggtggtgctgttgtcggcagtcatgatcggcgtgaaatcctgtggaggttcgaaacagacacaggattcggcggataataccactgttgccgatctgacccaggaagaactgagcatcctcggcatcgagggcgatacgccgcaggatacgctgcgtacgctggtcgggcgtattaaaacgatccagaccaatcaggagaatctggagaaacagaatgccgcgttggccgaagaaaatgcccggttgcaaaataagggaaataacgtggatggccgtattaatgatgcggttaacgccgtcaaacaggaaagtacccaggcacagcaaaaacttcaggccgagcagcagcggctggctggcctgctggaatcattgaaaaatacggttcccggttcgggggcaggtagcaatactcccgcaggcagtgacttaccggtagggctggggctggaagatatcgggcaggctgaaacggtggcgcaaggcacggtctggattgaaccgcaggatggtgtgcaactggatcgtaacggtaaaccggtgaccggcgcggctgccgcgaccaatggcaccggcacattccagttccccacggcgtttggtgggctgaatgataacgagatcacccgccagaaagcggaactggatcgtgctgcgaaaaaccagcagagcatcgaagaaaccgaactgcccgtctataccctgccggagaactccacgctggtcggtagccaggccatgactgcattgctgggacgtgtgccgattgatggcaaagtcaccgatccctatcccttcaaggtacttatcggtaaagagaacctgaccgccaacggcgtcgagttgccggatgttgaaggcgctatcgtgtccggtacggccactggtgactgggttttgtcctgtgtacgtggtgacgttcactccattacgtttattttcactgacggcacggtacgcacagtgccgcagtcggcaaaatccagcgatggcagtaacaggaaatccaatggcggcagtattggctggctgtccgatgagcacggcattccctgcctttccggcgaccgtaaaaccaacgctgcaacctatctccctacgctgtttgcactctctgccgccggtgccgcatcggacgcgatggccgagagtcagaccacgacaaccactgacgggacatctatcaccagtacgctgaccggcagtgccggacaggctgcgctggggaaagcgttatcaggtggcacgaacgagctggccgactgggtgaaagcgcgatacggccagatgtttgatgcgatttacgttcctcctggcgcgaatgtggccgtgcatatctcccgccagatcccgattgattacgaagagaagggccgcaaggtcaaatacgattttgatgtcagccagcaacacgagctggattaa

SEQ ID NO: 266835 - DNA, 876 bp, Klebsiella pneumoniae
atgagtttacgacgatttttgttgtcactggcctgtcttgccgcattaccagcgcaggcggttgagctggtgaagtgggagcgtattccgctgccggtaaccctgcatgtcgggcaggagcgcattgtttttgtgaaccgcaatgtgcgcgtgggatttccgcctgagctgaaggggaaattgcgcgtacaaagtaccggcggtgcggtgtacctgcaacccgggtcactgtttgcccgtacccgcctggtgcttcaggatgtggagaacggcgagatgatcctgctggatatcagcgccgaagagggtaaaaacgtactggagccggtaagcctggtgtatcagggggaagtctccagctcgacgggaaacggtgatgttgcaacgaccgatagcaaagcctcgatagttggcgaacggcagtccacatcgaaaccgaaagagaaaaaatccaccacgccattgccggtagccttaacccgctatgccgcgcaaagcctgtacgcaccgtcgcgcacgattgagccgctgcccggtgtacattccatttcgctggcgttgtcggacaggcttacgtcattgctgccgtccgagtctgttgaggtgaaaccgctggccgcatggggattgcagggctacagcgtggtggcgctaaccctgcgtaatcagcgtgcggagaaagtggttcttgatccgcgccgtcttcagggcaatttctacagcgcgacattccagcatcgctggctgggcgcgagcggaacgccggaagataccacgacggtgtatctggtaaccaaagggcgtcctgatgccgcgtttcttcctgagccagtgaaggcgaaaacaggcaaaggagggaagggcgatgcagattaa

SEQ ID NO: 266836 - DNA, 657 bp, Klebsiella pneumoniae
atgagtaagtttaaaaatgccctgaatgcccgggacaatcatatctggacgctccgtactgcgtgtggggttatgttggtactgttagtgttgtccatgcttggctggatgatgtctccgcgcaatctgaccattcacaatcctcccgatctccgctccggcagctcccgtccgtggtgggagatccctccctcaacggtgtatgccttcagcttttatattttccagcagttaaacagttggccgaaggatggcgacgttgattatccgtatcgcatcgagacactgtcggcctacctgacgccgacctgtaaggaactgctgcataaggatgcgaagcagcgtaaggacctgggggaatcacgcgaccgcgtgcgtggtgtgtcggagatccctgaacggggctaccgggatgacagcgtcaccattattgaccgcgataactggcaggttcgtctggatctggttaccgatgaatatgttaactcagagccggttaaacgctcactggtgcgctatccgctgaaggtggtgcgctgggacaagaatccggaggctaacccgtttggtctggcgctggattgtctctcggaagcgccgcagcgtctggaagcggccccggtggttaaggaagagaaaaagggagtgtttaactga

SEQ ID NO: 266837 - DNA, 381 bp, Klebsiella pneumoniae
atggcgactatcgaatttatgcctgacaggctgaatgctgagccggtggtgttccgtggcttcaccacgccggaactgggatttaccgcgctgttcagcctactgggcggcctcgtggtcgccataccggttctgccatttctcggctggatagcctttccgaccgtgtcgctgttgatgccgctggtcacgattatttttggcggcaggttaatggcgcgttttaagcgcggcaagccggaaaactacctctatcgcaggctggatctgctgttaagccactcaggcctgggaacaaaagggctgatacaacacagccaagtactggcgttgcgccgtctgcgtcctgtggttcgccgtcaggaggccgttcatgagtaa

SEQ ID NO: 266838 - DNA, 372 bp, Klebsiella pneumoniae
atgttttgctctgcattatcttctctgcgtttttcttttcgtctctggtgtgcgcgggttctggccgttgctctgaccggaatttctgctgcacacgcggggttacccactgttgaaggtccgaaaagcagtaccgacagttctttttacggtcagatctccggatatctcaatgacggtatcgtgctgggcggattaattcttgcggcggttgccatgctggccgtcggtaacgccattattgcgacctttgccgaagtccgtgacgggaaatcaacctgggctaaattcgggatgctttgtgtcgtgggggtgatcctgatcgtcgttgttatctggctggcgtctaaggccgcaacggttctgctttaa

SEQ ID NO: 266839 - DNA, 237 bp, Klebsiella pneumoniae
gtgaatgatgcccagaccaacgcatttaaagcggcaagtggcaacgccgatcccgcactgctgagcaaagtgtttattggtgcgctgattgccctgctgattttgtgggtgggatgggggtttctgcatgtttatcgggggtacgcagcaggtcatatcaaagagcaggcattggtgcgttttgccatccgctcagtccttctcattattatcgctatctatctcttcgccagctaa

SEQ ID NO: 266840 - DNA, 312 bp, Klebsiella pneumoniae
atgcgcatgacacaaccccgggcatggtgcctgttgggttttttgctggtttcgggcgttcaggccgccgagtctgacgagctggcgctggtaatgaagcaactggatcaagtgcaggccgcactggaacgcgcccgtgttgtcgccgttcaggatgggcagaacgggcgcttctatttcgattacctacgggcaacgcaggatatcaaagcgattcgccaggggattggtatctacctggaaccttcccgcgcccagcccgtcccttcggcctctctcaccggtcagtaccggatggagcgtcgcccgtga

SEQ ID NO: 266841 - DNA, 600 bp, Klebsiella pneumoniae
atggattacttagaacagaaagcatcattgttatatttcaatctaaccaaacacgcttattacctcggtgcattaagttggctacatgttcaagatagaatgctcgccctaagtgaaatgtgtgagccggaagacccgacctatatagctgccagtaggattctttcattagaggggtatgacggcgaaaacgaatcctggagagagtcggaccgaaataatgaacaggactctaatgctggtcaaagaagatctagtgggagagtatatcctgatgatgatgggttttatcattttttatcacgactttcgaagaccaaagattgggagtttcatcaagctgatgctgatttttttccatcggtcccacatgggcattacaaaggaagaaatcaaccaaagcttgatgcatacctcggttgggtttacaaaaattcagctcagattgaccgtttaagtcgagatgcaatcgttgagttatggaatgacgcttcttttagaaagtttgcaaaaatttcaattacttggtttatggagcataaccctaatttcaactggcgagtctcagacccaatgttgttacctagaataagaaggtga

SEQ ID NO: 266842 - DNA, 270 bp, Klebsiella pneumoniae
atgaaacaacgttatcgggttgaagcggttatggcgtcttcaaagcaaaataagctgaaagtcccgcgtgatgtgatggatgttttgtgtgggcaggattgctcgtcacttcagatcccggaaattattgagcgtctgacttcgctgggttatcgcccgagatatgaagccaccgctgatacgctcacggatattgtcactctgtggatttgggtgggacaggaagaaatgttgctgaactgccagatggagccgctggcggtgcattaa

SEQ ID NO: 266843 - DNA, 2085 bp, Klebsiella pneumoniae
atgagcgaccgctatgttattgaagccatgctgcggcctgcggtggagctgaacaccgccgttgttgccgcctgcgccagctatatctgcgtgacggctccgtgggcggtggcgctggcaccttcagtcagctatgtcacggcggcagggtttgccgtgctgtcggtgaaacggactcagcaggggttacgggtattgcgttaccggcgcaatatccggcgtttgccgcgttatgttgtgacaagtagcgaggtgccggtgagcaatcagcggttatttctggggaaggggtttatgtgggagcaaaagcatacccagcgtctgcttgataccctgcgcccggaagttgcggggtatgtgaatcccccggcgctgtaccaggcagcacgtcgttttgaacagcactatgaacatcgctttcctggattgtgcaggctgctggcccgtgattcggctctgaaccccgttcgaccattgccgccggtcggcggccatccggcattgcacggcattgagccggatgaggtcaatgtctctatgagtctgggtgagcgcgtcgggcatatgctggttctcggcaccacgcgcgtcgggaaaactcgcctcgccgagctgctgatcactcaggatattcgtcgcggcaacgtcaccattgtttttgatccgaaaggcgatgccgatttgctgaagcgaatgtatgccgaagcgcaccgcgcaggccgcgccggtgaatttcatgttttccatctgggctggccggatatcagcgcccgttacaacgcggtagggcgctttggtcgtatttcggaagtggcttcgcgtgtcgctggtcagctcagcagtgaaggcaacagcgccgcgtttaaagagttcgcctggcgtttcgttaatattattgcccgggcgctggtcgcgctgggacaacgtccggactttggcctgatccagcgttacgtgaacaatattggcgatctgtttgagacctatgcggaaacctggatggtgaagcacactccggcactgtggcagcaggtggagaatctggcgcaaattctggatgaacgcgatatccccagacatatggaaggccgttcgctgcgtgtggtggcgatagagcaggtactgaacagcgacgaggggaagaaagtttacgatccggtgctcgatggcctgcgttcgtcggtacgctacgaccagaagtattacgacaagattgtcgccagtttgctgccgttgctggagaaactgacctccggtaagacggcgcaactgatctcaccaaactacaccgatatgtccgatccgcgtcctatctttgactggcaacaggtgatccgtaaaaaaggcgtggtgtatatcggtcttgatgcgttgtccgatccggaagtcgcggcagcggtgggcaattcgatgtttgccgatctggtctccgtagcggggcatatctacaaatttggcgtgaacgacggtctgccgggtgaagagggcaagaagacgccgatcagcctgcactgtgatgaatttaacgagctgatgggggatgaatttattccgctgatcaacaaaggcggcggggcgggtattgaggtgacggcctatacccagacgttgccggatattgaagcgcggctgggcaatgcggcgaaagcggcgcaggtagtggggaactttaacagcctggtgatgctgcgggtacgacatacggaaacggcggagctgatgacgaagcaactaccggaagtggaggtctataccaaaacgctggtttccggtgtcaccgatatctcgaatccggaaatgggtagcgattttacttcgaacacccaggacagggtgagcacagtgcgtacgccgctaattaccgctgcaaacgtaattaacctgccgaaaggacaggcgtttgccttactggaaggtggtcggttgtggaagatccgtatgccactacccgctgctggcgcggatgccctgatgccggatagtattggtcaaattgccgactatatgcagcgaaattaccggaccagcgatgtctggtggtcgggtagtgcattaccgggagattacgatgcagccactttttga

SEQ ID NO: 266844 - DNA, 501 bp, Klebsiella pneumoniae
atgatgatgcgttttccgctcgttctcgcactgctgtttccgggcataagtcaggcagagttgaccgttgtcgccgatctgggcggacagtcaacggctgaatattttgctggtattaacaatcaggaggaagagccgccagcctcgcaagtgttgacactgtcaacacctgataaagcatcggtattacccattcgtaccccggagctttcgcctgggccgctggaagcgcgttctctctttatgcccggaatgcggtcgattttcctgattggtgacgacgatctttcccggcgctggctgtctctgcggcgcgatcagcttattcagcttaatgccgtgggctatgtggtgaatgtcgccagcaaagcggcatgggatgatttgcagcaccaggcgaacgggctggagttgcttccggtttcgggtagcgatctggccggtcggctggggatttctcactatccggtactgattagcgagaaggggctggagcaatga

SEQ ID NO: 266845 - DNA, 549 bp, Klebsiella pneumoniae
atgtggctggtcatgttcatcgcgttgccggagtgtctggcggcgcaatctgttccggaaggatattaccgggtcgcgcaggcggaaaatgttcccgccgaagcgctgtatagcctggcgctgacggagtcctcccgcaaactggtgcatggcgtacgtccatggccgtggacaattaatgttgccgggaaggggtatcgctatgcctccaggaacgaggcatatcaggcgctgttaggttttatgcgacgctatccgctcaagcgtatcgatgtcggtattgcgcaggtcaatctgggctggaacggccactatttcacatccacctgggaagcatttgatccctatatcaatctgcacgctgcggcgcgtattttgcgagcctgttatgagcgtagccccgggagctggatatcggctgcggggtgctatcaccatccggcaggcggcaaaccagcgcaaacctataaggccatcgtgtcgcgtcacctcggcacattgcagccgtccgtacaggcgctggcattcaatcagggagaaacacaatga

SEQ ID NO: 266846 - DNA, 705 bp, Klebsiella pneumoniae
atgaaaaagttcaatgtcgtgctgctgtcaggagtgttgacagtgtcaacagtcgcatttgccgtatcgccagtggttcagggaaacagccagacggtgaataccttgttgcagacgctggaacagcaacaaatgacgcggagcgcacaggagtgggggttaacaactgaagagtggcagcgttatgaaacgctgaaaaaaggacgtcgcggcgtgctgtctccggggttagatcccctgacgatgctgggcatcgaggcgcgtagtgacgaagaacgtcgtcatttcgctgagctggcggtgaagcaggagtttcagcgggttgaagcggagctggcatttcagcgggaagtgaatagtgcgtggatgcgagtctatcccggcgttctgcccattcaggatctgcggagtgaagtcagtaacgcccgtcaggcgctgtttgtgaaagacaactgttcggcctgcgagcgcaagctggcccagttgatgaaatcaaaccagccgctggatatctacctggttggtagtggcggtaaggatgaggcggtccgaagctgggcgaagaaacacaatatccctgctgaaaaggtgaaatcccgccaggtaactctgaaccatgacaatggcatgtggctgaaatatggcaacgggctgatgccggttgcattgcaacagggggcgcagggatggcagcgcgtaaattga

SEQ ID NO: 266847 - DNA, 684 bp, Klebsiella pneumoniae
atgaaagagtctgtcagacctgcacgcagcaaactctgggcggtagtccgttacggatttggtgggctggttttgtttgcattaggcgtaaccacatttatcagtcttaaatccgtccaggtactttccgccgaggtcagccagcttaaaactgcgttgcagggtagtccggatatcgcgccacttcaggctcaactggcaacgctgcaacagcagtttgaggcgtcacaaatgcaactgggagggatggttgacaaaccggcgcttgcggctttgcagcagaaggttgaggcgctggataagcaacagagtgagcaggctgcttcggttgccgcccttaaaaccgggctgtcttctcttcaggagcaggttcgtgttttgaatcagcgcccggccagcgtcgctgccgttgttcctgccgtaacgtctggcgcggtggtagtgaagaagaagcccacacagaaagcgcagtggccagttactgcacccttcgtcctcaccggtattgaatggcggagagggatagcctttgccgcgatagcgccacaatcagcaacacagctcaccgaaatagcgttaatggaacccggggaaacccgtcagggttggacgttgctggcgatcgccaggcagcaggcgcagtttcgtgtcgcggggcaaacccggacattgacggtgcgataa

SEQ ID NO: 266848 - DNA, 597 bp, Klebsiella pneumoniae
atgaatcttcatatcccaatggctgtctgtctgactgccagcatcctggccggttgtactcaaaagctccagcaactggatacccaacctcatccgacggcgctgaacggcaacgtccagccagcccgactggatgtttatgccgcctctcccgaagttgttcgctatgaccgctatctgctggttgatacttccccgagcgctgcacagcgtgcgccgctagagcaaaccatagatatccgtatccccgtgtcattatcgccgaccgtggcggatgccatgcgctatgccctgcgccagtccgggtactcgttatgcagtacgacaccggcgaaccgggtgctgtacaaccaaaagttgcctgctgtgcattatcaactggggccaatgcgcctgagtcaggcgttacaaattctggccggatcggcctggcagcttgaggttgattccgttcaacggatcgtctgccattcattacgtgatggctatcgtttgccgccggaagcggtgaaaacgtcagtcacttcggtctctgtgccgttacccgctcaacccgtcaatatcaccgctctggctccgcagaggatgctgaaatga

SEQ ID NO: 266849 - DNA, 531 bp, Klebsiella pneumoniae
atgtctacagcatctaaaaccactaccgctaaacctaaaaaaggcagcgccagcaagcaagccgcggctcccgttcctgctgaatcagtaactccagctcaatcagcagttccggcacaaccgaaaccacaatccagctactttaatttgcatatcgatgggctgggttatctgagcaacattcgcgaaattaacaccgctacgggttcattcctgagctgtacgattaacgcgttacatggctcaaccgaaaaacctgaatacacgcgttttgatgtcacagtatcgggtaaacagaccagttctttaatcagacgctgccagaacgcggtgaatgaagagagaaaggtacttatcggctttaagctcagtaacctgaccgccgatgtttttactttgaccaaaggcgatcatgcgggtgaatcaagagcgtcactgcaagcgagactgataaaaatcagttttattaaagtggggcaaaatatggtttataaagctgaaaagcctgagtctactgactccgcatactga

SEQ ID NO: 266850 - DNA, 714 bp, Klebsiella pneumoniae
gtgaccctccgtgagattacacgtcggccaaaaaaggctctggcccggagaagtgacattgacgatgaacccgtggtacaggttcagaggctcgataccaggatgggatcgggcctttttattggaggttattctatgggattgcatgttagttctgttgcagagcttcctctatcagaggaacgtgcttactatatttatatccttgattattacaattgggatgaacctatatctgatgcgcttcatcgtaatgtagataaaatatcagtattttgtgcggctaacgatgcagtaatgattaagggattgccagatagccatttttcctcagaggttttgtcttgggctggaattaatggacaaggtcccaataccattttgcctgcattgcttataactacaattcaccctcgttattttattgaggcacataataaatctccttcgaaagagatcaaagactctttgatttttataaaaataagggatgtatgtaaagcaccaggtgatgttattttgttgcttgaaaaagttttcaaagatatatctgcgcacaaaaagataaaagatttctccatagcaagagaacttcgctcaggagagcatagttcgtttgtcgatgctttgattcttgaaccgaatatttcaggagtaggcgttgatgtaaaaaaaatgatttcatgggtcaagtatagattttcaagtaagtaa

SEQ ID NO: 266851 - DNA, 2004 bp, Klebsiella pneumoniae
atgaagctctttctctgtgaaaagcccagtcaggggcgcgatattgccgccgtgctgggcgcaacaaagaaaatgccgggttatcagaccggaaacggcatgtgtgtcacctggggttttggtcatctgctggagcaggccagcccggatgcctacggtgaacaattcggcgtgccgtggcgtactgacgtgttgccggtattgccgacaacgtggcaaatgcgggttaaaccggatgcagcggcccagttctccgtcatccagaagctgctgaagcaggctgatacggtagtgattgccaccgatgcggatcgggaaggagaggtgattgctcgtgaaatcctcgattattgccactatcagggaaaggttgagcggttgtggctctcggcgctggatgaggccagcgttcgcgccgcgctggcggtgataaagcccggaagcgcgactttaccctactatttagccgggcttggccgcgcccgggcggactggcaaatcggcatgaacatgacgcggctatattcggtcaaggcccgggagaacggctacggcagcgtgttatctgtggggcgggtgcagacgccgacgcttaacctgattgtggtacgcgatcgcgatattgcgcagtttgttccgaagccctactggaatgtcgtggcgcagctggcggcaggagggatcgcatttcaggcgcagtgggtgccagcagcggcatattgtgatgaggaaaaacgctgtattaacccgtcagcagcgcagcaagtggttcagctttgccagaaaaccgggcaggcgacggtggcagaggttgagaccaaaagggaaaccgaatctgctccactggcgtttgatctcggtacgctacaacaagcctgttcccgccgtttcggctatggcgctcagcaggtactggatattgcgcaggctttgtatgaaactcacaaagcgacgacgtacccgcgaaccgactgcggttatctgccgacatccatgcgcggcgagatcgggcaggtgatggcctcaatacagcaaagcgatcctgctttatctgcgatcatctcgcggcttgatatacagcatgtttcgcgcatctggaatgacaaaaagatcaccgcgcaccacgggattatccccacgaagcagccctgcgacatggcaaaaatgagtgagcaggagcgcaacgtttaccagcttatccggctgcattatctggcccagttcctgcctaaccatgaagtggatgccacgcgggtttcgctgcattgtggtgggcagttatttaaaaccagcggcaaggttgtgatcgttgctggctggaagagcctgtttggtaaggattctgaagaggatgcaggcgatgccggtgacaaggcccggttaccggcaatggcgaaagggagcgtatgccgggtcaccggcgcggaagcgaaggcgcagcagacaaaaccaccggagcattacaccgaaggtacgttgattgctgcgatgaagaatgcggcgcagtttgttaccgatccacaccttaaaaagatcctcaaagagaatgcggggctgggtacggaagcaacccgggctggcgtgattgaaacgcttctgaagcgtggttttgtggtgaagaaaggtaagtatctgctggcgacacctatcgcagctgatttaatggctgtgttaccggcacagcttaaagatccggggatgacggcgctctgggagcagtcgctggatgacattgctgaaggccggatgtcgcttgatgactttatggcgaaacagtccgcctggacaatgcaactggtggtaaaggggcagcagcagacggttaagatcacgttaccgccttctccgccgtgcccgatctgcggtgggacaacgcgccagcggacggggaaatcaggcgcattctggggatgtgtcaactaccctgactgcaacgggattgtgaatgtcggggcgaagaagcttggtcgtcggcggaaaagtccggcaaagaaaagtgtctga

SEQ ID NO: 266852 - DNA, 564 bp, Klebsiella pneumoniae
atgagcagcaataaaacagcttttaccggattgttcatcctgagtacctgcctgagtgggtgtgcgagtgttgacaatgtcaacagtgcgataaaccagattagcggcgggatcttctcaatcggttccgcaccggcagacagtggtccggcggtgttgtcaaaaggcgtaccgcaggccagccacaaaattgcccaggaataccgtgttccagttgatgttgataccgcagctgcgcgggtaaaacgctactaccgctttatctcggctgaagaagtagcgcagctacgtaacaacggtacgcaaagtggagggtggactgccgcttcagtagccgatggcgcatgggtatgggacgggcaacccggtagttactacaaaatggggcgcgactggggaagcgagaataccaatgacagcattcaggtcgagctggagaaaaacggttccggtagccgcatgtatatcacctttcgttccgggctggcctctcatgccacggcggcttataccagcaaactgtttgagaatatgaagagcgtggcggaagggacgatccgatga

SEQ ID NO: 266853 - DNA, 753 bp, Klebsiella pneumoniae
atgtcagacaaaacagaaaagaaagtaggtgcgctgcattctgaattgcgcatcgagctacatacccaatatgctattaacacctggagcgggcgaccagcctcagatggcaagccttcacttatcgggatgccgctgtttttccgattcatttcccggattaaccgcgattcactggccgataatccgtgggcggatgcggccttggttgaagtggaaacattactggagacagccagtcagcagctccagaaatggctgaacgatattgatgccctaatggcgatgctgccagcgaacgcttctgtttccggggtcacctccaaagcgccgctaaatatcggcgttcacagccataccccactgggataccgctgcgtttacctccttgttggatttgatcagcttattctgcgtgtctttcgggcgcatcattacggcctgatgtcgcttaaagagcgcaaagcctggttacatcgtggtagccatcaaattcgtcgtatcttctctgtcgctctgcgttaccgttctcatcccgttacccgccaggatattgcctcagataacgacattgcccgacaggctatcgaacaatttggggaactggacagggcgatcctgctgggaacccgccgttcccgcttttctccgccagtaagcgccgaaagtattaaggcgctgaaagccgccttcaaacgtcagtcacgcaaagagaaagcggcaaagcaggaggtgcaggatgagcagcaataa

SEQ ID NO: 266854 - DNA, 789 bp, Klebsiella pneumoniae
atgaaattgaattttcatgcaatttgtccaaagtgcagtcaaaaacaaagatttatagctttagcaatcagttctgaaaatagtgctttggcgtacgatatttttcatcatgatgagtggaagacattttgttttcatgctttctcagttgcaacctactgtgacaattgtaaaaattacgttaccgcaaatatttcgatcaataatgataagattacccaagaatctacacttgaaagttatgctaacaaaacacttacactatcggaaaatgaagatattattattgactttgatattccccctattgacccaccccaatatttcgaatctcctctagttacgtcaccatatgatcttctgacccaagccaaaagttgctttaaaattagcgcgtgggatgctgttggtatcgtctgtagaaagataattgatattgagactcaaaagatatggagaataaacaacccttataacacggataaaaccgataaagaaaatgaaatgccttcattagcaaaacggcttgaacatctattagcaccagagatcagggataataaaaagaaaaggaaagatatagacagaaacgatgtatataaacatattgatgtagaaaaacttgagcatcatcttttttatatagccgatagtttaagggaggaggggaatagtgctgcgcatgatattctagctatcgggcaggatgctgctgaacatgcaatcatttgtgcagagttatgtcttgacttacttgataaacataaaagaaatccgaataataaatag

SEQ ID NO: 266855 - DNA, 1557 bp, Klebsiella pneumoniae
atgtttggtaaaattaatcttacatcaaaagcaatatcatcattattactagatacaaataatccgcgccttattggttatagaaaacaaggaaagctcaaaaatgaaaaggatataataaatgttatgctttctaattactcaatcaaagacttaattgcatctattttaactaatgggtatcaccctgatgaggtacttttttcaatcccttgtgaaaatggtagtaacaaaagggttattgttgaaggtaatagaagattaactgcatgtaaaatattaaagaaacctgaaattcttaagggaactaatcattcatacttaatatccagaattaaaaatcacaaaaattatagcattgctattgatactattaagaagatcaatattgtcgaactagaaaatcgagccgcggcacgcgcatacatagcgtcaaaacatactaaagaatcaatcaaaagatggagtgtttatactcaaggcgcctattacattgacctcctgaatgaattcaaaacaattaatgaagtacgcgcatcaattaataatatagtgtccagctcgagagttaaaagtgttatacttttttccagaataactgacaaaatactcgagcttgaaacacttactgctgaagaaaaggacttaattctttctgacattgataatgctaaagtagaggctatcctgagattaattcagcgctctgaatttagagacaaaattggaatcataaccctaaactctcatggggaattaattacaaaaaaaatatcatctacggcctttagttatattttagccaaaatggcaagggatgcacatttcacaaaagaacttacaactcgacaagagaatgatgaaaaaatcaataattatattaatcagctaatgacaatagctgaaaagttctcaccgccagaagaagatgaaattgatttatctgaggaggaaataaatcttgatctcactgataacgatgaagatacgccagaagaggatttacttggatctgcatcagttgatgaaattaataaaaatgatgaaatgccttcgattaaaacaacagccagaaaaagcaaacaaaatgtttatctcttagataaaaaaacagcatttacaaatcatcataaaaaaatcgacgatttaattgaggaagcaaaaaggttacactcaattagatttaagcatagcgcaatattactcagcagaacattgatccaaatcatattgtcacatttgataaaagcctccactcttcatgatgattataaaaagaaaagcacgttcaaatatcttgatttagatagcttactagatttttttagtaacaaccttacaaaactattccctgatgagaatagccaagacattaagctcataaaacagacaattattagctacaaagaatcgggaagaattatagctaacttaacaactcatcacgagtcacacattcttacggaccaagaaatcaatcacatacaagcaaaactgcagatccttgttgattattttatccacaaaatacaatgtggccatcgaagcaatgattag

SEQ ID NO: 266856 - DNA, 966 bp, Klebsiella pneumoniae
atgcggacttatgaattagaagacataaaaaaacttaaaaaacaatctgttatgaggacgcttggtttaactgccatgccttcagacgtatcacctttccgttaccccggcggtaaagcaaagctatctaattttattgccctatttgtcgtaacaaatggactggaaggttgtactcttgttgagcctttttgcggaggcgcaggtggcacacttccattattgtgtgcagggctagttgacaaactagtcctcaatgatttgaatcctggtgtatacagtttttggatgtctctcacgaggaatactgatgccctaataaaaatgattgaaaatgaacctgttacccttgacgcttggaaacactggagggaagtatataattctaatgggaatacacaatacactactttagaaaaaggattcgcgaccttttttctaaatagaacaaatcgttcaggaatgctgcatgcaggccctattggtgggcagaaacaatctaactcagattataaacttgattgtcgttttacccggaatacactaatcaaacgagtggagaaaatagcttttttctcaagtaaaatcgttgtaaatcagtatgatgcttgccattcgattaacaatttatcttctgatagccttatatatgcagatcctccatacgtaaaagaagggcgtaacatatatagtaacttctgtttttccgaggatgatcatcgtagattttcatcgaaattaaagagaagtaaagcacactggttattatcttacgatgatcaccctttagtacatgaactatatgaaaaatcaggaatcaatatcattgaactgagctatgcaataaataaagccagagtaggcagagaattactaattgcatcagtaaattcaagacaaccttctttagagtttaggcaaacagatcctattatcactacagataatatctcactagccaactaa

SEQ ID NO: 266857 - DNA, 984 bp, Klebsiella pneumoniae
atggccgcattgccatatatgcagctctatatagctgattatcttgcagacactatgcatttgtctacagaggaacatggcgcatacctgctgctgatgttcaattactggcaaacagggaaggctatccctaaaagtcggctttcgagaattgcacggctaaccaacgaccgctgggtttccgttgaagcatcgttaaaggagttttttaacgataacggcattgagtgggtacatgagcgtattgaaagggatctggagatggttcgttcatctcagcgtcagaaatctgatgcgggaaaagcctcagcaagagccagaaaagttaaaaaatcagcagaagggaaacggaatggtaacgaccgttcaacgggtgttgatgagccgtttgaacagaatgatgacggcaatccaactaataaagatccagatatagatacagatctaaaagaaaccccctctctacgcgggagcaatatttcagatgttcaggagccgcaattcctgtctggcctggatatccccataggtaaattcacgatgcataaaaattggcgaccatcgcaggactggccacggctggccgccacgtggggaatagcgcttcctgaaccggcttatcttccgactgaactggccgagtttactgcctactgggaatcagaacggaaggcattcacacaggtccagtgggaacaaaaattcgcccgtagcgtcgtgaccgccagagctaaatccaaaccacaaccaccaaccggaggtaacggcaatgcaagaattcaatcagttaacaccgcatcccgggcagtccagcaaattcaggaagccagagagctctgggagaagcaacgcggacttgctggcggcggatacggcttggcggctatggacggtaatgggggagatattctcgaaccggtggacccagaagaacggggcggcgccctcggatatgtggattgcccagattggatcgatgagtga

SEQ ID NO: 266858 - DNA, 303 bp, Klebsiella pneumoniae
atgagtattgttatgaagaacttcaactccatcagtctcgaaaagccgggtttaaaaacccgcagtgatggcggaataagctctttgcaaggcgctaatcaattcaggaatgtcttctccatggatcttaagctcttgccatgtgccttgatctggatcctctactgttgggcattcatcagaaatgatagaaaccaagccgctctgaatgtcgtaattaacagtaatttctgctctatgggcgactgccagaattctttccatgacggttccttaatctcgttttgtatgagggaggggtaa

SEQ ID NO: 266859 - DNA, 1332 bp, Klebsiella pneumoniae
atgaacgaagaaaaatatatatgtcatagatgcgtgggtgaagagtatgtaaggctagttataaaaaaaacaggaaatgccaacaatgattgtaattactgtggtaggaaattaaagagtattaaattggaagttcttgcagagatggtgcacaatgtctttattgaatattatgaacagcctgatgatggcgagttttataatgatagtggtgatactgcaacctctattattcaagacgagctaatcattgaagaagaacctgccgatgatatattcaatgtgatgcaggacatttataacgattatcacggcatagatgtagtttatgatgaatgctttaattatgttcgtgttaatcgcgtcaataattcgcttggctgggcatgggagaaaatggagcagtcacttaaaagtgaagctcgttatttcaataagcatgtaaaagagtttctggatgagcttttttcagacatagaaagaatgaggacaggtgaaagcaggcaggcaattaatgatgttggcagcgatgtcattttttaccgggcacgggcatttgaaaactacgaggacgtgcaggaagcactggagcatcctgagcggcattttggtccaccaccacaagcgttggcacgctcaggaagaatgaatgcacacggcattccagtattttatggtgcaacgtcaccgagcattgctgtgtcggaaatacgtccagtggttgggaatttcgtggtggtcgtaccgtttcgacctatcagaaatttgaaaattctcgatatttcagccctaaacgatctctcaaatatcaaaggtagtatcttcgatccatatgtgaccgggcataacgagaaggtctctttcatgaggacgcttgccagaaagctgactatgcccgtttctggcagaaagccggaagatgaatacctgatcacacaagcagtatcagaatatcttgccttatccgataaatttagtcttgacggtattagttttgaatccactcagcattccggtgatgagcccgaggatattggtcaccacaacgttgtgttgttcagaaaatcatcgagaatactgaattctgagagtaacgaaaaatcttttcaagtagatctatttgaaaatgtggaagatgataattatattttttcacccgctattcatccaatcaataaaaataaaacaaggagaacattgtcttcttctttcagtatagataaacacttgtgtgctcttgagttaatgcctgatggcatcgtatttcatagagtaaaaggcgttaagtattacacagactcaattgatgtaaaatcagatgggatgttatga

SEQ ID NO: 266860 - DNA, 879 bp, Klebsiella pneumoniae
atgagtgcaaataaattaaaaaaaaatatcaccgtcttattttataatattgaaggtgacgatttattttatgaaaatcttgccttaaattattttaccttgtgtgagtcggaagaaaacacgaggataataacttcgcgcgacaaaaaacatcttattaaactaaaccctccccattatgtaaatgataatgagattttcggtgttactgttgttcgtgagaggaacacttggcaaacgaaagccactaaagatggttcaatcactgggatccatatcaaccaaggaataattggtgacctgtattatatttatatattaccagcatacaggactatttttggcttcacttccgggcctagtggtacattaaagagtgtctgcaagttcattcttgaacaattaaatacaaacagaagactaaaaataaaaattgacctcatcccgaaagcaaaagggtatatatctttgaatgattaccaagcatttaacagcttgcattttaaaatgaactcatcttatctcagcgagataacagatgatgcgcctcatttttttaaacaactcagcacaagcccctatatcggaccaggaatgcaactttcatttgatttagaatttaatgatgaaaattgcagctcatttactaaagataatgtaattgaaatcattaattttctatcagatcatgacggttgttctacattaaaagtaaaagcaaataatagtgatggcaaagcaagtactatagatttctcagatacatttcttcacttcaaaaccgaagttaacacacgaaataagtatattgatgaagaatctgcatcacgagttcttgaccaagcattattagaacttttaaacttcaagaacggctga

SEQ ID NO: 266861 - DNA, 372 bp, Klebsiella pneumoniae; identical to SEQ ID NO: 212322

SEQ ID NO: 266862 - DNA, 480 bp, Klebsiella pneumoniae
atgaaatacagcgcatttattttactagtgatgagtttctgtattggagccaaaatgattccaaacacagaaatggtaaatttatataataatcaaatacctcaaactcgaattttaatgtctgaattaaatgaagtaatgaaaattactgaaccagtatttgatttatataagcatatgagaggcctgactcctgaggctgtagccctaagccagcatctgatgcagatccaggagaaaagtgatgaattatatggtaaagcgccaattgccactccatttacctcttgccgtagtctcacaggcgttgcttataactactggattgaaaaacttgatagcgtgaacacacaaaatgaaaaacgcttagatgcattgtttgaacaatacaataaattggttaaagaatgctcgaaacagataaaaacaccacctccaaaaatggttgaagagctggcaattattgatgtaacacaatga

SEQ ID NO: 266863 - DNA, 624 bp, Klebsiella pneumoniae
atgtctgacgatattaaagcagtatttgatagtaattttattgcaactcaggcaggttccgttcaggtttttcattatgattcaaatacccgtgagtttattggtgttgaagatatttatgtccctctcggtgtcgggattcctgcattaacctgcctggataaaccaccggtacaaaatgaatatcaggttgctattcgttcggaagataattcgtcctggtctgttacagatgattttcgcggtatcactgtctatgatcttcagacgctggccagtcacgttattaccgagcctggacctatccccgacacagtaacgacctctgcgccgtctactccatacgataaatgggatggttctgcatgggtaaccgatgcagatgctcagcatgccgctgatattgctgcagctgaccagcagaaaaaagagttaatttctcaggtaacggcggatatttccattcttcaggatgcagtagctcttaatatggcgactgatgaagaaaaatcacaattaacctctttgcagggatatcgcgtgctgctttaccgggtagatacgtcgcttgcacctgatattatttggccggttgtgaccatccaggagggtaataatgtctaa

SEQ ID NO: 266864 - DNA, 1989 bp, Klebsiella pneumoniae
atgtctaatttacctgagcaggcagcatgggaatctggcatctatcaattacaggagtctgatcgcgccaaggcgggatcaggcggtgttcttaatttacctgcaacacaacttgctaacagaaccgcctggctcaaaagtgagcttgaatatttttcatcaacactaaaatcaggagaatcgccgttcagcagtgaagatgatgccaaagcggctatcaccacaggaaaaatacaggaaggccagcttttttccattcgctcatcggaggatggcgtctgggccgaggagtacaaaaacgctggcggcctgcctgtttccaccgggaaaaaacttccttcatccgcaatcattatgccggtggttgaggccgataactcagatacggatggcagccagaaaggcctgtcattaaccactgagggacagatgttttgtgctgttcagatggatggctcatttgtattttttatcaaccgtaacggcattgcaaaagaagtcaacagtatgccggttgatgcaggcgtgaggtttttgcgcggctacggtcaggatgaattcacaataatcggcactgattttagcgtgctggattatgctcgcgaccgtatggcccaggcgggttctgatattaagtacggatacggagacaaacctttttacctgctggggccagataaccaggtgacttcatttttaacctcggactcaatgcaggatgcggacgtttctttactgcgtggttatgcctcatcgccatttgtcatcctgggttcggataatcaactgatgacattcggctcaggcagtagccagtcttcctctgattcgccggaggctggcctgcttgactacctcattgcgatgcaggagcgggcatatacaggtggtcacctggttattatgtgcgggccgggtgattcattggacgccggcactggcgggctgggcgctattgacgccatgtacagcctgtttgcagcgcggctaggtcatggcggtatcggatacttcgccccctcaaacgacaatacagcctcccgcgacctgctgaatatggagctggtctatagcggctgggtggataaccagacctacggcaaaaaatgtggcccgctaaattttgctcttgttccgtggtcaggtcgcactaatttatttttccgggtaaaagatgcgtcccgcagcaaccccatttatcagcacgatgttgtcgaggtcggttttactggtaccggcgacgccggaacatccagccagttccgttttcgtgcgaccgaccggaatgatgatggctcaattggcccggcaggctccggggagtggcagacagccaccgtctcgaataaccccgagggaagtgaggcggtaactatcgtacgggttgaggggttaggtccgtcaaccgggcgattcgcactggagattgaaccgccagcttccggtcaggccgggtatcctgcgatcgtcagcttcaactgcatcaactctgctggcggcgttcgcgtcattcgttacgcccgaggtggcgcaactgcggcatatcacctgaatcagacggcctcataccagaaatactggatgcagtattttgcgcctgacctggtgtttatcaatctcggcgagaatgattatgccctgaccgattcggaatttctgagcgggtacagcgccattgttgagcgggtacaggatgcgttgccgggtgtgcctgtttttctgaaacgctggtacagcgacaaccacattaagcgcgatgcggtttttgacgtcattcaggctaaatatggaatgctcgggtttaatgttcgcgatttaatcaggaactctaattttgcattccagaacggctacgcctattccaccaccaacccggcagacccgcaccccaacgctcgcggagcaagaattatcggcgcgtatcaggcaaaacgcgccctgctgaactacgccgtacaatctctcagaaaggaacaacaaaatggctaa

SEQ ID NO: 266865 - DNA, 678 bp, Klebsiella pneumoniae
atggctaaaacgactttcctgcaaattcccgtggctgttaacagcggcatcgcgtcaacgtattccgagcgtgatgataaaacctgtcgctggaaccccagccattattttgactggcgggaatcaacactcgctgaccgtgcgggagatatggctatctctctcggatctgcaatcagcgccgccaccctgaacgggattaaaacgatgaaaagcgccctcacggctaacggcggcgtgacttcggggaatgtctacccatcaactgcggaaaacggctattgctatgcgtttgcgtttaagcgcgacaacctgaatcaggcaacctttctgatcgctggtccccatttgcggcttcaggcgcagactgataataagctgtattactacaaaacaggtgaatcaacgcagcgtggaggcgtttcgctgtcatccgggattgacctgattatcgtgaattacgatccggttactgacattgagaccatctatgttaacgatgccacaatgaccgtaactgcggcatcggcaatcacgtatcaaaataccccactaaccctcgcagcaacggcggccaataacgtcaattactcggaggtgatgattttcgattcggtgaaaacgctgacagagattgcagcgatgaaggcgtacttccgggcgcagtatggaaactga

SEQ ID NO: 266866 - DNA, 1176 bp, Klebsiella pneumoniae
atgcttacaacactcatatacagaagccacgttcgttcaggaacctcataccaggcaatagttgatatggttaaaagcgctaatgaccgcaacgtgcagatgggcgtcactggtgtgttactttttaatggaatccattttttccaactgcttgaaggccgcgaagaatcagtcaaagaagtttttgacagtatcagttgcgacaaacgtcattttaatattgttgaacttttttgcgactttgctccttttcgacgttttggtaatgcaggcatggagctaattgataccagactccatgcgcaagatgagtgcctcgcatctgtccttgaacgtggtacaacaaagcataagcttatgtacaatgatcgggcgctgcgatttttccgcacgttcatcgaatcgactgaaacagaaaattattatgagttacctgacaagtctgaatggtattttatttccgaaactgtagggttaaaatctgtaacagatcccagtttaattgagataaaacctgtcgtggatcccctcgctcaacatgtacattcatttgagttaataccgaatgtacagtcgcaaaacagtgaggagctttttttggcagacataacctcaaaacgagacgccttttactttgccggaaaatttatactcgcggaacaaaggatatcagttagccttcaacctatgacgcttattgaagtgccaaggtctgttgaaacactccttgattatgttaaatccagtaatcttctccctgagcaacttatcattcagttctcagaaagagcaataattggtgatatgagtaagtttactcagtctgtcaaaaaacttaaaagcgctgggatcagtgttgctatcagcgactttggagcaggttatgctggcttgtcgcttctcgccaatttccagccggaaaaagtaaaaatccaccatgatttaacaagaaatattcacaaagatggttcccgtcaggcaattgtgcaaagcattattcattgctgtgaaaagctcgaaatcagggtttgtgcaacaggtatagagcaaccggaggaatggatgtggctcgaatcagcaggcatatcctgtttccaagggaatcttttctcaggttacgatgagaacaatcaattacatgtcacttggcctaatctcttcagcgatagtaattag

SEQ ID NO: 266867 - DNA, 2064 bp, Klebsiella pneumoniae
atgcttgtcaccgccgaacagggactgaaacaacagcctggtgtctcgatcataactgaagaggacattcaaaaaagcccaccagttaacgatctttccgacatcatccgcaaaatgcccggcgtgaatctgaccggtaacggtgctagtggcagtaggggtaacaaccgtcagatcgatattcgcggcatgggtccggaaaataccttagtgatgattgatggcgtgccggtgagctctcgtaactctgtgcgatataactggcgcggtgagcgtgattcccgaggcgataccaactgggtccccgcggaaatggtggaacgtatagaagtgatacgcggtccggctgctgctcgttatggttccggcgctgcgggcggggtggtgaatatcattactaaacgccccactaacgactggcacggatccttatcccttttcaccaaccagcctgaaaacagcaaagaaggcgacactcgtcgtgctaatttcaatcttagcggtccactggcaggtgatgttttgacgatgcgcctgtatggcaacctcaaccgcaccgatgccgattcctatgacatcaacaccgcacaaaacggttcatatgcagccggtcgagaaggtgtgcgtaataaagacatcaacggtgtactgtcctggaaaattacgcctacccagatcgttgatttctcctatggctatagccgtcagggaaatatctatgcgggtgatactcaaaacagtaatagtaatagcagtgctaacggcctggttgaatcgctttatggcagtgaaacaaaccgtttatatcgtcaaagctacggaattactcacaacggaatctgggattggggaacatccaggcttaatttcaactatgaaaagaccaacaatacccgtctaaaagagggtaccggcggcagtactgaagggatgattaatagcgatgtcttttcgactagtcgcctgcaaagctatcgtgctggcggggaaatcaactttcctctacagttactcgttgatcaaacgatgactcttggcgctgagtggaatcgcgacgaactcaacgatccggcctctatgcagtcgtcaagtactgacttctatttaccaggtagctctggtgatccttctcaacgtagcagtaaaaactcagcaacgattagttcgctctatttcgaggataatattgccgcgaccgacagtaccgaggtaattccggggctgcgatttgactatcacgataatttcggtgcgaactggagtccaagcctgaatatttctcaggaaatgggcgaatacttcaccctgaaagccggtatagcacgtgcgttcaaagcaccaaatctgtatcagtcaacgccgggctatctgctttccacgcgcggcaacggttgtcctattggtcttagccagtgttatttactgggtaacgataatctcgatcctgaaattagcgttaacaaagaagtggggattgaattcagtcatgcaggttatgcagctggcattacctacttccgcaatgattacaaaaacaaaatcgtgtctggcacttctgccgtttacagcaacggtacttataacgtgctgcggtgggagaacggcggtaaagctatcgttgaagggttggaaggtaacctgaccattcctttgattgccgatacgctggagtggcgctctaacgcaacctacatgttccgttctgaaagcaagaagaccggaaatccgctgtcagtcatcccggagtttaccattaactcccaactggaatggcaagctactgaagacttgagcacaaatattaactggacgcaatatggccgtcagaaaccgcgccagtatgctgaaaccgtccttgaaaaccgtaatgggctttcacaacgtgaaattagtccttattccgtagttggcttaaacgtcaactatgatattaccaaaaatctgcgtgccaacgcaggtattagtaatctgtttgacaaacgcatataccgtgagaacgcgggggcttcaacgtataacgaacccgggcgtgcttattatgctggcgtaactatgtcattttag

SEQ ID NO: 266868 - DNA, 804 bp, Klebsiella pneumoniae
atgtctgacattaaagaagtgatatcaattttcaaagatagtcttatatcaccaatacagcaagccgttgcctttagggctaaaaatactttttttggttcactttttatctcttgggtcatttggaactgggacaggatcgcatacttcacactatccaaagatctcgttcttgatcggataaaaaatataaaaaatggtactgaatttagtttgagcaatgaattatacctatatatttttcctgaatcacttttttacccactcataaccgctatcttattcactcttttttatccattttttatgtatgctactgcttttgtgcataggcgcataatggaagagattgatatctttaataatgcggagaacgtaaaaaaaataaaaaattcaaaagaattgattgaagagaatcaagctaaagaatcaattatagcaataaaaactgccgaacgggaaagggatatcgcaaaatataaagaggatagggttagaagtgataatgcggttactgcaattattgcagagtacaatgaaaaaagcgcaaatctaattactttagaaagaaaaataaaagaatgcgaatcattgctttcaacatatgaaaataagatcgcgcaatctaatactgaaataatagaattacaagggatactggcccccttaaaagaagggcagactcagataataaaattgaatattgaaaaagaagaccttgaaagacgaattcaagaagtttcatatgagagagatcaggcacaaagacaaatacgaataatggaatccatgacaaacaaataa

SEQ ID NO: 266869 - DNA, 678 bp, Klebsiella pneumoniae
atggctaaaacgactttcctgcaaattcccgtagctgttaacagcggcatcgcgtcaacttattccgagcgcgacgataaaacctgccgctgggacccctcgcactattttgactggcgggtatcaactctcgctgaccgcgcgggtgatatgaccatcgcactgggttccgctatttcagagtcaacactgaacggaataaaaacgttgaagagcgcgctgacggccaatggcggtgtgacgtcagaaaaagtctttcctgaaaatgcagcaaaaggttatgcatatgcatttgcatttaaacgggataacgctactcaggcgacattcctgatttccggcccccatttgcggctccaggcgcagactgataacaagttgtattactacaaaacaggtgcatctacgcaacagggcggcgtttcgctatcgtccggcatagatctggttattgtgaactatgacccggttacagatattgaaaccgtttatgtcaacgatgcaaccatggcagtagccagcgcttcttcgattacataccagaacacggtattaaccctggccgccacagcggctaacaatgtcaactatggggaaatccttatttttgattctgttaagtcagcggctgagattgcagcgataaaagcgtactacagagcgcagtacggcaactaa

SEQ ID NO: 266870 - DNA, 513 bp, Klebsiella pneumoniae; identical to SEQ ID NO: 99469

SEQ ID NO: 266871 - DNA, 459 bp, Klebsiella pneumoniae; identical to SEQ ID NO: 99470

SEQ ID NO: 266872 - DNA, 822 bp, Klebsiella pneumoniae
ttgagtcagaaaattccaaattctgtaatcggtgcagtggcttcagttattgcagaacattattacagccactcaagattaaatacgctgtttatggagagcggagctcctggcgattcccccgaaggtaactgtgaaacaaaatgcagtaattggcttaaacgttgtaatgacgatacaacggttaatgctttagaagttctaggtgcagtggttcaagagtttatggatcaggagccccccccatcactattcggcgagtcatcaatttcaaaactagcagaaggccagacaagaattaccaaagcgctagccaaaaatcaattagcctatcgtacaaatggttatattactcaggctggctcgacagcaatatcgaaaaaacttgaagattatttaaaatctggcgatttttcttctattgaaaaagagtttgaaagggcagtagagcatatcaatggcgatccacatgcatctatcactgctgcttgttcaattattgaggctaccctgaagttttacattgagcgtttcagcttggctatgccgaataggctcaatgtcatgaatttgtggggcgtagtccagcctcagctcagtttgaattctgatgctacattggctgctgatcagcacaaagtattaaaaggtatttcctctatcattgatggcgtgggggcatttaggtcacacataggatcggcacatggtcgtggtactaatccacctagtgttatagttgcggaagcacgattggtagttaacgccgcccacacgattgtgatttttgtgatggagttaatacatgcaacaaaaatctaa

SEQ ID NO: 266873 - DNA, 204 bp, Klebsiella pneumoniae
atgagcggtgaatcaattctctttaacggtctttctctacggcctgtagatgcgctaaaaaacatatcttcacttattgaggttggatgtttattaacgacatcaagcagcaataaccataaagagattggcgatactattatttggttggctcgcgactatgcatctgccgcacatactttcgcccagggggaaaagggatga

SEQ ID NO: 266874 - DNA, 186 bp, Klebsiella pneumoniae
atggctacaaacaagcataccgaaattcagccgcaatttacatggcgctttatggccttgaatgcggatagtggaaaaatgattcacatcatcgccactacagagcgtgatgctcgccagatggtgccttgtggcatggtggcaatattcatggctcgccttcctgtaatggaggtggcgttatga

SEQ ID NO: 266875 - DNA, 678 bp, Klebsiella pneumoniae
atgacaggcgtattagatgaaacaaacgatgtctttttgaatagaattactgatatcacagctaaaatgagtgcgtctgttgacaccttgcttcagttgactgatggggaagtaaaatatttcagcgaagataatgtaaaaattatccgtgatgtaattgatgatattgcccgagcggcatctcttatcttaactgacgctatcaatgctgcctctcctgaagaaccggagaagattcaagcccacgagccagaaaaaatctatgatgaggagcttatgaataagctccctgcggttgctgtggaggtcatttcacagataggcattaattctgcaatgaaattattcaaaacttttggtggttcaacattttcgataggaaaaggattacgcagtcttggcgctccccgcgcaaaaatgttacaagagattcttactgatgaagagattaaaaaactttcctggtatttttccggcacccccgtctatttcccccgctgtaatagtgtttttcgggagattaaacgccgtgaatttctaaacgaactcgtaataatgaaccaaaatgggacttctacgctaatggcgatgatgctcctttgccccaagtatgaaattagcgaccgagccgggtggaaatggcttaaggctgaaagagaagcacagtctgctcagtaa

SEQ ID NO: 266876 - DNA, 360 bp, Klebsiella pneumoniae
atgaacccacgcaaacccagcgtcaccgcccaggatgttgcccggcgagcgggagtctcccgggcagtggtgtcccgggcgttgagcaacaacggcagcatctctcccgacgcccgggcgcgggtactgcgcgccgccgaagagctggggtatcaggttaacttcctcgcccaggggctgaaccgccagcgcagccacttaatcggcgtgatcgtctcgcgcatcagcgatccttttcgcagtaccctgcttgatgcgctgcttaacgagatccagcgccagggctttcaggctgtagtgcggcgatttcttttgcatcaaaacgcatttaattttgcacaaatgcgtaaggcgatttag

SEQ ID NO: 266877 - DNA, 939 bp, Klebsiella pneumoniae
atgaaagaaattgaaaatcaaggaaaggagaatgctaaaagtattaaagaactgagagaacagatttctaatatcgatgaaacaatcgaatctataaacttgagactccaaagtttaggtataaatggttttagtgtaaaaaaacatgaagaaaacaaggatatgtacatcatttcccgttcagacaaagacaaaaataatgatgtatacaaatctcttagtgagggagagaaaacgttaatcacattcctctatttcttggaatgttgcaaaggaaaaacggataaagacgacgaagataatagagataatttaataatcatcgacgatccaatatctagcctttcacaaaattacgtttatgatatagcatcaattattcatcatgaactaatcaaaaatgagactacaaaaaaaatattaatacttacacacaatctatattttttccatgagttaataaaactgtctcctaaaagtaaagacgacagaaattttaaacgcgactatcgcctttttagaatcacaaaaaatgaatttagcaccatcaccgaaatacaaaaaaatagtatacaaaatgaataccaatccctttggcaaatattaaaagatgctaaagaagaaaaggtcaataaaattatcataccaaatataatgagaaacattttagagtactattttggctttgttcatagaacagattctttacaaaatgaattaactaaactcgcaaaagatgagaaaaatagcgatttcagggcgttttatcgatacataaatcgaggttctcattctgactctgtgaatatcacagatatgggtgacattgacccagacaagtacctaaaacagttaaaaaatatattctcagcaacaggagatgaaaaacattatgctaaaatgatggatgagatcgatgaggaaatcgctaccgcttag

SEQ ID NO: 266878 - DNA, 1005 bp, Klebsiella pneumoniae
gtgagcatatcacctctgttcaggtggccaaattcagtaaaccacttcaagtcgctgtccgagtcagagtcgctgtcggaatcggagtcactgtcagagtccgaatcgctgtcagaatccgagtcgctgtcagagtcggagtcggaatcactgtcggaatccgaatcgctgtcagagtccgaatcactgtcggaatcggagtcgctgtcggagtcggagtcagagtcgctgtcggagtcggaatcgctgtccgaatcggagtcactgtcagagtccgaatcgctgtccgagtcagagtcgctgtcggagtcactgtccgagtccgaatcgctgtcagagtccgaatcgctgtcggagtcggaatcgctgtcagaatccgagtcgctgtccgaatcagaatcactgtcggagtccgaatcgctgtcagcatcggaatcactgtcggaatccgaatcgctgtcagagtcagaatcgctgtccgaatcagagtcactgtcagagtcagagtcagaatcactatccgagtctgagtcgctgtccgagtcagagtcgctgtcagagtccgaatcactgtcggagtcggaatccgagtcgctgtcggaatccgaatcgctgtccgaatcggagtcgctgtcagagtcagaatcgctgtccgaatcggagtcgctgtcagagtcggagtcactgtccgaatccgaatcactgtcggagtccgaatcactgtcagagtcagagtcggaatcgctgtccgagtccgaatcactgtcagagtcggaatcactgtcagagtcggagtcgctgtcggagtccgagtcgctgtcggagtccgagtcgctgtcagagtcggaatcgctgtcagaatccgagtcgctgtccgagtctgtatcagaatcggcatcggcatcactttcgctgccgccagggtcggtatcgctgtctgagtcagaatccgaatcactgtccgcatcagaatcagtatcatcgttcggagaatgcgacgaatga

SEQ ID NO: 266879 - DNA, 195 bp, Klebsiella pneumoniae
atgtacatcgagccctttttcacaatcgtaaaaatcatgggcatcttttataggctggaagaaggattttatcaggcgctaatgatgcacagttataaattcttaataagacgttttcaggtgcatggcaataacgtgggcgttatgttgctgctcaaggccattcatatgatatggctctgcaacactttatag

SEQ ID NO: 266880 - DNA, 840 bp, Klebsiella pneumoniae
atgaaaatacattgcctgcaaaccggagatgtccagataaagagtcggcatcaactagcccgccatgaggcacgcccagctcgggtttttgatgttttaaaagacaaaaactggagccctcgtctcccgatcggatgctggttaatagaacatccagaagggcttattctagttgatacaggtgaaagttcccacgcaaacgaccctggatatcaaccctggtggcatccgtttatgcagtattgtgagaggagatgggttaaaccagaagaagaggtcagttcaagaatacgggcgcttggatttgatcctctggatgtccgatgggtcattatgactcatatgcacggtgaccatgcgggaggaattaggcactttcctaatagtgaaattatcctcagccataaagaagcccatgatgcgctggcctggtctggtcctgcacaggggtttctgaatatgcactatccgaagtggcttaaaccaacaacaacaacccatgatgacgggccgtttgagagttttgacagaagtatgtcagtaaccaaagacggcaatgtaagaatcgtaccaacaccaggacacacgcccggacaccagtcagttatcgtcgatatgggcgagtattatgtgctcatcgctggcgatgcatcgtatcaggaaagctatatgctggaaggtcgcattgatggtgttgctgttgatacaaaactacatcacgactccaccagaaggatgcgtgagttatgtcgacgtaaaccaacaattacccagtttgcccatgacttcgatagtgcaaaacgacttgaagagaaaacttttacagtgcctggcaaatag

SEQ ID NO: 266881 - DNA, 615 bp, Klebsiella pneumoniae
atgagagcaataaccacagaagaaaaaaaatctacggataccgtaagagagagaacgggaggacgtagcgcaaaagtgcgagaggcgatattgcaagcagcccgacgcatacttatggagagcggcgcagactcacttactcaccgcaacgtcgcccaatacgctggtgtaaacgcgtcaacggtttatcgtcgctggcctgacagggcacgattaattgctgatgtattcaaaaatactgctgatggtatggtcaaaattcccgatagcggcagtctggcaacggatttactgcagttcttgcaaatgatcgctgccatgctttcttcttcagagggcaggaagctgaccgagggggggatcagtgccatgtcgtcgggtgatgacatggttaaatctgctattcgagagttatgggagcaaagattcagccaggcagaaatgattttcgaacaggcagcacagcgaggtgaacttgattataaagggcagcgtaaagccatacttgaaatgctgattgcacccgtctggttcagaattctgattactcaaaaatgtgttgatgaggaatacctgattaccaatatccgtgatgctttagcaatgaagaggtaa

SEQ ID NO: 266882 - DNA, 414 bp, Klebsiella pneumoniae
atgactacaccacgaggcattcgaaataataatccgggaaatattcgctggggggacgactggcaggggctggtttctgagtctcagcggaccgacaaatcattctgtcagttcaaaaccccggaatatggtatccgggcgatgattatcatcttgcgcaattatcagcgcaaatatggactgagcacagtaagcggcattatcaagcgctgggcgccgcctaacgagaacaacacccaagcgtatatcaatagtgtcgccaaagctacgggggttagtccggatcagcacattgataccaaagacagccgtttcatgatgaagctgttgcaggcaatcattcagcacgagaacgggcagcagccttatggctttgatgttttcgtgcgcgcggttgaactggcaggcctataa

SEQ ID NO: 266883 - DNA, 711 bp, Klebsiella pneumoniae
atgccattgataaacaaattcgcttacacgtccccaggacctagaactcaaaaccaagatgccatcttggttgagtgtttgcccagtgctaatttgttatgctgcgttgcagatggcgttggcggtaatcttggaggggaaacagcctctcgcttagcacttgacataatttctgcaactttgcgaagtgatggcaatgtttcacttcatgaagccattaactccgctgatgaagcgattaaaaatgctgctagtgaagatgataaattgaccggtatggccacgactgtcactgccatcaaacttctaggtaccaagttactaggggccaattgtggtgattcccgtgcttatctgttgagggggcgtggtcttatgcagctttcatatgatcatagtgaagttgctcgacttctacgtgaaggtaagttaactaaagaggctgctgttgactatccgcgtaaaaacattcttgatagtgcacttggagcaagtaaacctttacaaatccatgattttcaaatcgatttgatgggcggtgacagaattgccattctcacagacggggtttcttcagttgttagtaaaaaggactttcgggatctttcattaaaaaatcagttattggatgattatggttcaagtattatcaatcttgttgagcatagaggtactagggataattactctttgattcttatagaaatttga

SEQ ID NO: 266884 - DNA, 1332 bp, Klebsiella pneumoniae
atggtgatcaatcatatcaagcgtataggtagtggtggttttggtaatgttgatttagtgcaagacattgagaacggtaattattatgcaaaaaaaacattttcgataaaccaaccccagcctttgcctcccgaactggctgaaaatgttaaaaaaagatttataagagaggctagtgtacagcacagattaatacataaaaatattgttccagtccttttcaaagatcttgcaagtaatccaccatcattccttatgcctgttgcagcatcaagtcttgataaagatatcgcacaaagtcgaaatttgaatggttttttcttaagggccataatggatattttgtctgggcttgaagaattgcattcattgcaaatttatcatcgtgatctcaaacctcaaaatgttctaagatttgacgcaggcgatggttcatattatgcaattagtgattttggtttaatgtcagttaaagatactcaaatttctgcgttaactcatacaggaatgaaaatgggttcggattattacactgcacctgaaattgtttcagacctcagaaaagcaagtattgcctctgatatatattcgttgggatgtatactacatgactttgtaggtacagacgaaagaattccttgtggtgagattaataatgattcaagtgcgtacgcccatattctacgtgtatgtactcgtcgagatccatcaagacggttccctagtgtctcagcattaagggatgcaattcttagcattgatcctgcgactgttattcatctctcagctgaagtaagttcatatgcttctgctttagagagcggtaacccaattaatgttgaaacgtggagagaaatagttaattttattgaagataatattggtggagaaaactctactgtgatatttcaacgtctaactttcgataggatcaatgaggtcattgctcatgacactatgctcgcttgtcgactaggtgaggcatatggtcgttgggttgctgatggtgtattttcatttgagcagtgtgacgggatatgtaatcgactcgaacagtttttacaagttaacgacttgaactgtaaagttgaaattatcatagctatgcttttaatggggacatctcataatcgttggtatgtcgaaaggcgctttgtaagcgtagcaggtcacgatatgacaccagatctggctaaaaggcttgctttggagatgagtatacttgaaggtagaatgtgtgcggcggtgagccaccttcaaagatccattggtgccacacctgatatgcttcatccagagcttttcgatatgatacaaagagtatgccattga

SEQ ID NO: 266885 - DNA, 876 bp, Klebsiella pneumoniae
atgcatgtaatttcagtaatttctaccaaaggcggtgaaggtaaatccactcactccgccaacctggctggcttctttgccgatgccggtctcaaaactctcctgattgatggcgactacgcccagcctactgcctccagttactactcgttacgttatgaagcgccatgcggtcttttcgaaatgctgatgcagacagtggatctcaaccgtcctgagcaactgatttcccggacttgtatcgataaccttgacctgattatctcgaatgatccccatgaacagctcaagacggccatgatgcatgcaccggatggtcgtattcgtttgcgtaatttactccagcatccactgtttgctgcttacgatgtcatcatcatcgattcacagggcgctcgttccatcatgctggaactggtgctgctggcaacgtcgtatactgcggtggcgatggtaaaacctgtcgtgccggatgtccgggagttcctgcgaggaacggtaacgctaatggaggaacttcttccttaccgtgggtttggcctcacattgccgccgatgaaagtcctggtcaactgcatggattacaccctgctggctgaagaagcgctgggtgcgttaaccacgataattgctgatggaacgtatagcaaagcggatattccccccgttactctgctcgaaacccaaatctatgaccttgaggtctataaattaggccatacgcgagggcaacccgctcaccgtcttgaataccagaccgaccggaagagtctgcccgccgcacagactatgcatggtctggcttgtgaattattccccgaatggcgcggccgctttgatgcggtactgcaaaaccagccgaagggggataaataa

SEQ ID NO: 266886 - DNA, 390 bp, Klebsiella pneumoniae
atgaaactctatcgtgctacgtacagcctcttaacccgcgatggccgggtcacagttgatgagcagtgggtcttttttgaagcagaaacctactctgacgcgctggaaaaaatatctggtctattaatgacgatgtgggattgttgtgaatcccagctcgaagtatggaatctgatgcaggataaccagcttgttgatctcagcatggatatggagattgattctccccgggagtggcgtttctttgaggtcggttattccgctggttctgctgtttatcttgatgtcgaacgtgatggctggccgctgtttcttgtctccccgtcatggctggcccgtttgaataaagcattggttgaatgccgtagtgccggaggccagcatgaataa

SEQ ID NO: 266887 - DNA, 1353 bp, Klebsiella pneumoniae
atgaataacgccgaacagatatcgccgccgcattcaattagtgctgagcaggccgttctcggtggtctgatgctcgataacgatcgctgggatgatattgccacgattgtttctgctgaccgcttttattcgcggccgcacggcgtgattttttctgcgatgcagacgttgttacttcagaacaaacctatcgatctgatcacgcttgcggaatcaatggagcagcagggcacattagaacagtgcggcggttttgcctatctcgccgaactctccaaaaatacgcccagtgcggcgaatattgtggcttatgccgagtacgttgccagctacggccagaagcgccagttgctggagctggggcacgatctggtcgggcaggccagtgatgccagaagtgacctgatggtattactggatgaagctgagcgccgcatctttgccattgccgaacagcaagctccggatggcgatgttgatctgcctgcttcactggaagtcttccttaaccggctagagcagcgttgcggcagcgaagatctcattaccggtacgcctaccggctttgctcaattaaatacgatgaccagcggcttccagcccagcgacctgattctgctggcaggtcgtccgtcgatggggaaaaccgcgttcggattggcattttgcgaaggggcgttgaacgagcgcccggatatggcggtgcaggtctacagtctggaaatgcctactgagcagttgttgatgcgttttaccgccatgctggggcgtgtgcctctacaacaccttcgcaatggggatatgcaggatgaagactgggcgcgagtcagcgctgcaataaaagtcctgctcgaagactggaaaggcaggctggtgattgatgattccagctatatgacaccggcgatcctgcgctcccgggtaagaaaaaatatccgtaaatacggtcatccatccctgatcctgctggattatctgcaactgatgcgctgcccggggcaggagaaccggacgcaggagatcgcggagatatcccgttcactcaaggcgctggcgaaagaaattggctgcccggtggtggcgctgtcgcagctaaaccgggcgctggaaagccgggcggataagcgtccgaacaacggcgatctgcgcgattccggggcgctggagcaggatgccgatctgattatgttcgtctaccgggatgaagtgtatgaccctgatacgcatgagccgggtgtggcggagattattcttggcaagcagcgtaatggcccaattggcaccgtaaaagtgcaatatcaggcggaaattacccgtttcgaggatttcaccggaggtcgttatgacttctaa

SEQ ID NO: 266888 - DNA, 1614 bp, Klebsiella pneumoniae
atgacttctaagaaatcgatccaactgggcgaaaagctgcttcagcggggtcgtaccccaaacactgaaagctctgccgtggtgctgccggtcaatgaaatgccgatggtgctgacgctggagcagttgcgcccgaatcccgataacccccgaacttcccgcaatccaaagtatgaagatatcaaagcgtcgatccgcgccagggggctggattcggtgccaaaagtcaccaaagacccggaaagcccggaggacgtttatatcttcagcgacggtggcaacactcgctattccatcctgacggaactgtatgcagaaacaggcgatgagcgttttcgccgtgttcagtgcatcgtgaaaccgtggcctgggcgtttgcagtgcgttatcggccatctggccgagaatgatgtgcgtggcgagctgtcatttattgagaaagcctttggcatcgagaaggcgcgggctatctatgaggaacaactggggcgggaagtgagccagcgcgagctggccgatctgctgaaagaggcgggttatccggttcaccattcgaatatcagccgtatgatggcgacaatcgaatatctctggccgtggatgcctaatctgctgaattcgggtatgggacgacctcagatcgcccagcttatcgcgctgcgaacggcggcggaaaaagcctggcagaccttcagtcagaacgtcgtgttgccgccggaacaggaatttaatgatgtctttggcggtgtctgccgcgcctttgacgacccggatcactactcagccgacatctttaaagaagagctgattgcggccctgctgaaggcaatgcccgatccgcaactgaactatgatagctggctgattgagcttgacccgcaggaacagaaccggcgcaaactgtttggagcgccggagccgcttccccagcatgttctggatgcagataaaacccatgatgagccttcaccaccaccggatgctgagccgccctccgtcaccactgattccggatcaacgaggaaaaagcctgtcattaccgggggtgactcctctgatcatattgatctaccgcccgatgaagaacaactggatctctatggtgggaatatacctggagattcgacatctgaattacccgacgttcctccggacgttgatcaagagcctggtgattgtgctggcggccagcgtcaggagccgccagtaaaccccattacttttgctgtgaacgggctggagccggtcaccgatatctggcatatcccggcgttacaggatgatgttgaacatctacaggacatcgcgtttcgcctggcgttcgaactggcggaggtgatgggggttgaagatgttattcaggaagataaatctctccttggctcaggctattctcttccaccaaatgcgaacggtgagctgctggccgcattgtgtggtggcggatcttataccccgttatcgaccttaaccggatttcttctcggtgcgtccagtccgtttgatgaacccttactcaatgatgtgtatgcggtgaaattcctgcgtttaatcagggtagtgcgccggttgcgcgagctgcaacgtcagacgttcagggaggagacagcatga

SEQ ID NO: 266889 - DNA, 243 bp, Klebsiella pneumoniae
atgaaagcggactgggttgatgaggcgcaggaagtgactcaactgatggttgatagccaggtagaacgtattcgctcttcgttgatatcaccggcgatatcgtcctctgaatgcgaactctgtggacatgagatcccggaggcccgtcgcagagcggttccgggcgtcaggctgtgcgttgaatgccagaccattgctgagtttcggcggcgtgttggatttggaggatacgatgaaagctga

SEQ ID NO: 266890 - DNA, 525 bp, Klebsiella pneumoniae
atgaatgcactgttaacgcagatagttatggagctgaagtcgggcaatatccgccgttgtgaggcgatggggttaacgctggaagagatccaggaactaaacagcctgaccgtcgaggatctgcattatctggtgaatacacaggtatcgcttctgaccttccgtatcaaccataccaatctgaacaccatgctggcgcaggcccgtcgtgagcagacccggacacagcgtatcgacagagcgctaacgctgggcggctctatcgagatgatgcagtgttttttcggcctgacggcgtcggaagtcagttcccggcgacgcctggtcggtgttgtaacccggcaggggcgcagccagatcccgacagaagaacaggagctggcggtgtggcagcagtggaaggcatcgaacgttgacaacctggaatcgctggatgcactggaggccatgatgctaatcgctgaacagcaggacatttcgttaaccgcagtctggacgctaaccaaaggatggagtgccgcctga

SEQ ID NO: 266891 - DNA, 1200 bp, Klebsiella pneumoniae
atggccgttgttcccgtcgatgatgttatacagcgtacgctggcgaagatgcaaaaccggattgagcaaaaggcgcagtccggtgagcagagtaatgagcagagcggattgctctttctggggaacgtgcatgacgccgttccccggcgtttatttctggatagccggttatcgccgctggataagatggcgtgggtgatgatccggctgtatgcccagcagaatgagggcgctgtttttcctacctacgacgagttgcagtgtcagctggcgcttccccattcggataaagcatcccgggagacggtcagcagggcgttgttaatgctgcgtctgaccgggtggctgagcctgtgcaaacgtgtcagagataaatccgggcgcattcgcggcaatatctatgcccagcatgatgaaccgctgggattgtttgacgcggaatacttcgatcctggctggcttgatgctgttgctgacgcctgccgacacaccaataaaacgatacgtctgacagcgctggctgttttgcaggatatcaaagccgataccggtatgcgccaccggcactcgcgcgtcgcgctgatagaagcccgtttatccgcatcacaaactccgcaggaaatggtatcagcacagaagaagaaaactcccggttctgaaaccgaaccaggtcaaaattcaccgagttcggaatccgaacttggcgttctaaaaggggatattttaccgggttcggattccgaactaagccggaaatcacgggatggcggcttagttcgaaaatcgaaccgttacgtacgtagttttacacagagtgtaaaagatacgtacgtagggggcgaaagtcggttgtcatggccgacagcggttatcgaacggctgaacacgcctgaccggaatatgctggagcagcagctaaacgcgctgcctgatggactagggcagcggatgctggacgatctggcaggccgcatgaaagtgacggaggtcaggaacgtcacggcctacctgctggcgaaccttaaacgggcaagggaagggcagtttaacgttggtgatacgggggcagtacatccgcctgcaaagccaaaatcggttgtagtgccaccatttgctaggaaaaaagaggtcaaacgtgcccgaagagagtttgtatccggtgtgatggctgagatccgggagcattatttcaggtcataa

SEQ ID NO: 266892 - DNA, 543 bp, Klebsiella pneumoniae
gtgagtaattcgaccaaatatcattggactgaggaatatcatgacactttgaaggatatgaatcctaatgatgcaattaaagatgtcgagagtatgagtgatcatgatgtactatatagagttaatatgcgaaagtttcaacaggactatatagcggattatcttgagtatttatgggaactcagccctaaggatttctggcgtcatattgaaattatgttttccgatgaaacagagcttctattatctgataatatgagttttgtttctattttatgcaatgaagttgcccctgtgtcagtaataaatagtgttgtgaaatatactgtggataaatggatttgtgatgggttcgagacgattaatgaatctttatataaggatattttatctgaaataatccaagagcaaaataaactttcaatttcaggtattaaattaatagatatctaccctagtgatcaatcagggatggatgagttagagaaagcattcaatgaaataattggtagggaaatacgaaactcctttaaaagctggtga

SEQ ID NO: 266893 - DNA, 147 bp, Klebsiella pneumoniae
atgaatttgtcattattggtactgattatcaggtccttgaatatggtgccgacagtgacaggctgcgtgatgctggagccgatattaaatacggttatggcttaccgggaaaaccactggcagtcatcggtacagacggcgagatga

SEQ ID NO: 266894 - DNA, 408 bp, Klebsiella pneumoniae
atgcagtattttgcgcctgacctggtgtttatcaatctcggcgagaatgattatgcactgaccgattcggaatttatgagcgggtacagcgccattgttgagcgggtacaggatgcgttgccgggtgtgcctgtttttctggagcgctggtacagcgacaaccacattaagcgtgacgcggtttttgacgtcattcaggctaaatatggaatgctgggatttaacgttcgtgaccttatccgcaactcaaattttgcgttccagaacggctacgcctattccaccaccaacccggcagacccgcaccccaacgcacgcggagccagaattattggcgcgtatcaggcgaaacgcgcactcctgaactacgccgtacaatctctcagaaaggaacaacaaaatggctaa

SEQ ID NO: 266895 - DNA, 1608 bp, Klebsiella pneumoniae
atgagtgaattttatctacgcacagaaagcataaagcaatcagatattttatctttatctgttgtaaattcaactgacagaggaattcttgacgctctgaaatctaatgaaccttgtcttcttgaaggatcaaggggtactggtaagtcatttcttatgagagttgcggaattagagttagaagaaggagataaggcatgcgtaacagtatttgttcctttcaataagagctctttgataacgactgatgataaccttcagttttatcattggatgatggctaagacattaaaatacctacttaataagcttagaaaaatggggatggttgtttcaggcttgacctctaatttgctcagtaatgagcatagtgactcagaagaaagcattgaaaccaatttgaaagaaatcgtaagacttttcgaagattcttataaaggaaagactgctgttgatatttcaactctacctgatatagaagatgtcaaagaagcaatacaaatgatttgtgaagaaaataatttagatagagttattttcttttttgacgaagcagcgcatatatttagacctgagcagcagcgtcaattcttcagtttattcaaagatcttcgctcaccatatattacatgtaatgcagctatttatcctggagttactcattttggtgactcttttgaaccaattcatgattgtgtattcaaaaagcttgaaagaaatattttagaatcagattaccttcaatatttcaaggatattgtatttaagcaatcagatgagtcgctaaagaaagaaatagacaatcaaagagatcttttcaatacgttagctttggcttcaggtggtaatcctcgaatgttgttgcgaactttgcaagatttatcaaaattaaatactagtggagttaactccacaataaagtccttttatcgtaatcaaatttggacagagcatactgatttgggggaaaagtataaagggcatcgtgaagttatagattgggggcgagatttcttggaaaactctgttatacctagagtagaagattacaataagagtcgaagagataagggaacagatgaatcaacaatttatttttggattcataaagatgcaccagaaccagttaaagaatctttaagacttttaacttatacagggataattagaaagatcgatagcgcggtcagagcaactagatctgaacttggaacaagatatgaaataaaatatgggtgcctgttatctttagaaagtaacccacatttagactcaaaagaattttataaaaatttgtctgttaaaaaattccctgagtttggcaagaatcacgccagctatgttggaagtgaaaatcttcttaataaacatgagcttcaatatgaagagtctttaagatctctcttaaagaaatcaattaacgtattagtagcgctcacagaatggcaaaaagaaagattacagtctgttggcattaacacaattgaagatcttcatagtaatactgaggaaagtctaattgaaaaaatatatggagtaggcccttcgagagcgcggactatgaaaaatgctgcgaatgcagagcttcttgaatatatttcaggatga

SEQ ID NO: 266896 - DNA, 3792 bp, Klebsiella pneumoniae
atggaacggaaagggtcgggttcattaggggcaggatcgcatgccggacggggatttcgctaccaagatgcgattggagtatggctgtcactccgctgttggaatcaggaacttcactatggcaccgttattcctgaggggcgagatgattacgaattacagggttccagcggctctgctttagtacaagttaagtctcgtcgtgatcacatggggttattcccgattagtgaagttgttggttttgtgcgggcgctctggagccggtacgaattatctccggaccctggcaaagatctgaatctaatccttgagcgccctgttatacaggggccaaaaacagattatatcctcactgaacataccggtttagctgaagttctgcgggaagactctcgctggaaattacttgcaccccgtactcatatctggattgctgctgaacctgcggaaaaagcaattgaaactatcagccatacactttcttgtgcaccggtggctgcacaagtttactacggtgaattgttaaaccacattggtggtttggctgatgcgaatgggatggttaagaatggaatatacgaaggattggctatatccgatgttgaagcggttattcgtcgtatggagcctgtccttgatgttgcgggtatggagatggcccttcgtgaagggtactgcgatgccattgattttctgactacggtagacgagcctgcattttatcagggagttgatacccgaccggcccatcttgcggcgggccttgtcgtggaaagacctgaagtgcgcagtgcggttttgactatgctggctgcccaaagagcagctctgatcgtcgggcagtcgggcaccggaaaatcagcactcatgtgggaaacagcccgcgtcagccgacatacagtacgctggtttgaaattattcgtggtgacagccttgacgcccatttacttatccgttttgcccgttcactaagagcgtcatctacagcgcccgttggttttatttttgatgatgtgggtaaagggaaagcgggtctttgggatggcctgctgcgtgaggcaagagccggaagcggcattcttctgctcggttcaatcagagaagaagacgtttttatgctaactacccggtctttcgccggagagatccgcccaaccgtggaagaagttgtcgccgaacggatttggcaacagctttctcatcagggacaaaccacatgggctggctggcgagagccatgggcgcaaagtaatgggcttttgcttgagtacacgcatatcctcacccgtggtgaacggcttgaaatagttcttggagaacagatagattgtcgccttcgggaggcaagggatgccgaactggctattcttcgcattaccgcactggcgggtgctgcgggagcaatggttgatattgaccggttatctgatgttttagacctctctcagagcgatctttcccgagcgctacggcggctcattgatgaacatctcatttccgaatccctaaatgggaagttgggagggctgcatcagctacgttctgcgactattttcagtctcagccataagtatccgccgccagcaattttgcacaccatcgaagaagcagtatttgctgttcacaacatgaatctggatatgcttgcggcttatgtcatcacccattatccggaagcaaaagctgctttgattaaagcgattgtgaccagaattgagcgtgagcgcgatcctgctgcattagtgactgtgctttcaggactgggacaggcgcatattgagatgactttacgggactggatcccggaggtgaaagcgttgggggtagagccgacacttattacaggtattgttatgttcgccgtcgctgatacagatctttcctctgatatttttcctgaacgaatgagaaattcagcgcgcatattacaaacccgatcaacatccgatcccagattgactttattaaccctgctttcaccaacgataattgagcagataatttctacctctacgatatcaaatcttctgggaattctggggggactgttgggaatagaggtcccggcgaatattcgacagatgatggttaatgcaagaccctgctttgatgcgttggaccttatggctatagcagacttactgagtgtggcccgacttgtcgatcccgcgatttcgatggcgtgggcatgtagcaatattccagagcgattaattgcacgtattccacttgagatcccctgggctggaccagtcagtgttgaagcggtgccagaaggccggctgctgcgtagctcgatcttccatgttgcacattctgtccagacagacgttcataaagacgttgtacaactttgcacactcctgcttggattggatccaacagctgctgtggttgctgtagatgctgttgctgccggtgggtttctctcaggtactccggattatccccttgcatctaagcgaattccaagagaaaacctgccaccaccagcattacccgaatggaataaacggtggatagctaccgccgccgggctggtgggaacagaaagctatacggattatttacagcgggcactcgtactgttaaataaactcgttccgttagtcgacaagatcctggatggaaccttacggtgcaaggctccttcatctaaagttctggaacaactgggggccatacatgaggcttcgcgggaacttaccctaccaaaaggaggggagtttattggtataaatatagaactgcatgccactcctgttcagaacatattattttattgttcaacagatatgatccggcgatttatatctttacctgaaggatatggtgcatacattgcgtggctgaaagatctgctgaaagacatagataagggcaaagattatccttgggatctcgtgggtggttatccggaaaaatccttcacgcgattaaaggagttgatcacgtcactgcgtcttctgtcagcagaagcgggtacccaaggaataaaaccgacacagctatggttaactgaggctaaaacggctgtgcgtggaggggcattgagcagcgccgtcagagtggtaatgcgccagttcaataagttagcctctggctacctggcagaagtagaaggcagactgaaaaatagaggaattgaaacagaactccatgcccgtcctgactgggaggaacttttgccgtggccaacgtcagaagttctggcgatcgttgatcttgagtatcccgaagactggccgaactggcttgaggaaaatggagcatatcttcagactgcaattggtgaacatcgccgcctatggattattcctcgtattgcagggattgtagtatcccggcttaccgtcagcgcgatatttagtttttttgcatccccgtatgcaattgatgactggcttgatgaattaaatttgcgtcggcttaacgatacactgactcaggctgcgcaacctgccttggcgcttatcagtgagcttgacggattacgctattttaaccttggaacggaaaatcgccctcatctggagcagtctgtacgtaaagaggatgaaaaagccctgattaccgccctgaatgaatttgaacaaatagcagaaggtacgccggttcaaatgttaccccgacaattgaatgaagagtgcatagcaggacgagcgggtatagctgagggggagattgccctgttatatggtcaagtgacggcaggaggcgaggctttaatgatacttcaatttactttactgactcaggatctggtgactgccttaactcaagcgtag

SEQ ID NO: 266897 - DNA, 1206 bp, Klebsiella pneumoniae
atgtcaaacaataaattaggggaagtaaaatcattactagtaccattaagtaaaatcattacaaatcttattccatatatgactatcgtatcaggtgttatcatatgggcatacctgaaaaacataggtagaatggatttattcgttgatgcactatctttaaatgcgggccttgtttcattattattttctactcttttcctttctgtttttatttctatagcattagttttaccaagttatatattaattttatttaaaatcaacaataacactaatgactcgcgcttaagttcagcaacgccagtgatcagcctactattatcgatagcatttttatgtctggtgtttctgccatatacaggttttgtagaaagatggatcaatggatataaattttccatagagaatatcatatttataatttttattgctatagcgctaatatgctgtataagcactatcataaattatgattacagcaacaaaaattcaaaaatcaaagttttctttaaagaagtcgcttatactgcgcttaacatttttatacttttcatctcgatattatctatctcaataccggtcagtctattattgagagccagtaaaggagaagacacgacatctattttatttgcattattatttatgattatattttctttcttcacatttttacctgcgatggtattttaccgcaacatagaaaaacagcgcattaataagattgatgaaagtgtatctaaaaacatcaaaaattgtgcttttacagttatgttttctattttttcgataacatttattttccctagcatatcaactgtctttgtctattcatcgctaagcagtattggcttaatcgataaaaaaacacactattttaagataagcggtgagaattataaacctgcaatgtttcctaccagcatatggaaaacacaaacgccatcagatatggggaatgatttttatattaaaggcacgaatcttttttctctgggttcgactaatcttatctgccctttatatattgtcaatttgagagattctgcttatcagaatgacttctcaacatttatacccactaatgatgaaaagaagattaattatttgaagaaaatgactaaaacttgtgttgttttagacgatcccgatgttcggttatgggacacgctttttgatgcggcaggccagatcaaaaagtaa

SEQ ID NO: 266898 - DNA, 207 bp, Klebsiella pneumoniae
atgatgctacaggactggcattctgccgacattatcgccggactgaaaaaacgtggtacttcgctgtcagcactttcgcgtcaggcagggctggcgtcttccacgctggcaaatgcgcttacccgccgctggcccaaaggtgaaaggttaattgccgaagcgttaggcatcgcgcctgagcaaatctggccttcgcgctaccgctga

SEQ ID NO: 266899 - DNA, 333 bp, Klebsiella pneumoniae
atggacagaggggaaatctggctcgtttcactggatcccaccagcggccatgaacaaagcggaaaacgtccggtactcatcgtgtcgaaggcatcatttaacacgttcacccggttgcccgttgttgtccctgtgaccagcggcggaaactttgctcgcgaagccggttttaccgtttcactggacggggcgggaacaaaaacaacgggtgttattcgctgcgaccagcccagaaccattgatatgggagcccggagcggtaagcgactggaacgcatacccgacgctgttgtgaatgaagtgctggcccgactggaggccattctgagctga

SEQ ID NO: 266900 - DNA, 228 bp, Klebsiella pneumoniae
atgcaattagccgatgaaaaggcacagaagggaaaatggcggggggaaatcgtggaacaggctgatgacacaagggttaacggcggccagggttgcactttgaccgccgaatattcaggctttttgccggttatcaggaaggaatatcgtcaggaatcccagcagcggcaggaaggcgcagattttataaaccagatcaatgctggtatggtccgccagcaggcctaa

SEQ ID NO: 266901 - DNA, 675 bp, Klebsiella pneumoniae
atgaaaaatataaaaaaaatctttactgtcgtcctacttacctgtaccactccagtcctggcccaatcaacattaactattccagatgatgtcactatttatgttgtaaatggtcagaactatgataaagatcgttttatctttagctctacaaatgacttaaaacttcctgatggcgaaaatcagatcgtatttaaattcagaactacggtaaaacaaggtaccgatgatttcaaaacttatgatagtgacactgtcattgcaaaattcaccatcaattcaacgcatgccagaatgattatgcctaactactggacattcactgaagcacaagatgggataaaaaacttatcctggcaaataaaaacggacaagggcgaacaactctcggttacacaagatacgcttcctggaaatggaattcagatcgcacgggattatgaaaaagaagtcagaaattataataatcataacggtcccgctgcaatcagttctcaatcggcactattgacaggaccgattgaaggtaataatgaaaatgttcccagtaaaagatataaaaatgatgatccggcgttacaagctacgacatctgaaatgcttaagtattggtatcaaaaagctgatgacaaaacgaaaaaacaatttaatgaataccttaaatcacagcaataa

SEQ ID NO: 266902 - DNA, 1578 bp, Klebsiella pneumoniae
atgagaaacaaaaaaacgtcaaaacaaataggtttgttcatattcgcaactgcacttctcagttttcagggatgtgttcaggcatcatctactactctggcagaaaatggctggacgtcgacaggcgatgtgaatgcaagctatattgcctctaagggccattatgataataccagtctcgggcataagtctgatagtgcgtattctgttgaatccttccatgtcttgaaaaacattaaagacggaaaatactacttgcgggcgtatacacaaagtagtggcgggcaatcagtggccgaaatattcacccggaattgcggtggggcagattcacatacagctattcctaaaaccgaagggaatacagatcactggactattgtcgaatctcagcaaatccaggtatccggaggtaactgtacgattggagtgagttcaaagggaaatgcaggtcaatggttacttgcagataattttgaattactaccgcaacctcaacctggagtcccccccaccgctatgcacgttggtggtgatatcacatatcgaaatctcacttattcagttggcggtaaatgggctgacgagaaagggaatgaaaaggatgtcctcagcattcttcaggataatgccttcaatctcgcgcggatccgtatttataacaaacctggcacaccggtagatcttaacggtaagtcttatcgtttacaggaagggtttcaggacttgaacgatgcagttaaaacggccaaagcagcaaaagatcatggcatgactctgttcctgtcacttcattatagtgatttctggactaatccagcacagcaggcggttccaaaagattgggaaggtcttaaaggtgccgcgctacaaaaagcattatataattttacctataaagtgatgacgacccttaaagcaaataacgttacgcctgaatatatttccattggaaatgaaattaatgatggtgttgctggggtaactcgcggcgaagagtactaccaacttttgcagaaaggctatgaagccgtgaaagcagtttctcctgaaacgaaagttgtcatccatcttaccgtccctaaccaacagttttatgagggatggattgatgatgccaggaaatatggtctcaactatgaccttattggtgcatccatgtatccattctggaccaacatgtctattggtgaaatggcaaactttgtaaaccatatcgcaaaatattctgataagcatgtaatgatctgtgaggtaggctatccatggacgttaaaaacacagttcggagccgctgatattcaatcgctcattgtcgctaacaaccttgatccggatgggccagaaaactatggggctacgcctgaaggacagttgaaatatatgaaggagtatttccgagccatgtataacacaggcgttgtagaaggcatctcgtactgggatcccattgccatagatgttaagggagctggatggattgttggggaaacgagtgcggttgaggataccagcttctttgattatcaaacgccacatcgtgcgcttgaaagcttaaaagcattctatagctattga

SEQ ID NO: 266903 - DNA, 1071 bp, Klebsiella pneumoniae
gtgaataaagctaagctattagccgttatgattcctattgtcttatttatagatcatgcgcaagcgatagaaatttacaacaagaatggaacgaaagtagatttatatggtggaatgaattctcgtagagagttcaatagtgatggcaattacgataaatcacttgttgatttggggttttatggggagtcaaaggtcacaagtgatattactggctacggattctggcaataccgtattaccggcggtgaaaatgaatggagctcaaatggtggagtccgacaacaatttgctggcctaaaaatggttaatgttggctcactggattatgggcgaaactatggcgttttatacgatgttgaacgctataccgatatcgcaccttacttctccggtgatacatggacaaatgcatcagacaactttatggttagccgtggtgatggcatgctcacctatcggaatgaggatttttttggcaaactttctggccttgattttggactacagtatcaagcaaaacgtgagggatatgacccggataaagaaaatggtgagggttatggttattctctaagttatcagatcgcccaagggttaaccttgacgggtgcctatagcaattctcgtcgcactcaaaaacaaaatactctcgagtcggagggggagaaatatgctgaagcgtgggggattggtggactctatacttctgatcatctatacctagcatcggtctactcagagaccagaaatcttactcccataaataaatcatgggctgattacaaaacggcagacaaaacacagaacatggagtttgtattacagtatcaatttgataacgggttacgcccttccatttcatatgtccagagtaaagtaaaagataaaacagccggtaactttgacatggcggaatatatacaagcaggtgtgctttataaacttactgcgaacgtacaactgtggttcgatcaccgttttagcctggttaacgaagattcagaacttgtgaattatcgcatcattgatgatgatcgttcagcagctggtgttatcttcatgttttaa

SEQ ID NO: 266904 - DNA, 2196 bp, Klebsiella pneumoniae
atgatttatcattttaagaatgaacaaccctctaacttattgcgtggacaccttaatcttggcggccataatggaaacacttcactagaagtgactaatcattatcttgagaaaaatggcgagtgctggattccaataatgggagaaatccactacgggcgtgttaatcgtgagatatggaaagatgaactattgaagataaaagcaggaggcatcaccgtcattgctgcttatgtcttctggattttccatgaagaggaggaaggacagtttaacttcacgggaaattatgatttacggcacttcctcaccctaattcaggagtgcggattagaggttgttatgcgcataggcccatggtgccacgcagaactacgaaacggtggcttcccggattggttagtgaaaaaaggctgcaggacacgcactgatgatccggaatacctaaactacgtaacacgctactggcgtcaattgaaaacccagatgagtggtttcctgtttgaggaaggtggcccgattttcgccattcagttggagaacgaactgacggataacgcagcccacatcaaaacgctaaaagatcttgctctcgaactgggactaaaggcaccgatttataccgccacgggctggaatgcgacctacggcgcagcaattcctgaacgggatgttctgcctgtatttggtggatatgcggatgccccctgggaagagcataccaggcagcttgagccggtttcacactattttttcctgcctgcgcgaaatgaccactccatcggaaaagatctcattatcgccaaagagacggatgatgatgtgtttcagatgaaatatgacctttatccttttgcaacttgcgaaattgggccaggcgttcaggtaacacatcatcgccgccctgtcattagcccagatgacgcagcatcacttgcgatggttaagatcggttgtggcaataatatgccgggatactacatgtaccgtggcggcaccaatccaattggccaaaagcatacaatgcaggagtcaaaagcaacgggttacccaaatgatttgcccgtacgtagctacgacttccaggcgcctattggtgagtttgggcagataaatccacagtacggtaagctaaaaattcagcaccatttcctgaacgcctttggtgattcactgggtaaaatgcatccacagtttcaagcaatagaacttgatggacgctatgacacacattccttacgctatgggttacgcacaaatgggcaaagtggctatgtttttgttaataactatcaaagacatagtaatctttccgcgcatgacggcgtacaatttgtcgttccggttgccaacggtacattgacattcccgcaccagggtctgcacgttccgtcagggagctatttcattctaccctataacctgaatatcagcggcaatacgctcgcttatgccacggctcagttgctatatcaacatgacaacacagtattctttatggctctggatggtattgatgctgaattcacttgggccgatggttcgtctaataaagttcgtgcaggtcttgatagcacttttaaacatcagagcgaaggcatttccataaacgttgttacattgacacagcaacaggctgaacaactgtttgtcctcgaaggagagatattttattcaccagcagatctattccgggatggtgaatatcttactgcttaccgacaagctaacagtgatctatcctggtttcattggaacggctcgaagtttattgaacatgaatatcataaaccttcactcacgaactgtattgagtaccacgaaattactactgagattcctgaaactctgggtagcgaagaactcctattatcaaaaaccgatcagattaaatcctggtggttaaatatagataacatcaacctagccgataattctgatgcattaatttgtcttgactatatcggagacattgctcagttatatgttgacgatattcttgttgccgatgacttctataaaggaacgaaatggctcgtcagccttcgacatataaaacggtttggcaacaacgtcaaactcatcatatctaaaaaaacggaagacaatatttacattgaatcagaggagcggaccggactggatttaaaagatattcatctggacgttatttatgaccataaattcaaaatctaa

SEQ ID NO: 266905 - DNA, 1233 bp, Klebsiella pneumoniae
atgaaccttacaagcaggaaaaattatgtattgctaagtgcctttgattttttatacctattttcatggtcagcgaccatgtcattttttgtgatttggaccactcagcacttagggataagtgccaccaacattggcattatctattcgattaatgccatgattgctttactgatgcagcctatctttggctatatttcagataaactaggcctcaagaaaaggctggtatggttcttaattttattacttttgcctgttgggccattttttatctatgtctatgcaccattactggtcaatgccttttgggtcggggcggtgcttggcggtgtgtatctgggcattatatttaatactggctgcggtgttatagacagttatcttgataaagtatccagacggtatgaattcgaatacggaagagtaaggatgtgggggtcattaggttgggcattcgcaacttggttgaccggtaaatatatcgactcaaatcctgacattcctttctggatgggaagtatagccatcctactggcagggttttgctttctttttacccgcattgatttaaccaaggatgaagttaatgcaacggaatcactcaaggtagtaaacgcgttagaattgctcaaaaacaagcaattttggatgttgatgattttcatgctttttgtgaatcagatatatgatacttacgatcagcagttcgcccaatatttctctatgcaatttactactcgagcagaaggcaaccattggtttggcgttctaggctctattcaggtgtgcttcgaaacggtatttcttgccatagttccgtttttcgttaatcgcataggtgcaaaaaaagcattaatcctggctggcacaatcatgacggcgagaattttaggttctgcgattgaactgggcccaatctggatagcatcaatgaaaatggcgcatgccatcgaaaaaccattaattgtcgtatcactcttcaagtttatcgcagctaacttcgataacaaactctcttctacagtatatcttctgatgttattttctgcgtcattagctaccactatttactcaccactcgcagggtatctctacgattcagttggctttgttaacgcttatattatctttggttctattgccggcacctttacgattttctcttcaattatgctagaagataaagacaaaaaaagagtaaagccatattcagagtcaacgccagcataa

SEQ ID NO: 266906 - DNA, 1197 bp, Klebsiella pneumoniae
atgcagatagcaggactgaataaccaaacggtgaggcagcacaaccgccgagcaattatgacgctgatttggcgctataagcgtttgagtaaatcgcaactggccacgcacaccgggttatctattccagcgatcagcaagatcctcgacgaactggttggcgaagggaaactcagccactacagcgaaaacctcagctcgcgtgggatgaacagcgggcactatcagatccccaaggagggaccgctgattctgtgcatgaacgtcacgcccaccagcattgaaaatcagctaatcgatgcgcaaatgacgcctgtcggcgaatttctccagactcagattaacgcccccacgccagaacacctgctttcagccattgaagcattgtggcgtgaacagcaaaaaaaatgcccgggacggcgaatcaatcttgcgcttggggttcatggtcaggtggatcctgatacgggtgtctcgcaaacaatgccgcaggcaccgtggaaaaaaccaattgagattaagtacctgctggaagaacgtctgggagtatcggttcgcgtcgataacgactgcatcatgctagcgctggctgagaagtggcaaaatagcggtaatcgtcaggacttttgtatcgtcaatgtcgactacggtattggttcatcatttgtcatcaacggccaaatctaccgcgggatgctcaacggcagcgggcagattgggcatacgattttcgatcgtgacggcactgcctgcgattgcggacgctacggctgtctggaaaccgtcgcatcactctcggcgctaaaaaaacaggcacgagtgtggttgaaatcacaacccatatcgtccggtttagacccagaaaacatgaccagcagccagctcatcgacgcctggcacaacggcgacgagcaggtggtgcaatgggttgaagaagcggcgaatgcgattgggttaacgctatataatctcctgaatattctaaatattaaccaaatttggttctatggtcgcagctgtgaattcggcgacagatggctacagactatctatcggcagattggttttacaccttttgaccaaggcgacgccgttcgcatgcgtcaaacgcagataggcttcggcaatctgacccgccagcagcagatcaccggcattggctatctatatgttgaagccgcgttggcacacgcctga

SEQ ID NO: 266907 - DNA, 1197 bp, Klebsiella pneumoniae
atgagcgctctgagctatctggaaaagttacttaatggagttgatattcaatggaagacgattggagaagttactctacgaacgagtaatataaaatggcgtgaggctacccgctcttatcgatatgtggatttaacctctgttgatattgaaacaaaaaaaatcattgagacaactgaagttacagcaaacaatgccccgagtagggctcaaaaactcattgaggaaaatgatgttattttcgcaacaactcgaccaactcaacaacggttttgcctaatagacggtgagtactcagatgaagtagcaagcaccggattctgtgtcttaagagcgaaacaagatgaggttctgccaaaatggatttggcattggatttcaacaagttactttaaaaaatatgttgaagaaaatcaaagtggatcagcataccctgcgatatctgacgcgaaggtaaaggagtgctatattccagttccctgcccggaaaatcctggaaagtctcttgccatccagtctgaaatcgtccgaattctggataaatttactgcacttaccgctgagcttaccgctgagcttaccgcacggaaaaaacagtacaactactatcgtgaccagttgctgagttttgagggggggagtgttgagtggaagagtctgggggaagtagcaataattacaattggtgcgtttgtccgtaaggacaagcagaatcctgacgcagattatccggtctacaacggagggcggactcctacaggttactacgaagacttcaacaatgatggcgataagattattgtgagtgcgcgtggagcaaatgcaggatttgtaaataagagttccactccttactgggcaggcaatagttgctattccatctctgttagaagcactgaacagttgcattggatgtatgtctattactatctgaaacaatccgagaccaaattaacgggtattcagcagaaaggaggtattcctgccgtatccaaaaaacaaatggaggaccttttactaccaatcccttcaaagtcagagcaagttaggattgtcaccatactcgataaattcgacacattaacaagctctatcaccgaaggcttaccccgcgaaatcgagctgcgccagaaacagtacgaatactatcgtgatttgctgttcagcttcccgaagcctgaaattgccagtcactga

SEQ ID NO: 266908 - DNA, 627 bp, Klebsiella pneumoniae; identical to SEQ ID NO: 109896

SEQ ID NO: 266909 - DNA, 1443 bp, Klebsiella pneumoniae
atggctatatcaaaagaaatgagaaagcttataaataagtggaaaactggaacttcttggcctaaacgtcttgagtggcttgaaataaagggaataaggggctggtcaggacaaagagttgacatccagtttcctatagtagctttagtaggtgagaatggttctggaaagagcactgttcttcagtgtgctgcatctgtctacaaagataaaaagaaaaggttcgcttctttttattttccagatacgccattcgaaaaaatccaaagcgcttatatacgatattcttatcgcgaaggtaataattcagtagtaaaatcgattagaaaaccaacaaatcgctggataggaaatcctgagcgacctgatcgaagagtcgagtatgttgatttaagtaggcttcagcctgttaatgcgcgacttggttacttaaaattacttaagggaggttcgacagagcaggctcatgaagcttttgataatgagcgcttggagaggctgcgtaatatcattgggaaaagctatacagcagcagggttgtccacaacaaccatagatgctaaacgtcctgtaactgttatttcaaatgaaggagctaggtattctggatttcaccaaggagctggcgagattaccgcaacagagttaattgccgtagattatcctaaatacggattaattcttattgatgaaattgagacttcattacacccaagagcccaaagaagattaatgcgcgatttagcaaatttagctagggaaagagagttacagattctcattacgacccattcaccatacatactttctgaattaccacctgaagcaaggatttacctcatgaatggaattgagggaaagactgcggtcagtggtgtaagccctgagtttgcaatgactaagatggatgaagaaaaccatcctgaatgtgatttatatgtcgaagatgtaatagccaaaacgctcgtttctgaagtaatagcaagttccaaagaaagagagcttttatcgcgagtgatgatcatcccatttggcactgctagcgttggaatggctttaggacaaatggcgcataacaagagatttcctaggtctacggttgtttatcttgatggcgaccaatcccctgcggtcggatgcactattttaccaggagatgacgcacctgaagtagttgtattcaacgcattacaggaaaaaggttggcctaatgtttcagagaaaattggccgcgagccagcagaaacaattgatgcattaaactcttcaatgagcaatgctgatcaccatggatggccaagggcagcagcaaattctttaaacgtaggttctgaaatactatggcatgccatgtgttcgtcttgggctaaaaattgtatgagtgaagatgatctcgatgctgtgcttcaaccgattgtagatgcactggaaacggagcgttaa

SEQ ID NO: 266910 - DNA, 1263 bp, Klebsiella pneumoniae
atggcactaactgaggtaaaagtcagaaatgcgaaacctactgaaaagcccgtcaagttaacagatggggatggtatgcatctcctggttcaccctacgggttcaaaatactggcggcttcaatatcgcttttctggtaagcaaaaaatgttggcgcttggtgtttatcccgaagtgtctttagcagaagctcgtcgtagaagagaagaagcaaggcaactcattgccaacaatgttgaccctggcgaaaagcgaaaaacagaaaagattgaagagaaaggcttactcatttttgaaactgttgccagagactggcactcaagcaacagaacctggtcagacagtcacagaactaccgtattaaacagcctgatcactcatgtatttcctgttatcggtaagcggaacattagtgagcttaaaactcgtgatttacttgttcctctgaaaaaagcagaggaaactggacatcttgaacttgctgcccgtttacaacaaagaatcactgccatcatgcggtatgctgttcacaatgctttgattgaccaaaacccagcttacgacctcgcaggcgctgtaaccactgccaagagtaatcaccgccctgcccttcccctcgaacgacttcctgagcttctcaaacggattgatgcctataaagggaaaggtatcactcaaatagcagttcaattaactctactgactttcatccgttcaagtgaacttagattcgctcgttggtctgaggtgaatttcaaaaactccttatggacaatccctgcagaaagacgagaattggagggggttaagtattcaaataggggctcaaaaatgaaaacccctcatcttgtgccgctaagtaagcaggctgtagtattatttaaaaggctccaagctataagtggagaaaaggatcttatgttcattggttttagtcgcgatgacaaaccaatcagcgaaaacactgttaacaaggctcttcgcaccatgggttacgacacgaaagctgaagtttgtggtcacggttttcgaactatggcttgtagtgcattaatcgaatctgggttatggtcaagagacgccgtagaacgtcaaatgagccaccaagagcgtaactcggttcgggcagcatatatccacaaagcggaacatctcgaagagagaaaactcatgttacaatggtgggctgactaccttaatgccaacagaaaagaacacattacaccgtttgaattcgcccagagaataaagaaaatgaattag

SEQ ID NO: 266911 - DNA, 327 bp, Klebsiella pneumoniae
atgatttcctatttcattctttttgttgctggctgcttcgaggttgcgggtatttccaccctgaatggctatgccaatgccggaaccgttcgccgtaaagtcacgttccttctggccaccattgtactctttgccattgcgctcagctcgctgagtatctccatgcgcgagattcccctttccgtggcctatgccatctttacgggggtgggtaccatcggtgccgttgcggtaggcgtgtttattaacggagataaaattcgtctgctcaagggggcaagtatctttcttattatcttcagtgcgatcatgctaaagctggtttaa

SEQ ID NO: 266912 - DNA, 327 bp, Klebsiella pneumoniae
atgaacaccagaggtctcattcttattatcatcggcgcgatgtttgagtgcgcatgggcattcggacttaaacatgcccagggtccatttgaaatatttctgaccgtggtttgcgtggtggccagcttcggcatattcatgctgtcatttaaatatgtcggggcgagtatcgcgtatgtggtttataccggtctcggtaccctatttgtggtgctggttgaaatggccgacaccgtgtctcacggagggcagccagaaattctccgtatcgtattcgtagtcaccctgatgctgggcgtcattggtgttaaaggagcaaaatcatga

SEQ ID NO: 266913 - DNA, 1302 bp, Klebsiella pneumoniae
atgctaacacctcacaatgataaaccgttaacgactaaggccatagaaagcatgaagcctggttgtaaagacaaagcggatgtcggtgaaaaccgggggctacgcattacctgtggggctaccggcacccggacgtttttttaccgctatgttagcccagtcacgcataaactgacacagttgaaaattggcgctttcccgcaaatttcacttgcaatggcaagagttaaattacaaaaacttaaagaaatcagagcggaggggcgttgcccggcacaagagcataaagctgtgctggctcagcagcatgaagaacaagctgcgttgcagaaagtggagtctgtatcggtatggaccgtggaagcgcttattgagctttacctgacacagcgtatagaagatcgcattacaccggatggaaagcgtattcccggcgtgcgtaagctaaaaggacaaaaagaaactcgccgcctgttggtcaaaaatgttgttccggtcttaggtcatcgcactgcatcggaagtgacacgtaaggagattgtcgaactggcaaatagtgttgttgccagaggtgcgaatgttctggccggaagtatggtgcgcgaactgagtcttgcctatgaatacgcgattggtttagggcgttttgatgatgattttgctaatcctgcattattagctaaaaacagtcttcgtcaggcaagaattaaattgaccagtaagcgtggtacgcgcgtactgaatgaagatgaactggcaaaatttctgcactggttaccaggtgcagccttcactcccacaataaaaaacgtgttgcgtttaacattatggacaggttgccgtacaggggaagtatgcgcaattgcctggaaggatgttgatctcaacaaaggaacgattcatttaaacgaggacatgactaaaacaggtgttgggcgctatgtccaacttccggttcaggcaattgagtttctcaaagtgttgaaaatgacgtcggataaatatcttttcccctcacaggcgacgaagctacccattcagcaaaaatatttaactgaaaacgcatggcgtcttcgaaaagagggtttgatgttagatattccacattggactccgcacgatctccgacgtactgtgaggaccggattgtcccggctgggatgtccaggggaagtggctgaagcgattattgggcatactcgtggtggtgttgagggaatttataatttgtatacctatgatgcggagagcaagaaatggcttcaggcctgggctgattatatggacagcttgtttgcataa

SEQ ID NO: 266914 - DNA, 201 bp, Klebsiella pneumoniae
atgaatctcacaccggataaacctacagccagagatctcctggaccgctgccgtatcctgacgcattccatgcttgagatcgatgagcatggccccaactatgtcctgctcctgatcctcgccgatcagcttcatttgctctacgaagcgtttaaagaagccgaggaactggaaatgcggcgtgaaaagctgccggaataa

SEQ ID NO: 266915 - DNA, 684 bp, Klebsiella pneumoniae
atgttttcttcactcgcttcattgaaatcacgccttgcgcattactgttatactctcgccctctccgacgataatgacgagttgattcagatattcaatatcaaccgccaccactgcggtactctgcatcaggaatgtctcgaacgttggttaaaccatgccgaaagatggcgagaacgcttccccgaaaagccactttctccccacgataacgcctctctccgtcttgccctcgaaatccttagcagtcataccctcaatcagtcagaagtcctcagcacattgaccgaaggggatttttattctcccggcgggttacgtcatatccgtcaactcttggcctctgtggtgtacggatttgctttccggctagccgaaattcgtatcgccagcgcgtaccaggaaacgggaggtagtctttttatgctgactgaatcgttgcgccagcttgcggacagcatccttgccgaccatcgacatctccgccccttggaacgctgtcggctggacagtgtggcgatgtcactcaccgtaatacagatccgcctggatgaatggctgcggcagccggataaacttctgcgggatgagtcggtgataaacgaactctgtgccgtcagtaatgccatgaaatcgctgctgctggatatcgccagaatccgtggtggctgctggcagcaataa

SEQ ID NO: 266916 - DNA, 1128 bp, Klebsiella pneumoniae
atgaacaaacgtgatgatttcacagaaagaactaaaaaggcgttagcaaatagagcagggcatcaatgttcattcagaggatgtacatgtcctacctcaggccctagtgaagaatctgatgaagcaacgatatctatcggcattgctgcacatatccatgcagctgctcctggaggaagacgatatcttgcatcaatgtcaccggaagaaagaaagcatatttctaatggaatttggttatgtgctaaccatagcatagaaattgatcgggatgagaatcactataccgcacaactactaagagaaatgaaagccgaacgtgaaaatattgccagtcaaaacttaagcacgaacatatctcagtatggaacctatgatctttttgagatagggcccgatacgatcgctaccggcgaaattataaatataaatagattggtttggaaatttaaaattcagcatttcattaccggagatattcggacaatcactgattacattgatagatttgaaaaaataaatagttacgatcgttatgttgtttctaatgaattaaacgatggtcgtttattgtcaaatcctcctgaatgggagaaagtagacaataaaattattgttacctgttatgttgagaaaagtttccctcgaatccgggcagatcaactaggttctacgtttgcagtaaatgacgataatgatctatttttacaaaacggtaacctagcaagagtttcaggtataaatgcattacctcagaaaattaaaagcaatctatctcttataagaggcgaaagtccttttcacccaacttatggttctagattatgccagttctatgaagagtatagagggactgcatggttaaatagattatttaaattagatatgattcggttggcatcaataccttatgaggatcctaattcccccggtaaaataaacactccactaaagtgtatcaaccgaattaataacataaagttaattgaagaaggttatgatggtaaatggatgcctattgaatttgagcttgatgttgagggtgttggagcatggaagaaacaacttttaatactggttttaccatacacaccagaaccccctgatagctggaagaagcttctttga

SEQ ID NO: 266917 - DNA, 1677 bp, Klebsiella pneumoniae
atgaaacgcgcaccgaatgtaaaaaagctaccggaagataaatatacggaggccatcatcttcgccggagatgaagcctggaatgccgcaaagtgttacatacaggacccggtagttgacgatcctgtcccgccaattgtgctcgacctggaccagttagaacatctcaatgaactggacatcattgacgaaaaccgccaccgggtacggattcaccaggccgggcgcatcgcacaactggccctgacacagattgcccataagctggcgctggcaaatgtgcaatacgccgtgctgtatgatctggagggcaatctactggaagactggacatctcaacttgcccgccagaaaagcgacgccgccgagctgttggcctctcagcaagcgttaagcgatggtacgccgttagcggaagccgatcttcagcgccttgaagagcttaataacgaatatacccatgtactgctttccggcgagcattacgtggtcagcgtgaagcctcatgccgtcaccgggcgaacgcacactttccagacgctacgcgcatttcgcaataactttctggccgacaaaccaattgccggaaaaccaacaggcaatgcgtggctgcaatggccgggacataacagtaaaacaggtggcattggcttttacccgcagcctgtgctttgtccaccggatatctgtaacctgtttactgggttcattacagagccgttgccgggtgatatatcgcccttcctttatcatgtagaacaggtgatctgcgccggagataaggtagtgtctgattatcttctgcaatggatggcgcaccttatccagcgcccggaggaaaaaccctccgtcgctgtcgtgatgaaatcggtggaaggcaccggaaaaaacaccctggtgcgtcctctgctgcaaatactcggcccgtatgccgcgcagattaacggcatccggcacctgaccgggcgttttaacagtacgctggcaaacaaactgctggtatttgtcgacgaagccgaaatgacggaagccggatgcgcggacaggctgaaagccatcatcagtgaaccggtctttcacctggaacgtaaagggatggagccggagcctgtccccaactgcgcacgaatgatcttcgccagtaatcacgagcgggtcatccgggcagggctgtatgaacgccgttttctggtgttggaacccgacgctcgccgcatcagggacaaagattattttgatcggctgtatcactggctaaacgaagacggggcagcccacttgcttcactggttacagcatctggagctgacaggcttcgatccccgccgcgctcctgtgacccaggccctgagagaagagaaaatcgccagcctgtcactagtgcatcagtttatgctggctgagcttgaaacctcgcggccattcagcggcatggcgcgcctgacgtccaacgaactggtggaaaggttcttgctctggagcacaactcatcatcttcccttatctcccgccgctgccagagccatgagcggtaagctgatgcagcgattaggcatcccggtacaggggcgatcaggcagggggatcgggaaatattatgaactgccggaggaggatgtgttgcgtcagcggtttgcagcaatgttgggggaaactgcggatacaatattttcttaa

SEQ ID NO: 266918 - DNA, 216 bp, Klebsiella pneumoniae
atgatcacatcacaaccacccacttccctggattttccgctctccggcaacgtgcgtatccgtcaggtagcgctgttcctggcaatgagcgaatccaccgttcaccgccgggtgaaagatcccggcttcccgcaacctgtccgcctttcatcacgcctggtggtatttgatgccggcgaggttcgccgctggcaggaacggtcaaaaacgggttaa

SEQ ID NO: 266919 - DNA, 660 bp, Klebsiella pneumoniae
atgatgatcagtcctgtacgtcagaatgtgtttgaacgggcggtcagtacccccgcgctaagcgcgcgtgaactggctctgctgctgtgtggcctcgacccacgcctgaaaacagccgcgataccagatgaccaacgcgaatattatgacgtctggctttacatggtatcccggcaaatcaaagctgcgggactacagtctcaggacaaaagcaaacagctttatacggcggacgaaatgtttgcactggcgcacctgatgactgatgaaactatcaccccggagccgatccggacgcgttgcctccaggctgtcaccaccattgccaaccagaacctggccaggagctggttaatgcgcctgggcggtccaccgctgctggaactgggcctgacgctacgccgcaatcagcgcgggcaataccgtaagacgacggaaagagaaaatactgacaggctgctctttctgttgatcatgctgttggtcaaaaactcgcagggggcgtatggaactccagaatcaccccatctggctgacatctggcgggacatccagacgctggcggagcacgagggacttccggctgaaggactatcacgatcgactatttatagtaagttaaagtcagctctgactatcccccggcgctctcacgattaa

SEQ ID NO: 266920 - DNA, 978 bp, Klebsiella pneumoniae
gtggataagcgatatcaagtatttgtaagttctactttcactgacttacaagaagaacgtagtaacgttatacaatctctaatggaaatggactgtatccctgcggggatggagctttttccttcaattgatgaagaacaatgggagtttatcaagaaaatcatagatgacagtgattattaccttcttataataggcgggagatatgggacagtcgctgatgatgggctaagttttaccgagaaggagttcgactacgcggtatctaaaggactaaaagtcgtagtattagtgcatgagaatcctggcgctttacctttcgataaatcagaagcagatccattactccgcgaaaaacttcaaaaatttatagaaaaagcatcaacaggaaggcttcgaaaaacatggtcatcagcaaaagatcttcccgggcttgtagctttaagcctgaataaaactattaaagcataccctgcaataggatgggttagagcagataaagttagcagtgaggctactttattcgaattaaatgagctaagaaaaagaaatgaagaactatcagaaaaggtaaggcagctagaaaatcgtcctgattatgcacaaccggaaaaccttgcatccctgaatgacatatatgaacttccctatgaaataagtacagttggctggtatgatgaggatagagaagaacataagtcattaaatataaagtgggcagaattattttctttacttagcccttatttaacaactgaagccatagataatgaaatatatgatattttgaaaaaccacatagaaaaagtcgcaccacattcatacaatcacacaacaatagactttcaagagttaaaaaccatctatttgcaatttaaagcattaggtctccttgagcataataatgtaaactggaaattatcgcctaagggaatggaactaatgatgcagcttcgtacagtcaaaagtaaatcatag

SEQ ID NO: 266921 - DNA, 2490 bp, Klebsiella pneumoniae
atgacttccaacaaacagcatattttattaaacggctatgtattccccgaagattatcgctctaaaagtactggtcgaagtcctcaagtcgcatctagggacagagaaactcatggttcatcgttattaaatcagtacaatcaaataatagcttattatgacagaagaccaaggctcccaccaattactgatgaatgtggaatttacgtaaagttagtcagtttcgaatcttgtgatcttcctatcgataagattgataactcatatttcaaactttgttctttggttaggagatctaacagagagattgcaatcctatacataagcgagacaaatagatcgaaatttattaataaaataaatgaatatttaaatcctttaagagatagtcgagacttccccagaaaccacccgttaattgacagcatagaatctatagagttagctgatataacttccttttggactgacaaaactgaacttattcctgtagatcacaatgcagaacagtggtttgagctttggttgaaaggtgataacgattatgcgataagtattgctcaatcaatatgtgaaagaattaatggaagactagggaattcttctattaatttttttgacactacagtactacttattaaggcaagtttggcaagattgagtatttgtccggagataatatcaaacctaaaagagataagggcagccagagaagatatttctgttatagtaaactcattacctacagaacaacatcaatgggctaatgatgttacctctcgaattaaccgtagcattgatgctaatgtgtctgtctgtatcttagatacgggagtaaattataataatcctcttttatctaatttttctgatgcatcattgacggtctcctgggactcttcatggcctacatttgatgattatagtctaagaccatacaacgatcatggctcaaggcaagcagggctatgcgtttatggagacttcctgtcatcgacactaagcaatcaaacaatttcagtaccatattatatagaatcagggagaattcttcctcctaggtcaactaatgatccggcattatatggttccattactacaggaacatcaagtagattagaattgggaaatccacaatggcgtaggatttattctcttgctgtaacagctgagcctaatgctatcggtgggcaaccatcatcgtggtctgctgaaattgataaattttgttttggcctggaggacgatatccaaaggttattcgtcatatcagcaggaaattcccagccaacaaacctaaatttagattattgggattctgcaactctcgctgaaattgaagatcctgctcagtcatggaatgccttaacggtaggagcttatacggataaaactactcatactgatcctcaatacaatggatggtcgccttttgccgtttcagaagatattgcaccatcgacaaggtcatcaatctcgtggggatggagaaaacatgcgccttataagccagacttagttgaggaaggtggaaacaaacttttgtctcctaatcgcgatgaaataacaaacacaaccgagttatcattacttactacgtcaggtagagcaacaaatcagttatttgaagttaattctgacactagcgctgcctgtgctcttgtctcaagacaagccgcattgctaatggctcagtatccagagtactggcccgaaactataagaggcttattagtccatacagctaagtggactaatcgcatgcgtgaacgatatagaatagagcgaggtagaagcacagcgaaattagccaaagaaactttactcaggatggttggttatggtgtgcctaatttgcaacgagcaatgcacagtgccgaaaatgccctgacattagtctcccaatcagaaatgactccatttaatcgaaatggttcgggggatccgactcttaatgaaatgcatcttttttcacttccttggcctgtcgaagcattacgcatgctatcccctgagaccaacgttactttaagaataacgttgtcctattttattgaacctaatccaagtcaaaaggggtttagacggcaatatagttatcaatctcatggtttaagatttgcagttattagacctaaccagacatttgataactttagagcatcaataaaccgtaatgctaataatgaagagtacaatggcccagaaggagatgcatcaggatggtccttgggacctcagttgagagttcgaggttccttacattcagatacttggaaaggaagtgctgcggatttagcggagatgaatactatagcagtttaccctgttggtggctggtggaagtatcgtacagcacaggatcgctatgaaaatcgggttagatatagtttattagtcagtattgatgttcctgatgaaaacattgatatttacagtgaagttgaaaacataataaatattggaaatcagatcgatattgaaatttaa

SEQ ID NO: 266922 - DNA, 987 bp, Klebsiella pneumoniae
atggctaccgctgagcaaattaaagcattattgagaagccacgttgatcgtgatgatcagcggttcttttctattgctttgcaagtagcggccaaagaagctaggcagggccaccacaagctcgcaaacgacataaaaaatttagtcgacaaaagccagaaatctacacattcagtagggttagtcgaaaaacgattaaccccatttgttaagcaacctgacggtgatctcaagggattacttgagcaagtaaataggcctgtacatcttcaggagctagtgatttcttcaagcgtaagggagagactaaaccaagtcctactcgagcagaagcagaaggataagctttctgagttcggacttattccaaggagaaaactactctttactggccctcccggcacaggtaagactatgtccgcatcggtcattgccacagagttaaagctgccgctgtatacggttgtcctggataacctgataactcgttatatgggtgagactgctgctaaactgcgtctaatttttgatcatataaaacaaacaagagcagtatatttctttgacgagtttgatgcaatcgggacccagcgaggagcccagaatgatgtaggcgagatacgtagggttttaaactcctttttaattttcgttgaacaggatgattctgagagcatcgttttagccgcaacaaaccatccagaactattagatcgcgccttatatagacgatttgacgatattatacctttcacaaaaccagaaggtgacttaatcaaagctcttatcgagcaaagattagccgtttttgatttgaagaacctatcatggaatacgatcattgaaagttcttcagggttgagttcggccgagattacccgagccagtgaagatgcagcaaaagagtcagtactatataatgggaataatctaaccactgagttattagtaaaggccatacagcgtaggcaagaaagcagacaataa

SEQ ID NO: 266923 - DNA, 171 bp, Klebsiella pneumoniae
atgagcaatgacaagaaaacgcaggtgtattatgttaaaccgtctcgcgccgacattgttcgctcggtagcaacgtcaacagccgttgaaacagggcagtcctctgagaagatcgaagcttcgcttgaagcgacgcgcaaaaagttcgcccatcttcggcttgctgtttaa

SEQ ID NO: 266924 - DNA, 618 bp, Klebsiella pneumoniae
atgagccgataccgtgtctctggcagtgaaggacagtatgagaaaaactccggtgagcaagtcctggcaaataagctggggattgccgattctgatgagatggacgaagcggagcttgtgctgttagagaagctctatcactgcatttttgaagagcagtttccaacaggacagatcaccgttgctttgttgaaaagctggcatcgccgctggctgggaaacatctatgagtgggccgggcaagaaaggactgtcaatatcagcaaagggggctttatgttcgcgccctctgcacagttgccaaaactactacaagaattcgacgctaaatatctcgcccgatatacgccatgtaccaacatgagcgaagaacagctcatagaggctattgctataacccatgtagagctgatactcatccatccattccgggaaggcaatgggcgtttatcacgacttttagctgatgtgatggcggttcaggggggatacaggccgctggattatcaaagctgggagcgaaataaagccgaatacatttcggctatccacgcaggcatgtcaatggactatggcccgatgtgttattgggttggcgctgcgttgagacgagattaa

SEQ ID NO: 266925 - DNA, 132 bp, Klebsiella pneumoniae
atgctcctttttacatccaaattccccattgacaatttttttctcatcatgacgcagcacagaataaaactattaaccctctattttttaagtagaaaacaaatctacatcatagctattgacgtagattaa

SEQ ID NO: 266926 - DNA, 894 bp, Klebsiella pneumoniae
atgcctacaatctcgtcgtctaaagtaccatccccaaagtcttgggatgaatttgaagaaattaccttatccgcagccaaattgcgttggaactctactgatttttatcgtcatggacggcagggacagaaacaggacggtgttgatatctggggatatgatggtaaacgtcacatcggagttcaatgcaagaatacgacaggcgagctgggtttggctgttgttgaaactgagatagcgaatgctgaaaaattcatgccaaaactggatcatctctacattgtcacgacggccccaagagatgcgaaacttcaaaaatcagtaagggaaatctcccagaaacatagcaaagctggagatttcaggatcgatgtgcttttctgggatgacatttgcaatgatttggcaaaggatgaagatgtattcttcgggcactatcctcaattcaagtctgatgataatccggggaaaaagcatgacattgcattatggagtgaactcacgacgcttcttcgctctgatggtgtgattggcttcttggatcgtacaaacatggccggattttcgttccgtgaatcacagcttgaaccgattcgtgaattttatttcgagtggaacaacccggagcacgagttcattacgcctgagttagaaaaaattaataaggaactttggtcagaggttgataggtactacaacctcattgccaatgaaacctttccagcaaataatccacaattcagtacagtaccccctgaatgggagtttgaacaaccagataggttttggcgggttgtgaatgcgctacatgatcacgctgggaagatcgtaaaactgcacgcagatattgtacgtaccgggcgagagaaatttttgaatagtggtaataaataa

SEQ ID NO: 266927 - DNA, 402 bp, Klebsiella pneumoniae
atgagcgaatctataaaaatactaaacaacattcgtacgcttcgtgctcaggcgcgtgagttttctcttgaaactcttgacgaaatgcttgagaagctgactactgtggtagaagagcgtcggcaggaatacgtttcctatcgcaaggagagggaagagcgtcaggccaagcttgaagctttccgcctgcaactccttgaggatggcattgacccggcagatctgctctctggtttgagttcgtcctctaaaccaaaatccaaccgtgaaccacgaccggctaagtacaaatacatcgatgaaaacggtgaacagaagacttggactggtcaaggtcgcactcctaaagctattgccacagctattgaggctgggaaagctctggaagattttgcgatctaa

SEQ ID NO: 266928 - DNA, 690 bp, Klebsiella pneumoniae
atgaacattatcaatcttgaccagcttatctctatgacttccttggaaatcgcagaattgacgggtaagcgtcacgacaacgttattcgtgatgttcgtaagatgctcgaagaacttaacggcctcagttttgagggcgttaatgaagaaacatacaaggacgccaaaggcgagacgcgaacgctatatcgactcgaccggaagcatacctttattctggtcgctgggtattccgtccaactccgcgctaaatgctacgactacattcagatgcttgaacaaaaaatcctccgattggaagaccagcagaaacgcgcagccgtacagtcggctaaccgccgtggtgtaacatggggcgattactgcaagacgcatggtctacctgctcagaagttggtgaacatcctcaagcgggaacgaaagctctttcaggtccaccccgtcagtggtgaatggtcagtcaatccaaaatatgcggaatacttccgggtcatcaagccaactgaccagcgattcaacccgagcggcattaacattcggttcaacgccaagggactggaattctttggtcaacctgagcatgtcctaaagatgcgcggaaaggttatcgaaattcacggtacagacgccgagaagcagaagcacctacaggatgtcgctagcatatcttctcaaaatgagggtctgtaa

SEQ ID NO: 266929 - DNA, 225 bp, Klebsiella pneumoniae
atggtaactatcacaaaaggcgtccaaacgtttgacgggaaaatccccgttacactgttagtcgacgacgtagaaacagctaatactttagtgaaaatggcaaaagatgccaacgtcactgttattgaacagaacgttgatttaaataaatctaaaaataaaactactcaagataaactaaaacagattattaaaaataaaggggttcctaatggcactaattaa

SEQ ID NO: 266930 - DNA, 651 bp, Klebsiella pneumoniae
atgcatatcgcggttgctacctcaacggcggtgatgatatttaacgcgggctgggtcagctatcgaaactggcgcgccggcaaactttcagcgcagacattgttcccattattatggtttatcgccatcggggctgtcgtgggttcctgtctggcgggagtcttcagcgagaatattgttcgcgcactgttcattctttatatgctggtaaccattggcgattgtttgttgcgcaaaggttttttcatctgcagttccccgcgtcgcttgtcactttctgtggtaacgggcggcggagtgatcatcggcatgatagccgcattgctgggcgtgggtggcagcgtgatgacagtgccattattacggcgacacggctatgcaatgggtgagtgtattagcgcttctaacccgctttctctgcctgtcgcgctgtgtggtgccgtgacgtatgcagtcattggttggcaaaatattccggtgagcggatttctcggttttatcagcctgaaaattttaggcctgttggtactgacgggctgggctggaatagtttttagccgtcgggttatacctgctttacctgacatatggcacgcacgaatctatgtaatactgctgtgcctggtgctactggcgatgctgctccagtaa

SEQ ID NO: 266931 - DNA, 795 bp, Klebsiella pneumoniae
gtgcgcaacgtaaaaattgaagatgtcgataagctcgatcgtgaagtggtggcgttaggcaatgactatgcgcagggatttatactgccacaacaccaacatcgccgcgctcagctgctgtatggcgcaacgggtctcatgtacgtctcaacctgtaacggagagtgggttgttcccccacaacatgcagtatggatcccacccgaaacccctcacgctgtccggtttgtaggtgtgaccacgcgtagcttatatattgaaccaacatgcgtgacgggatcgattgagtatcgacactgtaaggtgatcagcgtatcgccattgttacgtcagttgttgcttgatgccgtggatttgccgctgatgtatgacagcgctcgcgaccgtgcgctggtaaatctgctgttactggaactggcggaaatgccggttcgcgaattcgatattccgctgccacaacatccggctctgctggctctttgtcaggcatttttactcaccccctcaatccatgaccctgctgagcgctgggccagtacgctgtttatgagcgccagtacctttcgtcgacttttcttacggcaaaccggcatgtcattttctgcatggcgacagcgagcctgtgtcgtcagcgcactgacgttgctgataacaggtaaaccggtgaatgaagtggcactcactctcggatacgacaatgcatcatctttcgccactatgttccgccgtgtcacgggacagccgccttcgtattgtcggcttgatttcaaaagcttcacagggcaccgttcataa

SEQ ID NO: 266932 - DNA, 492 bp, Klebsiella pneumoniae
atggatactgacaagttagttacgctgtttagatacaagcgctggatagatattgaaacactacaagcgatcaaaagaatcgatacgtctgtaaatgccgaaaagcaccacctgacgctcagattaatgaatcacatacatgtggttgactcgatcttcagagctaacgttacaggtcagaagcattcctacactgcactgaacacgccagagaccccatctgctgatgagcttctgataacgatgactgaatgtacagattggtatattcaacatgtcaattccatgtcttccgctgagcttgctgaaacaatcaaattccagtttgttgatggcgggcatggtgaaatgaaggcgttcgatatgctcaatcatgtgctttttcacgggacatatcatcgtggcgcagtaggttggctaatttcagaaagtggtgtagtcccgcccaaggacgtactgaccgtttttcttagagatcataaccacgaataa

SEQ ID NO: 266933 - DNA, 426 bp, Klebsiella pneumoniae
atggtcaaaaacaatacttttaatatattagatgtgagtaaccattcccgtaatcgaagcttgaataaagctaagttctcacaaaaacaacttcgttctcattgcatcagtgtcaggcttaataatgaagagttaatgcttctcaacgagaaacgtggccgtcatcgtaaaggcgaatggcttcgcttatctttactcaatatacttcctactgtcgttccagctatcaatattgaagcctggaaatcgcttagcgaaatttcacagaagctgaacaagattgtggctcatcttgataacaagagccatgaaagctctctgacgcaaacagaactcttcgcggtgaagcgtcagatctcagagcttcgcttgcatttaattaccgctgatttgtggagagcaccttctgatgaaagggatgcataa

SEQ ID NO: 266934 - DNA, 1062 bp, Klebsiella pneumoniae
atgatggggagcctcgctaaagagctaatagctgagtttggtgctacaaaagcacttcgccgtgatgtggtcaaacccgtatggcatatttcgcttcgcttgtcgaagaacgaagcgctgacagatgctcagtggtcaaaaatcgctgatgactatatgaagcgtatgggtttctctgaaacgcatctcagatgctatgtgttgcatgatgataaagatggccagcacatccatatcatcgccagcagagtgtctattgatgccggaaagctctacctcggcaggaatgagaacctggcaagcacgagaataattcagcaacttgaaagagattacaatctgacaagaaccaaaggaccgaaagcatctccagcagcgccctcacctaaaccgaagctcaaaaaatcccgtaatgagatgatgatagagaagagaacgggtgagctatgcccaaaagcaatcatgcaaaacgctctggaagtattccttgcctataaaccgtcaaccactgagtttgtgtatcagcttgtcgcacaaaacatcagagcaatcccgaacatcgcttctactggacgcatgaacggcttctcattcgaatacaacgggattgtgttcaaagcatctcaattaggaaaagggtattcttgggctgaattacaaaacaagatcgattaccaagctgaacgcgatagtgcattcttgtttaaactgagagcctctgccagcgaatcccctaataaagctattacccctgaaatcacagcagaaggcgctacagcaacgcttctcttggaaactggtgctaaaggctcgatagcaatcggggagttaaaagagactcccaagcgaagctatacgatttcaacatttagatggctggaaaccatcccctatctccaaaacatcattgctatgttgaaaaacctaaaaatccccacgctgaaacgccctaaaaaacacaaaaccatcactggcatgagggtggtagagattacacctatcccccaaaaaaacctcatcgaatctgcacctcaatccaaaagaagttcgctttcaatgtaa

SEQ ID NO: 266935 - DNA, 429 bp, Klebsiella pneumoniae
atgacaaataaaaaaacgcagtttttgaacactaaggatgcaaaacattcaacctcaaagtgtaatttactaccacaggaattacgaattcattgtgttagtgttcgtcttaacaatactgaattggccaagcttaatacattgagggagcattattcgaaaggagagtggcttcgtatggcttcccttcaaaaattgcctccagttataccagctattaacaccaaagcctggatagctttaactgacatatcgcaaaagctaaatcgaattgcgatccatatcgatggtaagagcaaagacagcaagcttacgcatacagagcttttcgcagtgaaacgacaactggaagagcttcgccagcacctgctaaatgctgacatatggagcaaaccctatgaagggtatgcagaagatcaaaaggggtaa

SEQ ID NO: 266936 - DNA, 1155 bp, Klebsiella pneumoniae
atgaagggtatgcagaagatcaaaaggggtaaaagcttcgctggtgtcgtgcaatatgcattgaagccaggttcacatcataagagtaatccaatcgtcattggcgggaacatgttaggtggctctgctcttgaattgatttccgaattcaatggcacaaaacaacttcgcccagatgttcagaaggccgtttggcacaactcgttacgattgcctgagggagaaacattatcgaatgaccaatgggtgtccatagctgacgactacatgaagaagatggggttcagtgatactcacctccgttgctatgtcttacatgacgacgaaggccagcacatacacattatcgccagcagaatcgacatagccggtgggaagctctacttgggtaggaacgaaaaccttataagcacacggatcattagtgaactcgaaatgtctcacggtctgacagtgaccaaaactgcatctcccccctcgcaagcacaaccgaagcggaagagagtgtcccgtaacgaacaaatgctatcggcccggactggagttccctgccctaaggaagctctccaacagatcattgataaaagtatgactgataagcccgaccttcttacttttgttaaacgactcgaagattcagaagtcggctgtaaggccaatattgcttctaccggtaagatgaacggcttctctttcgaataccgcaatatagctttcaaggcatctcaacttggaaaggcatactcatgggtaaatcttcaaaagcagcttaactacaaccaaaaccacttagaagttcttcgagcgacaaaggaagctatccccatccctgttcctgttcctgttcctgttcctgttcctatagaatcgacagcaagaacgactgcccagagcgaaagcataggcgaaaaaattgctgaaatagaacagcgactcagagaagacagacgaaacgagatcgttgagaagattcttcaaaagaatgcagttaaacagcaaaagcatctaaggcttatcggctggcttccatttcttagaaggcttgcagagcttctccggagctatggtaagagcattcttcacaagcccctccctggattctcaaaactcgatgccacacggactctacacaaaggaagaaaaattcatttatag

SEQ ID NO: 266937 - DNA, 363 bp, Klebsiella pneumoniae
ttggcgttagcgagaaacacagtatttgaggaatcaacagaaatcggatttaacagcagaacaaaaaaagtcaaaatccccaaaaagataaaaccgttagcaataatcaaactttacgaagaatccccatcactgacaccagacgaacaagaaataattaactctatggatggtgtaacttggaaaccccgccaaaagtatgctggttttaaattcaatcgtgagccactcaagtttgaatgtttatttgaaagtgtagttgaatacgaggggtggctagagtttaaccgattggaaaatgaacagtaccagggatacgatgtcgattttatggaagttgggaacaacggcatctctgattaa

SEQ ID NO: 266938 - DNA, 228 bp, Klebsiella pneumoniae
  misc_feature (201)..(210): n is a, c, g, or t
atgaaactcatgccttttaacttcgacaggatgcctgacggccgggtattcatcagtaacctcgctggctttcatcattttgtaggtgagcaggaatttctcgatctggtaaacggtcatatcagtcaagaagagtcctcatcgcttgaaagcaaacttttcatttgcggagatgaatcttcctccgttaccccttatgcnnnnnnnnnncaaacgactcatgaatga

SEQ ID NO: 266939 - DNA, 333 bp, Klebsiella pneumoniae
atggctggttggttcgaattggataagagcagtaatgaacagtataaatttgttctgaaagccggtaatggagaaattatcctcaccagcgagctttacacaaccaagagttctgcagaaaatggcattatatcagttcaggcaaacagcccacttgatgaacgctacgatctgaaagactcatctaacggcaagtcctattttaacctacgggcggctaatcatcatgtgatcggtacaagccagatgtactcgaccaaacaatcccgtgaaaaaggtatcgcttccgtgaaaaccaacggaacaacaacaacgattaaagataatacttaa

SEQ ID NO: 266940 - DNA, 234 bp, Klebsiella pneumoniae
atggctattccgggtaatgtgtggctctatgacgatggtggagcactaatcaaaggaggttgtgatgttgcagacagggaattcagtatagagtttaataggtttcaccataatctctccattcctactgataatgccactggcaagcctaccggcactcttcagcactcaccaatgatcatcgttaaagaattcggctattccagcccatacttctacggtggtttaaattaa

SEQ ID NO: 266941 - DNA, 1167 bp, Klebsiella pneumoniae
atggttttttgggatgactcatacaaagaagaatttgattcgattagtcactatatcgatgaaaactttattcgttttataaaagcacctgacatcgtatataacgttaatgatgcggagttagtagatacagtattggtcatagcatggcgtaattttaaaagattatatactcgaaggttagacgctcttaacaagtatacgccatataatcagcaaaacatggatcaaggtttaccacctagcttgaaagagttgcaaactgataaaattacctttctatataaaattctcagaatattatatgaattctatttttggtcaggcaatacctatggactcccaaccgttttacaatctgaaatattaaacaggctagataaacttaataaagactctaatgcacctgttcatttcatttggattgagcaatcaatgcctgctggtttgactaaacaccttcttttatccgaagaattctcaaaactacaaaacattgccgcggatgtaggcggatttgaagaaaaaatttcagagcaagtctcacaaggtttaaaagaagtacaattaaaatccaacgatttaaattccaaaataaatggccttattagtagtgcaaacgaatcagttaaatccctccaagaatatgatgaaaaacttcagcagtataaaagcgaatataactttgttcttctgagtaaagctttctcaaaccttttgaaaaccaaaaaatcagaatatgctacaaatcacaaaagtgtaattatcttttcttcatttttaattgctacacctttacttgcattattgaatcacatatataacttctaccccgtagaattcaatttaaatgcaatattttatttcctgccaatattatcgttagaattgttatttttttattttatgcgcctttattacattgaaggaaaggcaatcagggctcagatgcttcaaattgaacagcgcctaagcttatgtgagtttatacatgattacgtggagacaaaaaataattctagtgctgaaaaggaatcatggtcgctgtttgagaagttaattttcagcccaatacaggtttcttctgaaaacataccgtctttactggatggcgcatcatctattgccgagttagcaggaaaagtattgtctaaagattcaaaataa

SEQ ID NO: 266942 - DNA, 645 bp, Klebsiella pneumoniae
atgccggatggcggcatacatgccttatccggcctacgttccttcctgcgggctccccctgtaggcccgcgcaagcgcagcgccgccgggcaggacacttcaagctccgtacctgtggttgtgccggatggcggcatcaatgccttatccggcctacgttccttcctgcgggctccccctgtaggcccgcgcaagcgcagcgccgccgggcaggacacttcaagctccgtacctgtggttgtgccggatggcggcatcaatgccttatccggcctacgttccttcctgcgggctccccctgtaggcccgcgcaagcgcagcgccgccgggcaggacacttcaagctccgtacctgtggttgtgccggatggcggcatcaatgccttatccggcctacgttccttcctgcgggaccccaccccaggaccggcaagcgcagcgccgccgggcagtcagacccgtgccctggtggcgtcatcaattctttatctctggcttaatcggcgggcgatacgctcaagcttcatcatcaacagcagcgtgacgcccaccagcacaatggtcagcgccgagccatcggcgatattgccgcgatcggtgaggctgaaaatggtcaccggcagcgtcgtccagcccggcggatag

SEQ ID NO: 266943 - DNA, 690 bp, Klebsiella pneumoniae
gtgttaaaagaaccattagggcaaatatttgctgcgctcttcaaggtttatacatcacgctcatcatcaagctataccgagctttgtgatttatatcttgagttgcatcgagtctcccgcggcgatgaaaaagaagatgcattaattaaagtattgtcggataacatagcggaaaataagaaaaatttaggcgatgagcctagccccgattcattgataacctgcattaaggatattataactctatttggtgtgaaaagaatggtggggcgatggaatcagtataagtccgctgattattgggataagatctggcgtaatcttgagcaacatttgcgctacacaatagacgcaacacactctcttaacgaggcggcgttgatgtttcaggcggaaaattccgttcaggtgatgaacgtgcataaatgcaagggactggaatataaagtggttatttttcttggcttagaggaccaagctttttgggcttataaaaacacaaaatttgaaaatgattgcgctctctatgttgctttatccagggctaaagaaagtataataataacttctacaaaatgtagagagcatagaatcactaattggcgagatgatagaacctctacctataaaaatattggtcctatatattcgttcttaacgaaacattgcaagtttagggaggtgagataa

SEQ ID NO: 266944 - DNA, 552 bp, Klebsiella pneumoniae
atgaaacgcattctgacccttggcctggcgctgctgatgctgatcctcgccggctgcagcaccgaggtcacggagtaccggcagcagcagcccgccctcgacatctttcactattttcaggggcgaaccgaggcgtgggggatggtgcaggatcgcagcggcaagcagctgcgccgcttccatgttgagatcgatggcgacgtcgtcggcgacaccctgaccctccatgagcgctttgtctatgacgacggcgagaagcagcagcggatatggcgcattcgccgcaccggcgataaccgttatcagggcaccgccggggatatcgaaggcgtggccagcggccaggcggcaggcaatgtctttcactggcgctacagcatgaacgtcgaggccagcggcagccggtggctgctgcactttgacgactggatgttcctgcaggacggcagccatttatttaacaaaaccgagatgaagaaattcggcattacggtcgccaccgtgacccttttctttacccgaaccacagcagaagagaggacagcgccatga

SEQ ID NO: 266945 - DNA, 306 bp, Klebsiella pneumoniae
atggtgaataaaaatgttggtatgaccaagttttacaacgaattccataatccggcgataaattcaccatcactcagcaaattacgtgaattgcaggtgagtataaaccatgctgtgctgcgtgcgtatggttttgatgatatagatttaaatcatgattttcatgaggttgcataccttcctgaaggaaagaatattcgttacacgatttgtgagtctgcacgggaaaaattactctatcggttggcctcattgaataaaattcgttatgaagaagggcagaaaggtgggattaacgatctctag

SEQ ID NO: 266946 - DNA, 489 bp, Klebsiella pneumoniae
atgacagagaacaataagctagctgtatcacctaatgcatggttcgctattgatcgtggccaatctaaaaatcctactttggcccttcatacagtacagctaaaaagtgaacaagctctcaagcacggtattgctgatagcgattgggtcgtcgtctttgacactacaggtcatatcacgcgaatcggacgtattctgcgcattcgctctgatctcgaaactaccaccttatgtttcgaccgaattttgcaggttgaaccactcattcccgttggcatgacttcacttactctgcctgcaaaaggaagctttggcagaattcagtggaaagaattcattgaaatgcttccaaatacactaaatacaagcattgctgaaataccaacgatcgaagatcaaacttacattcgcgaattactgcaattagcagttatggatgatttactcgggccggcagctggccctaatgagccgctatcttgttggtaa

SEQ ID NO: 266947 - DNA, 1407 bp, Klebsiella pneumoniae
  misc_feature (1347)..(1356): n is a, c, g, or t
atgatttactcgggccggcagctggccctaatgagccgctatcttgttggtaagcttgctccacgtgaagcagccgagcgcagctctgagtttccagtggatccagagaatgctgatgatgatgttggtgaccaaatagttaagtctcagacaacaaaagtgcattctccaaaagtgtctggccgaggagaacccgatgtcccggaagaaattgatgccgccagcaaccaatcattggtaccaagtagtctgggaatgactttttgtgtcgatggcgatattgatcaaatagaactagaagttcgttggggacgttatgagcgtagcaatgaccatgagatctatcgaatccgcaagaacaaggagactggggtcgaagaacagaccaaagtcaaagcttggcagcgttttcctagtggcgggaagataacattatcactagtagagggggctatttcccctcaatctttagatagttcatctcctgaagtactaatacagggcaccattcgtcccaagaatgaaaatggtgatcgtctggtcactatatttcttgtaaatactcagaaagagccagaaaccaaccgagatgcagcatgggtattccaaccagaaatcattgctcgcccagtgaaggacgcagtcgaaagatctatttttaggcgcaagccagttttggattgtgacggtatggatcctgaacgcgaagcgctggaaatgatttaccgtaaccatgttgaatttgcagtcgggcatggtgttgcagtacatgctgaacctgcagataacactgaacttgcgactgaaattcgtacaactgtcatgccacagtatgaagttcagagaacagagacccccggccttgatccatcagatcgtccggcgatgcaagaaatggtcaaaagtggtttacttgacatgcagaaactggccactttggaggtggaaccactgatcgatgcattgaatgtactaaccaaggactatctggattggattagtgaacaacgtgccagtgtaggtattaaaattacaggttttgaaacccaatctcagatcgcaatggatcgttgtaaggagatccattctcgcctgcaaaagggtattgatacacttaagcttaatgaaaaagcgctggcagcatttcgtttcgccaacaaagcaatggcaacgcagcgagtacgaagtttatacgcgttggctaaacgccgtggtgaagatacgactatcgaatcatttgatattgaaaagaatcgtagctggcgtccttttcagttggcattcttgttgctctctataccttcgttggcagacccaaaccattccgatcgtgtgcagcctgtaaannnnnnnnnnctgatcttttatggttccccacgggtggtggtaaaactgaagcttatttag

SEQ ID NO: 266948 - DNA, 1002 bp, Klebsiella pneumoniae
atgtcagaagcgcttataacagagtcagaacctctcacctttactcttcctgatggctctctgaagctcgtcagaaaagggaccacgttgcagaacgtcgcggaaagtatcgattcttccgtcgcgaaaaacgccgtgtatgctgaaatcgatggccaatatatcgatctgatcgaggcagtgcagaaaagtggcacgctcaatatcatcacgctttttgacgaagaagcgttggacccgtgcacgctggaacagcttgagggggagtgtaaaagtatccttcatctggtgcttgatatttataagcagtttggatttgaagaggtcgaaatcaagttatccacccgtcctgaaaaacgcatgggaagtgacaccgactgggatcggctggaaaacgcgctttcagcctctctggaagctcagggattacaatggtcggtaaatcccggtgaaggggctttctatggccctaaactggagtttgtgttgcgcgacgcgatcggtcgtgactggcagtgcgggacgctacaggtagatatgaatctgcctgatcgattcgatattggctacattgccgaggatggttcgacaaaacgcccggtgatgttacacagggcgctcttcggctctcttgagcgttttaccggtattcttcttgaacactacgctggtaaactgcccgcctggctgtcgccggttcaggccgtggtcatgacgattactgataaacaacatcgatacgcggagcaggttctgaaggcacttcgccggaaaggacttcgctgtgagaccgatcttcgtaatgaaaaaattggatacaaaatccgggagcagacgctggcccgcattcctttcctcctgattattggcgatgcggaggaaaatgcggcgcgtgtcaccgtacgcgatcgtacggggaaatgtatgggaacactattactcaatgaagcagctgactgcattgagatgtgttgccgaccgccggaggtgcgccttgattaa

SEQ ID NO: 266949 - DNA, 852 bp, Klebsiella pneumoniae; identical to SEQ ID NO: 227445

SEQ ID NO: 266950 - DNA, 936 bp, Klebsiella pneumoniae
atgagtattgcagccaaacaaaccttatgccccggaatgctaccggatattcagtccactaagggtgacggtgagggcgagtcattatcctgggttggcatggaacaaattgacctgccgatagacatcgcaggcaggccggtatcagcaaaggtcaatgctggcataaaccttctcagttcacctgaagctgaaaaggggatccatatgtctcgtctttatcttcttctggacgaactgacacaaggggaaatcacaccggcattattgcaacatgtgttgaaagcatttctggtatctcatcagggacgtagtgatgaagccagtattgagatttcaggggatttgttactgtcgcgtaagtcgttaaattctaatcactccggctggaaagcttatcctctgactctgagcgccgaactcaggcaatcttttacggttaccctcaaagtgggtatcccttattcgtccacctgcccggcttccgctgcacttagccgccacgtcgcgggtttgcagtttagcaaagactttggtaacaggatcgacaggctcccggcagcagaaatagccgactggcttgttgagaaaggaatgccggcaaccccgcacagccagcgaagctgggcatgggtgagtatccgtcttaatcctgaagcaaaatcactgcctgtgcttgagctgattgattatgctgaagttgctctcgggacagccgtgcaaacggttgtcaagcggagcgacgaacaggcttttgcggtggctaacggtcagaatctgatgttttgcgaagatgctgcccgtcggctcaataacgtttttcgttgtgcacccttttgtgaagcatttgatatcagggttgagcatcaggaaagcctgcatcctcataatgccgttgcccgtattcactggaaaggaagtaaaaatgttacgtaa

SEQ ID NO: 266951 - DNA, 996 bp, Klebsiella pneumoniae
atgagcaacggttgcatttgctgcacattgcgcgaagatcttcttctcgaagttaatcgtctggcaaaagaagggcgttttgatcagcttgtcattgagtccaccggtatatctgagcctctgcctgttgctgaaacatttacctttgcgggcgatgacggtgaaagcctttcgacggtggcccgccttgacaccatggtcactgtggtggatgcgtacaattttctgaaagactacggttcggaagacagcattcagtcacgcggagaatcgttaggtgaaggtgatgaaaggagcgttgttgacttgctgatcgatcagattgaattctgtgatgtgctggtccttaataaagttgaccttatcagtgaagcgcaaaaagaaaaactgatggcgattttacgttcgcttaatccacgggccagaatcgttgtttcacagtttggacaggttccgctgggcaacatacttaataccgggctgtttgatttcgagcaggccgctcaggcacccggctggcttaaagaactccggggcgaacatacgccggagacagaagaatatgggatcaccagctttgtctttcgcgcccgccggccttttcatccgacccgtttctggcaggtgatggaaaatgagctggatggagtcgtcagatcaaaaggttacttctggctggccagccgtcctgagtttgctggctcctggtcgcaggcaggtggcattgcgcgccaggggctggggggcatgtggtgggctagtgtgccgaaaggacgttggccagaggatgctgagtcactgaagttcatcatgtctaactggatagatggcattggtgatgcccgtcaggaactcgtttttattggaatggatatgaatgaatcagaactgcgcaacagactggattccgccctgttaacggatgcagaaatggcagaagggcctcaaaagtggcggcattattccgatcctgttgagccctggttcgaagaatga

SEQ ID NO: 266952 - DNA, 993 bp, Klebsiella pneumoniae
atgagtaacggttgtatctgctgcacattgcgggaagatcttctgcttgaagtcaatcgtctggcaaaagaaggacgttttgaccagcttgtcattgagtccaccgggatttcagagcctctgcccgtagctgagacttttacctttgccggtgatgacggtgaaagcctgtcaacagtagcgcgccttgataccatggtgaccgtggtggatgcgttcaattttctgaaagactacggctcggaagacagcattcagtcgcgtggagagtcgctcggtgatggtgatgaaaggagcgttgtagacctgctgatcgatcagattgaattctgcgatgtgctggtcctcaataaagttgatctcatcagtgaagcgcaaaaagacaaactgatggcggttttacgttcgcttaatccacgggccaggatcgttgtttcacagtttgggaaggttccacttgataacgtacttaataccggactgttcgatttcgatcaagccgctcaggcacctggctggcttaaagaattgcggggtgaacatacgccggagacagaagagtatgggatcaccagctttgtatttcgtgcccgccggccttttcatccggctcgtttctggcaggtgatggataatgaactgaatggcgtcgtcagatcgaaggggtacttctggctggccagtcgtcctgagtttgctggctcctggtcgcaggcgggtggagtggcgcgccagggactgggaggcatgtggtgggcaagtgtccctaaagaacgctggccagaggatccggaatcactcaaattcatcatgtctcactggatggatggtattggtgatgcccggcaggaactggtttttattggaatggaaatgaatgaatccgaactgcgcaacaggctggaatctgccctgttaacggataccgaaatggctgaaggacctctgaaatggcgacattaccctgatcctgttgagccgtggttcgattag

SEQ ID NO: 266953 - DNA, 237 bp, Klebsiella pneumoniae
atgctccagtcaaaaatcagagaggcgttctgcgcctatatctgtcgcaacccgaaatggtatcagtatttacgcaccagagactttgtctgcgcgctgcaggaacgaggcgttcatttctccggccgcgaagcgaaccagtggatagagcgcaaccagacgtatttcgtcgataagataacagatggcaccgaaaaccggttgtggatgctccgcaacatggggatggttctgtaa

SEQ ID NO: 266954 - DNA, 291 bp, Klebsiella pneumoniae
atggcagaagataaagaattacaggttcgttacacccgaggcggtgaacacttcgaaaagacatttgcatgggatggctgtgatcctgttggaagtacattaggttgtatagttgaagaacataatctggcgaatttaatctcaggtgaggaaagggctgaattcggtgggattagaaaccttcataaaccaataaaccttctcgaacacggtattgatgatgtgttcttctatgatgaggaaatcaataagtggcaagaaatctccactgattggcttacggatgcttaa

SEQ ID NO: 266955 - DNA, 258 bp, Klebsiella pneumoniae
atgggaatttgggataaagctttaaaacttgcaaaaaatgccgggacagttgttgcaaatgaaatagaaaaatcagcaaatgaaacaagagagttaagggataattacgaaattttatctgatgacgagttggtcaggattgttcaaagtgatggtttcttaggcaagtccacgaaagagaagggggtagcctatggaattttgagaaaacgtggttatacagacgaagcaataaagaaaaacaaaagctcaacgtaa

SEQ ID NO: 266956 - DNA, 198 bp, Klebsiella pneumoniae
atgaaacctttgattgtgctaacgctggcgctcatgagcctacaggctcgcgccggacagataaccttaaccaacccacaggaggaacagacggagaatggtaagacgctttgcatctatgagaacagcatgtactcatttacgtacatcactaaaggctcctgcccttatgcccgcacctttgacactgatgattga

SEQ ID NO: 266957 - DNA, 201 bp, Klebsiella pneumoniae
atgtttaatcaaccgtttggcaagtgtaaataccccataattatccagggtaaagcggtcattcacacttttaataataacaaatgtaactatcacacactttgcataaatccttgtgccatgcggcttacagcgctatttgttatgaaaactacttttggtcacatgcaagaattgttgaacgagatttcaaaagcgtaa

SEQ ID NO: 266958 - DNA, 828 bp, Klebsiella pneumoniae
atgacaaaaataaaatacatcaatactgatgtgttccaatacgtgccgattgaggacgcattcaatgagtgtacgcgaattaccaatctgacgacaggtattacagaatctctatcccctgctgataaactcttttacgtaagaatgcgtcaccgccaccagttttttgtaaatgagcgaggaggcacctattacgatgacattgatcagcttggtgccagtattggtattagctcatcaacagcaacgcgtattgttgcaaagttgaagaaagttgggttagtggttgccacgctgtcagggcggtctaataaatggacaatactaccgctcacgccggataacttactctttgaacgtgacattaatgcgatggaaagaggagcagcgccagaatgggtggattgtctaaaacatcccgtatttggtaacgtcaaagaagatgtagcgccagaggtgaaggaagaaaagcagcaatctgtgccggaacccgatcctatgtgcgaaatggatgaaattgaagtgggagaggatgagccgcctgtcattcgtgtagaaaggcagaccgttaaacctaagcaaaagcgtaataaatctaaacctgtgcaaaatgatccattcgagtttagcagtccacgtgatgaaacgaaggattggttttatctaaaacattatcagggtgcagagcggtttaccacctttacagattttgatctcccgtatttggcactattcaaggcacagggcgcactcactaatccctatgctctggattatctccagctcagaacagatcaaatacaacgacagttagcgaggaatacatga

SEQ ID NO: 266959 - DNA, 129 bp, Klebsiella pneumoniae
atgatcactatgctttattggacgctttttatctatgtaataataaactattcagggatgttttcctcatacaaggataaaaataataatgagcagaaaaaaagaacgaaacgtactagcacgtattga

SEQ ID NO: 266960 - DNA, 192 bp, Klebsiella pneumoniae
atgattaacggctaccttatagctaatcatttctactcaaatttaaatacaaccctctgtttttacagagggtttttctttatatcacaccatatcaattcactctatctcacattttttgacggtatacatgacggtattaccattacggtatactctcgtaccgtcagaaaaatgatgcatcacgggtga

SEQ ID NO: 266961 - DNA, 171 bp, Klebsiella pneumoniae
atgacctgcttattcgcaccttccctggaggagctggatctgccttatcagcagatcctcgccgggctggagtttggtctcaatcatgatccggaatatctggcgatgaacccgaacgggctggtgccgttgttaaaggacgatgccaccggggtggtattgtgggaataa

SEQ ID NO: 266962 - DNA, 753 bp, Klebsiella pneumoniae
gtgggcctgaatggcttttctgagctgaaaaaggttcctgagggagctgaatacaaatatgtcactaccagtgacagcggcgtacccatcgctcttgcgacctatggcaatatcttttctattacccgccaggccattatcaatgatgacctgagtcagctgacaactatccaacaggctatggggcgtgctgctgcgcgtactgtaggaaatctggtctatctgaaactgacgacgaacagcaagtttacagacggtaagccgctgttccatgccgaccataaaaacctcattgctaaagggatggataccgaggggctcaatgaagcccgtaagtttatgcgcttgcagcaggatgcgaacggcgaccctatcaacgttattcctgcctacattcttgtgccggcggcgctggaagggctggcaaaccgcgctgtgctgtccacatcttctttgttccctgttgatcaggacggcgcgctgaaccagaaccccggcatcatcaacgtggtgaaggatatggcgcaggcggtggttgagccgcgtctggacaaggccaacaacaaggaatggtatgtaaccgcagcacaaggcacagataccattgaggtggcttacctggacggtatggacgtgccttatctggaacagcaggaaggcttcaccgttgatgggatcgcctggaaggtgcgcatcgatgcaggtgtggccgcgctggattaccgcgggctggttaagtcgagtggggcataa

SEQ ID NO: 266963 - DNA, 990 bp, Klebsiella pneumoniae
atgaaaataaataatgcggataagtgctggaatgatttgatggatgagttttttttctgccgttcagtacgtgaagctacggagtggagctacagaaaggtgctgaacggattccgtaagtttgttggcgggactctgttaccggaagatatccgacaacaacatgtcagggagtggcgacgggaggtcctgaaaaaccagaaacgttcaactcatacatggaacaacaaggtacgccatatgcgcgctatcttcagttttgcttcctcatctgaactcctgcatttaagttgtaacccgtttgagggtatgagcgtcagacaggaaaagaaacgcaaaaaaacactgacccggaaacaaataaaacgcatcctgctggtccttgagcagtttcaggaggatgaaatgaacctgaagatgcactggaagtgcgccattcgtccggcctggtactggattattgtggttaacacacttcgctttacggggatgaggctgaatcagctgctgcatctgcgcctgcgggatgttaatcctgaagaacggtggattgatttatgctctgaaggcagcaagacacatcatgagtggcggatcccgatggtcagtcatctggttccggggataaccaggctgatggatgaagcggtgaaacgtggagccacgcctgatgattatcttttccactatcatcgctatgctttgcctgtgtctgaagcattatcggtgagcggacctccggaagagcagaaggtcaaaggttttttccggcgtctgtcgaaagagtgtggttttcaggtatctgcacatcgtttcagacacactctggcaagtactctgatggcggcaccggaacgaaatctgtacatggtgaaaaccatgctgggtcaccggaatgtttcaacgacactggaatatgtggagatggatctgaagggaacagcacgtatacttgaggccgaactgtcaaaactgacagacgatctttaa

SEQ ID NO: 266964 - DNA, 1626 bp, Klebsiella pneumoniae
atgtttaagcggttcagacgtatgctgcccggcacaaaggtcacggagccaggcgtggtcgcgccggtgataccggcagggttttatgcgccgctcacagcagaagcactgttatcaccagagcacagggaactgaggctcaggcaggtatgggataacaatccgatgccccgtgatgtatacgacaggatgtgccttgcgccactcagccggctgttgctgaacacccagaatgtgccggcaacacgggaaggacggtggtcccgtgccggtggatttggtgatctgacggtactgtacaccacgtatgccgttcgtctggcaagagggtacatgtttccaccggatgcgaccccggaagaccaggcggctcaggccgcagtctggcatacggtgattttctggtcagcgctgttttaccacctgcccctgctggcgcaccttgagggggagctgctgagtggtcggggctggcagccagggatttctgtgcctgacgaacctttccgtttccggttcaggaagacggcgccgcagggcacggaagcgcaacaactggcggccctgactgccggcacgctgttaccggacggcgcaacggcctggcttgtgacggcgccgggggcgctgcagaatctggccggggcgctctggcatcagcatcccgggatggcgctgattcgtgatgtgctgcaggaagcggcaaggcagacagagagtccgctgaatacctgcgctgtcactgcgccggttactgcggaggcttcagcagacatccgtcctgctgacccggtggtgaccggcagcacggacagtgtgatggcagtcactgaggtgcagccggcagaggaggtgaagactgagagcgtgcagacagagactgaaggtggtggtgagtccgccggagcgtcagaggtgccgtccgcacagcaggaactgacggttcagacagcgccagtggtgacggcagatgatgaagcggtcagtgcttctcctgcggatcaggacacagcaatgctgctgagtcttttttcagcagatgagtccgaaactgctgaacgggataatggggatgtggtgatgctggctgatgaggaagaagcgcaggatctcaccgatggaccggatgaaggcgattcgtctccgggcagtattcatgaatcgccgtatctggtggagagtgacgcgtcggttaatcagtccgtatccggggaataccgcgcaacagaagtgaatccgcttaccggagatgatcctgatttaaagggagagacgtttttggactggcttaaagcagggctgaacagtggtgagatatcatttaaccagaaaggcgacaaaatacacattgttgcaggactggttttcctgccggtaccaggcattttctttgattacctgaaagcagtgcagcttcccggggacaaacgcccgattgttcagtcatcatttgagcggctctgtatcaataaacgccgtgatgaccagcgtttttattttgctcgtattgctgaggaacccgggaactgtgcacgttacaaaacagtcaaaggttacctggtcaaaggacgtagtctgatgcatgaaagtaaactgaaagacagtccttatctttttatttcgtga

SEQ ID NO: 266965 - DNA, 1509 bp, Klebsiella pneumoniae
atgtccctgaatcccaccgatgaacagtcagccatcattcactggcagggggaaaaactggtggtgaatgcctttgccggtacaggcaaaaccagcacactggtgcagtttgccgcagcctgccctgagagccggatgctgtatctggcctataaccgcgcgattcgtgatgaggcggagcgccggtttccctttaatgtggagtgcaaaacctcccatcagctggcgtattcgcggttcggaaagcatttccggcatcgtctggtgccggggctgtcagtgacggatgtggcgagaaaactgaacacccgctactggacgcttgcccgtgttgccatgaccgccctgaaccagttcatctgttcggcggacgtggcgcccggaatgcagcatatgccgcctcccgacgagatgaagggcgtttcgccacaggatgcgctgcgtgccgtgcagctcctctggcatgaaatgagcaatccggacggcaatttcccggtcactcacgacacctatctgaagctctatcagctttcctcgccggacctgtcacgcaggtgggatacgatcctttttgatgaggcacaggatgcgaatccggtgacgtccgcactggtgctggggcagcggtgcagggtggtactggttggcgaccgttaccagcagatttatcgttttcgtggtgccagcgatgcactgtcgcatccggcactgaacggggcggaccgtctctggctgacgcaaagttttcgttttggtcctgccgtggccggggtggccagccagttactgaagcgtgccggcgagagccgtgaggtgaccggcaggggcggggaggatgaagtgctgacggcaggtgaaatgcgtgcgcgcgtgaaggcagggaagatgaccggtcacagggcgatactgagccggacggtggccggtgtgattggcacggcactgatggcggcaatgcgtggcaggaaggtttactgggtggggggcattgaaggctacagaacggaagcactggaagatctttactggtttcagatggacatgccggagcggatgcacagtgacagactgcgaaaggactaccggagttttgacgagtaccgtcatattgcgaaggtgacgaaggatgtggaaatgaatcagtccattcgtctgctggagctgtgctttccgctgccgaagaaactcgaacttctcagaaagcacaccgtcacgaatgaacaggaggcggatatcacggtctcaacggcacaccgcagtaagggactggagtgggcactggtgatactcgatgatgattttcaggatatcaccgacccgctgataagcgagcaggagcggcgtgatgaaaccaatctgctctatgtggcggtcacccgggcgcgcagaacgctggttctcaatgagctcatgcagcaactgacggaagctgccggcgatggtggtgcacccggaaacgcgccggtgcaggggaaggaagacgatggcgtggagggagaggatgtttaa

SEQ ID NO: 266966 - DNA, 219 bp, Klebsiella pneumoniae
atgacagcaacaacagacaccacaccgcataaataccggattgaagccaccatcctgaagcctggtggtgcaccggtatcctgggtgcgttttcagaacacaccgatgactgagcctgaatgcgtcaggctgtttttaaaagaaaaagaggccggtaaatcgttcagtgtgaaagtgaacgtcaccgcattctcatgcagcagagttcagccggaataa

SEQ ID NO: 266967 - DNA, 726 bp, Klebsiella pneumoniae
atgacaccactgaaaccacttcttattgtgccgctgctggcattttctgttccactttttgctgcaccgtcaccttctcaggtcagtgcaccctcatcgtccacggtcagcagcgctccgggagcactgaaatttattccccgggacggtaaagggttatcactgaaaaaagccatgcagcaactgataccgccgggatggacatttgacattgcaccggatgtcaggccgccccgcacggtgtcatggaagggaaatgaccagtggaattacgttacggaacgcatgctgaaaaaatatcagctccgcgccatcaccgacacggagaagaagcatgtacgtattgagcggaacaccctgttcagtccgtctcaggccaccccgggcaccaccagtctgcaggaaaaaaccgcggaaaaatcagcaaacatgccgcaaccggcgcatgcacggaccacctggactcttgcccgcggaaccctgctgcgtgccggtcttgagcagtgggtggccgccgttccctgtcaggccggtggcacctggcagctggcctggcagaaccccggactcaattacagcatcgatgcgccgctgcatttcaccggcgagttccgccacgcgctcagtgaactcttccgtctctatcaggacgcacagacgccgctgtatgcagccatcaacagcacgcagtgtgtggtgcacgtcagcgacagaccgggagactga

SEQ ID NO: 266968 - DNA, 438 bp, Klebsiella pneumoniae
atgggctggtcgctctccctggtcatggccctgaccgtggcgctgacctggtttcacaacagcagtacccaccgggtcaccgtgtacagcgagcaggcggagatgcgtgaacgtgcgtgggagatggtccgcctcatgaacggcattaacgaccggctgtacacccatccggctgagcgcacggggggtggcacgctccccgtcaccgccacgggtttccgcccggtatacggtacccgccatatcatcgccggacagcgggtctttgtctggcaggatgaccgcccggggcttgcaggtgcgctggcagacatcacccacaaaaccgcgctggcaggccgggtgaaggggcggcgactgctgaacaccacaggtcaggacaccggtatcagcgtgccgtccgtcattcctgacagcgcatttgtttatttcaactag

SEQ ID NO: 266969 - DNA, 1626 bp, Klebsiella pneumoniae
atgaaaaaaagacaacacatgctcctgccactgactgccgtcgccctgctgctgtcaggctgcggtacggccgaacgtatcagcaacacggaaaaagacgccaccgccacactggagaaagcgcgccggcacgcgggcgaactccgtaaatcccggccggtggtcacggagaccacgcgacagtggatcaacccctcccctgtcagcgtcagccccgcacaccagagcctgccgggctgccccatcatcatcaacacccgccgggatatcagcctgcggcagatagcccagcgcatcaccggaagctgcggtatccccgtgaccatcaccgccgacgtctggcaggcgctggccaccaccggccccacacagcagctgacaggcgcaatccccgcaccggacccgaacggcatggtgccgctggccgccgtcggcagtggcgcacaggtcatccccccgggcggtggtgccgtcctgccggaactcagcgccaccgggctgcggcagctgctggataccgtcgcctcccggctcggtatctcgtaccgttacgacagtgaccggcgcgccatcaccttttactggctggagacacgcaccttcccggtcacctacatggactctcaggtgacctacaacgcccgggtggtcagcggcaccgcctcctcctcatccggcagcagtaccggcagtaacgccggcaccctcagcggggaggccagcaacacccagaccaccacggtcgacatgaagtccaccctctatgaggacctgaaaaatgccgtcggtgccatgctgacccccgggaccggccggatggtgcttgccaccggctttctcaccgtcaccgacacccctcgggtcctcgacaccgtcagccgttttgtggaggcacgtaaccgcgagatgcgacgtcaggtggtgctgaacgtggaagtcctcagcgtcagaaaaacccgccgtgaccaggccggcattgactggaatgccgtcttcagcgacggacgtctcggcctcacgctgggaggggcattcagcagtgccgccgatgacatcatcaccagtggcgtctccattgtggacggtaagctcaccggctcgaaggccttcctgaaggcgctctccagtcagggcaccgtcagcgtggtcacacagaactccgccgtcaccaaaaacatgacgccggtgcccatgcaggtggccagccagcagggctatatcgaaggtgtcaccaccgacaccacggccaacgtcgggaccagcacctccctgaacgccgccaccatcaccaccggcttcaacatgaccctgctgccgttcattcagccggatgcgcgcagcctgcagctgctcttcagcatgaacctctccgacaaacccacctttgaggtgttcgagagcggcggcagccgggcacaggtacccacggtggacctgaaaaccatcaaccagaccatcgacctgaaatcaggtcagaccgtcattctcagcggattccggcagtccggcagcaaatccgtgcgccagggcgtcggcagcccggcattcttcgggctgggtggcggcactgacagcggtgacgatgacaccattctggttgtgctgatcacaccgcacgtaatctga

SEQ ID NO: 266970 - DNA, 1308 bp, Klebsiella pneumoniae
ttgaacgggtcaatgcagaaaaaaattcgtccggtttcactgatatcgggtaaacaggcattccttgcgggccttgactggaagagcatacctcccggttaccggaatgcccggcggtttgcccggtcacagggcgcagaactgtatctttcctgccacaaccacgacggtgaaaacggtgatgaaatgatgattgccctgctcagtcgtcaggatgcagatatcccccgtaacattcgccagtgcctgtcactggcaatgttaatacgcccgctactcaaatcaggtgggtatgccattttcatcatcgggaacgacgagaacgacgacgctgaactcacctgtgcgtttgtatcggtgattaatggcattctggttaacgacgttaccggtaccccgactgaaatcacggaagcccgcaacacgttcctgatgctcaatgcggaaccggaaaacggctgggtacgctacgaacctgacggtttttcaccagacagtcggtgtatcccgctaccgctgtcaaacctgatcagcaccagaaagcatccggcagaagcgcgtctgctccccgtgtccagaggcccacagttaatgacagccttactcatcatcacgctgcttggcgcatcgtggtacggctggcaacgttatgaaatctggcaggcggaaaaagcggaacgggaagaaagcgcccggaaagcagctgaagcacgtataacgccaccatggacgaggcagcctgagagcggagaatttatccggcaatgcagcacaacatggaaccagacgccactgtctgctgccggatggcgttataccctggctgaatgttcttctgacggtaacagcggtaatctgcggtcttcatacaccaatacagcaggcacgacagtgacagccttcatccggcgcatcactgaactcacagacacccggccgtttattgttatgcctgaagggaactctggcggcgttgcactgccggtcacattccggctcccggataatcctgtcccggttgattcccttccggaaacccgagacctgcaggaacgactgaccacgctcgcacagtcagttcaactgcagattgactggcaggaagtcaataacagcttcactgatgaaaacggaaacatcatccagccaccgtggaaagagtatgacctgcagatacagacgctactcccggctaaccagctggcagagcgcttcagcgagccatctgtccgttttctctctgtcacaagacaactggaaaatggtcgtttccgttatcagttcacaggtaaatattatgcacgataa

SEQ ID NO: 266971 - DNA, 462 bp, Klebsiella pneumoniae
atgcacgataaaacaaaagcgctgctgattgcagccctgctgttaccggcaatggcagtggccggcaacgaaaatgacgcgtcacagaacaaacaactgcagattgagcagattcaggaagaaaccgccctgtatgaagcgatgctggcaagagaaaaaattcgtcatgaattgcggacactggaacagggtatctccccggtttccggttctgtcacgggacatcagccggaaaatgcggctggcacctcctccggttcacaggcattttcatccccccgtctgaaagaaatctttggtattcagccacagctttcagcacgcgtcatactccccggaggaactgaaactgatgtcagggccggacaggcattacccggtacactgttcatggtggaacaaatcacaccggacagtgtgattctggaatacaacggcaacaggcagacgctacgcccgtga

SEQ ID NO: 266972 - DNA, 1521 bp, Klebsiella pneumoniae
atgccagagactatcgaactgcctcctgaagatattcgtgatttcgtcgcaattcagcatgacgctgacggaaaaatcagggtgaaagtcgtcgaggcgaagaagcacatcacctctgtacaacgttacctgacgctcttacgctcccgctatccgggaaaaatcagcaaattcgattttaccactcttgacgttatcgcaaccctgaacagcaataatacggaacgtgcaccgggcgttttatccgacggagggatcaacacagtacaaagaaaagttcttgattacatcagaaaagccgctcaactggatgcctcagaccttcatatgaccccgggacgagacaacacggacttcacctatgtggaagcccgggttcacggcgaactggaagtgctcgatatcctccggaaagaagaaggcctcgaattactgggggccacctattccggcatgaccgacgtcatcaagggcacacagtttgatcccggggtgcctcaggatgcgcgtctttcagagcagtacctgaaactggccggtctgtttggtgcacgctactcccactatccctgcgtgggcggcctctatgctgtgctccgtctgatcaaggatgacagtcagcaaatcccgaccttcagcatgctgggctaccaccctgagcaggagcgcaccctgcgccgtattctgcagcgccctgaaggtattatcacgctctcaggaccaacaggttcaggaaaatccaccacgctgagaaccgcctctgcggcgtaccttgaacagtacggcttcaacaataccggcggtattcttctgccccgtcgcaggctgttcaccattgaatccccgccagagggccgtatacccggtgccattcagaccgccgtcatggattccgcacagggctgggtggactccattaaatcagcactgcgtcttgaccctgacgggatcctgaacggcgaaatccgtgaccacgattccgccattacggcaataaaagccgccatgaccgggcatctgatgctgaccaccatccatgcgaacgacccgattaacatcctcgaacgtcttgagatggagggggtacaggccaggatgattgccgacccgcaactgttcattggcctgctgagccagcgtctggttcagctgatatgtccgcactgccgtcgcccctggcatgaggtggctaccgagcgcacggatgatgaacggcgcctggtggaaagcgtctgcaacccggaccaggtatatctgcgaaatcatgaaggctgcccgcactgctggcgtggcgtgacaggacgaacggtgatcgcagaagtcatctccccggatgcgcgttttttccagttgtaccgggaaaaggggcgtattgaggccagaacatactggcaccgggagctgggcggcatgacacgaaatcagcatctgctgggaaaaatcaacagcgggcaggttgatccgctggcggcccattacatctctcccatcgacgaggacagctatacgctgctgcactga

SEQ ID NO: 266973 - DNA, 1101 bp, Klebsiella pneumoniae
atgagatttctggaaaaactcaacaacaccgacattgagctgacagcactgactgtctggatagccagaaaaacctttgccctgaaccgggtggagttctacgaagccctgggcggcatgatacgtgacggaacgccgtccctgcgtgcactcgaatttctctgcgagatcgaaaccgattttggtgaaaagaaaggcacatccggcatgtattttctggcaaaagaatgcatcgattccatcaaagccagcggcatgttatccggtgccctgttaacctgggtgccaccggaggaagccacgttaatcagaaacggggaagagcgcggaaatattgccgacgcccttttccaggtggccagaaccgttaaagcccggcgggaaatgacatccagcctcattgccgtctgcctctacccccttctgctgctttcgctctgtgtggtgaatatgtacaacgcccatacccgtatcatccccatcgtcagtgcgtttgcttcagaagataaatggtcattccagatgaaattgcttgccggcatgtcggaatttttcatcgggtacggattctggctctgtgggaccattttcgccctgacgcttctgatccgtttttcattcagccggtataccggccccggccggaggatgctggacaaggctcccccctggtcactgtatcagaccttacacggggtgaattatctgttcagtatttcatccatgctgcagattaatattcctctttcgcaggcgctgctccgaatggaaaaaggtgcagaaaagaataaatggttaaaggagagaattcaggcaatacgaaaacatgtattatccggtcagaatctggccacagcaatgcgaaattccggttacgattttccgtccagaatatgcatcaataaactgctcctgaactccgaaagggaggacagtgtggcaaccatggcactctatgccgatcagtggctggaggaagcaaaaaaacgggtaaaacgaattggattaattattaccggtatatcaggaggttttgtcttcttttttattcttaacatgatctctgccatctacagtatcagcgacatgctgaaacaataa

SEQ ID NO: 266974 - DNA, 537 bp, Klebsiella pneumoniae
atgaacttcagatcatgtctttattcttattttgctttaaaaaaagagaaagaggaggataaaggtttaaccttactggaagttgccggtgcactgattatcatcggtattgtggtatctctcgcaataagtcagatgtccagcacaatgtcatccagtgataaccagcgtgaactgaaaaacctgcagactattgcaacaaaaatgaagcagtacaagttccaggggcaatataccagcagtgattatatcaaaacgctgacgcagagtggttccctgccggccgatatgatcgccggtggtaacaaggccaaaaatgcctggggcggtgatgtcaccattaaggcaacagcagataagtatggttatacgattaccagcaataatgtaccgaaagaaaattgcgtggaactcattaacagcctgcgcagttcatccatgtttaccaaaatcatgaataccgccccggctactgtggatcccgtaacagtatgtagtaacgacaaaaataacatcacccttgaaacaaacagctaa

SEQ ID NO: 266975 - DNA, 477 bp, Klebsiella pneumoniae
atgaaatggttatatctctctgtcctgcttttattcagtcacacatcaatcgcatctgtgatgaataataatcatctcgatttctgttttattcaggccggaaaacgttacctgattgcccctgagcttctgaaaaccattgcacagcaggaaagcggcctggtcgccactgcgataaatcacaataaaaacaaatccggaaaaatcatcagtacggattacggaataatgcagattaattcagtgcatattcctgaactgaaaaaactgggcgtcattaaaaacaaggatgaactgcttaaaaagccctgcctgaatattcataccggtgcctggatactggcccgccattttcaacgctgcggcgttaactgggaatgccttggcagttacaacgcaggattcagcaaaaataacacagcccggcgcatgatatatgcccgaataatccacaaccggtatttcagaaaagattaa

SEQ ID NO: 266976 - DNA, 651 bp, Klebsiella pneumoniae
gtgtctgaattactcccgatatgcattatcctgattgtccttgcggcaattctgtatctttcatacagcgccgccacagtatatttatcagaagtacacaatacccgcccacacaacgctgcggtgtgcatctgttgtcttctggctgtcctgagcatttgcctcaacggtgcatatggtgttgacgcgacaggactgttattcctttccattctgacgggattattaactgtaatgacgctgacggatattgctgtctgtcggcttccccggatattcacgctttctcttattattctgggcgcagcgttcagatacagccaggactcactggctcatgccctgctcaacgcgtcactgtggttcggcatgatatacctgttacgacgcatttttctggcagcgaaagggacggaagcgcttggccttggtgatgtgttcctgattgcggggatcgcaatgtggacgcaaccgcaacacactccactcataatcaccgccgcagcctccggagcatttctgtttatcctcattttctgccgtcgcagacgccagctggcgctgccgtttgccccgtttctctgcgcgtccctgtatgtgctgaccctcttccctgattccgttatccacacatcggagatattcacgtga

SEQ ID NO: 266977 - DNA, 1200 bp, Klebsiella pneumoniae
gtgaaaaaattcagacacgatgacgataaaggttttattctgcttgaaattctggcaggcctgatagtaattggtatcgccacgccaatgatttattcagaaattgaagactggctgaatgaacaactttatcaaagtgcggctttacatgctgatgaatataataatgcaataaagaattatgtggctgataaaaccagctcactttccagtaaaaccatcacggtaaatgaattaattcagcagggatatctgaacaacggtttttcccgctccccctttggacacagctatattaccggtatcagaaaaaataatttatccggtcgtctggaagcacttacctgcacaaccggaggacaggatattaaagaagatgggttacgtcgcatagcgggccagattaatggactcggtggttttatgctccagaataattccgttacaggtgcctttggcggctggaccgatctgggaagtaattatcagattacctgcaacaaggggcatatcgccatgcgaatggctggaaaagatctggaggaaagcgatcggctttaccgctacagcgttcagggaagacccgatttaaacagaatgcatactggcattgatatgaataataacagcatcaccaatatcaatgaagccagtggtaaaaacgccagattttcaggcgatgtcacatcaaatcgttggttacatccaaatggtggcggcttcaccatgacggacagccaatggatacgtgctgttaacaacaaagggatcacaaccgaaggagagctcaaaggaggaaaagtcagtggtggaactgtccggtctgaggggcgtctttccacgggtgagtatttacagctggataaaacagccaccgcaggtacttcctgctcaccggacggacttgtaggccgcgacagtacaggggcgatactttcgtgccaatccggttcgtggaaatcaataggttcatctgcgccgtggacatcagtaacatccttcaccttgtacccaaccacaacgaaggctctaggaaaattcaaactttgcgttaatacatatcgcatagatggaaaggaaaccgcaatgacgcgtgtctggcctacagacaatccagatgcaaacggcgagatgaactggagtgcgtataacggtacgttatatggcagctactacatcactgttcactgcttccgctaa

SEQ ID NO: 266978 - DNA, 480 bp, Klebsiella pneumoniae
atgattcaacgcattatcggctatattgcccgtcttattcagtgccagatttgtcttgaaatgatggtgcttaccctcctgtattgtgaaagttgctgcgcggcttcattagtaaaatctctcccccggtcattacccacgcgaagacgtccgccttcaatatcacgcattctggcaagcataatggtttttgataacggtgaaaaacccagctgcaatcctgccggtgtgctcttcctgtttctcatcagtcattgtccctgtttcagtgtagttgccagcatgccgctgacggtatgcggcatgctgtctgggtgttcagaatgtgacgctcagttgtgccactgccccgtatgtattgtccgtaccggccagaccggcaatatccaggtgcaccacatcgaacggcgagagaccaataccggcagtgaatgcactgccgttgttgctggccagattctggcggtaaccggtacgtaa

SEQ ID NO: 266979 - DNA, 282 bp, Klebsiella pneumoniae
atgaaaactaataagaaagacacaaaatggtacattttttaccgtgaaaattcaggcgaggaaattttgcttgaaatgtcatcatttaaggaatgtctttcggcatccaaagaattaatgaccccatcaaattacatgatatgcatagaaagaaatggcgaaagaataaaacgttgggacagggaaatcatagcagtctctaaaaaatggattaactgcccacctgataacttcgaaatattaggtgagctaataaccattaatagaattatcaaaaagtaa

SEQ ID NO: 266980 - DNA, 1176 bp, Klebsiella pneumoniae
atgaataaatatgatgctccttttgcttctttctttgcccttgatgggtttacccggaaagtgattgacagaatacaacgtcaattagatgtatgtgaagatcgtaaaatatacctcaaagtggctccctggtttaaaggaaaggccagaataaaagttaaaggattttggttggaaaataatgttactttccttgggctttctgttacaggtgtttctttgcctgcaggatatactataaattatgacagagataacagtaacctggttgatgaaaaagctgaacaagggagcaggcaagcctgtagtaatgttccagttcggcatataaaaaatccggatgaacctttcagtgttgataacgctttttctcctgattctggagcatcgactcttgaacttgaagcgtcagtttttgaatttcttgacgatggttgtgaattgagtcctttaaggagaaaaaaagcaaaatatatatccgttacaaaaaatgaaagtgatttacactcattatattcggtaaatgaagttgttgatgaacaaaatagcataagcacaggatatatgtcattagctgataaaaatgaacctgaaagattgtatatggagtcaaaagggattgttcgtgacatgtggaatgctatggtttatttgagggaggcttattctgaaagaattaagtctctggactggtataccccagaaagctcattcttaaatacgcaagaacctgaacttgttgcaatcccggagttcaatgaaagcgaagtggaaaatgataaaatttccaagtcgattcttaactggccttaccttgatgttgtgaataagaaagatataagaggttttctgatatcaaggatgttgattgatgataatgtgatttattttatggaaatacagaggagagtgtgcaatgaagaaactatgaattcgttctctgaagtggaaaaatttaaaggtctggtttttacacttgataacgaatgtgaaatcgataaatgggtatctttgttagctcacgaatcaagatttgttaaaggtattttacaaaaaatagtgggaaaatgcccgggcgcagcgatgacttacaagcattctcccgcaaaaaatgaacccgttgcttgttatagcgcattgcttaatgcattgtctaaagtcggagttactttttga

SEQ ID NO: 266981 - DNA, 603 bp, Klebsiella pneumoniae
atggaaaaagtatcaataagaaaaatcaacaggacagagcattttccttcgttaaatttttcttctgatacatcctgggttgtttggtggtatggttttttaaaaaagaataaaagacgaggtgaacaacctaaagtagcaattacctttcgggaagttcaggccgatggaactctttgtgatagatattatgagcaagaatgtctgttgactgatttgtctttttttaaaataggcagtgtctggacaagaggaaggtgtgttgctgaaattctgatggaggaaaaaatatttaatgtggatttctcttatgcaaatggagggtggaagattaattctctttatcaggcatataaagaaggtgtgtcattaccttatgatttttcagattatcaactgaaatctccatatgataaaaattggctccttgagtttttaacagatgatgcggataaggtgatcatccatccgcttgagtttttttatcgttgctatggacattccgatgagttgaagagggttattcttacttattcaggaaatgaactgcgtaacaggattttttctgaggcatacgtggagggagacaaaatctttatataa

SEQ ID NO: 266982 - DNA, 732 bp, Klebsiella pneumoniae
gtgctaacaaaaaataaattggggtttatttcgatgaaggttgtgtttaatgtaatggatggttttgataagatttttttacccttggagttttctggttttcatggccggaatgggtactgttatttaagggttcagattaaacatggctttattgttttctcatgcgctcaattattgaactattatcgtacgtcagtaacaaatgcaattgagcaggtcagagaggctgcggttaatgctctcttcagggagggggtattgtcatacacgcagcaaaaagaatttctggatatattaaaaacatcacaacgagtagataaagaaattgattcgcaattatgggattacataaatgctaattcaatttggtttgaatactataaccataatgaatcattgtttctgaatgatcgctttcatatcgcctcttttgagggaaacaggaatccagtgtggaagaaaacttcactggaggatttagagagagcatatcccgagtttgactttgttattcataaacatcatcttgaaaaatggattaatggaggacttagtcctgaaaatgtaaaaaagacaataaaagaaaaaggctggagcaacaagatgttggctgcgcgctgggggtgcacagaggtatgggtgagtaaaatcattaacgatgaaaatagaaaggttcagtggaatgatgctattaatgggcttcctgtgataagtgataatatgatttga

SEQ ID NO: 266983 - DNA, 963 bp, Klebsiella pneumoniae
atggctgaatggtgcagaaatcgttttgaaatcaccggtaagtcagtctgtcttgacgtactgattcagtggattgaagggaatgatgccccccggtaccgtcatgcgatccagcagagcatactgctgtttcttgcaggctgtgcggggatactgaaaccggtaagaacggtgacatatccgccttatcccgggctggtcagtcacggtgccggctcaacaactgtagccagccaggcgtttgaacaatggctgggattactgaccagggatgccttccttgatcacgagacggtgaagacaatagatcgtctttatcatcagacagggacaggcgcgatccggtggagtaatctgcctgatacggcgaaggagataatcggtggtgtgcttgcacaacaatatgctgactggtttggcgtggcggatgtgtatgaacgccctgataacgcctttctctgggagtcgttgttaacatttgcggagtattcgcaaccctgcgatatgctgcaggtgatgccaacgcggctggccacggagctgaacggaagtggtggtctgctgaaaggcaccggaacgacccgcagtttttactgccgccagtttggtgtggagtacccactggggcagaacgtccggtggaaacgaaccgggctgagtacgctgatactggagtttgataccatctggtgtccgccttcaggtgtactggtgggtgagatttcatcggtgtttgactgcgagatacgccactggtacagcgaaccaaagaacgggatcaatggttatgactgctatgatggtggcgaacatatggacagtaaaatggaagctgaatggccggagtctgaccacgcagaggagaacgaacagactcatctgtatctggtcagtgattcgcagccaggtgaacgtgccacggcatcagctgagtcctcagggacgacagcaaaaatagtgtaa

SEQ ID NO: 266984 - DNA, 435 bp, Klebsiella pneumoniae
atgaacgttaagtctgtgactgaggttgacgacgctgtggttgcccgtgtcagtgaagttctggaattcgcatttccggggcagaaatttgaagtgctgaaggtatgcgattccggcgtttacaacatgattaatgtgtactggctggacggcccgacagaggctgaagtgcggtttatcacccgtgcgtttgaaggcaaaaacgggctgaggttcgtgcacgaatcccgcgaattcagtaatgaatttgtgcaggagtgcattgaccggcttcgccagaagtacgggcagagcaacgttccgccagatgtgaccgtggagcgttactggaaaaacgatctgtggaagattaaaacagatcgtttcccgggcaatattgaggttgccatcaacgaaatggggatggaaaccagtaaataccggaaggttgtataa

SEQ ID NO: 266985 - DNA, 339 bp, Klebsiella pneumoniae
atgagacccgatttgaatactttacccggagattccggctgcagcgtctggttctatgacggaatgtctcaaccgcgtctgctggcgggcagtattgccgggttactgacggatgttacgatcacatcgaattaccgtggtgacgtcacatctgaaattcatgacgtggtgcaggagtggcttgcgaccggcagggggaacctggcggatttaaaggaagaactctggtactacaacctctacataaatccgtcggcagacgaacttatgaatgccaacaggcggtatggcctcggacataccacctggctgaaaggctttatcaataacgcggcgtga

SEQ ID NO: 266986 - DNA, 360 bp, Klebsiella pneumoniae
atgtattcgcgttttattactggttactggcatcttcagacgcagtccgctttgctggcacatctctgtcagcttgaaggtgaactgacgatacttcgcgcctggcaacgtctcggaattaccccggtgccggaggatgaagatgagccttcaccactttactcaattttgtgggatgttggtgaggctctgggctggttgctgtatgacctggagatggaaaatgttcctgcaccgggaacgattttccacgaggtattcgacagggttatatctctggggtatgagactgagcccggtatctgggctgaaagtatcagtacgggaaagcgctacgctgcaatgcctgacgaattttaa

SEQ ID NO: 266987 - DNA, 510 bp, Klebsiella pneumoniae
atgaaaacgaaaacttctgcacctgctgtatatgttggtacctgggctaaatacaacaatggcagcatagaaggatgctggtttaatgatttaaccgtttttgaaactgaaagcgattttttagctgcggcccgtaagtttcataaggatgaaaaagatcctgaatttatgtaccaggattatgaaaactttccttcgggaatggcttcagaatatggtttcaactgggcttatgttgaaggttatcgtcttgcccgtgaagaaggctgtgaagatgcatggtatgcatgggtttctaataccggtgatacctgtttcgaacagttccgggatgcgtggcttggtggtccttatgacagtgaactcgagttcgccgcgcagtacgtggatgaatgcggttttctgtcagaggtacctgatactgttgcacgctattttgattatgaggcttttgcgcgcgatttgttcatggaactggattttgtcgacggacacgttttccatcggtaa

SEQ ID NO: 266988 - DNA, 192 bp, Klebsiella pneumoniae
atgcaaataagtgcagaaactcgcgctgttttacgtcactacagacagatcattaacgccagacggcgtgaagatggcatgaaagctctcagcacgccgcaaatcgttgatgagatctgtgagtttatgctcagccagccagcagtgtatctgggggggcagttcatcatgcagaaggccggaacaagatag

SEQ ID NO: 266989 - DNA, 387 bp, Klebsiella pneumoniae
atgggactcgatatttttttccttgggcgtgatcgtgtttgtgttaccgacgcagtggtatcggtaccggaaacgcgggaagtggggtactttcgcaaggttaacccactgattgcctggtttgagaagcattgtggaccgattgaaaatgccgtggagcgtccggtttccagaacggaactggaggcactactgagcgatcttgaatgccttacgccggagaactgccgggaattcttccccacaacagaaggattcttttttggctctcaggagtatgaccagtattactggaaggatgttgaggacgtgaagtcgtgggtcagacgcacgcttgattcgtttgattttgaacgaaaaatactgttgctctgggcatggtggtaa

SEQ ID NO: 266990 - DNA, 594 bp, Klebsiella pneumoniae
atggcggtacatccgtttagcctctggaaacggatatcaccactggtgattgaggtacgttactaccaataccggatttatcggttacatttcttaattaactctgctggctgtattgtcaccagtcagcattacctgacggattttccagtccgtcagggcggaacgtccgtcttttatccggaggttccgatgtttattccacttctgtttcgcgcagagatgcgcctgacacctttctttcagcgactcagacaacgtctgtgttatccggtgagtcgtgttcatacacaacatccctggtcttctccacagttgcggcacctttactgcacgccgtggtttgttaacgccaccggcaatctggcagtccgtgcctgcattgtttccattgacggttctttgcgacactgctttgagttccgtgaaggctctcacagccgtgaataccgtttctggtttgaggcgcttcctttgtcggtactgcgttttaacgcttttaccggtcgaatatccgatcgccgtacactctctgctgcctcccgtatggccgcgcagcttacttcctttcgctatcgcttcggtttgcgctga

SEQ ID NO: 266991 - DNA, 741 bp, Klebsiella pneumoniae
atgaaatcgaaatacaaaaaattaaaagatgaactaatcaaaatagctaaagcatgcgccccgacaccagaagacatactggtatatatggggagagccagaagatttgcttcatttcttaaagaatccaatatacagataaaatcaataaatagtataaaactacgtcatattgagctttactttcaacagcgttatcgaactggcgtccgttcaaaaatactccgagaagaattagacacaataaagcatattctcactgactgtggaaaacgaaacatgatgaaaaatgaacgtctgacttatgcagcactgaatattgcagatgttcgtccaattgtaatctgcacttactgtggtaataaggcacaactcagaaaaggtgcacttatgccattttcatcgacacccactacagaaaacaaatattactggatttgcagcccatgcaatgcatgggttggatgtcataaaaattcagggagaccattaggtactccagctaaagaaaatttgagaatactcagagcacaagtgcgtaaactttttgacagctatcagcaaaaaacaaatatatcccgtaacgaggcaaacagatggctatccagaaaactaaattgccgcatccatgaatgccatataggatactttaatgagagcatgtgtaatcgtgcatcagaaattcttattacagaaattaataagttcgcgaaaaacacatatcctccggattcattttaa

SEQ ID NO: 266992 - DNA, 918 bp, Klebsiella pneumoniae
atgtcccgtaaatcgtcacgttccaaagttgaagtctttcgcaagtcattcatctcacttgcccgtgattgtggtggcagctacgcaacaaccgctgacagaatgcgaattgccagatactttttgaattatttgcaagtaaacggtatcaaacttcgtcagacgggcagtattaagacgaggcatatttctggttatcttctcagcaggaaagagcaggggatctctcaccgcacaattcagaatgaacgggcagttatgcgcgcaattctggagaaagatggtcgccttaaaatagcggatccgtccaatcctttattgagcaatgaagctcttggactcagggatacatgccgtgatggtaaaaagataccactctcacaggatgagtttaataaagccttcagtaaggttgaaaaaaataatcccggtgttgcggcagtaatgcaactttcttatgttcttggactgaggacaaaagaagctgttcagtcttgtaaatcagttaactcgtggctacgtgaacttgattcagggcatgattctcttctcgttgtttttgggacgaaaggtggaaggcccagagatacaacgatcattaatcgtgatgcagtgaaacatgcgctcatttatgcaaaaaacattatggataaacagaatggtaaacttatcgatcgccccaatattaaacaggctataaacgtatatcgttaccatgtaagaaaggctggtttatctggagtgaaggcaccacatagtatgcgttatcatttttcgcaggaagcaaggcagttttatcgaaaaagtggatatggagataaagaaatttacgcaagggtttccatggaccttggtcatggtgacggaagagggcgttatgtaaaacaggtctactttaaaggcgctgatgagagctga

SEQ ID NO: 266993 - DNA, 882 bp, Klebsiella pneumoniae
atggatgtcataagcatcattatggcggcgggcaagtcgtccgttgacgtcgcgctgtatacgctgttgccgatcatggtgatcatgctgatcatcatgaaataccttgaggtccgcggtatcctcgatgtgattgttcgctgggtggccccgctgctgaagcccttcggcttaaccgggatgagcgccttcgccctgatccagattaactttgtcagctttgccgccccgctcgccacgctggccatggtgttcgccatggggcaaggcaacgtcttctatcctcttaccccttttggtctgcactggctggcctcgatcgttatctcggtggtcggcggcctgtgcgcggccgccgtcgcctggcacgtcaccggacggcgcttatcggtcgccgagaacccccgcgcggaagcgctgccgaacgccgagcagaacagccagggaattctggccgtgattaatagcgccggctccgacgccatccgcctggcgctcggcgcggtgccaatgctgatcctgtcgttaactatcgtcgggctgctgcagggcgccggggctatcgacctgctgcagcagctgctgaagccgcttctcagctggctgcacatcccccagaactttgtgctgccggcgctggtgaagtgcgttgccgggggcaccgcctactttggcgtcatttccgagctgatccagcagggcaaagtcaccgtggaccaggtcaacgcctcggcaggtctactgatccagacctttgatcttcccggtatcggcatttttcttggcatcagctcacggtttgtccgcctgttccgcttcgtggctcccgcggcgatcgtcggcatcctgctgcgtaccgttctgcacctgaccctgttttaa

SEQ ID NO: 266994 - DNA, 267 bp, Klebsiella pneumoniae
atggccagaacgatgactgttgatctcggggatgaactccgggaatttatagaatcgctcatagaatcaggggattaccgtacccaaagcgaagtaatacgcgagtcactccgtcttctgcgtgagaaacaagcagagtcacgtctccagaccctgcggaatttactggcagaaggcctgagcagcggcgagcctgtggtgtgggaaaaggacgcgttcctgaaaaaagttaaagcaggcacaaagcctgccggtgaaaaacgttaa

SEQ ID NO: 266995 - DNA, 327 bp, Klebsiella pneumoniae
atgaaatatgcatttgtacttagttccataatatcaataattgttccatgcgttgcccaagcagccccacaagagcaagccacacatactaaatatgcatgtgaagatggaaaaacactagatattgtgtatgttggtgattatgctgtcattaagcagatggatgaactgattccaatgaggctttcagtaagcgcatcaggtatgaggtacttatcaatcagtaaagattactcttatgaactttggggtaagaagaatgatatgaatctttcggataatagcaacggcaaagagcaaataatcctcagcggttgtaaaccataa

SEQ ID NO: 266996 - DNA, 174 bp, Klebsiella pneumoniae
atgttcatcaaccccatcagcgataaactgaccgatttttgtttcaagccgctgcattgcctcgtaaagcttggcatccgcattatttttaagaaacctcagtatataatcagcaataatttggacgggagtgaacttatacattatgtatccttaagacgttgtgttaaatga

SEQ ID NO: 266997 - DNA, 609 bp, Klebsiella pneumoniae
atgtatctgcatcttgtgccacgtattcttcaccatatgaaaaacaagtgtactctcatgtccgtgtctgtccctgaattgtcacttgagcttaaagctgattcgctggtggcaatgaaaccctatcccaacaagacctaccacgttggcatgctgaaggggcgacgagcattaaatggctttctggtaaagagcccacgaactttagctgagttcacaatgataacgctctgggaaatagacggctttggggaaattagtcataccgtaaaaacgctcgttcaggacaacgactatgacctggtctcccacgatgtccttttggcacatgcataccatcagacggaggagggattggggtaccgtgttcatccatcctatgacagtttagcccctgtcgattttgagccaacaatgcaatcccggtacataaaggaatccgacctttctcacgacgtatgggaaacctattcatggggggaatttctgcgttcgcgtgaagagacatttctggcgatgaccatttcttcttctcgtttaaaccaccctgcatttatcagaggaaaccggcttcctcaaactgaccaggccatcattattagttcctaa

SEQ ID NO: 266998 - DNA, 534 bp, Klebsiella pneumoniae
atggtcaaggtgataaatatcaacgggaatttagttgagttacctgagccctcagcaaagttatccaaagcggaatcacctgatggtaggttctcaaaacctaaaaataagatctctaaaatacagcgagctgagctgcgaatgaaatttggggggcgttgtgcctattgtggttgcaagcttcctgaaaaagggtggcatgccgatcatgttgagcctgttcgacgcgactttgaactggtgagagccccggtcggcagcggcgtaactcatgttgcccgaagtacgggtaaggttatgcaccctgaactgcatgcaatagaaaacttatttccatcatgcgctccctgcaacctttttaaaggagcttttagtgttgaaggaatgagaaatgaaattaccaaacaggttgaacgggctcgcgcatatagcgtgaatttccgtaccgcagaacgttttggtttgcttcatattgtagtaaaaccggtcgtcttctggtttgagcagtataacgaacagaaacaaaacgaataa

SEQ ID NO: 266999 - DNA, 303 bp, Klebsiella pneumoniae
atggaaaacgacgcggtgaaaagtaacttttacaccgcaattcagaaaaaagtttcagttagtcacattacgaataacccggcttactttcgcatgtgcgttcccctgcatgttaaagtaaagccctccgggcagactcgtcgcccacttaacgcctcgctcagccatacgcttcggtgtttccagccaaccacgaggaatattgcccggaacgttaccgataacccgtcaaatgcatgctgctacccggatgccgccgggaatatcgcatttggattcaacaatatgcatgacctcagataa

SEQ ID NO: 267000 - DNA, 378 bp, Klebsiella pneumoniae
atgaaaacgttagacgtgatttcaactcaactcaactttaataatctgctgaatcaggcaggatataatctttcagaaattgttgttaaacgctacagcgctgcacccgcctttaacgaagggcactggttgttcattgcagagcaggataatcgctacattgaagtggtcagtcttctttcaaaggcatcagaaagcggagagcagcatgtcgatatctttatcaatatgttcgaagatccgattgatgacattatctcccgaaacattgaacccaaaacatttgcgacactttataaatacattgaacgtataccttttacaccggacgtaaaaaaagaattcttgagcagtattgagactattaattttagttaa

SEQ ID NO: 267001 - DNA, 576 bp, Klebsiella pneumoniae
atgcggcgagtcacggccattgtgaatctcgattggattggcgaatacggcttccggttgggccagatgtcaatggttatgcttcatccagctcattactgtagtcattgccgttcagttgagctgatgctcctctcattctatatggcgacaacggtagtgagcccagaaagtgactaccgttgtcatggccgtccagtagagcgggtcaacctcttaactcacagggtgacaacggtattgagcccagaaagtcactaccgttgtcatggccgtctggttaagcagatcatcctctcaattcacagggtgacaatggtagtgagcctattaagtcattaccgttgtcattgccatccagaagagcggatgatcctctcaattcatacggcgacaatggcagtgagcccagcaagtcacttccgttgtcatagccttccagaagagcagatgagcctcttaattaacagggtgacaacggtagtgagctcattaagtcattaccattgtcatggacgtacagctgagctgctcatcctctcaattcacacaccgacaatggtagtgagctattaa

SEQ ID NO: 267002 - DNA, 318 bp, Klebsiella pneumoniae
atgaacagtacccggaaagagaaatacagtgctttctgtcgtttactcaacgaaacacttaaatatgaattacgtcttatactccctccgggacatcaggcagtaattcctctgcttgaatctccacgaggagaaataagccgggataccattgagaaaatgcgcgacatactcacaccggatgtgacacaccgaataaaagaatccatcaatgcctggacagaagatgagttaagttatctggattgtactgttgatgttgagtatgtgaaggaacagaaacgaaaattatttgcaatgctggactgcgaacaataa

SEQ ID NO: 267003 - DNA, 573 bp, Klebsiella pneumoniae
atgaaaatatcaaaactggttgttgtggctacagtatgttccacgcttagtgcatgttccgtggaagagatggctgctgtgaacaagaaaatcagtgacggtgcatttgctgtgacgaaagcgctcaatgggggaacgggctacgcggataatggtatgccgatccttaacaagcaattgccgccggagcaggataaacgcgaaaatgttattgatgtccctgttgatgtggataccgcagcaggccgactgaaacgctattacaagttttactcgaatgatgaggtaaatgcgatccgcaataacggcacaactgacggaaaatggcaggcaagtgcgattattgacaatgggcatatctgggatgcgatgccgggcagttactacaaaatgggaggaaactggcgtaaaggcagctttgatgatcacctgacgattgaggtggaaaagaacggtaagggaagccgggtctatatcacctatgcttcagcttctcaggcgcatttgcaggcaagttctcttgagcctctgtttaagcgagtgaaggatgtggctgaaggaaaggttcgttga

SEQ ID NO: 267004 - DNA, 246 bp, Klebsiella pneumoniae
atgaacaatgaaacagaaaaagcaatgtggagttgcaaaacctctgataccccatggactttcagctctctgctgaaaaaagctgtttgcgcggttttgtctaacgctggatcagactctacttgcaatgaaaaaaacaagaacgatattgaactcgtaaaaatccggtcatatggagatagcgagggctggattgaatcaaaaggtggtcccatcaacatcgttaattcatacgatcgatattaa

SEQ ID NO: 267005 - DNA, 1509 bp, Klebsiella pneumoniae
gtgaccacgaataactatctggaacactttctgaccctgctgggctggctggtgaataacggcctgtgggatctgctgacggggacggggctgtttgccctgccactggccttcagggttatcgggatctggctgaaagtgcgggaagagggggcggatgagggaaataaagggatgctctcactgccccgcattgagcatgccctgtatggtgcattttttgtgatggtggcctgctgtgtgccgctggtacaggtgacgctggacacgctgaaatttgatcgcagccgtgcccagacctgcggtgtgtggacaccgaaagcacccggtgataccgggtacagcggggtgatcagcagcctgggtgacaggacagcggccgccccggtgtggtgggtggtggtgcataaactctccaaaggtgtgacgcaggctgctgtggcgtccattccctgccggccggatatacggcaactgcgttttgaggtgcagcggacattcattgcgaaccgggcgctggccgacgagctgcaggacttcaccaacgactgttactcgctggcgctgtatcagtggaagcagcgtgaccaggggatgacgaaggacaggaagctgctttcggatatcagctggattggcagcagtacgttcatgcagggtgactacgggacactgcagtcgaaaatgccacgtgcggcattcccgtggaatagcgcccgtgacagcggccgtccggatacgggacgggggggttatcccacatgccgtgaatggtggagtgacagtagtgtcgggctgaagaagcgggtgacagaggaagttgatgaaggactgtggttacgtatttcggcggcaatgaaaatgctggggaacgcgcaggcgaactaccaggaggaaatcatcaaacgtctggtgagtccggcgaacctgaccctgtcacaggggggtgaggtgtaccgtggctatggcggtaatgcagatatgacggcggcgaatgcggtcacgcgtgcagcaggcacggcgggttctgccgttgctagtctggcagcgtttccggcgtttgatgcgatgcggcaggcgctgccgatggtgcagagtattctgctgatggcggtgtatatcatgctcccgttgattctggcgtttgcggcgtatgaattcagcacgctgatcacactgacgtttgtggtgtttgcactgaatttcctgacgttctggtgggagctggcgcggtggcttgacagctggatgctgacggcgttgtacagttcggacacgcattcccgagtgaacatgatggggctgcagaatacgtcggacgatatcatcatgaattttgtgatgggcacgatgtttattgtattgccgacagtatggctcggagcgttaacatgggcagggattagtgttggaagtattggagcagctattggcaaaggtgtatctgacgcacaacaagcaggaaaacaggcaggaaatattgccaatttattaagtaggaaaaaataa

SEQ ID NO: 267006 - DNA, 360 bp, Klebsiella pneumoniae
atggcgatgactcaggggacaaaagcggggctggtcctgaagggcgttaaggtggccggcatgtggctgtcgggccttattgccatgatgattctggccctcctggtggctgatacgggcatgcggcatacgcaggaagtggaagcattacggctctggctccacgagacacgtttcggatggctggggtggcgggtgtgcctctacggtgcgctggcatggggatgccggaaaatctggcgtgcgccggggttcagaccggaataccgctgtccctttgcgcggatttgtctggtcagtgctctgtttgcgttactttgcgagtacagcatttttttcggaccgggggctgaactgtga

SEQ ID NO: 267007 - DNA, 1419 bp, Klebsiella pneumoniae
atgatgaagatgaaaacaggtgtggtggcactgagtgtgatgctgtgctgcagtactccggtgatggctgatcttctttccctgccgaaactgaatgacagcacgttcggttacgggaaatccgtggatggcgccgtatctgacaaactgttctatacgctgggtggcggctcggtgatctcccagccagccacgcgcagcaacatgcagaagctgggtatggacctgggctggagcagcgatctgatgtgcggcaactttgacctgaagaccacggtgggtaatcagcttaacggcgtgaccgaaggttttaaaaatctgatgggggatgtgattcagggggcgaccggcgccgttgccagtctgccggcgatggtgatacagcgtgccaatcccggcctgtacgacatgatcaccaacggtgtgctgcaggcgaatgtggctttcgacaaggcgcaactgaactgccagaacatggcaaaacggatgatggacttttctgatcgcagcaaatggacgcaggctgcgatgctggaagagtacaagaaggtggtgaacagcggtgacggcgatgcggtgaaaggggatgaggccgggcgtcaggccaccgggaaggagggtaagaaatggattggcggacagcagcgtggcggggcaggtcagcccgccatccggccggtgcatgatctgacagcggccgggtttaacatgatgaacggtctgcccgtgaccagtacggccagcgtcagtgccggcaactgtaacggcagcgcctgtgagatgttccggaatgcagaagaggccgcgaaggcggtggtgaaggtgctgggtgatcgtaccatgcgcacctgtacggatgcgaaggcctgtaccagcggggataatgaacagcagcagggaaccgttgcaggaacggggtttgcgccggtgctggaagaggcgacccgggtgaacacggaacaactggtccgtctggtgaatggtcaggagaaacccacagcggagaatctggcaaaactgaaaaccggcagtctggctgtctctgcaggggtgatcaatgccctgcgtcgtgacccggacaatatgtccctgacatcgcggctggcgggagaactggcgatggcgcataccgtggaaacggctctggtgatgcgcagaatgctgctcaccgggatgtctgagccgtatgcggccgcagaagatgccgcgattcaggaaggcgaccggcgtatcgcttcactggacagggaaatcatggcgctgaagaacgagatggagctgaaacgcgatctggcacgtaacagcgtgctgaccatcattgaacgcgacaatgagcgcgtgggcagcaacccgatgatccagcctgcagacaatactgacagtcgtgtccgggcactggaaactccggacggggagtaa

SEQ ID NO: 267008 - DNA, 975 bp, Klebsiella pneumoniae
atgatatccctgaaaggtcgtctgcgtgccggcgcgctgttactgagtgtggcatcactgcctctggcgtctgcgtcactgaatactgccagcattatcgccagcgcggcggcaccggactgtatcagctggcgtgtcagcgggatttgttactggctttactgcagcacgtttggctgcaaggtccgaacctccgtgaaggtgacgcatttcatcccggaagtggttgtttccacctatacggcaccgggtggtaatccctggaaagagatgtcgctggtcagccggacggcaggtggcccggagaatgccatcactgacggtctgtcggggctgagtgcaggcgggggaaatccggcggatatgaaagcacagggggagcggcgttcagccattcgcttcaaatacgcagatgcgctggggcatccggcaacgaagcttatcggcgggatggtgcccggattcagctgtgattcaccggtgacgccggccatgccctatttcctgagtaccctggacagcatcgtctggcgaacgggattacctgaatccctgtatcccgaagcactggttcccggcaaacgcgagattggcagccaggccgataaaaacatgtgggggagtgtttatccaagaagcggttttgtgatgcagaccgatgatgaccgggccgcggcggtggtggcccagcgggtggccgacattatcacgcggacgggggagccgcatgtctacagggaggtgaagggcgtgaaacgtgacggctactggcccccggaggcggtggaggaaaacaccggcacccgcaatcacaaatggcagcgactgacgccgtcagtgtcgcgttcctgtgccgttttcccggatggtgaacaccaggcagcggagaacggtaatgccgcctttgcactgtggcagccctacagttgctgcaaaaagcgcgggcagcgattccttggcagtacgaatttttaa

SEQ ID NO: 267009 - DNA, 396 bp, Klebsiella pneumoniae
atgtaccggattttctgttccctgtttttcctgccgctggcagcgtctgctggcacaacaatttataccgattctcagcacctccccgttaatactcccgatggtgtcagggtggttctgctggatgcaccggagcagcttcagaaccgcttttttggctcgttgcctgctgatgcggataaggctgaagcgctggtcagggcacgtatgcagtctcccgaatggcagatgatgcaggcggaactggctgctcattaccgcgatgtggcacatgcctggtcgctgggcgtgaagaaatatcctgccgtggtgtttgatgacagtgaggtggtttacggcaccactgatgtggtggtggccgggaaactccgtactgagggaggagtgcagccatga

SEQ ID NO: 267010 - DNA, 387 bp, Klebsiella pneumoniae
atgatgtgtctgaaatacccgaaaccggaggtgatgacagaggtcatgcccgggggcagcgtgttttttctgccgccgcagggaaaaccgggtgttgcggatctggcgcaaccgcatctgcagcgcctgcggtcacagcttgaacgcaggctgggtacgctgcatcgtgtggtgtgtcagccccagcgggtggggcagagcagcagtgtggccgtgacagcagaaggggcgtgtggcgaggtgcatcttctgctgacagtaggggggcatgagagctggccctctgaagaggaataccggcatccgcgctggtatatccaggtggtggatgcggccgatctgttctacctgctgctctggctgtgtgatggcgggcaggaagcctga

SEQ ID NO: 267011 - DNA, 2850 bp, Klebsiella pneumoniae
atgacattctcgcttttcagacgccgtgaggaaaaaggtacagcagagaccagggaacgaccggaagcagaagcgggggcatcttcatcggcctttgttccgccctgtcctccgggggcacagcccctgcgacgtccgggacagatgacccgtgatgctgaggcggcggtttatcatgccggtccgtcggttattgattttctgccatgggtggaatatctggatgaggagcagtgtctgctgcttgacgacggggtgtcggtgggagcggtctattcggtgacgccggccgcaacggaagggcgtacggaagagcgcctggcgcaaatcagggacatggtggaggatgccctgcaggacagttttgatgagtacgacacgcatccctgggtggtgcagttctactgtcaggatgaaaatgatgtggatgcgtacctggactatctgaaggggtatgtgaaaccccacgcgcagggaacggcattcacggaggcctggctgggtgaaatggcccgccatctcagggggattgcccgtcctgagggactgtttacggacaccctggtcaccggtcagccctggcggggacagcagcgacgaacccggatggtggtttaccgtcgtatcgggaagaacaataacgatccgatgtcgccggtggcgatgctgaaccaggtctgcgaccgcgtggtgtccgcactgggtggagccggtatccgctgtacccggatgaacggtcagcaggtgcacagctggctgctgcggttatttaatccggcaccggactggattgcccgtgaagagctgtaccggatggcctcacgggttgatccgcgtgagcgtggtgatgatgtgatgccggtgatgacggattttgccgagagcctgtggtttaacccgccgtattccgatccggagaacggggtgtggtggctggacgccatgccgcactgtgccgtggtggtggaaaagctgcgtacgccgccggagccggggaccatcaccggagagatgccccgtggggaaaaaacggtgaatgcgctgatggacacctttccggagggaacggtgatgtgcatgaccatcgtggtgcagccccaggacaccctggaggaccgtttcacccggctgtcgaaaaatgcggtgggtgagaacacggaatccatccgggcgcgtcaggacgtgaaggtggtgaaggagctgctggggaaccggcacaagctgtaccgggcagggctcacctttcttctgcgggcagaggatatggacagcctgaaacgccggcgtgtggagctgaccacggtgcttctgggggctggtctgcagccggtgcggcctgagtttgacgtggggccgctgaacagctggctgcgggcgctgccgatgtgttttgatccggatacggacaaaaagcagtggtacacgcgtctgatgtgggtacagcacatggcaggattgttgccggtgaccggccgggatacggggaccggacatccggggttcagtttttttaaccggggtggtgatgtgctgactttcgatccgctgaacaagctggaccgtacccagaacgcgcatctgctgctgttcggaccaacgggggccggtaaatcggccacgctgtgtgcttcactgtcgcaggtgatggcagtacaccgtccccgcctgttcattgccgaagcggggaactcgtttggtctgctggccgattattttgagagtctcgggctgtcggtgaacaaaatcagcgtcagaccgggaaccggtgtgaccctgccgccgtttgcagatgcgcataaactggttgaggaagggcaggatctgcagtgcgtggatgagcactcactgcctgatattgaggatgaagccggggatgaaggggaggataaacgagacattctgggcgagatggaaatctcagccaggatgatgatcaccgggggggacccgaaagaagaggccgcgctgaagcgtgcggacagggcgatgatccgcgaggcgctgctgatggccacacaccggacataccgtgaggggcggcagatgctgccggaggatttgcagtccgccctgtgggagatctcccgtgacagcagccgtaacgatgtgcgcaatgcaaaggcggcggagatggcggagtctctggggatgttcacccagaaggggagttttgaggcggagttgttcaaccgtgagggcgaactgtggccggaagcggatgtgacgctgattgacctggggcatctggcccgtgaggggtatgaggcacagatggcgctgaccatggtgtcgatgaccaacatgatcaataacattgccgaacgtgatcagtatctggggcgtgacatcgtgtttgcggtggatgaggcgcatatcgtgacggtcaatccgctgctttcgccgtacatgacgaaggttgtgaagatgtggcgtaagctgggagcgtggctgtggctggcgacacagaacctgaaggattatccggatgtgtcggagaagatgctgaatatggcggaatggtgggtgtgtctgacgatgccaccggaggaagtgaacaacattgcacgctttaaatcactgacggaagagcagaaagcggtgctgatgtcggcgagtaagctgtccggctgttataccgaaggcgtggtgctggcgaaacagattgaggcgctgtttcgtgcggtgccgccaagtctctatctggcgctgggcatgacggagaaagaagagaaggctgagcggcgcatgctgatgaaggaacataactgcagcgaactggaggcggcgttccatgtggcgcgtaagctggacaggctgcgtggtctgtcggccatggaggcggatgtatga

SEQ ID NO: 267012 - DNA, 405 bp, Klebsiella pneumoniae
gtgaaacgattactgttcgtgatgagtgtggcactggtgctgtcgggctgtgccacctctaaagaagagctgctgcctgccggagagcagacgatgctggagctctggcagggtaaaaccgcaggtggcggtcagcggcatgcgctggccgcccgggaaacgttgcgccgtccccttacggtaacggagcagcaggggatgaacgcggaggcgtacagctacagccggacgcaggaaagcgaaatcagccagcagtttccgcgtctgccgaatcccgacatggagatgtatgtgtttccgcatctggccggcggtacgtcgccggttccgggctacagcacggtatttcctttttacagcaggacgcagtatgcgctgccaggtgagcgtacggaggctctgtaa

SEQ ID NO: 267013 - DNA, 1479 bp, Klebsiella pneumoniae
atgcagattaagtccaataccctggtgaaatttgtggtacctgctgtggtactggcggggctggtgatcacgatgaaaagctgcagcacaccggagagcgggagtgagagtacagcacagagcggtgcgctggccggattatcgtcagaagagctgcgtgcgctgggcgtggaaggggacacgccggaggataccctgcggaccctggttgcccgcctgaaccaggtcagggataaccagaaaacgctggagagccagaatgcgcagttgctgaaggacaacgaacaactgcgtcgccgggggacggatgtgtccggccaggtcagtgaagccgtggcgggaatgcagaaaacctacgatcagaagcagcgtgaactgcaggagcagcagcgctccctgatgtcgcagattgatgtgctgcgggggcaactgagtgaccagctgacgggaagtcacacgaagctcagcgatattcctgacgggctgggactggattcaggcagtggtgccgggtcgttgatctcgcagggggcggacgggctgatgtgggtgagtccggccgatcagtcacaggatgatccgctgagcagcggcggaaagagcggtccgcgttttccgacctccttccttgaagataaccccctgacccggcagaaagcagcctatgagcagcaggtgaaggggtacagcaatgagcagcaggcggccaccacgcaggccgtgtacaccctgccggagaactcaaccctgacgggcagccgtgccatgacggccctgctgggcagggtgccggtaaacggcacggtgaccgatccgtatccgttcaagatcctcgtggggcgcgataacctcacggcaaacggcattgaactgccggatgtggagggggctgtggtgtcagggacggccagcggtgactggacgctttcctgtgtgcgcggacaggtgaacagcatcacctttgtgtttgctgacggcacggtacgcacgctgccacaggcggatgtgaacggtaccaccaacagcaatcagcaggcgaaaaacgggaataacgcaggcgggattggctggatttcggatgaggatgggatcccgtgtatcagcggcacccgtaaatccaatgcgtcaacctacctgccgacgatattcgggctggccgcagccggcgcggcaggggatgccctgagtgaggggcagtacacctcgcagaacaatgtcaacggtataacctcgacgctgaccggcagtgccggtgaagcggcgctgggtaaggccctttccggcgggatgaatgagaccgcggactgggtaagacagcgttacgggcagacctttgatgccatttatgtgccgccgggaaaaacgctggccgttcacattacccgtcagctggcgattgattatgaagagcgtggacgtcgtgtgcgttatgacttcaccctgccgggagaagcgggcgaccggggcggccttgactga

SEQ ID NO: 267014 - DNA, 921 bp, Klebsiella pneumoniae
atgagaacctgtgtactgcgcaacctgctgcgtcctgccgctgtgatgttgtcgctgtcagtgatgtccctgacggcgcaggcagatgaactgatgaagtgggagcgtattccgctggatgtcccgctgatggtggggcaggagcgggtcatttttgccgataaaaacgtgagggtgggctttccgcctgcactgaacggcaggctgcgggtgcagagcaccggcggtgccgtctacctgaaagcggacagcgcctttccgaaaacgcgggttcagctgcaggatgtggaaagcggggagatgatcctgctggatgtgacggccgcagaaaaggggcccactgagcctgtccggattgtgtatgacggggaggtgaacacggtgagccgtgccggcggcagcgctccggagagcgcgaaggcgggcagcagtgacggacgtcccgggaaagtcggtgcggatgacggcacgcaggcccgccggaccgccccccgttatgacgagcccttgccggttctgctgacccggtatgcggcacagtccctgtatgctccgctgcgcacccttgaaccggttgcggggatcagaccggtggtgccacctcttccccggcaaatcaccacgctttacccgtctgaacccctgacggtatccccggtggcggcatggtccgccggcggacgaaccgtggtggccctgaaactcaccagtacggtgagccggcgtattgtgcttgatccgcgagccctgcagggccgttttgtggcggccaccttccagcaccgctggctgggtgctgccgggacaccggaagacaccacaatgctgtatgtggtgacggcaggccgcccggagaaggcctttgtggcagagcctgtggcaccgcgcaggacgggcggggaggtgaaacatgcagattaa

SEQ ID NO: 267015 - DNA, 648 bp, Klebsiella pneumoniae
atgagtcgttttcgtcatgccctgcaggatcgtgaccagcatattttgacgcttcgtgtgttcagtggtgtgctggcggggctgcttctgatggtcaccctcggctggatgtctgcacctgaccggctgaccatccataatccacctgatttacgttccggcagtacccgtccgtggtgggaggttccgccttccactgtctattcctttgcgtattacattttccagcaactgaatgcctggccgaaaaacggtgaggtggattatccggcaaaaattcatgccctgtcggcctatctgacaccgtcgtgccgggaaatccttgaaacggatgcacgacgccgtaaggacgcgggggaactgctggatcgtgttcgtgtggtgtatgagatccctgagcacggttacggcggacgttacaaccgtaatccggtcacggtggaaggccgggacaactggcaggttcgtctcgacttagtggtggatgagtattttcatgctgagccggtcaaacgggcgctggtccgctatccgatgaaggtggtgcgtatggagggcgatccggaacttaatccgtttgctctggcgctggactgttacagctccacgccgcagcgtctggaagccgtgaagggaggtggtgaatga

SEQ ID NO: 267016 - DNA, 366 bp, Klebsiella pneumoniae
atggaaaccattcgttttctgcccgatcgtctgaatgccgaaccgacggtgttccggggattcaccacgccagagctgggtctggccgcactgagcggtgtctttctcggtcttctctggacactgccactgataccgctgttcggctgggtgattattcccaccggtgccctgctcactccactgcttctggtctggaccggcggcgtgtggatcacccggctgaaacggggcaaaccggataactggctctggcagcgtattgaagagaaaaaagcggcgctgggtgtggggcgccctgcatttatcagggaagcacagggctggtccctgcgtcgttcccgcgtcaggggaggaaaaggatga

SEQ ID NO: 267017 - DNA, 366 bp, Klebsiella pneumoniae
atgtgtaaaaaggtttttactttccgtcacctgcgtctggcgggaatgggactgattgcttttctgctgggcagtctgaccccggcactggccgatttgcccaaaattgagccgccatcatccggtgggggtggtggtttttttaatcaactcaaaggctatatccaggatggcattgtgctgtttggtctggtagttgcagcggcggcctttgtgaaggtggcggaggctgccgttaccactttttctgaggtgcgtgacggcaagacgggctggggacagttcggggccattatcgtggtcggggtggtgctgctggttgcggttatctggctgctcggcaaatccgcgaacatcatcctgtaa

SEQ ID NO: 267018 - DNA, 243 bp, Klebsiella pneumoniae
atggcgctgacgtcggcacagaccacggcctttatggcggcatccggtggcctggcagtgaatgagctgcatctgaccgctgtgggaatactggttgccgttctctttctctgggccgcctggggactgtcggatgcatggtccgggtggcgtaacggtgacgtcagggaatcttcgtttatctggtttaccgtccgtaccgcactgctgcttgtcagcagtatctggatgtttgcgggctga

SEQ ID NO: 267019 - DNA, 342 bp, Klebsiella pneumoniae
atgttttctcttcccgcatttccccggcgtgccgctgccctggcaggtactaccgggatgatgcttcttgccattgtggctgtgccggctcaggccgccgaaaaggatgagctggcaacggccatgcgtcagcttgaccaggtacgggaggcgcttgaccgtgcgagaacggtttcccttcaggccacgcctcatgacgggcgttatttcttcgactacccgcgtgcacaggctgacattcagaccatacaggcgggtattgaccgttatctcacgccgtcccgtgcccagccccgaaacggcagtgccgtgaccggtgaataccggcgggagcgtccctga

SEQ ID NO: 267020 - DNA, 192 bp, Klebsiella pneumoniae
atggaatttctcctcaccgcccttccgtaccgggccctgttcagtcttacctggttttttgttgtgttatatatcgtcagggaagagccacagtgccctgtctggttatatgacgtcatcaggggcatcaacctgctcatcatcgtcatcaccattgttgtcattcccttgctgccggtgctcttacgctga

SEQ ID NO: 267021 - DNA, 762 bp, Klebsiella pneumoniae
atggcggaagcgcgtcgtgatgcggaacgcagcccgcagtcccgggcgccccgtcagcatggtctgctgtacaatctggtgtggggctggccgtgggcactggtggggctgattttatcctccctgctgctgagtctgttgattgagtatgccggtatgacgtttttctggagtgaggagggggcggcgcacagccgcgctgtcatgaacacggagctgggctggctgtcaacggagttcacccgcagtctgctgctttccgcgccggcagaaacggtgcctgcgtggatttccgccgcgtatcagtggctgtttgtggacagtggcatgcagacatggctgcatgcacagcaggcggggacggcggcaggcagaagcgtgtctgaattcagcagtgagctgagtcagtggctggcttatcatcttcatgactacctgctggcgacggtgtatgtgacggtggtgacgatggtcagggtggttattctcgtcctgtccgttccgttgtttgtgatggtggttctggtggccgttgtggaggggctggggcgccgtgatttgcggcgttacggcgcggcttatgagtccagctttgtctatcatcatgcaaaaaaatcagtcagaccggcgatttatgtcccctgcattatttacctttcctggcccggcgcggtatatccgaacctgctgatatggccggcggccatgctgctgggactggcggttaccgtgactgtggcatcgttcaaaaaatatctctga

SEQ ID NO: 267022 - DNA, 2118 bp, Klebsiella pneumoniae
atgagcaaccgctatgtcattgaggcattgctgagaccggctgtggagttcaatacggcagtggtggcagcaacagcagcatgtatctgtgtgacagccccctgggcggtggcgctggcacccaccgtcagttacgccactgccggtggatttgccctgctggccgtggtgcgtttccggcaggggatgaacatcatccggtatcgccgtaatctgcgccggctgccccgctatgtgatgagtacacggcagatcccgctcagccgtcagcggctgtttctggggcggggatttcgctggacccagaagcatacccagcgtctccaggatacgctgcgaccggaggtggcacactatctgcagccgggcggactttaccggctggcgcgctggctggaaatgaaaacggaacaccgtctgcccgcgctggggaaactgctccggcatgagtcgtcgctgaatcctgtgcgtcctctgccgccggtggggggaaatcccgccctgcatggtattgagccggatgaacaggatgtgacgctggctctgggggagcgtgtggggcataccattgtctacggcaccacccgtgtcggtaaaacccgcctggcagaactgctggtcactcaggatattcgcaggggagaggtgaccattgtttttgatcccaaaggtgatgctgatctgctgctgcgtgtctgggcggaagcacaccgtgccgggcggggtgatgaactgtatattttccatctgggatggccggaaatttcggcccgatataatgcggtgggacgcttcgggcgtgtttcggaagtggcttcccgtgtggccgggcagttgtccggtgaagggaactcggcggctttccgcgagttcgcctggcggttcgtcaacatcatttcccgcgccctggtggcactcggtgagcgcccggactacctgctgattgtgcggtatgtgaacaacatagccgatctctatatccgctatgccggaaaggtgatccgcgagcgcatgccggaactggagcaggcgattgcgaataaccagaatgtgatcagcgaggaggatgttccccgcaccatgcagaaccagccggatgcggtacgtatctggtccatcgagatggccctgagcagtgaggagggtaaaaaaatttacgatccgatcctggacgggcttcgcagtgcggtccgctatgaccgtacctattttgacaaaatcgtggcgtccctgctgccgctgctggaaaaactcaccacgggcaggatcgcagagctgctggcaccggactatctggacatgaacgatgcgcgaccgatttttgactgggaacaggtgatccgtaaaaaggcggtggtctatatcggcctggatgcactcagcgacagtgtggtagccagtgctgtggggaattcgatgtttgcggacctggtgagcgtggcggggcatatctacaagcacggcatgcatgccggtctgcccggtaagggggaaggcaaaaatgtggtgaacctgcactgcgatgagtttaacgaactgatgggggatgagtttattccgctcattaacaaggggggcggtgccggtatgcaggtcaccgcgtacacccagacatcgtcagatattgaagcgcgtatcggtaatgcagccaaaacggcgcaggttcagggaaacttcaacaacatgatcatgctgcgtgtcagggagaacaggacggcagagctgctgaccacacaactgcctcaggtggagatctacaccaagacgctggtctccggtcaccaggatacggcggacgtgtctgccggtcaggatttcacgtccagcacccaggatcgtgtcggcacggtgaaggtacctctgctggagccgtcagatattgtcaccctgcccaagggacaggcgtttgccctgctggaaggggggcagctgtggaaaatccggatgccgctgccggcaggggatacggatgacgtgctgatgccggagaacattgcccgggtggcagaggcgatgagacagaactatcacaccggtgaaggatggtggaatgagccgccgtcagcgcaggccgccggaacagatgaaggaggcggatatggcggaagcgcgtcgtga

SEQ ID NO: 267023 - DNA, 786 bp, Klebsiella pneumoniae
gtgaacgtttcatttactgaacaggtgcagagggatatgccgcaatgggcgaatgacccgttactggcatgggatgccaccgcgtttgcggcaatgtcggattttattacagagcactactggacgggacagggcagcatcaatgtgttccgcattgtgggaactgaccatccacagtatgccggaatgacctggctggagctgctggagcgcggtaaccgtatggacatcaatatcccgttactggaaaaaaatccgggatactacacgcaggcagagcaacagcatgccgggatgagttttgtcagcacggatggcgttgactggtatgtcagtacagacggcaatcaccgcagttgcctggcacgctttctgtttcacctgcagggggaggagcgcacacagcttcacaacgtggcacagagtatttatcacacagaccgggcgttctggtctgcctgccgggaaatccacaacctgactgacgcgctgtcccggcatggtgtatatatccgtctgcagatccgacggcagtgtgttgcccgcgaagacctggcctgctggaaagtggaccgtttcagcacagaggcgcagctgacagtggatgacgtgcgtgccggcggacatgatatgcctgcggtgtataagacgttgctgctgaatgcggcagacgcatggcgtgaggtgatggtattacagcgcagactggaggcgctgtctgcatcaccggggaacgatttgccacgcacatggtggcgacgtcttttacggaagggggacatgtaa

SEQ ID NO: 267024 - DNA, 510 bp, Klebsiella pneumoniae
atgacggtaaaacggatgtttatgtttttattcagaataacgattgtctggccatccatgctgacaggatgcgtgatgatgctgtatttcgcggaggtcgccggcggtggtgtggcgggactggagcagcgttacggggtggaatccgcccgctggcgtgatgcgccggaagggatggtgatgacagcgcagtgcccgtcgcgtccctttatggcgcctgtgagtgccggggagtggcgtgcactggctgcatctgatgatgaatgcagccaggttccgcgctctttcagagaagctgcagagggcgatgtgcagtcgctgcgcagagtggcactgacacttctgctggcatccgtggttctggaagcgctttcagcctgcattctgcgccgggtaacggcatccgtccgggtatcaccacactgtggatatggctgcggacgtggtgcggtggcgcactggccagagagtcgcgttcacgctgcaccggagaaaggagagcgggtgtga

SEQ ID NO: 267025 - DNA, 591 bp, Klebsiella pneumoniae
atgcagagacaactgacggacctgttacaggaaggcacgtggcacggcattctgctgtgcgtactggtcgtgctgtttctgttttttccgctcctgtgggggcgatgcagacgtcgtgaacgcgccagtgagcgtcgtcaccgccgttaccgcgctgcggctgaacgtgtgctgacaaagctgccggaaggtggggcgggtgtgaaatacctgcgaaaaattaacccgtatgtgtttgaagaactgctgcttctggcgtttgaacgcagggggatggcggtcatccgtaacacacgttacagcggagatggtggcctggatggtcaggtgctgattgacggcgagcggtggctgattcaggccaaacgttacggacggaccatccgtccgtcacatattgatgattttggtgacctgctgcgccgtgaaggctgccgtggattttttattcacaccggtcgtacgggaccggccagccgggcacggctggcgctgtggccggatattgagctggtcagcgggcagcgtctgctgaaactgctgaacggggcattgctgccggatgaacttaccagaggagcgcggagatga

SEQ ID NO: 267026 - DNA, 528 bp, Klebsiella pneumoniae
atgaaacgatttaaacgatatgtcatgacgaccgcaacgggtctgttgctgtgcgcggctcaggccggcgcggagctcagggtgattgctgaccttggtggcagtgatgccggcaggttttatgaagcaataaaccgccaggcggacagcggaacgtcgtcgcctgtcacggcgctgctgccgcagggggagagtgcgatgctgccggtgtccacaccggaaatgtctcccggagaggtgacgccgagatcactgcagttaccggggctgggggcactgttcctcgtgggggatgatgcattctcccgtcagtggctgcagacgaatgcggccgcgctgcttgaaaggaaggctgccggtatggtggtgagcgtgacgaatgagagcggtctgcaggcgctgcgggcgctggctcccggtgtgatgatggtaccggcttccggttcagcactggcccgccgtctgcagcttgaccactggccggtgctgataacggacagtggtatcagcagtgtggtgatgccgtga

SEQ ID NO: 267027 - DNA, 657 bp, Klebsiella pneumoniae
atggcgcgtggcagccttctgatgtcgctgctgctgatggcagtcagcattccggcgggggcggcgctgcatgatatcccggagggatacgtgcgtgtggcggaacagcatggtgttccggcagaagtactctatgccgtctcgctgaccgagacggccatggtcccctccgccattggtgctgtaatgaaaaaacggaatgaggattacagggtaccagcagtggcacgtccctggccctggaccatcaatgtggcgggccggggataccgctatgccagtcgactggaggcctggcaggccctccaggtttttctgaaacgatatccggcccgacggattgatgtggggatagcccaggtcaatctgggctggaacgggcaccgttttgcgtccacatgggcggcatttgacccgtacaccagtctgaacacggcggcggtcatcctgagagaatgtcgccgtcgccatcctgacagctggctgcaggctgccggctgttatcaccatccggcaggcggcgcacccgcagtacgctacatcgcgctggtgaggcggcatattgaccgcctccaccgtgatgcggtcagtacgtcaggtgtgactgccatgaatccccgttatatccggacagaaccccgggagttaaccccatga

SEQ ID NO: 267028 - DNA, 720 bp, Klebsiella pneumoniae
atgaagctgaaaagtctgtcactggcgctcatgctgctgtccctgcaggcgatggccgccgtacaggagagtacgcagcagggaacgcgcacctcctcatcctctcaggtcagtaccaccacacaggaactgcagcagcaggccgggcagtggggactcagtgaggaagattaccggcgttaccgtaccctgatggaaggtccccgcggtattcagtctccggggctggacccgctgacggtactggggattgaagcgcggacggatgcagagcgcagggtgctggccgaaaaatgggttaaagctgagtatgaacgcactgagaaggaactggctttccagcgtgaagtgaatgccgcctggaaacggttgtatccgggggtgatgccggtcagcctggggaattctgccggcatcgcccgtgacaccgggggacgtcttgccctgtttgtcaggtcgaaagactgcagtacctgtgatgcgcggctggccgccgtgctttcatccggtcgtcaggtggatatttacctggtcgacagtcagggaaatgatgaaaagctgaggcagtgggcccgggagcacagtatcccggcagaccgtgtgcgcagtcgccacatcacgctgaaccatgacggcggtcgctggctgcggtttggggaggggagaatgccggtggtacttcagcagggggctgacggatggcgcgtggcagccttctga

SEQ ID NO: 267029 - DNA, 780 bp, Klebsiella pneumoniae
atgagtgaaaagcaacaggagatatcagccgctgcaggtggttcaggtggcaccacaccgtcaggaagggcgaaacggcgtccctctcccggtctgttcgcagggctggtgacggtggtgatgatggcgatcgcggttgccggtctggttcgttatacgggagagcaggacaggcgaatgactgcgctggcggtgcagatgaaggcgtattctgatgcgctcgccttgtccggaacggaactggtaccactgagggagaggctggctgagaccgaaaaacagctgaagagtgtggcggaacgtatttctcagctggaaaagcgtcctgcactgacggaggaagagcatgcgcgtacgggagagatggccgccagcctggcatcactgcagacctcactggcgcaacagggagaaacgcttcgcacgtatgagcagcgactggagaaggtggagaagacttcagtcaccccggtatcaccgtcatctgcgaaaggcgcgggcgggacgatgaagggcacagcggcggttgcgccacagaagaaacgaatgtctgccggcgtgccggtggtcagtcgtaccgcgccgtttgttctgaccgggacagagcagcggggaggccgtacgtatgcggcagtggccccccgtggattcagcagtcttgctgatgtgacgttactgggtgaaggggagagcacgacaggctgggtgcttgagcgtgcaggacgtggcgaggccacgttccgggtgaatggtcgtcaggtccgggtcatggtggagtga

SEQ ID NO: 267030 - DNA, 579 bp, Klebsiella pneumoniae
atgaaaatatcccttcttttttccgcgctgtctgtctgtgtgttgctggcggggtgccagagtccgcaaaaactgcagcagagggcggctgccgtcccggtaccgtcggtgacagtcagcaacaatgtccgtccggcaaatccggatgtgtacgccggtgcggcgacaccggaggtggtgcgttatgaccgctatctgctggttaacacggcaccggatacggtacagcgtgacccgctttcccaggtgattgacatccgcattccggcatcactgaagccgacggtggcggatgcgatgcgttatgccctgaaacagtccggctacacactctgcgccacggggcctgccaacggtgtgctctaccgtcagccgctaccggccgtgcagtaccagaccgggccggtcagactgcggagcgcgctgcagatgatggcggggccggcatggcagcttgaggtggatgatgtgcagcgcgtggtctgtcacagtctgcgtgagggttatcagttaccggcacgccagctggcgccggtaccggcggtggtgaaggtatccggtgcggagcagaaaaaatga

SEQ ID NO: 267031 - DNA, 249 bp, Klebsiella pneumoniae
atggattttgctgaactttctgaagcaatattcacacactatcccagccacaagggggtgattatgacgatagcggaacaactggaagagaaaggccttgagaaaggccgtgcagaagagcgtcaaaaagcgcttgcagaaacctatgcatctgtccgtcgcatgagtgatatggggatgtcaacagaagttattaagcaagctcttcagctttctgatgaacagattcaggaagcgcttaataattaa

SEQ ID NO: 267032 - DNA, 969 bp, Klebsiella pneumoniae
gtgagtgaaaaagttaacaaaatcactatgattcatgacggggcgttcaagaagacgcttgaagatcccgccgcagtaagggactttcttgaacaggtcttgacacacgatcagatatcccgctgtaatcttgatacaatagaagttgaaaagaattcgttcgtgacggaaagtttgcgtcagcatgcctgtgatgttttgatcagcatgaagacaaacgacggcagggacggatacatttataccttaatcgagcaccagagttcgccggataaattcatcccgctgcgtatgatgcgatatatcctggctgtaatggagcaacatgttgaaaagcataagtgtgcacctgtggtgatccccgtgttgttttatcatggtgcaatgcggccatatccgtatccgctgaactgggtggattgtctggatgacccggagtacggacgggagatttatggcgagtcaaagtcattcagtctggtggatgtcagtacgcttgatgatgatgaaattgagcagtatcgccggatggcggcgctgatgtacaccatgaagtccggaactcaaggtgatttgattgagctgattggtaaatcgatcacactgacggataagtatggcagtagcattcacctgaatacggtgcttacttatctgatggaactttaccagatggatgttgctgaactttttgaagcaatatccacacactatcccagccataagggggtgattatgacgatagcggaacaactggaagagaaaggtcgggttgaaggtctggagaaaggccttgagaaaggccttgagaaaggccgtgctgaaggccgtgctgaagagcgtcaaaaagcgcttgcagaaacctatgcatctgtccgtcgcatgagcgatatggggatgtcaacggaagttattaagcaggcacttcatctttctgatgaacagattcaggaagcgcttaataattaa

SEQ ID NO: 267033 - DNA, 558 bp, Klebsiella pneumoniae
atggcttcacgcggcgtaaacaaagttatcctgataggacatctggggcaggatccggatatccggtatttccccaatggcggtggcgctgtggcgaatctgtcactggcgaccagcgacacctggcgggataaacagagcggtgaaatgaaggaagttactgaatggcaccgcgttgttctctatggaaaactggctgaagttgccggcgagtacctgcataaggggtcgcaggtgtatatagaaggccagcttaaaacccgtaaatggtttgaccagcagaatggtgtggaccgttattcaactgaggttgttgtgggcgtgaatggtgtcatgcagatgctgggttcatcgcgtcagcagggcgcttccggtaatggtgcttcagcactggcacaagggggccagggacatccgccgaagacgaccggacagactggtcgtgccacccggacgacgtcaacgggtaatggtgctccaccaatggactttgacgatgatatcccctttatggggctcgggtatggcatggaacgacgaattattcatgccatgtaa

SEQ ID NO: 267034 - DNA, 204 bp, Klebsiella pneumoniae
atgacttctacaaacggtattctcgcagctgcggcaggttatacattacctctggaaatactcaaaagtgggcgcggatattatattggcactcagtgttctgaaggaccggtatcccgtgaatcagaagagtatttcaaaaaatatgagcaggctgagcgggcgctgaaaaatggcacctggacacaacgtcatgcctggtaa

SEQ ID NO: 267035 - DNA, 465 bp, Klebsiella pneumoniae
atgtctgcaactaactctacttctgcaaaaactgaatacttcaacctgaccatgaaaggtcttgggtatctcagcaatgtacgtcaggttaaccatcagaacggttcgttcctcagctgcgtgattaacgcactgagtggaccaacggacaatccgtcctatacgcgttttgatgtcacggttgccggtaaagaggcgaccaccctgatctcccgctgccagaaagcagtggatgaggaccgcaaggtactgcttggttttacgttaagcaaccttgccaccgacattttcaccctgaacaagggggagcatgccggtgagcaacgcgtcagcctgaaagcccgcctgatcaaggtggactggataaaaataggccaggagcaggtctataaggctgaaaaagcggagtcccagccaccgagccatggcaccacaaaacgtgaatacgcagaagactccttctga

SEQ ID NO: 267036 - DNA, 2019 bp, Klebsiella pneumoniae
atgcgtctctttttgtgtgagaaaccttcacaggccggtgatatagccagagtacttggggctgccagacgtgttgatggtgcgattgaaggtaaggactttgttgtgacctgggcctttggtcacttgctggagcaggcgccaccggaggcgtatggtgagcagtttggcagtccctggaaaattgacgttttgccggtctttcctgaacagtggcagatggtggtgaaggataatgtcgggaagcagtttaatgtgatcagccgccttctccgtaaggctgatgaagtggtgattgccactgacgccgatcgtgaaggcgaaattatcgcaagggaactgctggattattgtggttataccggcgttgtgcgccgtctctggctgtccgcactggatgagagcagtatcagggaggcgctgggcaggatactgcccggagaggagaccgagaagttatatgaagccggtaagggacgcagccgggctgactggctgacggggatcaacctgacgcgtctgtataccctgaaagccagggagtgtggtgtgtccggcgtcctctctgttggcagggtgcagacgcccacgcttgcgatggtggtcagacgggatgcagaaatcaaaaattttattccggtaccttactggcaactgtatctctggctggagaaggacaatgtgcgttttcgtacctcctggattgcggcagcgcagtactgcgatactgaaaaacggtgtgtgaatgtgcaggcggcaacagccgtcctgtcacagtgtcgtcaggccggtgttgctgttgtcagggatgtcagcagcagacgggagaaaaagcagcctccgctgtgtttttcgctcggaacgctgcaggaggtctgttcgcgcaaatttggcctcggcgcgcaggccgttcttgatatagcccagtcgctgtacgaaaagcataaggcgacaacatatccgcgtacagattgcggttatctgcctgtgtcgatgtacaaagaagtgcctgacgtactggcagcgctggaaaaaaccgatccggatattgccccggagctggcaaaactcagtcctgatattgtgtcggggatctggaacgacaggaagatcaccgcgcatcatgcgataatccccacccgtcagccgtttaatattggggcgctgagtgataatgagcttaaggtgtaccggttaattcgtcagcattatctggctcagtttttacccgttcaggagctggatgtcacagaggccacttttcttgttgcggggcagttgtttggaacgcgggggcgagtggaggttgtcaggggatggcgtgcgctttttgtgtcagattcggcgggagaggaagaggatgttgcagacgatgagcaggcgatgccccttcccgtactggcaaagggcgatgaatgtcgtcctgctgaagctgaactcaaagagatgcagaccacgccaccgcgtcattatacggaaggcacgctgattgcggcgatgaaaaacgctgcggggatggtgagtgatccggcactgaaaaaagtgttacgcgaaaatgcggggctgggcactgaagcgacccgcgcagaaatactggaaacgttgttcacccgcaaatatatcgagaagcagggtaagcatatccgtgccacgcaactgggggcggagctgatagcgggattgccggaggcgctgaccagtccggggacaacggcgctgtgggaacaggctctggatgatattgcacagggtaaactgtcactgtcgtcatttatggaaaagcagaaacagtggcttaaccacctggtggccggtgcaaggcagcagcaactgcagatcacggcaccggttacgccggcatgccctctttgtgggagcagaatgcggaaagtgaagatgaaaagcgggaaaggggaattctggagctgccagcgttatccggagtgtaagggagtgatttcagagcagaaaccgacatccgggaaacggggcggcagaaaaattaaaaagcatggatga

SEQ ID NO: 267037 - DNA, 726 bp, Klebsiella pneumoniae
atgtctgaagaacaaatgaaggaacccgcatcccgtcgtgtaggtgcgcttacttcaccagtgaatatcgagttgcactcccgttatgcaatcatgctgtgggaagggagacgaggcacgaaaagtaaaagtgctgaagatcgcagggcagcgaaaataatgagtatgccggaagctattaagatgactggcggcctctacagagattctcttgctgataatccctatgcggatgaaacgatgtggaaagttgaaaatgcgattgttgaggcaaccgataaaattaatgctgaagttcgtgtacttgaagggatcctcagaaatattccgtcagtgatcactgtccgggatgctctttctcgttctcctgtcgatattggggttttcagccgctctcctctgggctaccgctgtgtatggcttcttgtcgggtatgatcagcttgcattaaaaacgtttcaggcagcacatctggggcttatttcacgaaacaggcgtgatgagttgttgtcttctggtgcgcatcttatccgcaaaatttacggtattctgcaggggtatcgcactatggcggtaactcgggatgatattgagaataaaacagaaaaggcagagaaagctattgcccgttatggtatgcctcatgatgatattctatccggtaagctcagatcttcattttctccgcccctgaaccgtaagtcccgtgatgcatcccggcaatga

SEQ ID NO: 267038 - DNA, 1266 bp, Klebsiella pneumoniae
atggcgctacctgcagaaagccttattgcgcatacgctcagaaaaatgaaggccagcatggcagagaaagccagtcgtgaggacgggaggatacgcagtgggctgttgtttaccggcaatgttcacgattcgtatccccgcaggctgttgctggatacgcgcctttctccccttgataaaactgcgtggatgatgattcgtctgcatgccctgaataatgagggcgcagtatttccgacgtacgatgaactgcagttacaactggcatctcccgggtgcgggaaggcgtcccgtgaaacagtgagccgggtgctgacaatgctgcggcttacgggctggctgagtctgtgtaagcgggtcagggatgaaaaagggcgggtccgggggaatatttacgccctgcatgatgagccactgacctgctgtgatgcagaaaagtttgacccacgatacctggatatggttctggatactgtgagcaggagccggaacaagacaatccggcacacagccagtgaagtgctcagtgatatcaaaaatgagcccggtatgcggcattaccacagccatatcactctgtttgaatcgcgtatgggggcagcacagacacctggtcagctggcggcgcgtcagcgggtgaacccgatggtgaatgaaaacacaggcagagagagtggttcggattccgtacatacccctgcacctgtcgtgcaggtaaccgaactcagtgctccgttaaccgaactcagtgaaaaacaggaaatgagcccactcagttcggattccgtaccgcctgaaaaatcagtaacttatcactcggttcggaaaccgaacaattacgtacgtaatatcacacacagtgtgattaaaaatacgtacgtattgcctgagtcggtgaaatcgcaaatcagcacagaagacacggacatgctgacaaaacaactgcaggcgttgccggaagaactggcaggtagtgtgctgagcagcctgtcacagatgctcagcaaaaacacgctccagaatccggttggctggatgctggctgtgatgaaacgtgcgcgtgagggaagttttaatacgccggatatgtccgtgcatgaatcccggtcgccagcccgtgcaccatatcagcctgtgtacaaccgtgatgaacgtgaacgtcgtcgcaggaaagtggcgtcacctgaaacggtgagcaacattgtcgcagaattccgtgccagcctgaaacgtgcaaatgctgcccgtctggcggcgcgtgtttga

SEQ ID NO: 267039 - DNA, 216 bp, Klebsiella pneumoniae
atgagaaaaatcagtggaatgttgaacctggagaaggccaggatgcagttgcgtgttttgttatcaggaccggttcctgcgatcactccgatgtcgcatgccgtggcaattaaagttgtgcctgatgctccggatgcgagtgagcggagggtggctgaactggaacaggcctgcgctgccgcgggcattcgtatcaaaggggaacaagtgaaatga

SEQ ID NO: 267040 - DNA, 414 bp, Klebsiella pneumoniae
atgaccactataaccaaagagcgactgctgacaatcaagcagtggcgcgaaacatacggaccgggtagcaacgttgtactgccagcagaagaagcggaagaactggcacggattgtactggcatcgctggaagcggaaccggtggcgtggatgtgtgatgacgaagatggtcgtgaatataacggtcataacgagttttcttatggaagacgcgggattcccctttacgccgtcccgccagcgccgaatggattggttaaagccgtagctttctatgagcaggttaaacgtgaaaatccgccagttgaaacgggagcatggaaagacgccgttgactgggtgcttaaacaagcttgtcaggctgtaaacactggcatcaatgaaagaagaacaattgaagaaaatgatgattga

SEQ ID NO: 267041 - DNA, 198 bp, Klebsiella pneumoniae
atggataaaaacaccactgcttactggaatctgtcacttgataccgaatgcccaaaatgcggtcacaatttcgatctgctttgtgatccagatttctgggaattttctggagcaaaacaggcatgtgaagaaataaaaggttacgaaacatgctgtccagaatgtaaccatgaatttaaaacagattttgtgtattga

SEQ ID NO: 267042 - DNA, 222 bp, Klebsiella pneumoniae
atggctaactcgttacttgaaacctgcaacaactggcagattcagagggcggagattttatctcgcaatccagatatggcaatgacaattgataatctggacacgctaattgaacggaccgtgcgttctgcaattgatatagcacatcgagtggattgggatttcagagaagcggagcggcttgctaaagagcaggagaaagcagcgggtaaaggagactga

SEQ ID NO: 267043 - DNA, 399 bp, Klebsiella pneumoniae
atgatcactattaccaaagagcgactgctgacaatccagcagtggcgcgaaacatacggacctggtagcaacgttgtattgccagcagaagaagcggaagaactggcacgaattgcactggcattgctggaagcagaaccgctggtgcccgtcatgtataaaggaatgaaactgttaacaaaagaggggcttgagcttattcgtgacggtattgctgaggctacaggactggaagcaatgtgtatggctgaggctttgctgtctggggcgtcagtgccgtcagtgccagaagaaatgtattggcaggatgcgcctgttggaggcagtagcaaagcagctgcatacgcgacaggctggaatgcctgtcgcgccgcaatgcttcagggaaaaggaaagtga

SEQ ID NO: 267044 - DNA, 600 bp, Klebsiella pneumoniae
gtgagcgagattgattatcaggcgctacgggaacgttattcacctaagccagtacctgaatgctctgtttgtggcgaggaaatgtcaatacagcgcatatctggagcacatgttgtttatgcctgttccggtgagggtgatgacggatattttaagatagggcgtacttttgcagacgaacattatgaagaatcacgcgtaacagtagttgatgatagtgatcccgatgtgattgcactactggacgaactggaggcagcaaaatcaaaactcaacgagcagcgtgaatattacgagggagtaatcgcggatgggagtaagcgtattgcagaactggaagcacgggaaataaaaccagccaaaggcgaagttcttgtcgttgtatctggttttactggttgcggaaaaagcgccattgccggggaaatagaaatcgcgatgaaggctattggtgtgccggttctatggactaatggcgatgcggaaaagcgcatgacaggagctgactggctgacagcgattgagatgtacaaaccaaatgtgcgcatcgtggaagttaatgtgccacgcgtcgctggcattcgcaccaaaggagagtga

SEQ ID NO: 267045 - DNA, 222 bp, Klebsiella pneumoniae
atgagcaagccaaccgacgaagaaatagttcgggtgttggaagaacacgggcgctgtatgacttacgtcgtgaccaactggcttagggataaatatcgcacactcaaaacggcatacgttttgcgtcgtctaaagaaactggagttcgacgggaaagtaaagcgcgttaacagttcttatataagacaaatttgctgggaggcaaccagtgagcgagattga

SEQ ID NO: 267046 - DNA, 213 bp, Klebsiella pneumoniae
atgagcaaaattgactatcaggagctgcgtgaggcggcagaaaaggcaatgcatgacgactggggatttgacacggaccttttctatgagctggtagaaccatcgattgtgctggctctgctggatgaatgcgagacgctggcaactgagaatgcgaagctgaagacagcacaccctcaactgttcgggaaagctgaaggagcgacaaaatga

SEQ ID NO: 267047 - DNA, 249 bp, Klebsiella pneumoniae
atgaagatgaaagagctggttcccggtctgctgagctgtcccggggtaccgccagcctgccagcggaaggcggtggacctcgttaaccggtttcgtcgcggggagaggaattaccatgaactgaaggaaaagggattcgggtatatcaagattaatgttggtccggactggcggttactgagcaggaaccggggacaaacctgggcgctgttgagtcacgagcgatacaacaatatgagactgaggtag

SEQ ID NO: 267048 - DNA, 579 bp, Klebsiella pneumoniae
atgagtaataacttgtcacaggccaccaacggactgttgatgcaactggtgatggatctcaaaagtggctatctgcgccgctgtgaagcgctggggctttcccgggaagaaatgcagatgctgcaggggctgagtattgaggaaattcactatctgtcaaattcagaggtgtcagtgctgcggctggatattaaccacaataaccttgtacgcatgctgcagcaggccaggactgaacagaaacgcctgcagcgaatcgatcgcgctctggcactggggggatcgattgagctcatggcgttttattttggcctttccagtgtggacgttgctgcacggcgccgtatttcaggaattgatgtgcgtccggggcggggtatcacactcagcgatgatgaaaactctgaactctggagactgtggcagaaagcagggattaacgatgtggagagcgctgacgggctggacgtcatgatgctctgtgcagagcagatgaatatcccgctcacggccgtctggcatgctgtcagggggtggcatacagccggaagccctgaacaggtaaggaatgcgtcatga

SEQ ID NO: 267049 - DNA, 732 bp, Klebsiella pneumoniae
atgaataatgatgcagcacgtcaggagcaactgattaaacggataagaaaactgctggcgctgagccggaataacagtaatccccatgaggcagctcaggctctttcccgcgcacaggcgctgatgcggaagcatggtatcaccgaactggatgctgatatttcggtgataaaaacctcatcatcaaagggagcgccgtcagaagcggaaaaagttccggtatggatggggcgccttatgaatgttgttgcaggggcattcggatgtcatacatacctggattggcgtatcacaaccggaggatactggcggcggattgtcacattttatggttttggggagcgtccggttgtggcggcgtatgcctttgatgttctctgccggcagatgcaaaaggcgacaaaagagtatctctcaacccagagccggaaattaaaacactcaacccgtcgtgcaagagctgcgatgtttcgtgacggctgggtttatggggtgcgtgatgtggtggatgcattccggctcacagaagatgagacgtgtgtaatgaatacgtggctgcagaaccagcaatttgagggaatggtcgtcttccgggaggtaaaggactgcaatggcggtgaccatgcgcgctggcagggatacaacgaggggaaaaaggcaacgctgaatcacggtgttgattcccgggatctgagaccggaaagcctgatatcgggcggaggtgaggtatga

SEQ ID NO: 267050 - DNA, 1650 bp, Klebsiella pneumoniae
atgtcaattaaacgaaatcattccgttgatctgggggctgccatcatgcaaccgggccgtcaggccagcacggcaggtaacgtggtggcgctgggggaaacaccgatgattctgacgctggatcaactgcgccccaacccggataacccgaggaccacgcgtaatccacggtacgacgatattaaaagttcaattttctcccgtggactggatacggtgcccaaagtcacccggatacctgagagtgagccggatatctatattttcagcgatggcggtaacacgcgatatcagatcctgaaagagctgtgggaagagaccggtgatcagcgtttctaccgtattcatgtgcttttcaagccatggccgggacggcttcagtgcgtcattggtcacctggcggagaatgaagtcaggggcgaactgacgtttattgaaaaggcccggggtatccataaagcacggatgatttatgaagagcagttaagcaaaagtgtgtccatgcgagagttgtcatcccttttgactgagcagggattaccggtggatgcatccagtatcagccgtatggagaacaccctgaaatacctgtatccgtggatccccgaacttctggaatcaggaatggggagtcctcaggtcagggctttactgtctctccggcaggatgcggaacgtatctggggacagtttgcggtggcaacagagaacgggggggattttgaccgcgtgtttggtgaatgctgcagcaaattcaattcaccggaactctggtcactggagatgttccgggatgagctgattggtgatctgctgaaagcgttaccacatccggtgctggattatgaccgctggctgcttgaactggatccgcgggaacgtaaccgacgtcatcattttggtgaacctgaaccggtgctcattcccgcagacagtgatgcgatgccagagcctgtgactcacggtacgtcggcagtgacggtggagaaggacagcggaagggagcagtctgtgatttccgcaccggctgaccatgacacagtcatgaatacggagcaatcccctgttggaaaggcggagagttcagttactgaacaacgcgaagaacgccgcagaaaggaagtccagccggatatgtatggtggtgaagaaacatacagcggcgattacgaagaggatggcgatacccgtgatgctgcggatctgccggtaacgtcaccggaagagggtgctcagcagagcagcggtgaaattttcagtgagccggaattcagtgttggtgaactggatgatatcgaatatctgcagaatgaggcatttcacctggcatgggagctggcgtcacacacaggctgtgtcgatgaactggctatggacagggaaagcgaactgtctgcgggattcggcgcggcagaggcgaattgttctccggtcatggcatttcttgtcaggctgaccggtgaggaggttctgcgggttaatccggtttctcttgatgcactgctgattggtggcagtactgaagaagagccaccactgctggatgatgagcatgccggcaagttactccgtctgcttgtggtgttgcgtcgtctgcgggggctgcagcgccaggtggaagaagagaacgtggaggggcgtgatgaataa

SEQ ID NO: 267051 - DNA, 1389 bp, Klebsiella pneumoniae
atgtctgaacgctatattccacgctccgttgatgcagagcaggccgtgctgggcggcctgatgctcgataatgaacgctgggatgaggtggtactgatgctccggggggaggatttttctctggccgcacaccgggtgatattccgcaccatgtcagagctggcaaccagcggtcagccgttcgacctcatcacgctgagtgagcatattgagaaaacaaacaatattgaggcactgggtggtttcgcttatctggctgaactcagcaaaaatacgccttctgcagccaatattatcgcttatgcccgtattgttgctgaaaagagcatgctgcgtcagttgcaggagacggggaatgcgctgattacggatgtggccgcaccggatgcgacaccacgcactgttcttgaatccgctgaacgtcggctcttttcactttcacagactggcatgttgcatgagcgatgtgaagtcagtctcacctcggctatggagctggcgctgcgtcaactggaagagggactgaacgccggcgggatgacgggcacgcccacgggatttgatgaactggatgagatgacctgtggtctgcagcccggcgacctcattcttctggctgcacgcccgtctatggggaaaacagcgctgggccttaccttctgtcttaatgccctgtgtaaccggaccgatgaaacggtatttcttttcagtatcgaaatgtcccgggagcagctgattctgcgtgtcctgtcaatgctctccagggtggagctgacacgtcttcgcagcagcatgatggatgatgaagagtgggcgagagtcacggcaaccatgggacgcttcatgaatgaagcgtcattcatcggagatggaaaccgcctgataattgatgacacctccttccagacgccgtcatcgctgcgtgccagcgcccgtcgttatgtccgtctgtatggcagaccttccctgataatggttgattacctccagctgattcgttctccggaccaggagaaccgaacgcaggaaattgcggaaatatcccgcgcgcttaaggcgttaggtaaagagctgggatgcccggtactggcactgtctcagcttaaccgtcaggtggagcagcgggcggataaacgccccaataacggtgacctgcgtgattccggggcgctggagcaggatgctgacctcattatgtttatttaccgtgacgaggtttataactccggcacgctggataagggcgttgctgaaatcattgtgagcaaacagcggcagggaccaaccggaacgatacgggtgaacttcgacggccgctacaccctgttttcaccgtttgaacgtggatggaattttgaccgtgccggaggaaatgcgtatgtcaattaa

SEQ ID NO: 267052 - DNA, 477 bp, Klebsiella pneumoniae
atgaacacaaatcatcagcaactgccgtccggcattgataacaaccatgatgaggatggcaacatggcaaaatattatgaaaactggaaagtcggaggtatgagcaccgacgatgtggaacggtgcaaaaccttctttgaccagggaacagaaatctttcccggagctgaccggaagctcgcttaccgactttgctggctcggacactggctgattaacagccgccgctggttttttctggacgataacagtatcagcgttcaacaagccgttaagtttgctcttattcatcaacatcactggctccctgcaacggttgaacagatgacacccgctgagatgtcccttgctctgacagattactgggctgactactggacacagccgactgagccggagaaggcgctgattcacatgactgactggcagtatcaaaaactttgttcaaatcgaaaaaaggtaaatggtgaccaatga

SEQ ID NO: 267053 - DNA, 495 bp, Klebsiella pneumoniae
atgaataacagcagcaataccacaacccgtaatacgctttcacccgttgagtcagcctgtcatgccttactggattttattgcccgggaagtttttgagaataaagcaccggaagaggacgtcagggaacgttgcaaagtatttacagcgctgcttaacgaaggatttaaagccctgcttgatgaggcagggctgaatctgtcaaaccttcgtaaacagtgtgaggaactggaatctcagataaccagacttgattctcagtccaatgctatttgtcgcagaggtgctcaaattgaacgcttcattggtcaccatttaccttttttcgatttgaacaaagtttttgatactgccagtcagtcatgtgaatcagcgccttctccggctcagtcggctgtgtccagtagtcagcccagtaatctgtcagagcaagggacatctcagcgggtgtcatctgttcaaccgttgcagggagccagtgatgttgatgaataa

SEQ ID NO: 267054 - DNA, 879 bp, Klebsiella pneumoniae
atgaaaatacttcccgttgtctcaacaaaaggtggcgaaggtaaatcaacacaatccgctaacctggctggttttctcgccgatgcaggtatccgtaccctgctgattgacggagatcatgctcagcccacggcaagcaacatctttccgctgacatatgaagcgtcagccggtctttttgagttgctgatgcgcacggctgacctcagttatcccgataacatcatttcccgcacagctatcgacggactcgatctgatagtctccaatgaccctcatgagcagttaaaaactgcgatgcttcacgccccggatggtcgtctgcgcctccggaatgtcctgcagcatccgctttttctgaacaactacgatgtcattatagttgattctcagggtgcgcgttctgtcatgctcgaaatgattgtgctgtcggccactgattcggttgtcgggatggtcaatccggtactccctgatgtgcgcgagtttattcgcggcactgtcaacgttatggagaacctgctgccttaccgggaactggggatacccctgccgaaagtacgcacgctggttaactgcatggattatacggcactggccaggaagacgctggatgagctggccggaattattcagaccggtcgttacagcaggcagttacctgaaggtgcggtttcccttctttccacacagatttacgacctgaatatttacaagcaggggcatgcggctggtcaacccgtacatcgtctcgaaaaagaatccacacgtcgcagtgattccgcgcttgtcacgatgcacagcctggcctgtgaactatttcctgagtggaaacaggcgtttgacgggctactggctaacgggggaatacgtcagtga

SEQ ID NO: 267055 - DNA, 300 bp, Klebsiella pneumoniae
atggctgtagttctaaccaaagccttgattgaagccggccgcaccggaaatagtgggtacagaaaaaagcagttgcttgcgctgggcgtaagtaacccgccgaaaagcggctggatcgaacgactgatcggcactgaggtatctgacgagcagtacgaacgctttctggggcacagcacgagcaagctgcatattccggtcgaaaatgaacacctattccggtttaaaatgaacgctgattccggcttgcgtgtacaccgattccggacacctcagtgcacgtactctgatgtcagatga

SEQ ID NO: 267056 - DNA, 243 bp, Klebsiella pneumoniae
atggcagagttcgtaggttcggctgcttcgcaagctgatttcatttggaagaacgcggaagacctgtgggggggggatttcaagcataccgacttcggcaagatcattttgccgtttaccctgctgcgtcgattggagtgcgcactggagtctacacgggaagcatcgctcgatagccaaccagccacgattgagttcttagaagcagagttcagtgttgatttcgatgcgctgctatcttga

SEQ ID NO: 267057 - DNA, 174 bp, Klebsiella pneumoniae; identical to SEQ ID NO: 124403

SEQ ID NO: 267058 - DNA, 249 bp, Klebsiella pneumoniae; identical to SEQ ID NO: 38931

SEQ ID NO: 267059 - DNA, 288 bp, Klebsiella pneumoniae
atgcaaattgatattaaaacatcttcagttaagcctttaagaaatacttatgcttatattgaaaaaagatttggtgataaaccagcttcacgttatcaagaagcgacctacgatattcaggaagaaattaattttcattacaaacctttatggcagcctgaatttgatctttacgataagggccgtactgtaatccaaatgaaagattggtacgtgcttaaagatcctcgtcaattttattatggctgtctcttatacacatctccgagcccacgagaccgaggctga

SEQ ID NO: 267060 - DNA, 414 bp, Klebsiella pneumoniae
gtggtggtgagcgggaaaattattaatctcagcgccgaaagcgtcgacggtggagtcaacctcaccaccagcgtcaccatcggctacgatacgccgtggcgtcaggtccatgcgctgctggagctggcggcgagacgcaccccggggatcgatcagcaaattgcgccggtggtgcgtaagctgggattgctcgactggtacacctcgtatgagctgcaggtgcgcttactccccacaaccaagctgccggatggccgcaacgcattgcatagcagcattattgatgtgtttaacgaattcggcgtgcagattatgtcgccgaactttgtgatgcagccaaaggcggcggtagtggtgccgcaggaagcctggtacgccgccccggccgtcgcgccgcagaagcctgagaaataa

SEQ ID NO: 267061 - DNA, 390 bp, Klebsiella pneumoniae
ttgctcgacatacacaccgtcgagaaacagcatgtggaagtgaacattcagattgagcgccgatccaaaacgctggatcagggtgaccgcgcccgtcttggccacttggtgggtatggcccgctttcttgaccaggtgcgtggcaatgacgcggtaaacgatgcccagcacccaccccatgatctcgggccggctggcaaacaggaaacgcagctgaaacgggaagctcaacacccactgacgcatgggttgttcaggcagtacttcatcaaccagcaaggcggcactttcggccatccgccgcgccccacagctcgggcagaaaccgcgacgcttacagctgaaagcgaccaggtgctcggcgtggcaagactcgcagcgaacccgtag

SEQ ID NO: 267062 - DNA, 138 bp, Klebsiella pneumoniae
atgagtttatttcgctatggtttagactatgttcaaatggcgattcagcgtttaattggttttgggaaaaaagaagagtttaaggaaattttggcaattttaagaaagcagaatcctgataggataagggttctgtga

SEQ ID NO: 267063 - DNA, 570 bp, Klebsiella pneumoniae
atgacacatctcaatgagttatatcttatcttaaacaaatctctaaaatggaacaagtcacatttaaagtgctttgcgctcatcatgcttgtgattattttaaagcaaacatgtaatctttcttctgcatctaaagccttgcccatcaagtgtttaccacaatcattttatcgacgtatgcagcgcttctttgcaggtcagtattttgattatcgtcaaatttctcagttgattttcaatatgttttcattcgaccaagtgcaactgactttagatagaaccaattggaaatggggaaaacgaaatattaatatcctgatgctcgcaatcgtttatcgtggaatagcgatacctatcctttggacattgcttaataaacgtggaaattcagatacgaaagagcgtattgctttgattcaacgctttatagccatttttggtaaagaccgtattgtgaatgtgttcgcagacagagagtttatcggtgagcagtggtttacatggttaattgaacaagacatcaacttctgcattcgtgttaaaaaaacttcattgtcaccaatcatttag

SEQ ID NO: 267064 - DNA, 441 bp, Klebsiella pneumoniae
atgattaaaaacaacgagttaatccatccttttgacgtaaccagtaatgaatcaggtaagacttatcaactgacgcctaactcgtccaagtcggttcagcccgtggccctgttgagattgagtgtatttacccctgtcggcacaaaagaaaaccgcgaccgaaactttgaagttgatgcctctgatgagctttcgtgtatggaaattgcaagatcggagggttatgacgacatcaagataactggtgtcaaactatctatgtctaccgactttaagtgctggctcgggatcatcatggctttcagtaaatatggttttacttccgagaagattaccctgacttttaacgagtttgcgaagatgtgtggtatcagttcaacaaacatcaacaaacgaactcgtgcgcgctttaaagagtcattgaagtggatactaatctag

SEQ ID NO: 267065 - DNA, 393 bp, Klebsiella pneumoniae
atgagtcaagttgttgattttttaaatgaagcaaaaactttttattttgcaaccgttgaaggagaccagccaagggtcagaccgtttaatgcagccatggagaggaatggcaaggtctatcttggtacaaccaatcagaaaaaagtttatcagcagttattggcaaattcaaaggtggaagtctcaggtatggcaaaaggaaaatggattcggctcaccggcgaagccgtaattgatgataccgtggaagcaagggaagcaatgcttgaagcaaatccgtttttgagagattggtatagcgctgatgatgggaaattcaccgtattttatttgaaaaacatgcaggcagttttatattcctttacaggagatccggagatattagataattaa

SEQ ID NO: 267066 - DNA, 891 bp, Klebsiella pneumoniae
atgaagatattactgattggcaagaatggtcaggtgggctgggagctgcagcgctccctgtccacgctcggtgatgtggtcgcggtggattactttgataaagagctgtgtggcgatctgactaatctggacggtatcgcgcagaccgtgcgtaccgtccgcccggacgtggtggtgaatgccgccgcgcacacggcagttgacaaggccgaaagcgagcgggagctctccgacctgctgaacgacaaaggggtggcggtgctggcggcggagtcggcgaagctgggtgccctgatggtgcactattccacggactatgtgttcgacggcgccggtagtcattatcgccgggaagatgaggcaaccggcccgctgaacgtctacggcgaaaccaagcgtgccggtgaactggcgctggagcagggcaacccgcgtcacctgattttccgtaccagctgggtgtatgccacccgcggtgccaactttgccaaaaccatgctccgcctggcgggtgagaaagagacgctctccatcattgacgaccagcacggggcgcccaccggcgcagagctgctggcagactgcacggcgacggcaatccgtgaaacgctgcgtgatccggcgctggccggcacctatcatctggtggccagcggcgagaccagctggtgcgactacgcccgctatgtgtttgaggtggccagagcgcacggtgtagagctggcggttcaggaagtgaagggcatcccgacgacggcctatccgacgccggcgaagcgtccgctcaactctcgcctgtcgaatgaaaaattccagcaggcattcggggtgactctcccggactggcgtcagggtgtggctcgcgtggtaacagaagtcctgggtaaataa

SEQ ID NO: 267067 - DNA, 870 bp, Klebsiella pneumoniae
atgaaaggtattgttctggccggcggctccggcacgcgtttatatccgatcactcagggcgtctccaagcagctgctgccgatctatgacaagccgatgattttctacccggtgtccgtcctgatgctggcgggtattcgcgacatcctgatcatctccacaccggacgatatgccttccttccagcgcctgctgggtgacgggtcgcagttcggggtgaacttcagctacgccatccagccgtcgccggacggcctggcgcaggcctttatcattggcgagaagttcatcggcaacgatgcctgcgctctggtgctgggagataacatctactttggccagagcttcggtaaaaagctggaagcggcggcggcgaagacctccggtgccacggtgtttggttatcaggtgctggatccggagcgcttcggggtggtggagttcgatgagaactttaaggcgctgtccatcgaggaaaaaccgctgaagccgaaatcggactgggcggtaaccgggctctacttctacgacaacaacgtggtggagatggcgaaggacgtcaagccttctgaacgcggagagctggagatcaccaccctgaaccagatgtatctggagcgcggcgatttgcaggtggaactgctggggcgcggatttgcctggctggatacgggtacccatgacagcctgattgaagcttctcagtttattcataccattgagaagcgccaggggatgaaagtagcctgcctggaagagattggttaccggaataaatggctgtcggcggaaggggtggcggctcaggcggagcgtctgaagaaaaccgagtacggtgcctacctgaaacgtctgctcagtgaagactga

SEQ ID NO: 267068 - DNA, 255 bp, Klebsiella pneumoniae
ttgaaatcgatggtttacttgagtttaatggttcgtgtaatattggccatggctctaaaatttcagttggaaaatctggcaaaattacttttggaaatgactttaaagtcagtgctgaaagcacaatcatcagtcatcataatgtcaaatttggtaatggttgtttgctctcttgggatgttcttgtcatggacactgattttcataaaatttataatcagcaaaatgaagttattaaccaagatcgtgaagtaa

SEQ ID NO: 267069 - DNA, 327 bp, Klebsiella pneumoniae
atggtactcggcagcctgcttgctctctccgccaacagctacgcgctcagcgaatccgaagcggaagatatggctgatttaaccgcggtttttgtgtttctgaaaaacgactgtggctaccagaacctgcccaacacgcagatccgtcgcgcgctggtgttctttgcccaacagaaccagtgggacctgagcaactatgacagctacaacatgaaagcgctaggcgaagacagctatcgcgatcttagcggcattaacattccgacggcgaaaaaatgtaaagcgctggcccgcgattcgctcagcctgctggcttacgttaaataa

SEQ ID NO: 267070 - DNA, 231 bp, Klebsiella pneumoniae; identical to SEQ ID NO: 149399

SEQ ID NO: 267071 - DNA, 168 bp, Klebsiella pneumoniae
atggcatttatcttgaccattcgttctcgcaaaagacggaacatttcctgttgcgtgacggtgattgaagtacaactggacatcagcgctattaccatgcaaacccagaactgctctaaaacgttatcgaatgacatagtatgtacccctcataagaacttcatgtaa

SEQ ID NO: 267072 - DNA, 138 bp, Klebsiella pneumoniae
atgatgatgagaaatgccattgccaaggcgattgaagaaaaggacatgaaagacaactttgtttatagcatgtacaacaccatacgatatatttttcttcgcaaggatcgccacctctgcgccaggtatgttgagtaa

SEQ ID NO: 267073 - DNA, 294 bp, Klebsiella pneumoniae
atgaaaaaagaaaataatcgcactgacattaaatactcgatgactgagtggttaactatacctgaagccatacaactggctcaacacgaattgaagtttagattaacaaaaagtgatatatacaagaatgcgctgagaggaaacatcatcctttccatttattttcagtcacctattacattaagaaaaattcaaaaagtaaaaaataaattaaaatttagacctatagaaaactcattaatctcccgcctttgcgccctcgaaaaaaaagctttatcgaagaaaacaatctga

SEQ ID NO: 267074 - DNA, 588 bp, Klebsiella pneumoniae
atgattccattaattaattacaccatcttaactgatgcgttgcacgctctgaaagttggggatattcgtcactgcgagtccctcggattcactttcgacgaaatgaatgctcttaatgagttatcactcgatgaactgtttgctgtcagccgggcggcggctccctttgtttcggtcagtgtccgccatgatgttctgcatcatttactggcgcaggcccgacaggaataccgacaacagcagcagattaaccgggctatccggctgggcggttctatcgcgttgctcaaccactactttggcctgacgtctaatgatgtctgccttcgccgacggttgctgggtgtcagcgtgccatatggacgtacacctgagccggatgaagagacagatgccgagatctggcggcaatggcagaagtgccggatggaaaaccttgaatcccccgacgcgctgatggccattatgaaggttactgaactcttgctaccaaggttccagggactgtcactcaccatggtatggagacgtatcacgctttgtgaaaaggaagttgccgctaacaggagggcaccagatgccggatga

SEQ ID NO: 267075 - DNA, 1068 bp, Klebsiella pneumoniae
atgagcaagattggagattatttctttgaattcccggcctcaagaggacttcagggaaaaactgttacgctgatgatgacggtaccagcacggactctcacccgtgttttggcatcagacaatattggcagcaccctcgaacgatctcagcgcgaaatcaacccggcgcgggttaagaagttttatgaatacttggtaagtgcgcatgagaagaaagagccgttcatcattccgccactggttgggaactgtaactcagaaattgagttccaggagttcggcaatacaggcgtaggcgtcgcgcgcttcccaatggatgcagagattaaattgtttgatggtcagcatcgagctgcgggcctggctgaattttgtcgtaagtatggtgagccgatcagcattccactgatgttgactcataagctgccgctgaaagctcgccagcaattcttctctgacattaacaacaacgtttccaagccatcagcggctatcaacatggcatataacggccgtgatgatgtcgcccagggcatggtgaagttcctctcagatcatgatgtcttttcagcggtaacggactttgagcataacgtagtccccgctaaaagtgacctctggatcagctttaaagctctgagcgatgcaaccgccaagttttcttccgcaagagatgcgcagcctaattttggcgatgtgtatgacatttgggaggcatggttaaagttgacggcccttaaagatatacgccgaggcgtctcgccggccgaatacaaacgcgacttcatccagttccacgctgtaatgattaacgcgtttggctatgccattcagcacctgctcgctgataactcagcacgtgatgtcgttggtatgatcgatgatctcgtgcaatccacaggaacggcagatcgcgaggacttcttccttacggctaactggggaggcatatgcgtcaacgccaacaaagagagaccgactgttatcgcaaacgtcgctgcacagaaagcggcagctgagcggctggttactgcattcactcgcaaaacgctgcaggtgttctcatga

SEQ ID NO: 267076 - DNA, 639 bp, Klebsiella pneumoniae
atgtcgaactatgaaagtggaaggccatatccaccgattaacttcatcggatccgataactggcagccatacaccaggctcattcctgccaacgaagtgcatgagtgggttaacaggcaaatactcatcgacaccggaagcatctataacccagaccatgggcatcttctcgacgctgacctctgctttatgtgggcgtctgattctttcgcgaagaaaggtcgctatgttctcggtcaggccgaacaggtaatgcttcgcgccagcggttggcagaaagccagaatggaacagcagatgcatgaatggttcggacgcataccgaagttcatcatcacgctggcggccgattactgttcacagtgcagcgaccttgaattttgcgcgctggtggagcatgagctttaccacattgcccaggcgacctatgatttcggcgcgcctaagttcaacaaagagaccgggatgccggttcttactctgcgcggacacgatgtcgaagagtttgttggcgtggttcgtcgatacggtgccagcaaagacgtgcaggaattagttgatgctgccaatgccccggcagaagtagcccatcttgatatcgccaggtcatgcggcacatgcatgctgaaactggcttaa

SEQ ID NO: 267077 - DNA, 480 bp, Klebsiella pneumoniae
atggcggcactgaaaggtgaggtcaaagccttcatcgttcagtctcttgcctgcttcgataccccatctcaggtggtggagtcggtcaaaaaagaatttggcctgagtatcacacgccagcaggtcgaatcccacgacccgacgaaggcaaacggcagggggctggcccaaaaatgggcggacatgttcaacgccacccgcgaacgattccagaatgaaatctctgacatcccaatcgcaaacaaggcgtaccgccttcgagttctcgaccgcatggccactcgcgccgagggaatgaaaaacctcgcgctcaccgctgagatcatcgagcaggccgccaaggagtgcggggatgcttataccaacaaacataagtttgaacattccggcccgaatggtggcgctatccagacgatcaccatgagcaaagaggaatacaaatccgcacggcaggagatgatggaggatgacgactgctga

SEQ ID NO: 267078 - DNA, 1350 bp, Klebsiella pneumoniae
atgactgacaaattaactctcgccgtcaaccatgcgttgaacgatgcgcggatggcgcgcgcccgtatgggaatgctggcgccaacaatggggctcgataacaaacgtagctcagcgtggtgtgaatacggatttcctgaactggtaacctatgacaacctttattcactttatcgtcgcggcggtattgctcatggcgcagtagagaagctggtgggcaagtgctggcagtcaaacccggagatcatcgagggtgatgatgctgatgagagcaaggatgaaaccgcatgggagacgaaatccaagcaggtatttaccaaccgattctggcgcgcgtttgctgaagctgaccgccggcgtctggtagggcgttatgcaggtttgctgctgcatgtgcgcgatgataaagactggaatcttcctgtcgtaaaaggtcgtgggttgcagaaagtaacggtagcctgggctggttctctggctgttggagagtgggacacaggtcttaactcgaagacatacggccaaccgaagatgtggcagtacaccgagcgccttccgaacggttcgacacgccgcgtcaatatacatcctgatcgtgtattcatcctgggtgattactcagatgatgcgattggcttccttgagccagcctataacgcctttgtgagtctggagaaagtagagggtggatcaggtgagtcattcctgaaaaacgctgcgcgccagcttgctctgagtttcgataaaactatcgatttcagcagcctggcatcgatgtacaacgtcagtgttgacgagttgcaggacagattcaacgaagctgcacgtgagatgaatcgtgggaatgatgttcttctcgcgcttcagggcgcagacgtgacgtctcttgtatctccggtttctgacccggggccaacctacgacgtaaacctgcaaaccgctgccgccggggtggatataccgacacgcattctggtcgggaaccaacaggccgagcggtccagcaccgaagaccagaagtacttcaattcgcgttgccagtcacgccgagtagacctcgccttcgagatagaggacttctgcgacaagcttatcgacctgaagatcatcgactctgtcagcaataagaccgttatctgggatgacctgaatgagcagaccggatccgagaagctgaccaacgccaaaaccatgggcgagattaatcagaccatgcagggtagcggtgaaaatccggcattcagtcgagaagagattcgtacggcggcgggttatgacaatgacgacgaagaaccattaggagaagaggatggcaacgaagaagacgaagccaccgattctaccgcgtaa

SEQ ID NO: 267079 - DNA, 294 bp, Klebsiella pneumoniae
atggctaaatacgaagtggtgcgcccatggtttggtgtgaaggttggtgatgtggtggagttgaaagagcttcacccggcgctgaagtcaaacgtccgcctgatgcgcggtgaagctggtggggaactcaatccggcaacgcctgaaggcggtaccgataacaaatctcataaagagattatccagcagcgcctgacggagttgaatatcgagtttaaaggcaaccttggcgctgagaagctcagtgagttgttgcctgatggcgaactcgaaaagcttttccctgctgaataa

SEQ ID NO: 267080 - DNA, 570 bp, Klebsiella pneumoniae
atggggcgtcaaactcatgtagggtaccacaactgtaggaatgaaggcggcaaagagtttctcaagagtagcgttccgtttctaagcggagatggcgacaaccaatggttaacacaaggttattacttttggactgatagcccctactgggcagaacgctggaaccctggtcgagatgttgctatcagtgagtttaaaataacatttcacacagatgatgagttgttggatttggtggggaatgctggtcacatttttgaatttcaaaaaatgcgacttaaggttgcgcaacaccttgatgcaaaggatgtatcaaaagttactgtcagtcaggtaattgattttttaagagcactcgagcgtgatggccagcctggaatttttccatacctagctgtcaaggctcaggactacgcgagagctagtgatattttaaagatgtttttcatcagacgtggtaaaggtgagcacttagcttgcttgacaagacagcaactttgtgtttttgaacaaggcagggaccggatctattttcaagggttcgtcgcacctgctgattacaaagagtaa

SEQ ID NO: 267081 - DNA, 231 bp, Klebsiella pneumoniae
atgctatcctttgaagaaagaatggctttgctggaagcagcacttgcagagcatactccccagtctctgatggaaaagttaaacgaatacccggcgcacggcccttctttggcgtcgtatgttgttgaggtgtcagagcgtgtacgtgttattgaaccatgcaatgctgaggcaggttcatgtacagacgttaccttttccgattctgcagagtatggtgaagcagcataa

SEQ ID NO: 267082 - DNA, 348 bp, Klebsiella pneumoniae
atggctcattgcgcccacatccccgcttttgttttacatcaggtcacctgtcagtttgcgacgggacagaccctgtttggtccgctcagcgtctcgctggaaccgtccctttgcggcctggtcggccggaacggcgtcggcaagacgcgtctgctgcgtctgctggcgggccttgattctcctgccggcggccatattgagcgcgccgccgccgttgcctgggtagcgcagcagccgacgctcacgccggagaccaccctcgctacgctgctgggctatgcgtcggttttgccgccttgtctcgccttgaacagggccaagggctggccgacgatttcgatctgttag

SEQ ID NO: 267083 - DNA, 303 bp, Klebsiella pneumoniae
atggaactttatatcagagcaataattggtagcatggccttttcattagtttccttgctaattattttccttctgctaaacctcgttctttcactaattccatattttaaaagcaagactaaatttaccaccctgatttcgttcctaatgtcttggattttgattggattgattgttcctgcatttagcttgcaatacttcatggataacacttactatctctatagcctcgaattagtgctttctttggtgactattattttatttactttttgtggtaagcaaaaaatcataaataaatga

SEQ ID NO: 267084 - DNA, 276 bp, Klebsiella pneumoniae
atggttctaactcaggacaggctttctgaaattgaccagggtgctattgtcgacaataagcgtcttggcagagcgctggaagtggcgaaactggtacaggtcgaacgggataataaccgttcaaaatcattgccatcaggtgacggcccttcacgcagacgtaaagcccccacgacgaaaaaatcccagcgttctctggaccaggacgatatgctcaatgctctgataaaacttcagtcacggtctgaggagattttcgggaaaaaacaggggtaa

SEQ ID NO: 267085 - DNA, 921 bp, Klebsiella pneumoniae; identical to SEQ ID NO: 230361

SEQ ID NO: 267086 - DNA, 186 bp, Klebsiella pneumoniae
atgcgtgagttaaccaataaaaccacggcgatagcttgcgagttggcggccttattgatggttgtcgaagaatgtggggttgatcagattgaacgtgaaaaccttataagccttgccagaagggtatcggatcaactggcggcaagcatggtcgagcagaattcaacgggggtgctaaatggataa

SEQ ID NO: 267087 - DNA, 777 bp, Klebsiella pneumoniae
atgagtttacctaataggctttactatcctattgaattagcagccaataaattatcatgttcagtttctgatttaattcattatggtgcgacttccgatatagaaatttgtctgcatatgtcgtttaattgcgcagagtgtttttttgaatatgatacatcaagtgaattaattgattttacaaagggacgaaagatttacgttaaagggaagtataactcttttaatctcaggcgaaatgatgatggcatttatctaaatgacttttatggtcttgcggctttgacttcgcaggacttattaactatagattttgagcctgaagcatcaatttctattaatcaggttttctgtcccgcaggaaatggcaagttttttgatgatatcattggtgccgtatatatcgagcctaatgaggattatgtagcccagacgtcaaaagacaaggttatagagcggttgtttataaccgattatgaaattaaaaggcttttggatgatgcggagtttcatgatactccaagtttaccagagattaagaaaagaaattcaagtaagacgctgaatagtcaggctaagtttataaaatcattgttatggatacattatggagaggatgttgctaataaccccagacagcatctagaagcgaaaagttcaggctctggagtcattttgtctgattttgaaacgtatggccttaaggctccttctggggtaacagtcgatggttggttgaagtttatagatgttgagaaaaccagcgaggccgactga

SEQ ID NO: 267088 - DNA, 174 bp, Klebsiella pneumoniae
atggaaattgatctcgacaacctggtcttcagcggcctggatgaagcggaagagcgcaacgcggagcgtctggaagaagcggaagagcgcaacgcggagcgtctggaagaagcggacaaaaaagcccaggcgatcgttgccgacgacgactgcggcgacgcctgcaaaatctga

SEQ ID NO: 267089 - DNA, 3741 bp, Klebsiella pneumoniae
atgagtaaacttctggatcgctttcgctactttaagcagaagggcgagacctttgccaacggccacggccaggtctacaacaacaaccgtgactgggaagatagctaccgtcaacgctggcagttcgacaaaattgtccgctccacgcacggtgtgaactgcaccggctcctgcagctggaaaatttacgtcaaaaacggtctcgttacctgggaaacccagcagaccgattatccgcgcacccggccggatctgccaaatcacgaaccgcgcggctgcccgcgcggcgccagctactcctggtatctctacagcgccaaccgcctgaagtacccgctggcgcgtaaacgactgattgagctgtggcgcgaagccctggcgcagcatcccgacccggtgctggcatgggatagcatcatgcaggatccggcaaaaacccgcagctataaagcggcgcgcggcaaaggcggttttgtccgctccagctggaaagagctgaaccagctcatcgccgccgccaacgtctggaccatcaaacattatggcccggaccgcgtcgccggcttctcgccgatcccggcgatgtcgatggtctcctacgccgcgggcactcgctatttatcgttgattggcggcacctgcctgagcttttatgactggtactgcgatctgccccccgcctcgccgatgacctggggcgaacagaccgacgtgccggaatccgccgactggtacaactccagctacattattgcctggggctccaacgtgccgcagacccgaaccccggacgcccacttctttaccgaagtgcgctacaagggcaccaaaactatcgccatcacgccggactattcggaagtcgctaagctctgcgaccagtggctggcgccgaagcaaggcaccgacagcgcgctggcgatggccatgggccatgtgatcctcaaagccttccacctcgataacccgagcgattactttctcaactactgccggacctacaccgacatgccgatgctggtgatactcgagccgcgcgacgacggcagctatacgccgggccgtatgctgcgtgcttccgacctgcttgacggtctcggggaaagtaataacccggaatggaaaaccgtggcctataacagcgacggcgaactggtggcgccgaacggctccatcggctttcgctggggcgaaaaaggcaaatggaatctcgaacaacgggcagacggcaaagatgtcgagcttaagctgtcgctgctggatattcgcgacagcgtggtgtcggtgggcttcccctactttggcggcaacgaaaacccgcattttcgcagcgtagcgcagtcaccggtgacccttcacccgctaccggctaaacagctgacgctggccagtggcgaaagcggcctggtggtcagcgtctatgacctgattctggccaactacggtctggatcgcgggcttgatgatgtcaatgcggcgaaggatttcgccgaggtcaaagcctataccccggcatgggcggagcagatcaccggcgtaccgcgtcaacatatcgaacaaatcgcccgcgagtttgccgatacggcgcataagacccacggccgctcaatgattatcctcggcgccggggtgaaccactggtaccacatggatatgaactaccgcgggatgattaatctgctggtattctgcggctgcgtcggccagagcggcggcggctggtcgcactatgtcggtcaggagaaactgcgcccgcagaccggctggctgccgctggcgttcgccctggactggagtcgtccgccgcggcagatgaacagtacctcttatttctacaaccacgccagccagtggcgctacgaaaaactgaccgcgcaggagctgctgtcgccgctggccgacgccagcaaatttagcggcagccttatcgacttcaacgtccgtgcggaacggatgggttggttaccttctgcgccccagctcaacatcaacccgctgaccattaagcagcaggccgaggccgccgggctctcccccgcggagttcaccgtccagtcgttaaaatcaggcgatattcgctttgccgccgagcagccggatagcggcaaaaaccatccgcgcaacctgtttatctggcgctcaaacctgctgggatcgtccggtaaggggcatgagtacatgttgaaatacctgctcgggaccgacagcggtattcagggtgatgaactgggcgccagcgatgaggtaaaacctgaggaagtcgagtggcagaccgcggcgattgagggcaaactcgacctgctggtgaccctcgatttccgcatgtccagtacctgtctcttctccgatattgtcctgccgaccgccacctggtatgaaaaagacgatatgaacacctcggatatgcacccgtttatccacccgctctccgccgccgtcgacccggcctgggaggcgaaaagcgactgggagatctacaaggatatcgctaaatccttctcgcaggtctgcgtcggccatcttggcaaagagaccgatgtggtgctggtcccgctgcagcatgattcccccggcgaactgtcgcagccgttcgaggtgcttgactggcgcaagggcgaatgcgatctgatccccgggaaaaccgcaccgtcgattgccctggtggaacgcgactatcctgccacctgggaacgcttcacctctctcggcccgctgctcgataagcttggcaacggcgggaaaggcatttcgtggaatacgcaaagcgaagtcgatttcctcggcaagcttaactacgtcaagcccgacggtccggccaaaggccggccgcggatcgacagcgccattgacgcctccgaagttattcttagcctcgccccggaaaccaacggccaggtggcggtgaaagcctggcaggcgctgggagagtttaccggccgcgatcatacccatctggcgctcaataaagaggatgagaagatccgctttcgcgatattcaggcgcagccgcgcaaaattatctccagcccgacgtggtccggactggaaagcgagcacgtctcctacaatgccggttataccaacgtgcatgagctgatcccatggcgcaccctctccggccgccagcagttgtatcaggaccatccgtggatgcgcgccttcggcgaaagcctggtagcctatcgcccgcccattgatacccgcagcgtcagccagatgaaggccgtgccgccaaacggctttccggaaaaagcgctgaatttcctgacgccgcaccagaagtgggggatccactccacctatagcgaaaacctgctgatgctgacgctgtcgcgcggcgggccgatcgtctggcttagcgaaaccgacgcgaaagagctgggcattgaagataacgactggattgaagcgttcaacgccaacggggctctcaccgcgcgggcggtggtgagccagcgggtgccgccggggatgaccatgatgtaccacgctcaggaacggattatgaatatcccgggttcggaagtgaccggtcgtcgcggcggcattcataactcggttacccgcgtctgtccgaagccaacgcacatgattggcggctacgcccagctggcctatggctttaactattacggcaccgtcggatcgaaccgcgacgagttcatcatgatccgcaaaatgaagaatattgcctggctggatgacgaaggtcgcgatcaggtacaggaggcgaaaaaatga

SEQ ID NO: 267090 - DNA, 285 bp, Klebsiella pneumoniae
atgagcaagttagccatcgatttatttgtaatggatgatgcttgcgagccttacatttgtggcgttctcggtgcttgcacaattagagacttacaggccatcgaaaaggaaattatagagaacagggaagatcacctctctggaagtggaatctacgctatcgaagtaagctggtttaaaggtcagtttgacgagtatgggcgttgcgaaattgcccctgcctgggaatgggaaattatcgaatcatcaccatttgatttccctgcagaggattgccatgactaa

SEQ ID NO: 267091 - DNA, 294 bp, Klebsiella pneumoniae
atgaacatagctgaaaaaattagggcgatacgcaaggcggaggggttaacgcaagtaaagttctgtgaaatcagcgggctggcattaagtactttaaaaaactatgagggcgggcatgcggagccagggttaggggtcgtgctgaagatcacgaacacctcacagcttcaaaaatacaccctatggttgatgaccgataagactgcgccccaggctggtcagatcgcaccggccctcgcgcacattgggccagaaccaacggaatcagaccaatccgggaaacagactggctaa

SEQ ID NO: 267092 - DNA, 195 bp, Klebsiella pneumoniae
atgagccattcacaggactacatcaagggcgccattgctgcgcttaacgaagttaaggccatcggattagccgcagccatgcacacagggatccttcacggaaaagaaaccggggacgccgtaagagcaacggtcgatagtcttgctgatccgctcattaacaaatacaaagcgatggtggtgaaaaatgattaa

SEQ ID NO: 267093 - DNA, 960 bp, Klebsiella pneumoniae
atgattaagtcacctctgaaatgggcgggtggtaaagcccgcgttatgccgcagctgctggagcacctgcctaaagctgattgcctgattgagccatttgtaggcagcggaaccgtatttatgaatacggaataccgccgttatgttctttgtgatagcaaccgggcgctgattaacttcttcgaaatgttaacccggcataccgaagaacttataaaaagcgctcggatgttctttcaggatggaaactttagtgaggactattacgcctgccgcgatggatttaatttcattagtaaaaatagcctcgttggtgccggaattgcgcgcaaagtgcagtgggcggcgatgtttctttatctcaataggcacgggtacaacgggctttaccgtgtgaatcagaagggtgaatttaacgtaccttacggtaagtttgcggcgccttatttccctgaaaaagaaatgcgtttatttgctgaaaaggctaatgacacgaaagccattttcatgcatagcgactttctacattcaatccgcgctgtcgtatacgccagcgatgacgctgtcatttattgcgaccctccgtacatcccgaccagcgcaaccgccaatttcaccgcctacggcaagccattcaccctagacgatcatcgctccctggttacaaacctgctctatgctcatcgccagttcggcatccgcgcggtgatatccaacagcgataccccggaaacccgcgaaatttattctgctttcaaccttcacgccttcagtgtccgccgctctgttagcgccaaaagccgcgacatggccgctgaggtaatcggcgttctgcgtgtttgtgatggctgcggccgttctggtggtggttgctgcccggactgcggcccggtgacgggtaactccacctacaacgcaatggcggtaacgggcgcttttgacgatctggaggctttctga

SEQ ID NO: 267094 - DNA, 1017 bp, Klebsiella pneumoniae
gtggtcgcttattacaacgaagtagacccccacgcagtgcagcacctgcgcaaccttatcgacgccggccatattgcgccgggcgtcgttgatacccgctcaattgaggatgtaacccccaatgacattaaaggattcaatcagtgccatttcttcgccgggatcggcggatggtctcttgcgctgcgtcgcgctggatggtcagacagtcgcccggcatggacagcgtcatgcccctgccagcctttcagcccggcaggcaaagggcttgggtttgctgacgagcggcacttatggccctccgcacattggcttgtcggccagtgtcgccctgtcgtggtttttggcgagcaatctggcagcgctgacgcgaacgactggatcgaccttgtacaagctgacgtggaagccctgggctatgccttcggggcggttgcgtttccgtctgcgagcgtcggcgcgccgcaccagagagaccgtacttattgggtggccgacgccgattgccagcaatgggaggggcgcggggaatttcaaccgacaggggggggtaaaccttcagacagcggcgttattagctggttggcccacgccaacgaccatagacaacaatcaggttgcgggattgtgtgcggcggccaatgcacaaaagagggggactaccctgggtggcgctgccagattggcagcatggccgacaccaaccacgagcaacgaccgctcgccctgtccgcaagaagctatgcggacacatcgcgacaatggaacaaagattcagaagcggctgcaggatgtagctgcattatgcggcccggcccggttaacggcttctggagagatgctgattggctccacggccaggatggatggtggaggccagttagacccggatcattcccgttggctaatggggttcccgccagagtgggaagagtgcgcacctacggaaacgccatcaacattgaagcggcggctgcgttcataaagtcatatatggcggcggtggatcatgtctga

SEQ ID NO: 267095 - DNA, 771 bp, Klebsiella pneumoniae; identical to SEQ ID NO: 237218

SEQ ID NO: 267096 - DNA, 231 bp, Klebsiella pneumoniae
atgaatcaggtgcagctaaacacccagggcctgcttgagtcgattgaggagcgcttggcacagatagaagcgctggtttcctctgcccatcggacgatttccagttacgaggcctcactgtatatgcaggaggcggcagaattactccagatcgcccgagagttggtacaagaggccaggaattgctcctcctctctgtcagcgcagctgaccgccagggaggacaaatga

SEQ ID NO: 267097 - DNA, 165 bp, Klebsiella pneumoniae
atgttcaaattcaagttcgcggcgatctgccgtaccgataaaaaatcccatattcatcatctgtccaccatcgcctcatccgagcgtgaagcccgtcgccagttcgccagccgttttgttctcgttctgtcagcccgtatccgagttagcggggtagccgcatga

SEQ ID NO: 267098 - DNA, 228 bp, Klebsiella pneumoniae; identical to SEQ ID NO: 247847

SEQ ID NO: 267099 - DNA, 207 bp, Klebsiella pneumoniae
atggctaacttggtgctgttactcatcgtcgccctgtgtctactgcagcagtgggttgcctatcgaccctggcgcgctttccgggaaagcaggttggtacgccgcgccctgtttaagggagaggctttcgctcaccgctaccgtatgtggcagcggttatatcgggaaatactgatgaccggagggaggaaagatgtcgactactga

SEQ ID NO: 267100 - DNA, 4005 bp, Klebsiella pneumoniae
atgaccttacaagaattctatgcggctcgcttcggtagcgatccgtattcattgcttgaagcagcgcgggatgagctgtcagagctggccacaatggctggcattaactggacagcatgcgctgataacattcagttgaacccgcgcggcggggaagaacgttattcaaaatataacggtggcgcccccgaggctctggaaaagagcctcaaagggcgtgtggaaatctactcccgcaaggaacaacacaaaagcggcatcagctacccattcgtcaactttgtccagaaagggcatgacgaaggttcctggagcggcttctccttcctgttcgccgaataccgccgtgaacaacaaagaaaccatgcgaccgtggtcgcacaacctgctgaagaactggcgcgtattgaacgccaggcagaagcccgcaagcgccgcgccgaacagcaacggataaatgaacttaaaaacaatcagttagagcaagagcggttgctcggatggttggcattccacagtgcatgggaacatgcgccagctgaggacgggtcgtggccttacgcagtgaaaaaaggcattcgtgacgtattcagcgcttgcgatattcgtcgcgtgaccagtcacgacaacgcaaaatggagccgtggaccgactacatacatggcgattccgctggcccacctggacggacgcaaagacggacgaattgtcggctggcagcgtatcgaccagcgcggcggtaaattccagaccagcgcgatcaccagcggtgatttcgtcggggcgtgctttgttatcggcaacctgaacggcgcgcaaaatattgcagtggtggaaggtttcgccaccggcgcgtccgtatggctggctacccgtaaggacccgaaaaaaagctttgatgctgtcgtggtcgctgtggccgcaaacaacatgatccatgttgttgagcagctggtgaacatgtacccggcagcaaaaattacctgcgccctggataacgaccgcaaatcatcggctgaaggtaaaggcaacaccggcttacgtaccggcttcgacattctcgcaaaatttagcggcatcaaatgcgtttatcccacctttgaagacgatccccagctggagtgcagcgacttcaacgacctgcatagattacgtggactccgcgagacctgtcgccagctattcgccaaagggaaccgcctgagtaacagcactgatttgctgtccctgacgctaaacaagctgaaaacggctaagcgtgataaccgcaggacgtttgctaaagaactgctaaacgcggtggatattggcatgctgacctgcccggtaccgaatagcccggcggatctgtttaacatgttctgcatagtgctgcgtgatatgggactggaaagcgtctatcgcgccacggttaaagaccacatcgcacgccgcctgaaccgcaaatgccgtactgcccaggctccccgttcctttagcgagcggatcaccgacccgaacaagcgtccccagcacatcacgtataaacgctttgaaacatccgtgatgacggatgaaattctgcaatacgtgcagcagctgcagggcatcgttattgttcgcgccggtatgggatcgggtaagtcgacaggcctgctgcgcccattgatgcataacgctgatcgcggcgtttccgttgcgcaccgcgtaagcctcatcggtggcctgtgggaaatgatgacagagcagaaagggaccaaggccgatattctgcattaccaggaccccggctatcaggaaatggcgccatacgcgaataagctgaccatttgcatcaactccatcgtcaaaggctgctggcagccgctgatgcgccagcatgactatttcggctttgatgaggcaacgcagggacttcgcgccatcctttctggccgcgcaatggagaacccggtcgccgttttcaatacgctgatcgacgcgctggccagaactgaattgcaccccatcatggtagacgcagatgctaacgatctgctggtcgacctggcagaactggcgatgaagcgccgcgaagaaatgggcctgccggcatggttacagattcacgtcatcgagctgccggtcgacgttcgcaaccgcgaaacgggcgaacctatccgcgtattctacaccgagaaagatcgcatcatgaccgaggtgattaaagcggtggaactcggtgaaaaaatcatgctggcgaccgatagctcaacgtttgccgaagacgttaccgccacgctgcgccagcgctacccggagaaaaaattcctctgcgtaaaccagaagagcaagccggaacccgaggttgaagaattcaccaataaaccgaagaagatggtgaagaagtacgacggcctgatttacagcccgtcgatatcctccggcgtctccatcgagcaaaagcatttcgaccgccatttcggcatgttctgtggcgaagtggtccccagcgatgcgatccagatgctgcgccgcgaccgcacagccaaagagttcatcatcggttttgacaaggttcgcgcacgacgcgaaaccgatccgcaaaaaattgagcgtgcgtttgtccaggcattgctggccactgccggcatgaacggcgaactaaccgacgttgttttcgacggcgaccgcatttctatgggtgtggccaacaccgattttacccggatgaaaatcaaggcagcagcgattgaggcctccgcgcgtaatgactacgccagcaatatgatctgcataatgcacagcgacggctacaaggttgcccctctggcatccgacgagctggcgaactgcgtcggcaaggagctgcgcaaggaagcccgcgaaattgtctgggaacaaacgctggatctccacctgaatatcgaaacgccgaacgaatctgaacgggaagccattctgaagaaacgcgccctgaccctggaagagcaggcgaagctggtccgctgggacatcgagcatgagctgaaactgccggtcaacgaggacaacctgaaattctacttcgacggcgcccgcgataaggttcgccgttatgaaaccatgctgctcgatgagatcaccgcgcggcgtttcgaccgcgaggaatccgcgatcaacttcacctacgctttcaggcaggcgggccaatggcaatactttaccgccaccgcgatgacccgcgagcaggctgatgaagcattccaggcgaaacaccctggcatcaccgagtacaaagtcaaatcgacacccgcggtcgaggtcggtatgcgcggcttctacggcctcaaatctacggtgctacgccagtacttcattgactgcggcatcgacccggaaaccatgaccggagaagccacccaggcgcgcctggcatacgccagggataaactcatgaccgccgaacggcgagacctgttaaacaacgtcctgcgcattggtggctttatgacgcccaaaggcaagccgaaggtccccgaggcactgtttaaaaccatctgcgagtcgctcggcctgaaaaccgacaagcgccgcgccagggacggagacaagcgcccgaccatacggtttgtggatcagcagtcggcggcgttcatgatggaaattctggagaaccgtaaagacgacggcctgtctctgcagttgcgtaaagccgagaaagccaccaccgaagtggatcacggtttagatctcaatatatatatggatcataaaacgcgatccacaaacgagcaggatttggacgcccctcattcagtaataactgaggcgctggccgagctgccggtgccggtgccggaggcctgggcgatgaccgcgctgtctgatgatgagctggccacaatgacctcctggtcgccagccagcatagcgatgaccttcgcgtccctgtacctcacagagttcatggaccgcctctccagcaacgaactgcgccggctgcgtgaatacatcaccggtacggttacgggcggctacgacgcgcaggaggcgttctatggctaa

SEQ ID NO: 267101 - DNA, 738 bp, Klebsiella pneumoniae
atggaacttgaacgaatccgcgcttgtgtggctacggccctttcagatctgcattaccttcagcgaggaattttagaagttcagcttgagcagttacgtcttgccaactccggcaggtttactgataagccaacccgggtcattcaaatgggcgagaataataaatacgagatctcggtcgcggctgagcaggttcgttaccatgttgggaaaacgtttaagcaatcctcaatgctgctgactgaacttgattttcagacggctagttggcgcagagccattgagcagttaaatcgtgaggaaattgcctggctgcattattgctatggctgtaagcccaattttgaaaatgatgaagttatatgccagtggctatggctggattttcttgtcgctcattcaaaggctgatttcaaaaaaatgaaagaggcgacaaagaaaaagatgcgcaatttaacttattacgccatccagcaggttaaggcttcaatattacgcggagaggatgtggacccgctgcgtgaggatgagcatataagtcttttgcttaatatcaccgtcgatagctggcgtaaggattataaaaaacgctggctattaatgaaatcacgatgcctgcatctgaatagcatcgcgttatttaacgcagcggagaagcgcagtgaaatcatcaaccgccattgtacaggaagtgccaacgtgcctgtgccagcagattatgcacaggaagcccggtaa

SEQ ID NO: 267102 - DNA, 135 bp, Klebsiella pneumoniae
atgaacgcagaactattcaactacagcttgaaaacgctacaggtgctgaacgttgtcgcagatttggttttatcagtggcgctgtttggctttgggtacggtcttcttaacttgcttgagtggtggcttgcatga

SEQ ID NO: 267103 - DNA, 477 bp, Klebsiella pneumoniae; identical to SEQ ID NO: 248419

SEQ ID NO: 267104 - DNA, 246 bp, Klebsiella pneumoniae; identical to SEQ ID NO: 180600

SEQ ID NO: 267105 - DNA, 228 bp, Klebsiella pneumoniae
atggataaatcggcattgcttttggagaaactccggcaacgaacgcaaagtagcctggccagcggtggcgacggctttgtctttgcatcgatgctggtctttgacgtgggcttgaatgcccggactattcggcaaatgttggacgttgcagtaaggaacgggacgcttgaaaaaagggaaagaggcataggccgtgcgcataagtatcggacaaatctgcaaatttga

SEQ ID NO: 267106 - DNA, 231 bp, Klebsiella pneumoniae
atgatgaacgtgaaacagatccgcgaaaatatgaccgaagcggccttgagcgttgagagtgtaatgcggggacacccccgcatcaccctgcaggaattaagcaccgcctgcagcattagcctgccagcggtggagtttattatcgagcagatgctttgtatgagggtggcgcagcgaggcgcttttgggcggtactcccttaccccggaataccaaaatggtagcttttaa

SEQ ID NO: 267107 - DNA, 1062 bp, Klebsiella pneumoniae; identical to SEQ ID NO: 248079

SEQ ID NO: 267108 - DNA, 312 bp, Klebsiella pneumoniae
atgaacacagctatcgaatatggaaatcctgatctctggctggtcttgctcatgctggccgccggggtggtatcaagcgccctgctttccgaaacccctatcaacccgcgccgcctcatcggagacgttctgagaggcgtaatcgtggccatcatcctctgggcttacggtgctatgggcaacatctcaattttgaacgtaatcactctcgccggtttatcggctgtggcatggccacacaccgtcaacgaaatcaccggctttgcaaaacgaactatcagccgaattttcggcgggagaaaagaacgatga

SEQ ID NO: 267109 - DNA, 285 bp, Klebsiella pneumoniae; identical to SEQ ID NO: 245992

SEQ ID NO: 267110 - DNA, 432 bp, Klebsiella pneumoniae
atgatgtatcaacgcacggatctgacgctctccatgttctatgcatccagcgctgatgcagacgggaacaaagtggctacgttgacgatgcaggtaattgcggcagaggttggcgccgtccagaccagtcaactgctatgcatcaccgatagcgcgaagaaaaaaacgtataccgtgggcgagcaatctatcagtaatggttccgatccgttgctggtcgcgattgagaattactggcgccagagtacggatgtcgtggttaaaggactgatcgccgaggtgaccgatttcatcgcagggaatatcaactcagtgagcacttggatcggccagtttgggatgaaggtatttgagaatcagccattagctgagcggctgccagaaagcgtgctacaggctgatggtagctccgctacagcgacagggtcctga

SEQ ID NO: 267111 - DNA, 423 bp, Klebsiella pneumoniae; identical to SEQ ID NO: 199877

SEQ ID NO: 267112 - DNA, 1287 bp, Klebsiella pneumoniae
atgccacatattgaagaattgcgtcgtcagcgtgcgggtatcaacgaacaggttcaggccctggcaaccattgacgccagcggcggcacgctgactgcggagcagatgacggagttttcgaacctgcagcagcagttcactgatatcagcgccaaaattgaacgcctggaagccgccgaacgtgctgcggcgctggtcgcaaaacccgtgaaagcgactcagcaggcccccggcattattgttaagcaggagccgaaacagtacaccggtgctggcatgacccgactggtgatgtctgtcgccgcaggcgcagggaatctgcaggacgcggcaaaattcgcttcagaagagctgaatgaccagtccgtatcgatggccatttccaccgctgcgggttccggtggagcgctcatcccggagaacatgcaaaacgaagtcatcgagctgctgagcgaccgtaccattgtccgtaagctgggtgcccgctccgttccgctgcctaacggcaatctgacgttaccgcgttcggctggcggtgcaacggccagctacaccggcgaaggaaaggatgccaagacgtctgaatcaaaattcgacgacgtaaaactgagtgccaaaaccatgatcgccctggtcccgatgtcgaaccagctgattggtcgcgccggttttaacgttgagcagctggtcctgcaggatattctgaccgccatcgctgttcgtgaggataaagcgtttatgcgcgatgacggtaccggcgatacaccgattggaatgaagtcgcgtgcgacgcagtggaaccgcctgctgccgtgggaagcgggttccacgatcaacctgaacacggttgatgagtacctggacaagattattctgatggcgatggatggcaacagcctgatgatccgttgcggctggggtatgtcgaaccgtacctatatgaagctgtttggcctgcgtgacggcaacggcaacaaagtctacccggaaatggcgcagggtatgctcaagggctatccgattcagtataccagcgcgatcccggttaacctgggcgaaagtggtaaggaaacggaaatttatttcgccgacttcaatgatgttgtcatcggtgaagatggttccatgaaggtcgatttctccagagaagccacctatctcgatgcagaaggtaacccagtttccgcgttctcgcgtaaccagtcgctgatccgcgtcgtcctcgaacacgatatcggcttccgtcatccggaaggcctggtgctgggtaccggcgtcctgttctaa

SEQ ID NO: 267113 - DNA, 318 bp, Klebsiella pneumoniae
ttgatactgaaattggatgatgtgaaaacccagctacgcctggaactggatttcacggagcatgacgccatgctcacgcaaatggtgaacgccgcgcagcggagcatcgagcgtgattattactgcaagctggtcaccagtgatgaagagctgcaggcactcccggagaccgtccgcggatttatcgcggatgaagatatccggctggccattcagtttctggtcagcgatgcgtatctgaatggccataccggacagtggctggaaaccgctgcggtgaggcatcttcttttccccctgcaggagcatacgctatga

SEQ ID NO: 267114 - DNA, 390 bp, Klebsiella pneumoniae; identical to SEQ ID NO: 180575

SEQ ID NO: 267115 - DNA, 759 bp, Klebsiella pneumoniae
atgaaaaggagtgcgaaagtactccttttacgaggtatgaacgtgctctacaaatatataggggatcataatcctagcgaagttttaaaaaacctcaaacgctttgttgaggatggaacaattagcgcaagtgatcctagaggctttaatgacccttctgagtttaagattaacttcagcttcaagggatcaccatcgcaaatagaacgatatttcaaagaaataaatgccatcccggatatgtatgaagaatggatggaaagtcatcgaatagtctgtaacgaaatggcagttgagaccagagatttatgtctaaagcaatttggtgtcgtatgcctgacaccatttgaaaaaaatggattgatgtggtcccattattcagtatcgcataagggattttgtataggttttgatgatgaattcgcagaaacaattgatgattttcatctttttagtgatgtgaaatatgtttcacatgtgcctgaatataatgtgttaaatgatatgtcagaattaattgatattttatttttctctaagcatgaaagctggggttatgaaaaagaaaaacgcataattacaaaaagtagtggtgtgaaaaaatttgataaatcttttatcaaagagattattttagggcacaatgtaagtcaagatgttgaaagctacgcgaaaacattaatcggttcgcatataaatatttttaaaatgcggacgcctgaagatagctattctttgcaaaaagagccgctattgtaa

SEQ ID NO: 267116 - DNA, 1164 bp, Klebsiella pneumoniae; identical to SEQ ID NO: 266489

SEQ ID NO: 267117 - DNA, 978 bp, Klebsiella pneumoniae
gtgaaacagcgctctattttaaaaaatgcccccaacatcgacagcattatgagcaagacgcaccaggcgcccgcatcacagcctgtgtcaccgatggtgggtgatttgcaacgccagcttagttcattatcgggaaacagtattatgctgcctgtgtgtggacgtaacgttaactttaagctggaaactatcccagcggataaagttgaaatggcgacgatggtttggctcggtaatgaacgtgatcaagacctgctcaacgaaacgtccttggctgatctcgttccgtcattcctcacttcggggcagcagaacccggcgttcgctcgcaaaactgcaggcatcatagaggttgctgatggttcccggcgccgtaaaacggccataattactggctgtgactaccgcgtattagtcggcgatctcgacgatgaacaaatgcagtggttatcgcaagtgggcaacgactatcggccaaccagtgcatatgagcgtggaaaaaaataccagcgccgtcttaacgatttcgatggcaacgtcaaagcattagcggaggccgagggggttgaccgaaatatcattacccgctgtataagtacggcgggcctgcctaaagatatcattgctattttccagcatcctggcgaactatcagcccgcgccggtcacgacttattcaaggtgtaccaagagaataagcaagccatgctagacgccgcacaacagctgctgcgcatgaagaaaaatggtgaaatattcgaaccaacgagaatcatccaagccctgcaggatttcatttcgacaaatgcagctgatacacaaaaaactgagaagcggtatggtgatggggttgttgcgaaatacaaaggtaactacgtcacattaaaattagataaccgaaaaatttctccagacttaatgagtaaaatagaagcattgctccagtctgagttagaaaaaacggaaagtgtaaaataa

SEQ ID NO: 267118 - DNA, 1146 bp, Klebsiella pneumoniae; identical to SEQ ID NO: 246014

SEQ ID NO: 267119 - DNA, 648 bp, Klebsiella pneumoniae
atgagttatggtgtcacgcttactgtacccagcggtgaaatgtgggttactccggatagtattccgctagcgctgtattcgaagcaggaaataacgcttaggggagggacaaattctgatgaattcagagcggtaacttatgaccagacaaaaccaatgatagcttttgtctgtttcactaacggccaggcaaaagctaataccgtttataacggaaacgaatgtcgggtagtgttttcctacggaagccagcaagccagggcagaaatttatttcttcaccatatttccacaaccaaagccagactatggtctggcaatttgggatgcatcagggactcttgttctaactgataagacaaggatactaactgacgtgcaaagctacggtgaaggatacaatataaacataacgaatgaggggaaatgggcagtctccccgctggccctaggtctggttgttggtgtggttaatgatccactgccgaggccatttcagggggagtatcatgcttatgccatttttaacgggtcaagtaccaatattaggggcatggtgacgcagatgcctggaggtaacatatcgggagtgacgtaccttaatatgcgtaatcattgtcttgctattgagtgttctaaatatgactga

SEQ ID NO: 267120 - DNA, 309 bp, Klebsiella pneumoniae; identical to SEQ ID NO: 230657

SEQ ID NO: 267121 - DNA, 11586 bp, Klebsiella pneumoniae
atggcaaataacataattaaagggcgcaagggtggcggctcaaagcagcgtacaccgacggaacagccggatgatttacagtccgttgcgaaagccaaaattctgctcgcattaggtgagggtgaatttgcaggtggtttaaccgggaaagatatttatcttgatggcaccccgcttgaaaatgctgatggttcgcaaaacttcagtggcgtgtcctgggaatttcgacccggcacgcaggctcagacttatattcagggtattcccggcactgaaaatgaaatcagtgtgggaacggaagtttccagcaagacagcctggacccatacctttactaatacccagctttctgccgttcgtgtccgcctgaaatggccgtccctgatgaaacaggaagatgacggcgacgtggtgggcaataccgtcaagtatgcgattgacctgcagaccgacggtggcgcctggcagacggtgctggaaaccgctgtcacgggtaaaaccacctccggttatgagcggagccatcgtattgatctgccccaggccggcagtacctggacgctacgcctgcgtaaaatctctccggatgcaaacagtgtcaaagttggtgacgtgatgacgctgcagagctataccgaagtgattgacgcgaagctgcgttatcccaacaccgcgctgctttatatcgagttcgactccagccagtttaatggctccattccgcaaatttcctgcgagccgcgtgggcgcgtgattcgtgtgccggataactacaatccggaaacccgcgaatataccggcgtctggaccggcgggttcaaatgggcctggacggataacccggcctggatctattacgacattgttatagctgaccgttttggtctcggtaatcgtctgagcagcgccaatatttcgaaatggacgttgtaccagattgcacagtactgcgatcagctggttcctgacgggcgcggtggtgacggcatggagccgcgctatacctgtaacgtctatgtccaggaacgcaacgatgcttacaccgtgctgcgagactttgccgccattttccggggcatgacctgctggaacggtgagcagattgttgtgcaggctgatatgccgcgtgatgtcgattttacctatacgcgcgccaatattatcggcaaaccccgttattcgagcagcagcagccaggttcggtacaccaacgccctggtttcctggtctgatccggataatgcttatgctgatgcaatggagccggcgtttatcccggaactggtttcccgctacagttttaaccagctcgaaatgaccgcgattggctgtacgcgccagagcgaagcccaccgtaaggggctgtggggcatactgaccaacaataaggaccgcatggtcgaaattgatgtggggctggacggtcgcattcctcaacccggttatatcattgccctggcggatgagttgctggccggacgggtcaacggcgggcgaatcagcgcggtgaatggccgggtgattacgctggatcgtgatgtggatgccaaacctggcgaccgcctccagctaaacctgccatccgggatctcacagagccggactattcaggctgttaacggacgccggcagattacggtcacaacggcgtacagtgagacaccagaacgggaatgcgtctgggccattgaatccgatgacctcttcctgcagcagtaccgggttacaggggtaaaagagaacagcgatgccaccctcacgatcaccggcgtggcacatgatccggataaattcgcccgcatcgataccggcgctattatcgaccagcgcccggttagcgtattgccggcgggcaaccagtcacctccagaggatattgtcatcacatcccgctcggtcgtgaatcaggggatcagcgtcgaaacgatgcaggttaactggtcagcggtcagcggtgctattgcctacgaagcgcagtggcgccgtaacgacgggaactggattaatgtgccgcgcagctcgaccacctcgtttgaggtcagcggcatttatgccggtcgttacctggttcgcgtctgcgcgatcaatgcggcggagatctcgagcggctgggcgtattccgaagagaagaccctgaccgggaaagttggcgaaccgctgccgccgttggcgctgacaaccgtttcactgaccgcaggtattgaaatccgctgggagtttcctgcaggagcagaggatactcagcgtactgaactgcagtacagcccgaaccagaacggcaacggagcactgccgctaactgatttggcgtaccccggtaaaaagtatcagcagatgggcctgcagattgccacgcagttctggtaccgcgcgcgtctggttgaccgcctgggcaatgcctcgtcatggaccgactgggtgcagggaatgtccagcgataacgtcagtgattacttccagcaattggatgaagccattaaagatacggaaacgtatcagtcactggtgaaagagattgatacccgggccgtggccgaagaggtggactcggcaattgaagcagcgaaaaaggacgttgcttcacaggtaacggatgcgaagcaggaagcgcagcaactggtgcaggaaactagaaatgacatcgaacaggccctggcggatgaggcgctggcgcgggccagtgctattgctcaggaatcggctgaccggacagcagccatcgcgcgcgagtcggctgaactgtctgatgccattgcccgggagtctgctgaccgggcaaacgctattgcacaggaatcggctgaactatcggatgccatcgcccgggaagcagctgatcgagcttacgcgctggcagatgaagcccgggcccgggcaacggcgatttcagatgccgtgaaggatgaagctgctgcccggagtaaggctattgctgacgaagcacagaaacgtaacgatgctatcgctgcagaaaatgccgcccgagtgaaagctgtatctgagcttgacaccagaacagccgatgcactggcaaatgaaacagctgagcgtattagtgcggtgtccagtgaagcgaaagcgcgtgcggatgcattgttgaatgaggagaataatcgcgaagccgcgatccgttccctcaactcacagctgcagacggctacagagtcactggcacaacaaatctcccaggttgccgccggtacgggcgaacagtttgatcctctgaatatctggtattttgataccagcaatgagggctggaccgaagatgacaatggttacacgccaatgatcgtcacggatgatggatggttgaaagcggataacggtacttccagtgcccgctccccgaatgatttgggcatcgatgccgccgcctaccgcttcatcaagcttcgcctgaaaaaagtcggtaacccggcatggaatggacgcctgctctggattggcgcggacgaatccggctgggataatgcgcgttcagttgtgattgatgagccggaatatgacgttaacgatacggcgacggtcacgctgcatgatattccgtggctgccatcgcagcgcatccgtcgtttccgtttagatctggcgcagggtcagaatgaagagaattacttcttaattgactggctggccgtgggacgtccgacgccgggggccggcatggccgcgctgcagaacgagcagcttgcccggacgcaggcggacgcggcagaggcggcaaacagacaagacctggctgttcagctgcgaggctcgtatgacggaaatgatctgaccaaagtcagttctggtctgatttatcaggaacaacaggcacgagtcacaggggacaaggccgaagcttccgcccgacagtctcttgagacccggatcaacgacagcctgtcaacgataaaccagtcccttgatacgctgaatacagccgatgaggcgatggcatccgacatcaccggcctgaagtcatccctggccggaaaggccgatgcgtcggcgctgacgacgctgaaaacgcaggttaccacgcagggggacacgttggcttctcagggggccagtctcacgaacctgcagaatagcctgaaccgcctcagcagcgatgtgagcaaaaaagcagatgctgccgctgtccagtcactgcagaatcaggtaactcagcaaggtaaggatatcactgccgctaacagcagcatcacgaacctgaaaacgtcgctcgatacgactgacagcaatgtggcgaagaaggctgacgcgacgacagtcagtgacctgacatcccgtgttacatccgcggaaggaaaagtgtcgagtcagggcaacagcattacccggctgaacaattcgctgaacaatgttatcgcggattccgacgctgcttccgccattccaggcaaccttatcgtcaacccgtcctttgaacgtggaacggacgggtatatcggggttagtgcacagagcacggtggtggcagtacaggcgccgcgaaccggtacacgtgcactaaaagttgatcctggcagtgttgccccgggtcagactatcgactttgttaagggtcgcacttacgaggtaggtgtttgggttaagcagatcgcgggcacgacggacaatggcgccggcaacaataagttaagaatcggcaacagcgcaggtaatccagtactggaggttccgtataccggagctggtacggactggacaaaatacagtaagcgctggaaagcaacggaaacagcccgccttccagtaacactgaataactacctgacagccggaaatcgttattttgatgacttctatgtcatcgatgtgacagacagcgtcaatatagacgccaacgcctctgctatcgcttcagtccagaatacggtgacgcagcagggtaaggatattacgtcacagtcatccagtatcacagatctgaaaaacagtctaaaaacgacggatgcgaacgttgcgaagaaagctgatgctgccgctgtacagacgctgcaaaatacggtggagcagcagggcagagatatcaccactgcatccagcgatatctccggtctgaaaaacagtctcagcacgacggatgcgaacgtggctaaaaaagcggatgcttctgccctgggcgcgctgcagagcaccgtgacgcagcagggtaaagatattacgtctgccggtaacagcattacgcagctgcagaacagcttagcctcaacaaacagcgcggtgaacaaaaaggccgatgctcaggcattgtccgcattgaccggacgcgtctcggatgccgaagggaagctctcctctcagagcgatcagttgtccacgctggaaaattccctgcgtctggggagcctgatttcaaacggcagtctggacaacgacgccaccttctgggcggactccggctcaggctctgcgtttgtatatgaggccgccgaaaaagcgctgcgcaccaccacaggttctatccggatcgccaacaccacacgtattcctgtggaagtcgggatgacgctgacactcagctttgagtttaagacgacagagaccatttcggccatttcgtctgattcggtgggtttcattacggacctgaacgatcaaacgaactggctggtttcccaggcatcatggcttacagcggtcacgacagaatggcagcgacagaccctgacatttacgatccccgataaattcaccgggcagtatgtttaccttcgttttgctgcggggggctggtctccgtcgaacagagcccggctttacctgaaagatatcgaggtttattcctcaaccgggatcgccggaaaagcagatgcctctgcagtgagtgaactctctagccgtgttgagacggcggaagggagcatcacttctcagggtaacagtctgacgaatctgcagaacagcctgaacaccaccaacgcaaatgtcagtaagaaagccgatgcaagcgcactgcaaagtctgcagaacactgtgacacagcaggggaaaacgctctcctctgcctccagtgatctgtcttccctgaaaaatcgcctcgacaccaccgacgggaacgtggcgaaaaaagccgatgccactgctttgcaggaactgaaaagcacggtggagaatcagggcagggcgctgaacagccagagctcacagctcgtgacgctgaacaacagcctgtccgccaccaggaacgatttgagtaagctggcggcggatgttgatacggccgggaaaacaccgggcaaccttctttccaacgccagctttgagcgcggtacagaaggctggagtaacgacggcaataactggcaggtctatgccgcacaggggccgcataccgggaaaaacatcattcgcatgatcaccgccggcgatgcgatgctgacgcagtcttttgtcgttaaaggcgggcggacgtatcgtgttggcgtatgggtacgacgtaatgccgctgtcgtgattgctaatgccgggaataccaaaatcagcctgcgtgacgcgaacaatgttgaagtgaaaaacgttctgctgacactggaaaatatgggtaatgcctgggcggacgtaagtctggaatatcgtgcaccggcagacgccaccatgcagatttcactgcgcgcatcgctgagtgcgggtgaggtctacatggatgatgcgtatgtcgtggatatcactgatgcggttaacattgatgccgccgctgcggcgaccactgctctggaaaaccgagtttcgaaaaacgaaagtgcgataaccagccagagcaccagtctgacgaatctgcagaacagcctcaacaccaccaacagtaacgtcagcaaaaaagctgatgcgacggcgctgacgacgcttcagaacacggtgaagcagcagggggattcattatcgacccagagcggcaccctcacgaaactgcaaaacagcctgacgaccacgcagtcagatctggattccgcaaaagcgacactggcgaaaaaagcggataccgcagccctgtcttctttacagaataccgtgttgcaacaggggaacacgctgacctctcaggcttctcagctgacccggctgaacaacagtctgacaacgacacagtccgggctggatgccgtgaaagctgatgtggatgccagcgcgccgggaaacctgctggtaaacagtacattcgaacgtggacaggatggctggaacggctggacttctcaggcctccgttgttgagctacagcaaccacgtagtgggaaaatggcgctgcgtctggcacctgcttccggcacagcggcattgcagcagaatatttcggtactgggtggtcacacttatgagctttccgcgtggacgaaagtggccgcaggcaccactatggcgcccggctctgcgggcaataacaaattacgtatcgggaacactgacggatcagcggtagcggataagcagctcgatcctgctacgatttccacgacaacgtggcagcagaccaccctgcgttataagccggcgacggaccgcatcatcactgtcgggctgatgtattacctcagtgccggtatccagtattatgacgacgtgacattcactgatatcaccgaccgcattgatatcgatgcgaatgcgaacgcaacaagtaatctggattcacgggtgaccgcggcagaggggaaggtcacatctcaggggaattcccttgtttcactgcgtaacgacctgacggcagtacagtctgatatcacgaataaagcggatgcctcggccgtcagcagtctgtccggccgggttgataccgttgaggggaaagtaacgtctcaggcgtctgatttgacgaacctgcgtaacagccttaacacaactaacaacaatgttagtaaaaaggctgacaccaccgcgttacagagtctgcaaaacaaagtggagcagcaagggaatgatatctcttctgccggcagccaaattactgaactgaatgccgcgatccttgccgcgaaagcggccggggatgattacatcccgaatccgtcgcttgacccggcttataaccgcatggggtataccgtgcaggcctccgacgctgatggcgttcctgcagggtgtccgtttgcatatgtgatccgtcttgccagtcgtgaccatattcccgacatcaacaatattgccgtcacaccgggcgacgtttttgaaatgtctgcgctggttgcgtgcggtgcaggcagtgccgactttaatttttacatcggtcgggcaaccaccgttaccggcgatgtcaaagcgaggtcctccggtggcaacacaaaagccacagcagcatggacgcgcgtgacatggcgcttcaccgtaccgtccgacacgaatctgatgcgaccgttcctgcaggtgaaccagagttctccgttcggcaccatctggtatgcaactgactggcatctgcgcaacgtgacggcggcaaacaaggcacaaaataccgctgacaataccgcctctgccgttgagtctctgacgacgaaagtcacccagcagggtgatacgctcagcagcatcgggagccggaccacgacgctggaaaatgggctaaaaacgacgaataccagtgtcagcaaaaaggcggatgcggataccgttcagacactgcagaacacggtaacgcagcagggtaaagacatcacggcggcgaacagcgcaattacgaagctgaccggcgatctgtcgacgacgaatgccaacgtcaacaggaaggccgatgcaacggcgctgtctacgttgcagaacaccgtaacggatcagggccaaaagctggcctctcagggcagcagtctgacgcagctggcaaataccctgagtgatgccatgaccagtctggccgcggatggcaaaattccgggaaacatgatctccaacgggtcatttgaacgtggtcaggatgcgtttaccggatggaacaatgtgacctcagttatcgacgctcagtcccccaattttggcagcaggattttgatgtgtgctgcggggcttgccgggatcacacagaaagtgcctgtcgtcaaaggcaacacctataaaatcggcgtgtttgcccgcgctcaggctggttcggtcatgcaggacggaaacaataacaaactgcgtattggcggcacgagtttgctgtacgaccgccagtttgacaccgcgaatctgccaaccggctcatcatgggttgagctgaccggcacatggaaggcgacggtcgacgggatggtcgatgtgtcgatctattcgtcccttaaatccggcgcacagtatttcgacgatttctatctggtcgatgttacggatgaggtgaatatctcagccaatgccggggctatcagcggtctgactacgcgggtgacgaacgcggaaggcaaagtgacaagccagggcaacagcatcaccagcctgcagaacagtcttaatacgaccaacagcaacgtcagtaaaaaagcagatgcagaagcactgcaaaacctgaaaaacacggtgacgcagcaagggaaggatatctcaacccagagcagtaatatcaccagtctgcagaacggcctgaacacggcgaatgccggcatcgacagtctggttgccgataatgacgcgtcgaaaagattcgtcggtaacctgttggccaacccgtcatttgagcgcggtctgaccggatacagtggcggtggtgcttttatcacggtgattgatgcccagtcacccaacaccggcagcaggattttgtcctgcggtacggggactggcgcagtctctcagtccgtggatgtcacaaaagatcgcacctataaaatcggtgtttttacccgctgtcaggctggttccgttctcgatgcccagggtaataataaactgcgtattggtagcagcagcctgttgtatgaactgcagttcaggcctgccagctcatcatgggttgagctgaccggtacatggaaagctacgataacgggcaaagtggatgtctcgatcaattcctcactcaaatcgggtaatcagtatttcgatgatttttatttcatcgatatcactgacagagtggatctcgatgcgacaagcaacgcggtcagtagccttacttcccgcgtcacgaatgcagaagggacgatttcaagtcacaccggcagcattacgaacctgaataacagtctcagctcgctgaacaaaaccgtttccgggaaagcggataccagtacggtacaggcgctgcagaataccgtgacgcagcaaggcaaagatctggatgcaaacgccagtagtctcacatccattaacgcatctctgagcacgctgcaaagccagggattaaatccctgggtggacggttcattcgagtcatatgctgccggtaagagcctctatggtgatacggccatagtaacgacagacgtttcccgtaacgggtcgaaatctctcaaaatcacccgcaaagcgggcgaaaccggtaacagtgataaaatgctggggaaatggctatctgttcgaggtggcggtaagtaccgcttctccctctgggcatatatggacagcgatatgtcggcgccgaacgcatggagtgcaattgttggcctctatgcgcgcggtgagaatggtggagccaatcagtggccgggcgcggttaccataaatgagacgaacatcacccgtggaaaatggacattcctgacaggagtcgccagcgtggccgccgaccgcagtatcgctcagatgtggatttccactcgcggtccatcgggcggcgccgggttctcgctgtatttggatgatatcaatattgtcgatgtgaccgatgctcaggcagcgcagaccgatgcgagcgcggcagcgaatgcggtgacgcagctgacagcgacggtcagtcagcagggacgtgacatcaccgcacaggctaagcagttcacggagctgcagagcagccttaacagcactgatgcccgtattgcccggcaggacgaaactatcgcagccaatggcctggcgatggcgaatggttttaaccagatgcgcagcatgattggcgacaacagcgccgcgatcaccactacgaataaaaccgttaccgacctggaaaaatccacgacggaaagtatgacgcaactgacgtcgcaggtaggggatatgtcggcctctgtccagcagacggcatcgactgtggcagatctgaacgggaaactgagtgcgcagtggggagtgaaggttggcacgtcctccggcggtaaacactatgtctccggtcttcagctggggatggatggcagtggccagtcacagtttctggtgcaggctgatacgttcggggtatatgtccctaacggcgataaaagcaatctggtcttcggtgtcgacgggaacggtgcctatatgcagcaggctatggccaggaacctgacgattaactttggccagatttctgacagtctgcagtcgactgactaccagccaggttccactggctggcgtttgcctaaaagcggtgcttttgagatgaacggtaatgtcccaggagaaggacgcgttcagcttgattcttctggtctggctgtttatgaccagaacggtgttctgcgttgcaaaatagggagaatttga

SEQ ID NO: 267122 - DNA, 756 bp, Klebsiella pneumoniae
atgagccttaacgcgaattatcagaagttagagccaggcgatgaggttcgtctcctggagatcgatggccaggcgtttggcctggacgaggttttgtatttccacggctataacgttccccatactgcagccgaaatcctcgccgctggcggcgacctgaataagctgccggcgaaaagcatctggtggcaggggcgggagtataaagcctggccatgtgaaatcgaagggatcgagtcatccaccactggcagcgacgcgcagccaacgctgcgggtagggaacatcgacggaaagatatccgcgctctgtcttcattacgatgatctggctctggcgcgggttgtcatccacgacacacaaaaacagtatctcgatgcgaagaacttcccggacgggaatgcctcagccgatcctacgcaggagaaacggcgccttttcttcattgacgtaaagcattatgaagacgatgagaaggtggaatttactctctccagcccgtttgccctgcaggggataatgatccccactcgccagctgcatgcgatttgcacctggtgcatccgcaatcaataccgcagtggtaacgggtgcgactatgccggcacccggtattttgacaggaacaatcagccagttgatgacccgtcgcaggatgtctgcaacggcacgctcacggcctgcaaattacgtcatggtgagaatagtgaactgccgtttggcgggttccccggcacttcattaatcaggagctga

SEQ ID NO: 267123 - DNA, 339 bp, Klebsiella pneumoniae
atggctattgagatattcacctggagtccgcgggttaatccccagcagaccgttaactttcgtgtccggaaggcgcagttcggtgacgggtatgcgcaggtatccggcgatggtattaacacccgatcacaggactgggagctgagttttgtcggtacggaggactatatccgtccgattaagcagttcctcgaccgtcatgccggcacccgcgcgtttcagtggaccccgcctctggaagaggtggggctttaccgctgcgaacaatacaaaccggtgccgctgggcggcggaaattactcactttcagccacttttattcaggcatttaaaccatga

SEQ ID NO: 267124 - DNA, 3180 bp, Klebsiella pneumoniae
atggccagccggctggcggggctggcaggagccggtctttccatcggtacgatcgtcaccacgtccagacaatatggacaggcattatcagacctgcaggccatcaccggtgcgactgctgctgaaatgaaagcgctggatctggctgcgcaggaaatgggacgcacgacagagtacagcgccagccaggccgccgaggcgctaaagctgatggcgtcggctaaaccggagcttttaaaaacgtccgatggactgcagaaggctacgaacagcgcgcttatcctggcgcaggccgccggcacaacgctgcccgatgcgaccagaacgctggcgctctccttaaaccagtacggggcgagcgcgcaggaggcggatcgttatatcaacgtgctggccgccggcgcgaagtacgggtcgtcggagattgtggatacagcggccgccattaaaaatggtggcgtcgcagccgcacaggccggcgttggttttgagcagctgaatgccgcgattcaggtgctggcagagcgtgaaattaaaggcggtgaagccggcacggcgctgcgtaacgtcatcctgaatctggaaaagggcacggacaagagtctcaagccgtccgtggttggtctcagccaggcgctgaccaatctatccgggaaaaatctctccacggcccaggccgtaaaactgtttggcgtggagaacctgaatgcggcgtctatcctggtccagaaccgttcaaggcttgatgagctgaccgcttccctgaccggtaccaaaacggcgcatgagcaggcatccatcagggttaacaacctgaacggcgatttgctgggtctgagcagtgcgtttgaagggatggtcattaagatcggccagagcagtaacgggccactccgcagcgggattcaggttgccacggaggcactgaacagcctggcagacaatttcaacaccgtctccagcgtggcgctttacagtctgatccccgtgctatccacgaaactgaccgcagggctgcgggagaatatcgcggcctggcgggaaagccaggcggcggtaaaagcgcgggcgcaggctgatgcggatattgcccgcaaaacgctggattcgacagctgccatcctgaaacagaacgacgctgagtttggccactaccggcagatggagcggacggctaaacagtacgggatgaatatcagttaccaggatgagtttgcccgcctcatccgacaggaaactgaacaaaccaatctggccagccaggcgaaactgaaactggcggcggcaaaccggcaattgtcgatatcagcccgcgcggcctctgttgcggtgggcctggcaagaggcgccctggcttttgttggtggtccggttggcgcggcgacgctggctggatctgcattactgtatttccatcaacaggcaaaagaagcccggcaatcggccattgatttaaaagatgccgtagtggaaaccagtgaagcgctgatgcgcctctcgcttaaccagttaaatgtgaagcagttcgacctggaggataagtacgaaaaccaggtcgtgcagcgtaaccagctgatgaaagagattcaggatgccgacagtcgtatcgacagcctgaaagggtttgaccccttcggccagctggaaggggtgacaaaaggccaggcgcgtgcacgggcggatctcgaaagcgttaacgagggactccgcaaaactgaggaaaacattaagcgtgtcagtgatgcaaaaacactggctcagctgggtttatcgggaaaaataacctcccttacggacgatctgaaaggggcgttaagcacgccccctaaagagaccggagagggaaatccctggggcggcgatggcggtaccggcacggggaaaggcagtaagtcccaggtcgaccagttcaaaacgctgcggcagcaaattgaagaagcccatgcgtccagcctggccagaattaacctgcaggaaaaggacagtaacagggagctgcaggaagcggcgaagaaaaatggcgccagtgatgctgacctgcagcgcgcgctgttaatgaacgcagagaattaccagaaacagcgactggatctggccgcgcagtattcccccgcccaggaaactctgcgaaaagagcaggaagccagccgggacctggctgagcttttcaaagcccgccttcttgatgaaaaagagtaccaggccgcacgaataacgctggccagagataccgcgaaagagctgctgcaggcaaaggctgacgaaatcgcggcgcctaaactggatatcgccggtgaggttgatccactggtagcactccgcaatcagttaacgcagcggcaggctttgctgctgtcgtactatcagagcagcgcgatcagcaaagaacagtacgaaatgctgatgaagaaggcgacgaaggattctgcagattcgcaatatcagacgtcgctggagttatatcgatcacagggcgaattccagagcctagccgtcgggttatttgaaacggcccatgaacgctcgagcaacttcctgacgagcatgctgacgcggacgagaagctttaaggagaacatggctgacctgttttcctcgctcacacagtcaatcataaaaaacctcgttgatatggccgctcaggcgctggtcaccagttcggtcatgcaaaccattatgggcgtggtgggcgtcgggaccagcgttgtcacgggcgctgcgggtgctgcagatgcaggttcggggacggcgatccagaatgccgccagtaacttccagtttaacgccaaaggcggcgtctacgactcgccatccctcagtacataccgtaatcaggtctacgactctccgcagttcttcgctttcgcaaagggggctggcgtatttggtgaggccgggccggaggccatcatgccactgacacgtgccggcgatggttcgctgggtgtacgtgctgttggtggaagtcagaacgccggcggccagaacgccggcacgtcggaagggccaaaggtctatatcacgattgaaggcggaaatacctcaacgcaggcgccggctggttttgagcagtttggccagcagattggctcgtttgtggagaaaaaatacagggagctgatggcgcaggatatgcgccctggggggatggtctggaatgcagttaaaggacaacgttga

SEQ ID NO: 267125 - DNA, 252 bp, Klebsiella pneumoniae; identical to SEQ ID NO: 15676

SEQ ID NO: 267126 - DNA, 225 bp, Klebsiella pneumoniae; identical to SEQ ID NO: 25145

SEQ ID NO: 267127 - DNA, 321 bp, Klebsiella pneumoniae
gtgaaattcacagacgaagtttggaaagtgttaaacagtatctataagcatcagcatctctggtttacagaaaaaaactggagttggtacgacagccagtcaccaaaggctcagcagatgagtggccagccaaccattgttactggatgtgggagaccggtagccaaatggcatccgtggaatcaaatgtggtatctggtcactgttccaggaaagggcatcatgcatgaagctgcggacgatatatattcaactccccctgaaggccaatatatcgaccctaatgaattagattcctactggcaatggcgtccttactaa

SEQ ID NO: 267128 - DNA, 615 bp, Klebsiella pneumoniae; identical to SEQ ID NO: 64548

SEQ ID NO: 267129 - DNA, 474 bp, Klebsiella pneumoniae
atgaagcgcttcaccaccatatccaaagagattcgagtgtgtgtgatggggaagaacacatacaaagacatgctcgatatgcaaatgaagaaggaaggcgctgaagaacgaatcaaagagaagggaattcttccggagcgcgaatcttacgtcgtgtcctcgactttgaagcccgaggacgtcattggagccacggtagttccggacctacgtgcggtgctcaatcaatatcacgacagcgatcaacgaatagctgtcattggtggagaaaagctgtacgtgcaagccctcgcatctgccacaaaagtccacatgacggtaatgcacaagccatataactgcgatcggacgttgccgatgtcatacatcgacaaaaagtttgttgcaggtcaagggtctatcaccattcaaactgcggtagatggtgagacccatcccgtgaagttcatcacatatgagcgcgctcggccgtaa

SEQ ID NO: 267130 - DNA, 171 bp, Klebsiella pneumoniae
atgagcaatgacttgtgcttgggaattcagaatcgacgtgacgatctgaatgccagcatcgaggcgtccgccgtagcaattgagatggagatgaacaacatcgccgtgttggcgagagttgaagaactgcaccagtggaacgtatacggctggctcactgatgttctgtga

SEQ ID NO: 267131 - DNA, 144 bp, Klebsiella pneumoniae
atgctcttcaaaagctgcgtgaacaagcatggtatctgcaccgtgaagaccagcggttttatatcaaggaaacagaaaatctttctcgccagattgagcgtaacgctaaggaaattcctcagccaaaaattgatcaagctttaa

SEQ ID NO: 267132 - DNA, 828 bp, Klebsiella pneumoniae
atgagcgctcgcaaaaccggcgagggcaacgttgatgcaggtcgtcaccttcttgattactgtccaaaatatggcggagacaagcttactgcaggagtacgctccgaaagtttctggagtcttgtcggggacagtaatggggctttgaaagaaacatcgttgcgttcccgagtttctgacgttcgcagagcattattgcttgtactgcgtgaagctggggcatcgtttgcgcaagacattcgcgatgcacgaatgcttccacgagcagcaaaggctgctacgcccacagggacaattgataagttaacacggcagctcacattgtccggggaggaactttgttcagatggtcagcgagatgtaatgacagaactgctctacacgcaacttaaaccatatcttcccgaagcactaagcttagaaaaatttaaggggttgagcatcttcgaagatttaggcgaaaatgaaatactaaacatttctgctacaaccaactgtgaaattaacttcttgggaagaagcctcgatattggactcggtacagttgcaggaatgaagggtgaaactcatgccgcatctttaatccttgaatcctacggtgggaccagccgtaaatttgatgttgcactggggcttgagtatatttcaggaattgcgaccaaaaaaatttcaaagttacccaaaacccagcaggcgcaaatgcgtaacctttacgtagcaatgtcacgaccaacaaaattaatatgccttgcagcgaacgaaaaccgaatttcacagactttacgtgatgctcttatactaaagggatggcatatagaaaatgtgtaa

SEQ ID NO: 267133 - DNA, 1356 bp, Klebsiella pneumoniae
atgggtatcattatttgcctgcggttcggtatccgaatcggagtcggagtcgctgtcagaatccgagtcgctgtcagagtccgaatcactgtcagaatccgaatcgctgtccgagtcagagtcgctgtcggaatccgagtcgctgtcggagtcggaatcgctgtcagagtcagagtcgctgtccgagtccgaatcactgtcggaatccgaatcactgtcggagtcggagtcgctgtcagagtccgaatcgctgtcagaatccgaatcactgtcggaatccgaatcgctgtccgaatcggagtccgagtcgctgtcggagtcagagtcgctgtcagagtcggagtcgctgtcagagtccgaatcactgtcggaatcggaatcgctgtcggagtccgaatcactgtcggaatcagagtcggagtcagaatccgagtcgctgtcggaatccgagtcgctgtcagagtcagagtcgctgtcagagtcagagtcgctgtcagagtcggagtcgctgtcagcatccgagtcgctgtccgaatcggagtcactgtcagagtccgaatcactgtcggaatcagagtcggagtcagaatccgagtcgctgtcggaatccgagtcgctgtcagagtcagagtcgctgtcagagtcagagtcgctgtcagagtcggagtcgctgtcagcatccgagtcgctgtccgaatcggagtcactgtcagagtccgaatcactgtcggaatcagagtcggagtcagaatccgagtcgctgtcggaatccgagtcgctgtcagagtcagagtcactgtccgaatcggaatcgctgtccgagtcgctatccgaatcggagtcactgtcagagtcagaatcgctgtcagagtcagaatcgctgtcagagtccgagtcgctgtcggagtcggaatcactgtcggaatcggaatcactgtcagaatccgagtcgctgtcggaatctgcatcagcatccgactcaccgatatcacttcctgccacgatattaatcgtcagcgtagccgttgccgtatcaccatccgcatccactatcgtgtaggtaaagatatcggcctggccaacagcatccgcatcgccagtcgccttgtaggtatagctgccgtccgcatggatcgtcagctgaccgtaaagaccatttatcacaacacctgcagccgtcacatcaagcggcgtggtctgcacgctggaggcgattttgcttaccgtaatgccatcaccggtgtctgctacatcaccccctgcatccgcaaccagcacattgccggcaattgccgtcgaggtgtactgcgtagaatccgtgattgtcgcctgggcaaccgacagcagatttgctga

SEQ ID NO: 267134 - DNA, 366 bp, Klebsiella pneumoniae
atgtctgaaccacaaaagtctgaaccacaaaacgggcgcggcgcgctcttcgccggtgggctggccgccattcttgcgtcggcctgctgcctggggccgctggttttgatcgccttggggttcagcggggcatggatcggcaacctgacggtgctggaaccctatcgcccgttcttcatcggcgcagcgctggtcgcgctgtttttcgcctggcggcgcatctaccgcccggcgcaagcctgtaaaccgggtgaggtctgcgcgattccccaagtgcgagctacttacaagctcattttctggatcgtggccgcgctggtcctggtctcgctcggatttccctacgtcatgccatttttctattaa

SEQ ID NO: 267135 - DNA, 900 bp, Klebsiella pneumoniae
atgacttttaattcatatagttattttgcaacgattcaaaatcgattagatgttgttactgccattccaaactctcgaacatttcctgaattccttcctcagagaattaataattataccccaatgattgagttgtttcgagaaatagtaatgacttctcgaagtagctatgatgtattgcttaaaatacgtaatccaggtggtttttctgctgatgttcgtatgtctttattaaaaattttcagaagatgtgtatgtaccgtattagatacagaagcgacaaaaaaaatcactaaaatttccactagtgatttatataatgcatttggtgatttattcaaagatattgccacgttacaagcacaatttgcagacatcacaaatgaacaaatatcttcattagcatccttgttgggtgaatatgatgaccgtggtcagcaagggtatgttctgacagatttattctttgaatggtttgaagaaaagtttggcccatatttctcaataactggcccacgaggggcaggtcgggatatcgaactaaacaccatttatcctcagtttattggttcctgtccttgtgattttataatcaaggatttactttctaatcaagtaagagctattggctttgcccgttatgatagcacgcgaggaggatcacaatctgatgacagaacaggagggaataatgataaagtcaataaagccatgcagtttagtcgccaatcaggggaaaactttaaaataatatttctctccgatggtcctggattgactcataatgatacttggtatgaaacatgttatttggatgggcaatgggaagggaatgttagagtgacgactttaaaaacagcagatattagaataactcatgactggttgctaaatcagtaa

SEQ ID NO: 267136 - DNA, 510 bp, Klebsiella pneumoniae; identical to SEQ ID NO: 109551

SEQ ID NO: 267137 - DNA, 594 bp, Klebsiella pneumoniae
atgaaaaataataacgcaccattatatctctggttgctttggtgtacgctttgtctgtacatcactaccccatggcaatacttacgttatccatacactgacaacttatcattgccttatatgttatatttctgtgtggtggttgtgatttgcattttcccactacttttcagatgtgtacttcttattgtaaggtctgcatctaaatacgacttcacattctttgtgaagaagaaaaagggaagcaagaaatcaactatacatcttagcccctatgctgacacacgttgcccgaagtcaatgaggaaacactgggatgtattgctttctctgatatcaaaagcaattaataattatgaaatcattgtcatgcattcacatctctttactccagcaagaataaataaacttataaagagactggaatcttatgatttgagtttttcagttattacatacccacggaaaacaagtctgtacgaaaaattatcaattccttttatatatctcttgtttcagtggtctttcccgcatttgcattcggacggaatgacagtcgtcattcgtcctctccagacccaccacaccaattaa

SEQ ID NO: 267138 - DNA, 615 bp, Klebsiella pneumoniae
atgttaattcaaaatattaatgctaacgttctgaagaaaaatgagaaagaaacgtctcatgacaaaggctggggtattatggaacagggtgcaatagcacttgttgtaattatcgtacttgcccttgtttttggtggattgtatatgttgcgttcacgaaccggtgtggcaaatgaaagttcgaacatacagacaatcatcacaagtactcaggggctgctaaaaggtagcgatggatatacgtttaccagtggagccaaaatgacgggtgctctcattcagatgggtggcgtacccaagaccatgacagtgcgtggtactccatcatcaggtacagcaacgctctataactcatggggcggtgccgtaactgttgctccggcttcaacatcaggtttcaacaatggttttaccgtcacctatgaaaaagtcccacagggtgcctgtatccagattgccacacaaatcagtcgtactggtttaactaacggtattaccctgaacagtacggctcacagtgatggaaaagtcactactgaagaagccagtgcgcaatgcacagctgataatggcagcaccggtacaaacaaactaatcttcaccatcaatggctaa

SEQ ID NO: 267139 - DNA, 2169 bp, Klebsiella pneumoniae
gtgaaaattttacttcgcgcactctgtgcaggccttgctatatcctcactgccggcaatggcttcagtgacctatcaggatattgtgtctgccgcaaccaatcctgacgatctgtctcgccaggcgctggtcacgatattcggtgatgtagtcaccaatccactgtcaaccagcgcccccactctgatcggaagcatgttcggggcgttcaacagtatcatcgccgtacttgccgttgtctggtttatgttcattggtatccgtcatgttgtgcgttcggggcatcagggacaggtattcagcaccggacgcgatatcgtcggcacactgagtgtcgttgcaggttttctgatgatcgttccaaccggaaatggctggagtatcgctcagctcattatgttatggggcgcatcgataatgggggttgggtccgccaatgtgatggtgcaacttgccgctgataatatcgcaaatggttattcaatgactgtacagccagttcaggcatccacacgaacagcagcgcgtggcatttttgaaatggaactgtgtaagtatgcggttaacgcaggactaaatgattttaatcagacggccaaatcctcgacttcactgatgacagaatcagctaaaaccgccagtggtaattacactgtcacggtatccaatggcagcggtatctgtggttcagccagcctgtcagtagaaggaaacggaacaacagatcaatcgacgattggaaaattctttaatcccttcagtaaaaacgaatacagcggtgttatctcagcacaacgtgcagccatggataatatgattagcgacatggacaacgctgccagtgagtttgtgacaacatttctggaaaaaagaaattctggcaacggaacattgccggatatcgagacacggattcagagagcagccgacgagtatgaacgtgctgtacaaaaatcgctacccactgataacggagagcaatccagaaaagaggctcttaaatcttatctcacaacctatggatgggtaacgcttggcgcgtggtatcagacctttgccactgctaaccagcgtctggcagagctggctgacagagctccagctgtaacttcaatgtcatcacttggggaagttggcgatactgatttatttagtgctgttatgggggcatacaagactcaattgcagaattcaacttataccccacctttaggtactataacttcagcagacgaacaactactttcaaaaacaagcacgccacaagatgctttaatcaagcccacagagaagtttgggcaatggcttacgaacaatattgccaccgagtggactgattcgggtacaagtagcaatcaagttaatccactgataaaaatgaaaaatattggtgataaaactatggtcgctgcagagggtatttggattacttatacatctgctagagttattacttcaggaactgggagttctatatttggtaaattcatagatttgacgacaagtgctatttcaacactaaatgccttacttgaggccttagcgccccccgtatactttctgttactactgctgttttgtgcaggattctctttatctatttatttaccatttattccgtttattttctggatgactgggattggtaactgggtcattagtgtattaatcggatgtacagctggacctctgtggggggcaactcatctaggcacatcacaggacagagggagtcgtgctgcctacggttatatatatttaatagacagcatgataagaccacctatcatggttttcggattcttttttgcctctgtagccattatagcaataggtactatattaaactttttattcggtgctgcactgaccaatgtacaaataagttcatttacaggtatatttagcctcgcaggtttcttacttctttatgctagaagttgcacaaccattgtagccgcagcatttgccttacaagcatacctcccagaccatgtaattaatttcctaggaggacgtgatggtgtaaacacgcttggcaatatggctggttcaataaaagagatttttgctggcagcaatagaaacataagacacgcacctaatataagagaggagcaaattaaaaggatgaataacgacaacaataaggatggaataaagggataa

SEQ ID NO: 267140 - DNA, 615 bp, Klebsiella pneumoniae
atgattggagcatatgcaaaccgtggcggcacccattctaaaaaagaaacatgcgtgatcgcattcgcacttttctacattattttcgccgtcccattactaatcatttggaatacacctaccagttggggactagcagtaatcccaactggattcctactatactccggatataaaaatggaagaaagaaaagagcaatcgtaaataatatcctagaacagataaagactgaatatcatgatgtattcgatccagacccatcttacgaacacaaatcaataccatcattatatttcggaattgatatcaaaaaaggtactgcgttatatattcggctttaccccaataaaacattagatgtcattggcattgatattgataattttacacggacagtagtaagagaaaactgtatggaaatacacacaaagtatgtcaatatgccaatgttagaattgcctattggtgttaactctgctcgttctattgcaaacacattgcacgcaatggcaagtcgaggatatgattaccctgtcgactttcctcgcctgattcaggaaaagcgtaaggagtgggagcagattgcaggcatacctgtagccgaagtattttaa

SEQ ID NO: 267141 - DNA, 1086 bp, Klebsiella pneumoniae
atgtcgcaattaaaacaacctattttcctgaaaaagataaaaaaagtcatcaacacaatccctgggcttgaagagcaaatctttgcatgccgaaataaaaaacgcagcgacaatccattattatttatcgacagaaaagacgaagaacgcatactaatgagtcgtctccagagccaacaaaaaaatgaagaactggcttctaaactagaatctttatttcatgaaaacgaattatcgtcaccacacagtattttgtgttttatatactggcgctatacaaagaaaatttatcgactaagcgaggacatcatcagtgatgtggctaacacctatgttgataacattcctgcacagacccttaaggaactcccttcatggagtatctatgtttcagccgaaaatctgcatactatacttcctacgtcctatccgatacatggatttttcttttatccatttttggacaataatggaaatattatccggcttttcattattgatgatctgaaacaaagtcaaggaactacagggctaaaagaaaaggatgttgacgtcgtcaataatatcatcagaataaaggactctcgtgaaggacttcttgactccagaaagatggagtgtatcgatggtgaagtcgtcgtaacagttaacgaaaagctcaaagatttcagagacagggagtttaatcttcttaacgcacagatatcaatggtgctttatatctgttcacagatcaatgatataaaagaaaaaaatcaatttaaacggtcagaaaagcacaaaaagcatgttcacactcaccatgaactaccagcacaaaacattcgggagtgggacgttggtattcgaatggggcaagccatacggcaatatcgccaagcagaacccacagggaaagagcggacaacaataggtagcaaacgtcctcatatacgccggggacactggcatacatactggacaggaagtaagaaaccagaactagcccatgagcgtaaacctagattaatatggttacctccggtaccagttaatttagaagacgtaaacaaactaccggtggtaataacacccattgataaatga

SEQ ID NO: 267142 - DNA, 207 bp, Klebsiella pneumoniae; identical to SEQ ID NO: 10660

SEQ ID NO: 267143 - DNA, 525 bp, Klebsiella pneumoniae
ttgctcgccagcctcgacacgttggcgcagttcggcaatacgctcagacgacagggatttcttcctgccacggtaagccccgcgttgcttggcgagcgcaataccctcgcgctgacgctcgcggatcagggcgcgctcgaactcggcgaacgcgcccatcaccgagagcatcaggttcgccatcggagagtcttcgccagtaaaactgaggtgttccttgacgaattcgatatgcacgccgcgttgtgtcagcgtttgcacgatccggcgcaaatcatcgagattgcgcgccaggcgatccatgctatgcaccaccacggtgtcgccggtgcgggcgaagcttatcagcgcttccagttgcggacgcttgacatccttgccggatgccttgtcgctaaaagcgcgatcaaccttgacgccttccagttgccgttccgggttctggtcgaaggtgctgaccctgatatacccaatgcgctgtccagtcatggaattccctgcaaaatgtcagggaagactctatga

SEQ ID NO: 267144 - DNA, 2220 bp, Klebsiella pneumoniae
atgaaaaagataaatttgtttttattaatattgctgggttgttttataactccagcgtttgccggagttgacctattcggtttgactggcggcacagatgaagtaagtaagaatgtagttaagtattggaacccctacgctacaaatataacaggaaccgttttacaagttttttcaaataaagttatgttagtcggtggtattatacttgcatatacgcttatcgttggaaccatgtctacagctcacgatggtgaaatgttaggtaaaaagtggtcttctgcttggcttccaattcgtactgcaatagccccaacacttttacttcccgtcacgactggaggatacaactgtgttcaggctattatcttatggttagctcttcaaggcaatcaatggggaaatgaaacatggaatgctttagctccctccttaattactgatagtacatacatatctgttgataataaaatattgatacgtcagaacgttatgaacaccttatattccgctgcatgtgttaacgtttataatagatacgctaaaaaagctaacgatgcctcaagatggggacagttatatactttaatgagtggaacacgcttttcaacggatgaattagttggttatagattcggtatccccggagatggtgatccttcgttgggtggcggtatagatttgtgtggaagttcagttcttaaacttattgatgaaaagaacttcaaatcagaaaatgctatcatagatacaggtaaaattgctaaagcagttcaagaagcacaaataaaagctaatgatattttagtgttaggtgctaagcagtatgcagattatcttgttgatgctcctttacaaaatgccgaagctatcaataaacaaatagacttaatggttaacgcatatagtgcctatgttcaggcttcagcagaaaaagtaatgaaagatgctttatcgcaagatgaggttgatagaatgactgaaaaaggttggacttatagctatacatattatgcgagaattgctaatgctatttcagatgcaaacgctgctgttaatagataccctacgagcacaatgaattatagaggtgatgaggatgtgtattttaatcaacaattccctccttcttctttagcgactttaaagagattgcaaacattattagctactgctaacaagtataattcaagtatgaaagattcctctaaaagtgatgatggcgcttatcagaaagttattagtgctatcggtggtaatatggctataatcaactctcaagatgaatctaaaacatcaagtttaatgccactaacagtttctgtaaatataggttcaaggatgatactatccgcagaagcggcatatatacttgtgacgggcggggcggttgcaggtggtagtattccatttgtaggcgatggcattcagaccgcagcaataatattatcaccgatgttaaataaaatattgtcaacaatgattaatgttggtgatgttctcacattcgtaaacccaatgcttccttacatgattggattcttttgtgtaggcgcatattacatattaatattcgaagcattagctggttctacactacttgctgctgctttactcttcccggatcaggatggtgttgttggtaagcaagggcaaggatatatgcttgcgttaagtgttttactaagacctacgatgaatatgatagggttagcaggttcatatgtaataacaactataatgtttgatttgctcaactcaactttcttcaccgcagcgagtaatacagaaggtggtttgcttggtatcaacaaattcttgacgatgattataatatatacatcagtaatgatcacaatgcaggttatgtgtcttaaactcctttatataatacctgatactatttttaaatggatcggtggagcttcttctgcagttcttgggatggtatctggacaaactgaatcagcaatgtctaaaggtatcggagccgctgcgattggttcaggggtattagctaacttgatgcaacataaacatcagcaacctaaaaactcaggaaataataatgatctaactggtaataatgttccaaaagctactcaaggacgtaatgaagaaagctcatcaaacactgatactacacagaacacccctcaagataattctaaaggtgatagtggtcaggatataaatgactttgacattgataaaaaataa

SEQ ID NO: 267145 - DNA, 570 bp, Klebsiella pneumoniae
atgaataaaattgaagattataaaaaaaatagcgcattaaaaaaagttgttaaagttgtttcatttccatttattttttctggtaagttaattgttttgccattctatccagtatatctatttggaaaatatattttacattctcttttaagagcacaagggaagtttgagcatgaagtaaactcattcgatacatggtatgcgcttaaagatataaatgaagagatacttgaggataacatacgtgctacagcgttatatgcatgggttaatctaatcttttcattgttaggtttcgccttaacttttcatttttacttgaaaggtgctgaggctatcagtgttgcttcaggtgctgttttttcctttgtaatccttactatgtattttcattacgctgtttactgtcattgttttaaaacacgttcattcgacagaaaattagatgtatttaaatccatacacagcctttttccaaatgtaatgtatgagggcgttaaggtgaaaagtgggaaaaaaagcgttcctgctcaattctacccaaagggtaaaaagattataaaaaaataa

SEQ ID NO: 267146 - DNA, 288 bp, Klebsiella pneumoniae
atgattgatttatacatccatacagcacaagcgttaagccataccttttatggtattccatactttttgtttaacgtagttttatctttagctttcacctttttggttgttttaccttttggtaaggtatctcaatctggtaggttccagcatgtaagcactaataatgctgttttcgctaagttagttggttttccacttttgattggcgtgttgttaacatatggtatgactctcatttctttattgagtgtattcaacaagattttcgatttaggctggttctaa

SEQ ID NO: 267147 - DNA, 1182 bp, Klebsiella pneumoniae
atgtgtatgaatcctttcccgcagcaaaacaaaagctatcaattctattacgatgaatctaataacgttcgtaaactatatctttccaaacaaattgatggttataacattgaccatgatccagacaagcacaacagcgtaaacttcgtgttagccggtgttgctcatactggttcctcatcgagtgctgactttgatgatttacgtcagcgcatacagctacaagccaacgctaaagagttcaagctgaaacacttagctaaaggcgacttcctgactatgctcacctctaagaagctcacagcgttctttgagtggcttctctatggtgatctatacctacactacttccacctgaatatggagtactggggatacgtggacatcattgatgattgtatcctgttcggacgtgagaagggcttcatcccggaaatgagtgatgaacagctctatggctacatgttggcaaacaaggacgctctacacacctacgttaaagctaacaaggttcagttcatccagttcctcaagtcctatgacttcccatacatcgaggggcgggagaaggatttcatacaagggctatcaagccagatctccactcattgcgtaaacctctatacagctaccaataaagatgatttccagctccggttagctcatggcctcctgcagctcctgatggcctgctctgaccaaaacatggatgatatgacactcactatggatattagggatgaaccgcctacagacgacgataaccgccttgttgatggcttcgctatgttctatcagcatcgggcgcaaatgttcgaggcttccagccatatctttgacatagagaaggtagtggaagcagatcttcaaaaggcagcagaagccaaccctaatctaacgcttaattactctttcgctgattcaaagctaaatcctctggttcaagtgagtgatgttgtggctggctttatgcagcactattttgattacctgaatagcaacagctatgaaaagattaaacatgacagaaacagtcttaacgaaaggcaaagattaaatatggagtttttaaggctcctgataaacaaatctcatgataataacccaacattattacattgtgttatgtcagctttagaacatgaaaaacataaagcatttacttacccggatgaatcataa

SEQ ID NO: 267148 - DNA, 648 bp, Klebsiella pneumoniae
atgggtaaacagtataaagtagttagtattaatgatgttttagataacgcagcattacaaacaaaagaatataacagtaagcaagaatattatgatgatgataaaacctattttcaaatgttccatgataacgctgaaagtataataaaatccactccatccacatctaaatacacttctgatgaaactacaggtgatttagttcttgatcttggcaataaaaagattgatatatctaactatacagaggaagattacaaggctttatctgatgatttatcacatcaacttgccgcaaaagaaattgaagatactataaaaaccgatcctgaactttctgatttgaatagaagattatcaaatggcgaaatttcaattgataccgatagagaatatgcgtcattaagtgatagtaatggtgagcttgtcttttcaatagaatctaataaaaaccataatccatctaaatctttaaattctgatgagggattccgttttatagcatgggatggtgaatatggcggtgatcagcctacattaagtgatggtttaaaatcagcgcaatcaaatatccagatccttgaagcagaggcggcattagaaatagatgaaccagaacaaaaatcaagatcttcatacagagcataa

SEQ ID NO: 267149 - DNA, 696 bp, Klebsiella pneumoniae
atgaaaaaaacagatgaattacttaaaaagaaactgattaaacagattcaggcaatcagtgataacacacataaaagcttttcagcctttgcttttgcggcagcaaccgccgcaagggatacaacccgactctttgcctctgagatcgaaacaggagattttttggtaaggccggatgtatacgcaagaacacgctacagcaagatttgtgatgcgatagagacatacatagagctggtatcagtctctgaaccgtatacagacctgttaagcgatgtattccatcaactacagcttgattacgcatcacaggccaagagaacaggacagttccatacaccgagttcgttagcaaatggtgtagcaagattcatgggaagtgagatctacaaaaccgaaatggatttgtgttgtggtatgggggcgttagctctggcaagggctaagtatgctctggagcaaggtaagatggttggtgtaatgaaaggggtagatattgatccaacctcgatagcagcatgttttgctcagttggcatacaacaatctaaaaaatcctgtatttcataccattgagttaaagtgtatgaacgctattatgtattatggtgatgaatgggatatttactatcatatcaagctggatgatgaaaaatcgcatcataatgctgagtatttagatttagcaacagggtga

SEQ ID NO: 267150 - DNA, 546 bp, Klebsiella pneumoniae
atgaattattatatggttaaaccatttcgaataggaatgatagaaaaagatataaatgtgaaagagtcagatcagtatgtgattattgatttaattagttctgaagaactactttattgtgaagataactgttttttgataacacctgaactattgttagatctaaaggaaaacaatctgaccaatgttaacgtagtaaaacctaaaaatatgaagtttagcattcaacataacatggattatccaaataaaagaatgcgcgactggtataggttgatccctttcaaatatgatcaatcaaaaaatcaagaaatgtttctcgaccaaaacgacaaccttattgtaaatgaacgaattttcaacatactgaaaaagcatagaatcataagagcaaagtatactgaatttcatatagatgaggctaaagactttgaagaagaaattgatgaacaaccagtattcaaaaaggacataaaaaacagctatagagacttgttagtttttgtagtaatcatactaacggttgcatacatattttttaaataa

SEQ ID NO: 267151 - DNA, 258 bp, Klebsiella pneumoniae
atgaaactgattaccttactgtctaaacacttcgacgttgaaatagctgattttgagatggaagatgaaaccctgcccggagcaatctggatttatgaaaaggggcaagactctgaaccagtggtgatcctgaaaccaacagaacagccgggaaactggaaagttggaaacatctactctgcccttcctcatgatgccatcctttcagaagccaccataaaggaactggtaaaggccgggaaggtgctgaagggctaa

SEQ ID NO: 267152 - DNA, 285 bp, Klebsiella pneumoniae
atgatgtcaggtcttgatggtggaaattttatccttagctcaatggctaaggaaagggtcagatcaggtctacttgatagagcaacaatacaaggctctaaaggcgagtataccgtgatttttgatggttcagagtgggaaggtaagccattagtcttatgtagctcaagacagccatacgaagcacggctcttcaaaagcattgatggtgcggtagccgaactaatgcgcataggtttaagtgaagcttcaatcaaaaacaccaccaaatcgaacgataaataa

SEQ ID NO: 267153 - DNA, 483 bp, Klebsiella pneumoniae
gtgaccgccgcggcgaagcgtacccttgcatccccgccagcccggctaagatggaggcacggcacagcccgcacacgacacggcggccacataactgaaaacccacaaggccatgcaccgcatggccgggtaaagcggagccggcggcgacttcctttgtgctctgtccggggactggcaggaaaaggcggggattttccccgccatcatcagccccggatttttgcgagggcatccgccatgctgcggatttcggcccgggcctcccggaccacctcccgcagaacatcacggtcaaaccagcggcggggcggttcatccggtatacgcagcacatcgcaggccagcccactggacaggatatgctccacacactcactgaccaggtacatttccactgccgaaaaacgtgctccccggttcacgatggcatcgagcaccacgggcagattttcgtcgtcttcatcgagccagcaggggtga

SEQ ID NO: 267154 - DNA, 426 bp, Klebsiella pneumoniae
atgcaatatgcgaaacctgtcactctgaacgttgaagagtgcgaccgtctctcctttctgccttacctgtttggcaacgattttctgtatgccgaggcgtatgtgtacgcgctggcgcaaaaaatgatgccggaatatcagggaggcttctggcacttcatccgcctgccggacggtggcggttacatgatgccggatggcgaccgttttcatctggttaacggtgaaaactggtttgaccgcacggtcagtgctgatgccgcaggcatcatccttacctcccttgtgattaaccgccagttgtggctgtaccacgacagcggggatgcagggctgacacacctgtacaggatgcgtgatgcgcagttgtggagccacatcgaatttcatcctgaatgcaacgcgatttacgcggcgctggactga

SEQ ID NO: 267155 - DNA, 423 bp, Klebsiella pneumoniae
atgtactgtactgttaaagaaattatccgcgaagtgctggatacagacgtgccggacagtgaatgcgtttttgccgtggtgctgacccgtggggatgtgcgtcacatagcccaggactggagtctgacagacgatgagctggaaaccgtcatgcagcggctggacgatgcctttgagcatggtgcggatgtcagcgttgttcacgacgttgttcgtgaactgatggaagaaaagcgcgccagccgtcaggtgacagtcccggcggtgatgctggaaaaagtgttggcgctggcaggcagtgaaatgaagcgcctgtatgccgtcgggagtgagaacgggggcgacggtgatgcgttcgtcagggaagaacgcgaagcaatggacgttgtgttacaggcgctggacggggagcacatgtcatga

SEQ ID NO: 267156 - DNA, 387 bp, Klebsiella pneumoniae
atgaaatacaacaacccacttgaaatagcaactataacaacaaaagttttagcacattatatttatcaagcaatatcagaccttgaaaaagaagattacattaaatatgacaacgccgattatatcaaagactatttagatagctcaattgattcattaggaagcgatggtttttataccagtgttatcaattcgttttatggtataaatcatgattttggtcatgactactttgatacagaggaagagttaaaagagtatgttttaaaagctaacttatatcttatcaatgactctttagctgttgatgatgtatcagatgaatatgatgcttgtgagctggttttagaaatgcttgaagctgacagaaacgaaaacgatgaataa

SEQ ID NO: 267157 - DNA, 576 bp, Klebsiella pneumoniae
atgtgctgcgtataccggatgaaccgccccgccgctggtttgaccgtggtgttctgcgggaggtggtccgggaagcccgggccgaaatccgcagcatggcggatgccctggcaaaaatccggggctgatgatggcggggaaaatccccgccttttcctgccagtccccggacagagcacaaaggaagtcgccgccggctccgctttacccggccatgcggggcatggccttgtgggttttcagttatgtggcctcagcgtcgtgtgcgggctgtgccgtgcctccatcgtagccgggctggcagggatgcaagggtacgcttcgccgctgcggtcacccggtccctccttcccgtctgccgtgattttccggtcgttcacccgctcagatttcgcggtctcaccctccaactcccgccagccgtgtgcgtcaggctgcggcttcccttgcgccctgtgcatccccgccttatcgcccggcttttatggaggcacggcaccgcccggtgtcgcggaatatgtgaacaacggaggaaaacatcatgcaatatgcgaaacctgtcactctgaacgttga

SEQ ID NO: 267158 - DNA, 258 bp, Klebsiella pneumoniae; identical to SEQ ID NO: 267151

SEQ ID NO: 267159 - DNA, 297 bp, Klebsiella pneumoniae
atggcagataaaataaaaatctttttggaaagtcttaccgatgagaatagtaaaaacagtagaaatattaaaagtgtttctatgctaatagtaggtttaggtttatggttggtttcatattcagttataagtattttatttaatagttattttggatttgattcagatgtgatgggtaaaatatttagaatgcttgttataggcggtggtattactcttttgggttcaatcactccgtggatgtttagacaagataaaaataccattgatgctatatataacccaaaaataaaataa

SEQ ID NO: 267160 - DNA, 192 bp, Klebsiella pneumoniae
atgaatatcagcacagaaacccgcgaaattctgcgcaattacaaagccgtgattaatgcgcggcgtcgtgaaatggggcagaaaccgctcaccactgcgcagattgttgatgaaatctgcgattttgtggcgaatcagcaggcggttttccttggcggtcagtacatcctgcagggcagcagaaacaggtga

SEQ ID NO: 267161 - DNA, 825 bp, Klebsiella pneumoniae
atggatgaggtatttggagaagaaaacttcaggaatttaattattagaaaaaaatgtagttcaaagaactacacgaagaatcagtatcctaatattaatgactatattttattttatagtaaatccaaaaaaatgacatttataaacccaggtattcctgcagagttagattggatttcaaaagaatataataaaagagatgaaaaaggtctttttaaattagttcctatccatgctcctggcacgcgtaatggtgaaacaggaaaaccatggagagggatgaatccaccgccaggaaagcattggcagatgtctccagagaaattagaagaattagatagcaagggagaaattcattggtctaaaacaggaaatcctagacgtaaggtttatcttgctcaagacaagaaattacctttgacagattattgggacaaatttagagacgcccatcatcaaagtatcaagattacaggttatccaactgaaaaaaattttgatatgttgaaaaatattattacagcaagcactaatgtcggagatcttgtattagacccattttgtggttctggtacaaccttgcatgcagctcaagaattagataggaaatggttagggatagatcaatcatttcaagcaataataacttcaatacgaagattaaaatatggtttagaacctatgggtgattttgtgaattcaaattcttcggagaagagcaaacagcttgaattatctgttcaagaatttaatttcattgtcgataatgatgtttattgcaagcatactaatgaaatagaactactagtaaatgaaattatttaa

SEQ ID NO: 267162 - DNA, 528 bp, Klebsiella pneumoniae
atgaaaaacactttaaatacaagaatacagagtataagaaacagaggtatattctcaagaagaaacagaatgctattttctaatgacgttgaaactgttaagtcttacattcactttgctggaacttctgaaataaacactacagatgaaaatggtaaaacagctttgttcggggcaagttttgaaatagctgaacttttaataaaagctggtatagacgtaaaccataaggataacttcggtaatacagcattgttctttagtgattttaacagcacatggttgttattgaataaaggcgctgacattaacgcagtaaacaacaataacatgaatgcgctatacactgctgatacgtctaaggcaaggatgttaatcaaatcaggtataaacataaacaataaatctaaacttggtcatactgctttatattacgctcacttattaaatgatagaaacatgatgagtgttttaatggatgccgggatagaaataacccataaagaacaaaaaagatacgcagcataa

SEQ ID NO: 267163 - DNA, 309 bp, Klebsiella pneumoniae; identical to SEQ ID NO: 230657

SEQ ID NO: 267164 - DNA, 228 bp, Klebsiella pneumoniae; identical to SEQ ID NO: 267105

SEQ ID NO: 267165 - DNA, 357 bp, Klebsiella pneumoniae
atgacttctcaagtcgctaacccaccggtgcagtcgatacgcctgctgttcagcgcattgctgctggtgatgctgctttcagcgctggatcagaccattgtctccaccgcgctgccgacgattgtcggcgaactgggcgggctggacaagctttcctgggtggtcacggcctatatcctcagctccaccatcgcggtgccgctgtacggtaaatttggcgatctgttcggccgcaaaatcgtgctgcaggtggcgattgggctgtttctcgtcggctccgcgctctgcgggctggcgcagaatatgacccaactggtgctgatgcgcggcctgcagggctcggcggcggcggcctga

SEQ ID NO: 267166 - DNA, 264 bp, Klebsiella pneumoniae
atgagaaggtctaaccaatatagggagtgttttttccctaaatacattctcagccctgagaaaggcgcgaatgtcatgcttaatatacaaatccatatgctgatcaacaacgagagcttcattaagctctatctgaccaacagaactcaactccctgattctattaggcctaatagcccacaagccaaaagcccatcctttaacatgtattctatttccatctctatatacttctggattgttcatgtcaggcatgaagtatga

SEQ ID NO: 267167 - DNA, 1152 bp, Klebsiella pneumoniae
atgcagaatgtcgaagacgccgttggtcatcaccactttctcgccgcgtttgcgcgccgccgcaaccgcctgtttgagttcctcttcgctcatcacgccaaagccggtctcagcccggccgcggaccgcgttttccagctcgacaggggaaacggtggatgtacccagcttaccgaccaccacgcccgccgcggcgttagcgaaatagcaggcctcttccagggtgttgccggacgccagggtcgccgccagcacgccaatcaccgtgtcgccggcaccggtcacgtcgtacacttcctgggcctgggtcggcatatgcagcggcggacgccccggctgcagcagcgtcatcccctgctcagagcgcgtcaccagcagcgccgacagttcgaattcggcgatgagcttcatgccgcgctcaacgatctgcgcttcatcctggcacttgcccaccaccgcttcaaactcagagaggttcggggtgagcaacgtcgcgccgcgatagcgttcgaaatcggtgcctttcggatcgatcagcaccggcacgcccgcttcacgtgcgagtcggatcatggtctggacgctggtcagcgcccctttggcatagtccgaaaggaccagcgcgccaatagagcccagcgcctgctgaatgcgctcgtgcatcggctgcggatcgacgccggagaagccctcttcaaagtcgaggcggatcagctgttgattgcgcgacagcacccgcagcttggtgatagtcgggtgagtcgggacggagacgaagtcgcacttcacattgacgttggccagcgcctggctcagcgcgcgggcggcgtcatcaatcccggtcaatcccaccaggcgcgaggttgcccccagcgaggcaatgttcatcgctacgtttgccgcgccgccaggacgttcttcgatattttccaccttcaccaccggcaccggggcttccggggaaatacgactggtggggccgtaccagtagcggtccagcatcacatcacccaccaccaacactcctgcacgttcaaactccggcagcgttactttcatgactctctcctgcgagacgcaaactttgcgcgcgataatagcacacccgattttatagttaagccatcagccatttctgccagctggcgctga

SEQ ID NO: 267168 - DNA, 441 bp, Klebsiella pneumoniae
gtggattacttgcccctttttgccgaactgaaacaaaggcccgtgctggtgatcggcggcggcgagattgctgaacgtaaaatcaagttcctgctgcgcgcccaggcgcaggtgcaggtggtcgctgaaacgctgtcaccggcgctggccgatctggctgcgcgccaggcactcagctggcgggcgacggcattcagcgactcgctggtggatgatgtctttctggtgattgcggccaccgaggatgaggcgcttaaccagcgggtatttgcggcagctaacgcgcgctaccggttggtcaacgtggtggataaccaggcgctgtgctcgtttgttttcccttctatcgtcgaccgttcgccgctgctggtggcgatctcctccagcggtaaagcgccggtgctgtcgcgcattctgcgtgaaactggcgcaaccatctga

SEQ ID NO: 267169 - DNA, 1863 bp, Klebsiella pneumoniae
atggaatataaagcactcgcgcaggatattctcaaccgcgtcggcggcaaagagaacattgtgagtctggttcactgtgcgacacgtctgcgttttaaactgaaggataacggcaaagccgatgccgaagggctgaaggccaatccgggcgtgattatggtggtggagagcggcggccagtttcaggtggtgattggcaaccacgttcacgacgtctggctggcggtgcgccaggaggcggggttaagcgatgacagcgaaccggttgccgaggaaaaagcggccaaaggatcggtgttaagccagcttatcgacatcatctccggcatctttacaccgtttatcggcgtgatggcggcaaccggtctgctgaaaggcctgctggcgctggcggtgacctgcggctggcttacgccggagcaggggacttataaaatctggtttgccgccagcgatgcgctgttctttttcttcccgctgtttcttggctataccgccgggaagaagtttggcggcaacccgtttatctcgatggtgattggcggggcgttaacccacccgctgatgattcaggcctttgaggccagccaggcgccgggcgcggcggtggagcactttctcggcattccggtgacctttatcaactacagctcgtcagtgatcccgattattctcgcctcatgggtctcctgctggctggagcgcaagagcaatgcgctgttgccgtcatcgatgaaaaacttcttcagcccggcgatctgcctggcggtggtggtcccgctcaccttcctggtgattggtccggtcgccacatggctgagccatctgctggccaacggctaccagtttatctacgcgtttgcgccatggctggcgggcgcggtactgggcgccatgtggcaggtgtgcgttattttcggcctgcactgggggctggtgccgttgatgatcaataacatgacggtgcttggtcacgactccatgctgcctattatcctcccggcggtgattgcccaggtgggcgccgtgctcggtattttcctcgccacccgcgatgcgcgccagcgggtgctggccggttccgccttctccgccgggctgttcggcatcaccgagccggctatctatggcctgaccctgccgctgcgccgtccgtttatctttggctgcgtcgccggggcgattggcggggcgatcactgcctttagcaacagttatgcctactcgtttggcctgccaaacatctttttcccggcgcaaatgatcccgcccggcgggattgacgccagcgtctggggcgggcttatcggcaccggcgtggctttcgtgctcgcctgcgtgctgaccttcttcgccggcctgccgcgcggtagcgccgcaccgggcgccgtgacggtagccccggcctcggcaaacgatattctggcgccgatgagcggcagcgttatcgccctcgagcaggtgccggacagcaccttcgccagcggcctgctgggtaaaggggtcgccattatcccggcggtgggccaagtgattgccccgttcccgggcgaagtggcctccctgtttcagactaaacacgccatcggcctgcaaagcgacagcggcattgagctgctgatccacgtcggcatcgacacggtcaaactcgacggcgtgccctttaccgcgcatgtgaaagagggcgacagggtacaggccggcgatctgctgattgagtttgatcgccaggcgattctggacgccggctacgacctggcgaccccgatcattatcagcaacagcgacgactaccgggagattgatacggtggcgtccagcaccgtcgaagccggtcagccgctgttgtcagtcagccattaa

SEQ ID NO: 267170 - DNA, 1017 bp, Klebsiella pneumoniae
atggagtcggtaactctatcgttacctgaagcttatgacctggcgctggaggtactcagcgccaatggatttagcgccgaccacgcggcggcgattgcccgcaatgtgaccgccggggagcgcgacggctgcgcttcccacggcctgtggcggctgttgggcattgtcgataccctgcgcaaaggtaaggtatcgcccgatgccgagccgcagatccatgaccaggcgccggcgattgcgcgggcggacgccgggggcgctttttcattgctggcctacgagcgcgcgctgccgctgctgctggagaaggcgcgccacaatggcattgcggcgctggcaatcaatcgctgcgttcatttttccgcgctgtttgccgatattgagccgttgaccgaggcagggctggtagggctggcctgtacgccaagccacgcctgggtcgccccggcgggcggcacacgtccgctgtttggcaccaatcctatagcttttggctggccgcggcgggacaaaccgccgtttattgttgatatggcgaccagcgccgcggcgcgcggcgagatccagctgcatcagcgcgccggcaaagcgctaccggaaggctggggaatcgacagtcagggacagccaacgaccgatgccgcagaggtgctgaacggcgcgatgttgactttcggcggccataagggctcggcgctggcggcaatggttgagctgttggccgggccgcttatcggcgatatgaccagcgccgaatcgctggcgtgggataacggcgcgggcggtctcccctacggcggcgagctgattctggcgctggatccgcagcgttttctcggcgcacaggcaccagagcagctggcgcgcgccgaaacgctgttcatgggtatgcaggaacaaggggcgcggctgccgggcgagcggcgttttgcctgccgccagcagagtgaacggcagggggtcattatcagtcgttcattgcatgatgagatttgcgccttgcgccagggcgggtaa

SEQ ID NO: 267171 - DNA, 579 bp, Klebsiella pneumoniae
atgtgtgataaatgcaccgccgctaacgctgaagtaaagaagatcattaatgaagtcggggctaaaaaactcgtagggatgcttgattctataactggtcatggtgacgctcatccgctggaacgcatcatggccatcgtccaggtcatggacttatttgacgaaccaatgaaaatcctgatgcttgctcgtcactttggcggggcgtatgtggaagagcatgaacgtgccaataaactgcaggcaactctggacatgatgagcgaaccaaaatgcgcgccggcgccagatctctccggagacaatatcggcattgaaagcaaagagcgggagatcgccagccttaagtcttctttaggcatgttaattaccgcctttaaactaatggcaacccataacgggttcaaaatgccagagctaaccggcgatgaacatcccgctgctattcgccagctgcttggtgcgatggcggataatatggatgaagcgaagagccgtatcgaagacatgatgcgagaacttgcccatcgccacgatctaaatgaccagccgcacaagatgcagcaagtcagccactga

SEQ ID NO: 267172 - DNA, 231 bp, Klebsiella pneumoniae; identical to SEQ ID NO: 267096

SEQ ID NO: 267173 - DNA, 495 bp, Klebsiella pneumoniae
atgaaagttaaagtactgtccctcctggtaccggctctgctggtagcaggcgcagcaaatgcggctgaaatttataacaaagacggcaacaaattagacctgtacggtaaaattgacggtctgcactacttctctgacgacaagagcgtcgacggcgaccagacctacatgcgtgtaggcgtgaaaggcgaaacccagatcaacgaccagctgaccggttacggccagtgggaatacaacgttcaggcgaacaacgttgaaggtactgacaagcagtcctggactcgtctggcattcgcgggtctgaaattcggcgacgcgggctctttcgactacggtcgtaactacggcgttgtttacgacgtgacttcctggaccgacgttctgccgaaatcggcggcgacacctacggttccgacaacttcctgcagtcccgtgctaacggcgttgcaacctatcgtaactctgacttcttcggtctggttgacggcctga

SEQ ID NO: 267174 - DNA, 300 bp, Klebsiella pneumoniae
atgaaacgcgccccttttctcaacaagcagtctcccgagcgcacgctcgaggtggtgatcctggccggaagcctggcatgggagacctcacgcgtctggcgaaaagatcccgaccgggaagatgatattcctccggtggtgctcggcccggatgaactggccgatctggacaacctgaccattatcaggcccgacacgctctacgtccgtgtacttcgtaccggcgatatacgcgaaaatcgccgtaaaactggcacacgcgggtgtgcagacggcgcggctgatgacccccgacggtga

SEQ ID NO: 267175 - DNA, 1023 bp, Klebsiella pneumoniae; identical to SEQ ID NO: 136073

SEQ ID NO: 267176 - DNA, 381 bp, Klebsiella pneumoniae
atgaattgcgtcgcgatgggcgacaatcaccagctcgtcataggccggcacgccgtaatcttcgacgttcatcaccaccggcgttttgccctgcagcttcagctcctgcgcttctatattacgatagccgccgataaccgcgtccacctggccggccagcagggcgctggtcagctggaaattgacgttaaccagtttgatactggccggatcgatccccgcgtgttgcgccatggtcgacagggtggcctgctcaatgccgctgaccgaatagcccaccttcttaccttgcagatctgccggggttttgatctgcttatccagggcgataaccgtattcagcggcgaattaatcagagtccctacacgcaccagcggtaa

SEQ ID NO: 267177 - DNA, 609 bp, Klebsiella pneumoniae; identical to SEQ ID NO: 248417

SEQ ID NO: 267178 - DNA, 549 bp, Klebsiella pneumoniae
atgatctccggtcccgggatcacccgccacggtaaaatcgacgcctcgacgatggcggtgtatgacgtggcgccgacgctatatgagttcgccggcatcgatccgaacaagtcgctggcgaagaagtcggtgttgccgatgatcggcgtcagctttaagcgctatctcaccggcgaagtacaggagccgccgcgcggcaactacggggttgaactgcatcatcaggcggcctgggtcgatggcgaatggaagctgcgacggctggtgccgcgcggcctcaccgccggcgacgcgccgtggcagctgtttaatctgcacgacgacccgctggagacgcatgatgtcgcggccgaacatcccgatcgggtcaaagccatgagcgaggcctacgaggcatttgctaagcgcaccatggttaccaaagcgcagggcaaaatgatcgactacgtcggtatcgatagcaaaaccgggcgctatctggcggtcgaccccgccaccatgaagccggtgcctgcgccgcaggcgatccctgtgagcgagatccattaa

SEQ ID NO: 267179 - DNA, 816 bp, Klebsiella pneumoniae; identical to SEQ ID NO: 6090

SEQ ID NO: 267180 - DNA, 804 bp, Klebsiella pneumoniae
ttgaatcgaactaatattttttttggtaaatcgcattctgactggttgcctgtcagaggcggagaatctggtgattttgtttttcgacgtggtgacgggcatgccttcgcgaaaatcgcacctgcttcccgccgcggtgagctcgctggagagcgtgaccgcctcatttggctcaaaggtcgaggtgtggcttgccccgaggtcatcaactggcaggaggaacaggagggtgcatgcttggtgataacggcaattccgggagtaccggcggctgatctgtctggagcggatttgctcaaagcgtggccgtcaatggggcagcaacttggcgctgttcacagcctatcggttgatcaatgtccgtttgagcgcaggctgtcgcgaatgttcggacgcgccgttgatgtggtgtcccgcaatgccgtcaatcccgacttcttaccggacgaggacaagagtacgccgcagctcgatcttttggctcgtgtcgaacgagagctaccggtgcggctcgaccaagagcgcaccgatatggttgtttgccatggtgatccctgcatgccgaacttcatggtggaccctaaaactcttcaatgcacgggtctgatcgaccttgggcggctcggaacagcagatcgctatgccgatttggcactcatgattgctaacgccgaagagaactgggcagcgccagatgaagcagagcgcgccttcgctgtcctattcaatgtattggggatcgaagcccccgaccgcgaacgccttgccttctatctgcgattggaccctctgacttggggttga

SEQ ID NO: 267181 - DNA, 837 bp, Klebsiella pneumoniae; identical to SEQ ID NO: 6088

SEQ ID NO: 267182 - DNA, 762 bp, Klebsiella pneumoniae
atgcagcaggtgtatcataacatgggggcgttgcgtatcaacattgataagttacaggcctacattcctgaagacgagagggaggctgctctgaagtctcacttcctccagcattttgagaagaatggtggctttcaggcgctaaaggccgctatcaaatgggaagttgttgttggtattaactacgatatcaaaagcagccaactgaatatcctgaaacatgaactggagcgatacggcatcaaatgtaagcggctgggaaagatcaccaagaataaggtcatgcgcaggttcaatgttgatcaaaaagctgctaagttgcttatctatactctgatttactcacttggagagtttcgtaagcacaaagacagcgctgcatttcgtaagctttgtgatttgtatggctacagcgaagcggtgaaaaaggccgatgagtggattgagtttgttcggccagtgagaagggcgcttaacaagttggtggcgcgttatcttgatgagcatgttaattgccccggtcgtggctgggccatacgtaatgccgttcgtcagtcttttatggttaaacctgacaagatcactgcgagtgttcgtcggtgtttgttgtcccatatgattcagggtattgagagtaaggcggtgtatgaagcagtgctggctaatcccggagtatgcagttcgattgagcatgatgggatggtgagtaactgtgagatatgctggaatcacccttatcttgaattgaagacaaaacattaa

SEQ ID NO: 267183 - DNA, 138 bp, Klebsiella pneumoniae
atgaccttctacgttaattacactactatcaatatcaatcgtaatggatgtcaatttacttttagtgagcagttttttaaagactttaaaattaatgtctctaaacatttgggttgtcttgaagttgaagtttcctag

SEQ ID NO: 267184 - DNA, 1353 bp, Klebsiella pneumoniae
gtgattcggactctgacagcgactccgactctgacagcgactcggattcggacagcgattcggattctgacagtgattcggactctgacagcgactccgacagtgattcggattccgacagtgattcggactcggacagcgactctgactctgactctgacagcgattccgactccgacagcgactcggattccgacagcgactctgactcggacagcgattcggattctgacagcgattcggactctgacagtgactcggattcggacagcgactccgattcggacagcgattccgacagcgactcggactccgacagcgactcggactccgacagcgactcggactccgacagcgactcggattctgactccgactctgattccgacagcgattcggactctgacagcgattcggattccgacagtgattccgactccgacagcgactcggactctgacagtgactcggattccgacagcgactcggactctgacagtgattccgactctgacagcgactccgattcggacagtgattccgactctgacagcgattcggactccgacagtgattcggattcggacagtgattcggactccgacagcgattccgattccgacagtgattcggactctgacagtgactcggattctgacagcgactccgactctgacagtgactcggatgctgacagcgactccgattctgacagcgattctgactctgacagcgactctgactctgacagcgattcggattctgacagtgattcggactctgacagcgattcggactccgacagtgattcggattcggacagcgactcggattctgacagcgattccgactccgacagtgactccgactctgacagcgattcggactccgacagcgactcggattctgacagcgactcggattctgacagcgactcggatgctgacagcgattcggattccgacagtgactcggactctgacagcgattcggactctgacagtgactcggattcggacagcgactccgattcggacagtgattccgactccgacagcgactcggactccgacagtgattcggattcggacagcgactccgactccgactcggattcggactccgacagcgactcggactccgacagcgactcggactccgacagcgacagtgattcggactctgacagcgactccgactcggacagcgactccgactctgacagcgactccgactctgacagcgactccgactctgacagcgattcggattctgacagcgactccgactccgattcggataccgaaccgcaggcaaataatgatacccatacggcggctatcgataccgtag

SEQ ID NO: 267185 - DNA, 1746 bp, Klebsiella pneumoniae
ttgttattgcaaaaagatgaactcgacgagtttagttcacgtgcggatgaatacatcatcactggtgatcacgtttcattatctgctttagtcgaaagttttacagaacgggattttacctttactcaccctttatatgaggcacattttctttactgcttaggaaattgttactctaaactgtacgaaacacgtaaaacggagtggtattcagatgatttgatgaaatctgtcatattctaccggaaagctttatatgcattacctaaagcagattggagagaacacgaaaataatatccatgcatataataatcttagatctatgatcgagacaaatttagctaatcacctttcatcacaaggcagaacgctatgtagcattacccattatgataaagctatttctatagataataatcttgttgccattatagcaaaggccagtaatgaaatttttcttggacattcactttatgataacggtcatgcagaatatcattttcttgtggcttataaacttttaaaaaaagcaattgagaatatcagtcagttatctcctgaacaaagagggtcgctagaaaaaggcggcagattattcaattttataaggtggtttgaggagtcattcgaattatcggctttcgattattttaaagattatactgaaataaacatatccagaaaacagaaggagtatttagagtggtgtgcaagtaaccgactctttcttaatgacttgaatgattcatgtgaatatccgatcacttatcaggatgttttcgaattaccctcatttgttcaatcgcttaatacttctctcactatgagcgacgaattatcttatcatggtaattatgacgagttaaaaaatgattactgttatgcccggtacttgattttttcttcaaaagatataccagatgataccccgcatatgtttaactcaacatatcaccaaattgaagatatgacttactcaattaataatctaaaggttgctcaatataagtcagcattcaggatagtatattcactttttgataaaatagcatatttaattagtaggttctttgatttaaatgaactgaaatatgataagaaaatcagcatggataatttgttccgtgactttacaggtggtaataaaaagtggaggccacataaaaaacttaaagatagcggcaatcattttatccatgctttattttatatattaaaagatattcgtaaagtcggtgactctgatttagtaacgaaatggttagatccagatgcagtggcatttgcagacattagaaatgctatggaacaccggtcattaaaaatagttgatgattttggctatgaacttgcaacatcgcataataattacaatgatgaagagtttataaaaatgcaggaagaagctagtacgctttcagaagaaattagagagattgaattaaatattgatcaagccaaaaaagatggtgattattattcaacccaacagcttgaaggggaaattaataataagaagtcgaagctcatggaattaaaatcaaacatttatgaaaaagaaaagctatcttctcactctcttttaatcccaataagccaatttgaaaaaagacttatgcaactcattggattagcaagaaattcaattatctatttatcattagctatctattttgaagagcgcagtcgtccaaaagatggtatttacctgccaagagatgtgccgttaaagaaatttttatga

SEQ ID NO: 267186 - DNA, 1824 bp, Klebsiella pneumoniae
gtgactaaatctaagtttttatctttagatacaaaaatccaacagttaaaaaaaaccactcatggattgaaactccgagatatatgcaataatttatttatggcgctaattaaatttggacgttttaacaaaactgtcgaattgcactcgccctcaagacaaacattatatcttttaggtatcttagcatctcaaaaacaaacggaaaaagataagaactgtagtgatgattgcatgaaaaaaataaactcactattaaatgaaattttcggaaaatatctaaatgcatatataccgacagcaaaagaaatggtaggtgaattagaatggttaaaaaatcgagatatctcagcgctcagtttcttaagttatttctttgagtctccaaaaatcgcatccgaacaaattcgtttagaaaacttgaattcatttgaaaaattcaatactgaacttaaagctaaaagcggattgaatatttctgaagctgtagaaatcgcagatgcaataggtgatttgcttcaaaagaatatagatgaaatctcaactataatcaatgaaatcgaagagttacgaattaaagcattcagtcctccgaacatcgaccataatatcatagaggaagagttagtttataaatgcaaacctaaaatggcagaagcatttgaaagaatgaattatatctcatgtttcaaattcgatttgttagaagaaaaattcacacctgatgtaattcaatcctttaaaaacttgtttgtgattaaaaaaggtgaagccaatgagatccattatataactgatgaaaatccagttttatctagcccgatccttactgaagataatgaattattttatctgtgctcaatgaattttttacatttagctatacaaatcaacttcgagaatttattaaaacaaagttcaatttcagacaaatttagaaagcatagagacatgcttttagaaaaagatactgctgaaatgttccggaaattctttccaaaagatgcgttgatattcgaaagtgtatttgaaaataacaaatcaacttatgagcatgatttactaatcatacatgaaggagtggcaattgttattgaggctaaagcatcaccacgaagagaaccactaagggatccagagagagcgtttaaacgtattagcgatgattttaagaaaaagtctggtattcagagcggatataatcaagcccgaaaccttgagaaattacttgagcgaaaagatatcacaccgttatatacgaagaaaggtgaacttcttgcagaaatagatgggagagagataaatgagatttatagcatttgcataactaaagatgattttggagtattagctacaaaccttacgttattacttgacaaagacgaagaagctaaatacccattagtaataaattttagggacctaaaatacttattagactgtcttcaatacgttgaaaaagactggtcatttttcgtaacttatcttcgcgaaagacgattagttcacggtaaaattttatcagcagatgagctcgaatttgctggggcatttcttaaatatggcacattgttttttacagaagaaatccatgacagacatacaaaaatagccctagacataaatgaatcgaatatatttgacgatattcactttgctcaattagaaggagttaaattcgaggtgccctctatctctccaccatatgaaatctttaacaaaaacaaattcattaataattttaagcgttcccaaaaggataaagaacacaaaaaagaaaataagaagagatttaaacacgccagaaggaaaaacagaaaatga

SEQ ID NO: 267187 - DNA, 1488 bp, Klebsiella pneumoniae
atggatatcaaggactggcttccagaatttcaagtttcggctgaaacagatcgagacttacaaacttatttttttaaactacccgccataaaggatatcattgagagtagggcgtggctagttcttggaagaaaaggtacgggtaagacagcaatctatgagcatattcgccgaggaaatccagaaaatcttaatggttacaattcagtatgcctaaattttagtgattatccatggcctgcacatcaactttataaggatgctatggctggagagctttctgcctaccagaaaagctggatgtatcttttttatattaaggcgttatctaaacttattgaaataaataaaattaaaggtaaaccgcttaataaagatctaaagtgggctgaaaaatatataacaacgatttttggaaatccggaccctacacttcgagaagtgcttttttctaaggttactagattaaaaagtattaaaggaccaagtgcagggtttgacgatatatcccttgatgctggtgaaatttcgctggaagagatagctgaaaactcccagcttaagcaaaagcttagatcaaatgcatttaccttgctaatgcattttgagaaaatatttaaggataacattggcgatagtaaaataataatcgcactagaccaattagacgaaaattggttagagggacaaattgaagagtatagcaaggttctaattaaccttcttaatgtgtgcaggaatatttcttctgatgaaaatctttccgataaattaaaggtagtgccgtttttacgtacagatatatatcactcattaaaatttaatgacaaaaataagttacttcaagacagtgctattgtcatatcctgggatgaaaatagccttaatgatatgtattatgagcggataaaaaaatacaaaccaaatgatataattcttgatgaggaaaaagataagtccggtaaggtgtttgaagtgtcatttgttagacaaggtacgcctcccttcaaatatatatgccgccgctcttttttcagaccaagagatataattgtatatttcaataaaataagagcgtgccataacaaaaatgctactggcctatacacttccagtgaattatacgaagctgatcgtgaagcgtctattagtgtatataatgaagttattgatgaatggtcaaatcagtttcctgtaattgaaaaccttctaaccgtacttcaaacaattcaagtagagacgtttgactacaatgatttctctgaaaaatgccgagatgagttttcaggcattactgatggtacaatacggtattatattaactttcttttcgataactcattaattggtcagaaaaaacaagggcgatgggaatatgtaagcagcatgcataacttgaagataaatatacaaaatgaattcaggacacatcatgccttaaaatacaggctacatttgatagaaagtcgacccagtcaaaacatttaa

SEQ ID NO: 267188 - DNA, 255 bp, Klebsiella pneumoniae
atgacattcattcccaggtggtatttgaaagaggttgttttgtttgttgatgcagatgaaacacaatacaaatacgaattatttcagaaaagtgatggttctggtttttttgccaaccttttccgtttggatgatttcatggatttacaagtgtgggtgaaaattgatgagctaaatcacttgcttagccatttaaaagagcatgcagttgaagaggtggaggcgcatttcaaagagaaattcctcacatcttag

SEQ ID NO: 267189 - DNA, 336 bp, Klebsiella pneumoniae
atgtctacggaatctcttctcgataccatgctcaaacatgatcgcttccatgaccaagatgctatggtggctggaatagctcagagggctgtgaataatggctacgacaacttaactcagcgacaaaaagcggtactagagccgtttctcacccaaccttgcgatggcgtaaccgaccctggtggctatcacaatgactgtgagcatgttcttgaaggtaatgatcttgagagcgccattcagaatgatatgtactacggcggattgctttgcccttcctgtgtggatgagaaggaggagcatcgacgccaatgggaagatattcaaagacagtag

SEQ ID NO: 267190 - DNA, 198 bp, Klebsiella pneumoniae
atgttgatcgcgagctgcgtgagcacttcacccgtcccggtagccgttgatacgtcctgcagctgggtgagggttatctacctaaccgaccacgatatcgacgtgctggatatgcagaccaagcgcgatatgctggctcacaacaaagcagtgcgggccaactgcccgcagttattactcaatacaactttgcaatag

SEQ ID NO: 267191 - DNA, 1464 bp, Klebsiella pneumoniae
atggctaaagattcggatggcggtttttgctttctttggtcctgtttttcaggaattgttgagaattgtatcgtatggaataaacgtgtttacaaatcaaaatttgcttccctcgataatcaaaccgagatgcagggcacaatttgcggttatattggtatttgggctgagtattctttaacaagagataatgatgtccctccgccgaggctaaattggttaaagaataaggatcttatttcagatacactctccagtggaatagtttttagaaacaacgttgtatatggatacactatcggaataaaaactgagagttatgttgatgccattatagacggtaatgtagtattaaattgttatctgccaatttttgccagtggtacccgatgcacgatatcgtcgaattgggttgatatgctccaatgctccggtattaagtgtcctcagggagggcttgaatttaagcgttcatgcttaggtggcgctacttgggcaaaaaataatgatacaaatatgagccttcttattgaaaagaattatgtcaagtcggatatgtaccccgtatttcttactaataggaataatcttgtcgtcaaaaataattacttcttaacgacaaagaaaggtaagttatttgattctaaggataataaaattgtaactggtctcgcgctaatcgaaaatacatttgtaattgatgaggcatacgaaggctcttcctctcatattacatataatgcgaatgtgaagttctttgggaatacctttattaataaatcattaaatccatgtgagatagctttaggaaatgatggtgctcattcttttatttttagaaataacaatttcagtggtttttttcaactattaagtaattcgcatatatgttttgatgaaaatgaagtgtctatttctaaagttactaaaccattcattgtgacaaagtcatcaggtgtgaaatttaagggtaataatttttattttggcgaattatctaatgtcgctatttttgatatcacctcaaataatgttgatatagtaagtaatgttatacaatcagcgcaagtaactgggcctggtacccctctgttgtttaattttagcagtgatagcatttataatatttctttgcagaaaacagaagttaatattaatggaaaagaggtttttttagcaaagttcaaagatgtgcatttattgcacctagctaagaatacttcaaatattcctttgagtgtcgatatttcaggtaaaggttatgggccgttttacatggttggaaactcatttaaggctattcaaggtattgatggttataatccgaatgatatgaataacatttcaccattatatacagcaagtgttggtgaagttttatattcactcaagccagaaattggtagcgatattggtattatatatactgaaaatggctggcataagattggcaagttacattag

SEQ ID NO: 267192 - DNA, 1398 bp, Klebsiella pneumoniae
atgacggttttcaaaaataaagcgaaatcgaaagcaaatgcttctattatatcaatgttacagagattctcagatatatttattatattcgtaggtgtttattttatatgtaagctgaatcaaataacgattggttatattcatttgttgttagccctgttggtccttgttatcttccagatgattggggggattactgacttttatcgctcctggcgaggtgtgaaatttttaactgaattaaatttgataattcagaactggacgcttagtattttgattgctagcggtgtattttctatttttatagattacgatcttagctttaaattcatattccaatggtatgtctttgttgatgtcggttttgtattaagtcgttcctctatcagatttttggccggtatagttcgcaaacttggatataatacacgaagagtcgcagtggctggatctatgcctgttgggttcaatttactcaagggctttttggatgagccgtggttaggttttgtagttgcaggaatttacaatgatacgccattaccagataatatgggaattaattatgcgggtgatttcactcagttagttgaagacgcaaaaaaagggaaattagatcgtatatatattgccatggatatggctgatgaaaaaaaattgaaaaaaattgttagggagttaacggacacaacttgttctgtaatgttgattcctgatatttttactttcaacattctccagtcaaagatagaagaagtaaatggtgttcctgttgtaccgttgtttgatacgcctttaagtggtatcaatatggtgtttaaacgaattgaagatattatcgtctccatgttgattttaatattaatatctcctgtcctctgtgttattgctgtaacagtaaaacttacctccaaggggcctgttatatttcgacagacaagatatggcatggatggtaaaccaattaaagtttggaaatttagaagtatgaccgttatggagaacgataacgtagtaactcaggctacaaaaaatgatgtccgagtgactaaagttggtcgttttcttagaagaacctctcttgatgaattacctcagttttttaatgttttgcttgggggaatgtctattgtgggacctcgccctcatgctgtagcacacaatgaacaatatcgaattttaattgatgggtatatgttacgtcataaagttaaacccggaattacaggttgggcacaaattaatggttggcgcggtgaaactgatactttggaaaaaatgcaaaagcgcgttgaatatgatcttgagtatatccgtgagtggagtgtatggttagatttaaagattatttttttaacagtgtttaaaggttttatcagtaaaacagcatattaa

SEQ ID NO: 267193 - DNA, 2118 bp, Klebsiella pneumoniae
atgtcctcattggcaaataacaaaacttcaccacaagattctgacgaaattgatctgggaagaataataggtgaaatacttgatcatcgtaaattaataatagcagttacagctgttgtgacatttgttgctttagtgtatgtccttttagcaacaccggtctatcaagcaaatgcactaattcaaatagagcaaaagcaggggaatgcaatactgaatagtttgagtcagatgcttccagatagccagccacaatctgctccagaaatatcgcttttacagtcaagaatgatccttgggaaaacgatcgatgatctaaacttgcaatataaaatagagcaaaaacattttcctgttctcggtgctggcttgtctcgtcttttgggtttaaatgaaggttctgtagatgtaaaaaagttatatatccctaataatggcgatgaaagtcaggatattctactaaaaatactggatgaaagaagataccagattgttacagataacataactataaatggcactgttggaactcttttaaataataatggcattagcattcttattgataagattaatgctgatccaggaacagaattttatataagatatgaaactaaattaaaaaaaattgatgaccttcaaaaaaaattcaatgtagcagatcaaggtaaagatactggaatgctcaaccttacgttagtaggggaggatccaaagttaattagagaaattctgaacagcattagtcagaactatttggcacagaacgttgaaagacaggcagctcaggatgccaaaagcttagaatttttaaatgaacaattaccaaaagtccgaagtgatttagatgctgcggaagataagttaaacaattatcggaagcaaaaagactctgtagatttaactatggaggcaaaatctatcctcgatcagattgtaaatgtagacaatcaattaaactctctaacttttagggaggctgaggtttcgcaactttatactaaagaacatccaacgtacaaagcgttaatggagaagaaaaagactttacaagaagaaaaagccaaactgaacaaacgcgtgagttctatgccttctactcaacaagaagttttgcgattgagtagagatgttgagtctggtagagcagtctacttgcagttgttaaatagacaacaagaattaaatatcgcaaagtcaagtgcaataggtaatgtgagaataattgaccaagcaataacagaaccaaaaccgatacagccgaaatcattaattgtggttgctgttggaattcttgcagggttgtttatttcaattggtattgtgcttattaaagtttatttaagaagaggtatagagtctccagagcaattagaggaaatggggataaatgtttatgcaagcatacctgtttcagagtggcttactaaaaactctagtaagataaaactgaaaaaaaatgaatctgaaaagctgttggcaattgaaaaccctgcggacttagctgtagaagctattagaagcttacgtactagcctgcattttgcaatgatggaagcaaaaaataatgttttaatgatttcaggtgctagcccgaacgcagggaaaacatttatcagtactaacttatcggcaaccatagcttccacaggcaaaaaagttcttttcatcgatgctgaccttcgtaaaggttatgtgcataagatgcttggtggacaaaacatccatgggctttcagatgttttgtcaggacaaagttcagttgaaagtgtaatagaacgaattccaagtgcggaatttgattatataggaagaggccaggtcccaccaaatcctgcggaattattaatgcaccgacgattcgaaacattgttaaaatgggcttctgataactatgagcttgtaattattgatactcctccaattttagctgtgactgatgctgcaattattggtcgttatgctgggacaactcttttggttgcaagatttgaggaaaacactgcgaaggaaattgctgttagcgttaaacgttttgagcaaagcggtgtactggttcgtggctgtatacctgtctcttatacacatctgacgctgccgacgaatagagaggtgtag

SEQ ID NO: 267194 - DNA, 192 bp, Klebsiella pneumoniae
atgaacaaaaaagagtcagatgaaggaagccatgattgggaaaaagcacgtgttgcgaaagagctgattaggcttgaaaagcaggctgcagaaaaacgtgcgcgattaaaaaataagctaaaatggttagataaagagcctcgggcatcctttttttattttttttcctcgctctttatttcgaaaaactaa

SEQ ID NO: 267195 - DNA, 171 bp, Klebsiella pneumoniae
atgccgtacaaatcagttaagcacggtctgccacgctcgttcactcgcgtctgggtgatgaccgacacagggctggagaccaccggctacgttagatcggatggcgagtggtatatcaactgccctcgcatccgggcgactggcgctaaggttctgaggtggcgggaatga

SEQ ID NO: 267196 - DNA, 2202 bp, Klebsiella pneumoniae
gtgagtgataaaaaaaattacattattggtaaggctgaagagttaacatcattaacgccgccacctaaaataaatcctaatgtggatcctatctatacctttactgaggttattagaaggctcgagccacaatttgagataacgacacagcaacttaatgccttaagcagtgacgtttgtccaagggattttgctgtaagtgcaattaccttgcatccctcttatattgctaaaggccatttcccaagaacattgttcagagaaatgggcgttcgctcattggggagtaaaggtattgaagtcttgccagataaatggactcgggtaggtcctcctaaaaaatcgccaaccacaaaaatatttatagcaggaaaacgtgagagacttactgagtttagtgaaaatttacgtagtctctcagaagacagccctggtgcttcggatctttttcgtgtttggagcatagaaaaagttgatgaacgtgacaaaataaaagaaaaccccaatgcctttgaagggtattgggaagttggtttgcagctcattccaggagggaattccgaatttattaaatcttcatttattagctatgcatcagaattggggtttgagctcaaagaaaacatggctattgaagtttcaaacctctggtttttaccaatagctggagaagaaagatttttagagcgattggctgctttctcttttgttagggttgttcgccccctcccagcaatgcgttcttttcgaccgctgactagaaataccccaattggggcagatgtcgatttacctaacgtacatccatatgcttctgatgtgcgtgtagccattttggactgcggattacctgataagcatgtattagaaccatgggtatcaaattatggtctttctgacccaacagcaaatgatctcaccgacggtccctctcatggcttaggagttacatcggcctttctttttggaccgttgtggcctggtgaaaaagcacctcgcccgttttcatatgtagatcattacagagttttagatgaaaaggttgaaggggaagatccctatgagctttatagaacactttctcacctagaagatattcttctctctaggcaatatgagtttatgaatttaagcttgggcccagatttgccaattgatgatgatgaaatacatccatggacctctttaattgatacctatcttgctgacggtgagacatttcttacgattgcggcagggaacaatggcgaaaggaaccgtgagcataaattaaatcgtgttcaagttccctctgattgtgtaaatgccctttcagttggggcaatcaatagagttgaatcagactggaaaagagctacttatagtgcggttggtccaggtcgttcaccaggcttagttaaacctgatcttgttgctttcggaggtgatcctaagcagtattttcacgttcccagcgatactagcattgggaaattggtcccaacctgtgggacgagtttttcagcaccttatcttttacggtatgcagttggtgttcgtgcgattttaggacatgatgtatcgcctttggcaattaaggccttgttaataaattctgctaatcaacattctcacgacaaggaagaggttggttggggaaaagtaccagattctattaatcagattattgaatcagcggatggtaccgctaaaattttatatcaaggagagttataccctggtaagtatttaaaagtaccagttccgatgcccgcaacagggattattggtaaggttaaaattaaagcaacatgttgtttctcaagccctgtagaccctcaagatacttctatgtatacaaaggcaggtgttgagattacttggcgaccaagtcctgataaaacggacccattttttaaacagaaaacggttgctacagaagctgagttgcgtgctgatgctggcaaatgggagtctgttttacatggagagaaaggtaagttgggcactagtcttgatcaaccttgttttgaaatccactatatggctcgtgatggtggggatcagatagcaggagctaaagcctctattattagatatgcctttgtagtctcaatagaggctcccaaaacgccagatatcttcaatggcatcttaaggtctgatgcgaaactggttgaaatacaacctagaattcccgtaccgattcctgtttcaatttaa

SEQ ID NO: 267197 - DNA, 1119 bp, Klebsiella pneumoniae
atggaattggatttagtcagtgttgtcaagttcgctcttgaaggggaagataaagacctcaggatatacttggctaaacacattcgtggattgagaaaaagcgatccgttgttggctaagactcttgaagaactgctcaagaatcatcctgcccgatctcatcaggtaatgagaagagatacttcgacatttgattattcagatgacgaaagcaacggatatgccactttgcctaaaaacttaattaaagaacaaccaataagtaatggcagtaatgagccattgttacaattgcaagttaagaagcagttgaagcaagtgatcctggaaaggaaaaagattgatttgcttgcacgtcatggacttagtcctacaaagtctcttatttttagtggccctccaggggtcggtaaaacaatgactgctcaatggttatcgtccgagttagacattccattatatactcttgatttaactacggttatgagtagctttttaggtaaaacgggcagtaatctaagaagtgttattgattatgctaaatcccatccatctattcttttattggatgaaatagacgccatagcaaaaaaacgtactgatgagtcagatgttggtgaactcaaaagattggtaacgatcatgcttcaggagctggaagagtggccaagcactggtttacttgttgctgccacaaatcacccagagttagttgatcctgcattatggcgtcgctttgattgtgaaatagtttttggattaccaacagatgaacaagtcagtgatgctattaaattattttccggggatgacttcaaaatattcgagccgtggttcgatttacttaaagatagcttgcatggacagtcctacagcaatatcaaacgtgaaatctaccagctgcgaaggctacatcttcttaaatctgatgagtttgagtcagatctcatttcccatctcaactttgacttaaatggtaagtctaaagctgaacaaattagctttgctgtaaagttagttaaaaaatatggttttacgcagcagaaagcttcaaaagttgcgaatgttagcagggacactatccggaagagattaacagagcaggagtacacacagtga

SEQ ID NO: 267198 - DNA, 210 bp, Klebsiella pneumoniae
atgacagaagaacaatttgaacgtgattacccaagagatcagtacaactacgtacgaaccaatttcagaacaaagggatcgcatggacaaactgaaatagagtcgtttgatatcgtttctaaagccactggtgaaaccgttctacaggctacccgtactgaacataccaatctgagaggattggacacgacggtcaattgggattggtaa

SEQ ID NO: 267199 - DNA, 1110 bp, Klebsiella pneumoniae
atggaatatttcttagatgaaagtggtaacacaggtgacttgattaacaaaaaaaatgacatgggctttgctaatcaaccccttttcactcattcatgcgtgggagtgccagaagggaaaattagtagaatggaaagttttgtacgtgttctgaagataagacacggtatcgatgaatcaatagaactaaaatcacaagattattatataaaaaatcctgaactagtatacgaattggtgaattttgtaattgaagaaaaatacactttagtatgtgaagtaatggataaaaagtgtaacgtagctgtttctatagtaaatcaacttatagtacctgcaatggagaatgaagaccaagagcaagtacaattagtaagatctatactggttgatgtaattagtttgtatgctccagaaaattgtttcagtactttctcggagttatgcaaagatccttgtgaagaaaagttactcatttgcatttataccttaaaagaattcttttctagtgataacaacccgctagatgatgaaggaaacacttgtaggatgtttgatgaaacattaaaagaatattactacagaaaaagtgtgttcacagaaaaagtagctattaagtggtttgtacccattcctgacttggatagcaacggcaatatcataaagctattacctaacgtacatagtttttataatcagatcgctcgaatcaataaaattcataaaagaaaattatctaatgtcattttaacacatgatacgtctagcgaatttgccgataccttaaagttttgcatgtcagaaataaaaacagttaatattgatattatgcctaatatcccaacatgtgattttaatgttattgaaactccagccttgaattttaaagactctaaagatagtacgggcatacaaatagcagatataatcgctggatttttgaataggtatgtacatgggttaatgtataaaagtatcaaaatggatactatatatcatgatacatttgatagaattgttacaccaaatcgtagtcgagatcccaaagggacaaactttgtaataccgttaagcaaacaacattggctttttagtaaatttaatctctaa

SEQ ID NO: 267200 - DNA, 633 bp, Klebsiella pneumoniae
atggcatttgctgcaatacttggtttggtgtttgctaaaaaatggaaacgtgatgctactaaagataaagtgattgatcgtagtattcagattttatctgtacacttattagacattaataagtattttgtacctgctttacatattaacgtatttcaattttggtttacctcatttatggataaagtgcctactacttataaatttgtgcgttctatgaaaaagatggcatctaactatctagggtttatcgaaaaggaaagtgaagtatatactaagttcgtatctgagattgagtacttaaaacttctatcatgggatattaagaaagaacatagagaagtagttgatgaaattcagatagcaatgaaaaacataatcgcaaaggatcaagagttactagctctaatcaacagtattttcggtatgtggaacataagtgtttataatgatgatgaaagtaaagcctatactgaacttcaacataacttatcgaacaatcctatagtacagatgggtataaatttaataccggtaatgatcagagaaagagaggatttacaaaagcttctcgaagatatgttaagtaagcaattgaatgtgtttacatttattgaacaagtggaacattaa

SEQ ID NO: 267201 - DNA, 1185 bp, Klebsiella pneumoniae
atgacagtgaaatactacgccattctgactaatcagggcgcagcacggctggctaacgcgacgatgctcggcagtaagctgaatctgacgcaaatggccgttggtgatgcgaatggtgtcttgccgacaccagacccggcacagacaaaactgattaaccagaaacgcatcgcgccgctgaatcttctgagtgttgacccgaacaaccagagccagattattgcggagcaaatcatccctgagaacgagggcggattctggatccgtgagattgggctttatgatgatgaaggcgtactcattgcggtggcgaactgcccggaaacgtacaaaccgcagttgcaggaaggcagtggtcgtacccagactatccgcatgattctggttgtcacgaataccgaagctatcacgctgaaaatcgacccgtcggtggtactggcgacccgtaaatacgtggatgatgaagtcctggaattaaggctgtatgtggatgaccagatgagaaaccacattgccgcacaggatcctcatacccagtatgcgcagaaacataatccgacatttaccggagaaccaaaagcgccgacgcctgccgcaggaaataacaccacgcggattgcgaccactgagtttgttcaggccgctattaccgctctgattaacggcgcgccagccacgctggacacactgaaagaaattgccgcagccattaacaatgacccgaaattcagtaccaccattaacaatgcgctgtcaggtaagcagccactggatgagacgctgacgcatttgagcggaaaggatgttgccggtcttctcgcataccttggtttgggagaagcggcgaaaagggatgtgggcacaggagataatcagataccggatatgggagcattcgcttctggttcgggatggttcaggctaccaggtggatatattgttcagtttggcactttttcaggaaacacgacccgctttatcagtggacacttccctataccattccctaatcagccgatggtttcagtcagtgttatgtctgatgccgttcagtcagacccgtcgagtcctgccccgcaggttttgtctgtaaattttgaacatatcagtaattcagcgtggcgtgtggcaaccagtgatatctcacagcaatacagattcagttatgtttcgataggacggtag

SEQ ID NO: 267202 - DNA, 675 bp, Klebsiella pneumoniae
atgattaccacaactttcatagcagaaccaatcatgacgacttcaggccagctcgtaggctgtgaactattaacccgcttccatagtgaagatctgccagtactgaacagtaagtacttcatcatggctatggatgctgaagggaagagggaactactaatacgacaactacaggccatagaagtacatgcgtcatggttcagggatcaccggctttactgcaccgttaacatagacaccatacaagcaaggctatgtgtgtttgatagagaggtgataaagctactggataaactagagtatgtcaggctggagatatcagaggactttgaagggcttgaactcggtatcaatcatccagtactcaagaccctgttaaacgtgggctatcgcttgttcctcgatgatcttggttcaggccgtgccaatgtcgcagcactcactactggatgctatgaggcggtcaaaatcgatagggcgttctatcttcaggaagtacagaaaccaacattcaacgtactgatgaagaacatcatgcagtattgcccctatgtaatcgtagagggagtagagcaacagaaagaactatcagtactacgtgattgtggagtaacggcggtacaaggctacctctacagatcagtaccattcgacaaggtaaacaccctgctttaa

SEQ ID NO: 267203 - DNA, 627 bp, Klebsiella pneumoniae
atggactataaaaaactgaatatggcacttttcataacagttatagttcttataactgtagctgtgtttgcttttttaaaagtactcttctctgatacaaaagctttagaatggggaagtatatctgatttcattagctcaatttcaactttcggtacacttcttgtagcattctttgcttataaagcagcaccacaatgggtgaaacaaaaacaatacgatgaaggaattaatcatgttaaatctctaatggctgaatatgatgaaattgtatcaagcattttagagctgcaccccgaaataataaccattaacaaacaaagcccaaaatttaaaatactttcagaaaaagtcgaacaattaatttatcgcactttcgatttaagagcaaaattgaagtcctgccaaagatggaatattatatatccgaaggaagttagtgaggcatttcttagactaaccatgtattttcatcattctttcttacaattgactttcagtgatattgattttagtgatgaaagagctaatgaaattgatactgccgatctcatcattgctgaagtaaaagaagatattgattttttcaatcgtagtctagataaatttttcacctaccccaaatga

SEQ ID NO: 267204 - DNA, 498 bp, Klebsiella pneumoniae
atgacaaaaaagaaagccccagaagaaaaaaagaaagcgggacgtaaacaggaaataaaagataactttgatttgttttgtctcttcaaagaagtaacagcaatgaatgaactatcgggtaaatgccgactagtaatttctgacactatcaaagaaatcatgggtggtactaaagaagcatacgcaccacgtaagatttttcatatcatccagaatgaaagcaagataagtacagaatcagtaaaacgcaggattgaaggaaatgaaatattcggtcgtttctcatatagtgatgaatcagtaaagaaatacaaacgtgtagtattagcagtgataaaagcactagaggaagaactagcgaaaggtacaccactgttaaagagtgatcccgatgctcacaagtatctaaacgccgatgaagcacaggagttacgtactatgatcagtgatggcaggactaaagaagagttagtagcctatattcaggggctaatgtga

SEQ ID NO: 267205 - DNA, 492 bp, Klebsiella pneumoniae
atggaaaaaatcaatgacctaaaaggccaggtatctctacacctatataaagaagctctaagtaaatggcatagtatgcattcaagactcaaacgcaaaggttacgctaaaacaactatttgtgttgaatggtacactttcagtaactattactactggtacattgaaaatagtgttagtggatgggacgtagataaggatatgttgggaactaatcactattccccaaacacttgtatgttcgtaccacatgaagtaaatcaactattcagaggtggttacggtaaacataagaagggagtacagaaggttttcaatagttgggtagctaaatcaacatacaacggtgtacaggagtattacggtactttcactacagaagatgaagcacatgaagtatattttcaaaaccgccaagtacgtattcagaacctagcaactaagtacagcaactatccagtacttagtacagcactactaaacagcaagtaa

SEQ ID NO: 267206 - DNA, 153 bp, Klebsiella pneumoniae
atgaaggaattgaaatcacatcctgtgagcgtaaaactaaatgatactcaagtaaagctacttgaaaaactaatacaagaaggaaaagcgaaaactaaagcaagtgcgatacagtacctaatcaatcagtactcaatactaaacagtaagtaa

SEQ ID NO: 267207 - DNA, 1635 bp, Klebsiella pneumoniae
atgaccatcatcactaaaaagcgtttaatcgccgcgggagtgctatccgcactgatcgccggcaatatggcaatggcagcggatgtcccggctggagtgcagctggcagagaagcaaaccctggtacgtaatagcggcgccgagccgcaatcgctggacccaaataaaatcgaaggggtgccagaggccaatattagccgcgacctgttcgaaggtttgctgaatacttcgccgaaagatggccacccgatcccaggcgtggcggagagctgggataataaagattttaaagtctggaccttccatctgcgtaaagatgcaaaatggtctaacggcgagccggttaccgcccaggacttcgtatacagctggcagcgtctggtagatccgaaaacagcttctccttatgccagctatccgcaatatggtcatatcgttaacgtcgacgaaatcattgacggcaagaaagcgccgagcgagctgggcgtaaaagccattgacgaccacacgctggaagtcaccctcagcgaaccggtaccctatttttataaactgctggttaacccggcgatgtctcccgtctacaaaccggccatcgaaaaatttggcgaaaagtggacgcagcctggcaatatcgttaccaacggcgcgtatactctgaaagactgggtggtcaacgagcggatcgtgatggagcgtaacccgcactattgggataatgctaaaaccgtcattaacaccgttacctggctgccgacctcttccgaagtgacctatgttaaccgctaccgcagcggtgaactggacatgacttataaccagctgccgatcgaactcttccagaagctgaaaaaagagatccccaacgagctgcacgttgacccctatctgtgtacctattattacgaaatcaacaaccagaaggccccgttcaccgacgtgcgcgtgcgtaccgcgctgaagctgggtctggatcgcgatattattgctaataaggttaaaggacagggcgatctgccggcctacggctacaccccaccgtataccgatggcgcgaagctgagcgagccggaatggtttacctggtcgcaggaaaaacgcaacgaagaagcgaaaaaactgctggccgaagccggctatagcgccgataaaccgttgaccttcaacctgctgtataacacctctgatttgcacaagaagctggcgattgccgccgcctcgctgtggcgtaaaaacctgggcattgacgtgaagctggtcaaccaggagtggaaaacgttcctcgatacccgtcatcagggcacctatgacgtggcgcgtgcgggctggtgcgccgactataacgagccaacctctttcctgaacaccatgctctctgacagttcaatgaacaccgcgcactataagagcccggcgttcgacaagattatggctgaatccgtaaaagcatccgatgaagcgcagcgcacggcggcctatgcgaaagcagagcagcagctggacaaagacagcgcgatcgtaccggtctattactacgttaacgcccgcctggtgaaaccgtgggtcggtggctataccggtaaagacccgatggataacgtctataccaaagacctctacgttatcaaacattaa

SEQ ID NO: 267208 - DNA, 267 bp, Klebsiella pneumoniae
atgatcaattacaagacgacttttataacttatatcaacaaaacctcaaatacgttcgagaaaaagtcgctagagaagatagcattagtactaactcagttaatgacaaaactgccacagctagtagttccattatgctcggtgaatctcaagggcaaagtaaacttattgcatttgttgctatgcctttttcagaaaaaacgtctaactacccgcatggttattttgatgaagtacttaaacatctcattacgccttctgcggtga

SEQ ID NO: 267209 - DNA, 3528 bp, Klebsiella pneumoniae
atggcagtagcagcattagcagccgctgtattggctggtgcatcggcggcagcggcgacctatgcaacagtaggtttagtagcagcaatcgcaattggtgcagcagtaacagcactatcctatattacatctagtcagatgatgaatgtaggtcaacagggggtaaactatccaagtacgggtacaagtaatgcccgaagtacatcacctagtactggtattcccatagtgtacggcggatctaacaagaataaagatgaagttgcttttgttaaagtaggttctattgtagtttggcagaacgtatataaaggtgaatctaaccaactatgttccgtgcattgtctaagtattggtgaaattggacaagtacccggagaaacacaagcaggtgtaattaagcagctattttttgacaacgtaccagtactacgtgatgatgcatatattactcaggaaggtattattcctgaatcaatgctaattgagaagttccgcaagttcctacagattgaagtacgttttggtaaaccttcatatggtggttcaatgacgttagcccgtcaatatggcggcagtaaatggactgatgatatgcgtggtgatggtctagtacagatctgtacggtcattaagaaaactaacggtagccttactgatggtattctaactaatatgaactacgtactatcagcagagattagaggtagaaagatttatgatctaactgataacgtactaaaaccttcaagtaatccaccaagccagttatatgacttcatgacaaatacagaatttggtttcggtacagatccaaatgatattgatattgcctctttccgtaatattgcacagtactgtaaagataatcactattattctaatggtagtattgcatatgacaaaagttataaagagaacatggaagcaattctacaaacgttcggtggtgtactatatgaatcaaatggtgttcagtacttaagtgttgatacggcagatttacccgttgaacactttgatgaaagtaatattcttggttctgttaatatcactactggttcaaatacggattacttcaacactatggatagtacttatactaacccaaatggtgactatgccgaagatattattcgttacccaagtgatacactaactaacgagactattgtacgtgatggttatatcattaagaaagatttaaactgtaaatggattcaagataaagaacaattagccaaacgtagtaatatcgaactattaaaagctaagtatgtactagctggtattacatttaatacattcgtaactgatattacagtaaatgatgtattcacgattagctttaaagaagcaggttttgaaaatgttaagttccgtgtagtttcccgtactgtaccaatgacagtagataaagcaggaatagtacagatcacagcaacgcagtacacagacggcatctattcgggcgttgacccaggacagttcccacagaacggtattactaacttaccaaacccttcacaggtagagccaccaagcaacctacaggtacaacgccttggtactactgtaaatggcagtactgttttaatgacttgggatcttagtcaagatactggtgtacgtggttataaactacgttataagagaagtgattccagtacttggattaatattggtaacgttggacagtactctacatcctttgaaattctaaacttgattcagggagtaagctatgactttggaattgaaagctataacacacttggttattcatccgaactagtagcaatctataatcagttgccacagatcatttttgcattaccaaaagtaactggtcttgtaatgactaacgctgatgccggatttaaccaaacatattccgaggcatttatatttgattgggatgatcagctaaacctaccagtgaatggtaaacgattcattgactatttcagatattatgaaattcgtgtatatgaccgttaccgtagatacattaagtcttacttcacacaggatagtgcatggtcttatacgttcgctatgaaccaatcagacggtctaagccgttatcgtgtatttggtattatcgcacatgggtacggtactggcatctattcagaagaagtacagattgaagttagtaacccacagcacccacagttactaggtgttaaattacgtaatggttatgatcaggtgttctttgaatggactgaatcaaatattccagattatgctggtgtagtattccaagccgcaaaagatgaggggtttagttctggtgttgtctactttagtagttctaaccgttatacagcctcattccctattgaagacggttcttggtacggtagattggctgcatatgatgtgatggggcaggatgaattagtatggtcgcctacaattggttttaaccagaatacgaaggttccatattctaagttgaatgacgatgttattgatggactacttcatagtgatgttgctacgggaattgttgaaaaacaaatcgtagatgaactaggttcacgctggcaggttcaggtatcaaataatggtaacgttactggtattgccctagcagcagatgaaaaatcatcagttttcacggtgatggcggatcgcttttcaattatcagtactgactcagctaaacaaagtgataaggtatatccgttcgtagttcaaggtggtaaaacttatattaactcagcagtcatagctacggcctcaatcaatgaagctatgataaatgacctttcagtatcgcgagcgaaaattcaaaatgccgctatagataatttaaagctagcaaatggggcagtccgtaatattcacataatggacggcgttatagattctgcgaagatctcccaacagattcaaagtagtaattgggatggtactaatggttggatgattaataaaaatggttctgctaactttggtaatgtaacagtacgcggtaatatccaagcaacaacgggtgtattgaataatgttactatcaatgagtcttgtaatattcttggtacactaagtgctgcaaaaattattggtgatatttgtcgtcctcaatctactggtattgtaacagaaccattcatctttggttctcgtactgtatcaggtggtgttattggacgtgatccagtagcaaaccaacactatgtagctttgcgtattcgtggcgaagattttgatcgtattcttgatagtaatatgacattagaacttggttctttcgaacgtcagtacttctatgttcgtatgggtggtgatggtattccaatgactaacctacgttactgggatgctggtaatggtggaggtaatttatcattcccaattaacggtatctatgtacccgccgttggtcgtggtaagtggaactatatatacgtgatgtgtactacttcacgtggcagtagtgctaagttaaacgtaccagcgttactatcttcattcgtatatcgtgcaggtgatcagcctttatataatgcttaa

SEQ ID NO: 267210 - DNA, 645 bp, Klebsiella pneumoniae
atggctattccaaataatttattaaacaatgccgtactggttaactactggaatctagtacgcggagataataagacagtactcacagagaaagaactctatcaatgtggtgttatggttaaaatggttgatttgattccacctactggttctgcaatttatcttatagatgggctatcagaaaaaacagttagtggtattacctatcaaccagtaccggactttatcgattcaagttttgcaaactatgtagaaaagaatgcagtaaacaataacggtactacatttaaagtcagtaacgtaaaccaagaatatctatctatggcattacgtggactttggaaagatgcaaaagttaatatctggatgggtatcgttagtcctgctgatggttctattctatatcgttaccgtatctttagtggttatatcgattacttctcttcagattttaatgttgaaggtggcaatactgaaaacacaactactgttagtctcaatagtctatggaagaagttagaccaaacacaacgcctactatccagtactagtattcaccaatctacacataagggtgataagttctttgacctaatcggcatcataaatagttcagaacaattctggaaagcgagtaagaaataa

SEQ ID NO: 267211 - DNA, 555 bp, Klebsiella pneumoniae
atgctagataacgctattattagtgaatttgtcttgaatgacaatattccacaatatttaaatcagacgtggactggtgaacaaatcacacgtgtagtaggtacgcagtactttagtattacattcaaagctacgatgaataaacagtttcgtgcagaaattgcaaacttctatgcacagtacgcacaaggtaaaccatttgatatgtctcttggttggtggggtaagtatacgggtaatcagaatgcaggtgtgcagacaaccgcagcacgtacagcaggtgctacatcaattgccgtaaactcaaatagtctcgaagtgggttcaataatccaattcaacggtcataaaaagctatatcgtgttattgcaaatagcggtactactatgactatattcccaggattaattaagaatatccaattgggtgaagtaatcaaatacgataacctctctggttcgttcgtcctaactccacagaatgcagtgtattcattcccaagtactaacctaattgaagtaacaattcaagcaaccgagagcatcaggggttaa

SEQ ID NO: 267212 - DNA, 2121 bp, Klebsiella pneumoniae
atggataacgtagcagaccaaattaaagatagtaaggataaattgggtgatgcattaactaaccaagctggttctatgtacactgatgtaattaaaccattaggattaagtattttagaactacagaaagccgcagatggtggtgaagatattattgcaagaatctactatcaagctaaacaaatgggctttagtaattctcaaatcattaacatgatggaaactattgcaaacgatgcagataaacgtattaccatttatcaacgttataatagcgaacaagagtatcaaaaccgtctagcagatgagagcgtacaactaactggtgaacagtctaaccagttccaacagtaccgccaagctactctagaactcagtaaggcttgggaagcatggaataattctgctttagcaccagtagcggctaaccttgcagatattctaaacctaatgaccaagatacttaatagtaagcccgtagcagccgcagccgcagctacaagccgtgaaggtatcgcagcagtacaggaataccagaagggctatcagcaagatatgcttaagaactcttctatctatggtgctcaattagttgaagaacagcagaaggacgcagaacgcaaccagaaaacttttgctaatatgttagcaaatcttgataaggctaataacgttattcagaaacaacgtgaagagtacaataaaggattcgagaaaagtactattgatgctgcaatgaagcccttccaaactgctaaatcacagactcaatctaaaattgatgatttagataaacagtacaaagatacacgtgcggcaatacaagaatcattaataaaaggctataagggtaatcaggatgctttgaataaagaccttgctactcttgatgctggttataaagaaacacgtgcagacctcgttaagaaactaacagagagtgatgataaagcccgtgatgcagcaagtaagaaagcagcagcagcagctaccaaagccgcagcagaagaaaagcaacgtcttgcaaaacaagtacaagctcagaaagtattagatcagactatggcagcaatgggtgctaatgccgcacaggtgaaactacaacaattcactcttcaacaagatgaaattgaaaaacgtattcgtgattcagcaaaactcactaagaagagtgaagcagaaactaatgcaatgttgagtactcactatgcagatagagcacgcaattacaaagaaatggttgatcagatgttggcagagaatgaccgtttgaaacaagctcagaacatcgcagctattacaaatgatccaaatgccacaccagaacaaaaggcagcagccgcagccgctggtaacaaatgggctactaatactgctactcagggattaggttatcaagacccattcaatacacaggcagacccaactaagctagcagctatcggtacagaacagcaagataaccaggatggggcaaaagctctatatgatgccaaagtaattggattccaagaataccaagatcagcttacagctattcagactaatgcagatattaaacgtgctcgtgctactgctgatgcattgaatagtactattggcctttggggtaatgccgctggtgatattggtactactcttgctggtgctttctctgaaggtaacgacgcggctaaggcgttttttgctattcagaaaggtattgctattgctcagtcaattatcaatatccaacagggtattagtgaggcaaccaaattaggctggcctgctggtattgccgctggattaaaagtagcagcagagggtgcaaacattatccgtactattaagggaacaactattcaaggtcaagcccatgatggttgggattcattgcctagtactggtacatataatcttgaaaagggtgaacgtgtagtaggtaaatcacttaaccaagatcttactaactatcttaaagatgctggtaataactcttctggtgaaatcaagattgaagcaccacttgttattcaaaactctggtgatctaactgataaagactttactcaaatgtgtaaaaaacatgctgatgtaattgtacaggcagttcgtacatcacaacaacgcaacgtgtaa

SEQ ID NO: 267213 - DNA, 264 bp, Klebsiella pneumoniae
atgcaaatcaacatcaactgcaagagtatcccaacatctttcgatgttgtctgctcgaattgtgaatggaccggcgtggctacattagattatccggaaaacgtaaaaaccctatctgtcggaggagaaataaatttcactcataatgacgagacgccaaaatgtccacaatgtagcgttggatatatatatggtaaaagtggcacttataaacgtaatagtgcaactaaccatatggacagaatcggagattataaagagtaa

SEQ ID NO: 267214 - DNA, 597 bp, Klebsiella pneumoniae
atgggatggaagaggggcaaaagccctagtgatatgaagaaattcataaatgataattcaccaaagattggtgatcagtttaagaaagaacttagtgaacgtatgcgtactgtaactaaacaaattcaacaacagattaatgtagaatctaaaggtggtgtagtaccgtatactaatcgtgcaatgaagtttaacttctataagcccaatggttttactagtattaatcagattatagtaatgccagatcaggcagactacctaaagaacgttattgaccctaactatgttcgtaaacatgaatacaaagtgatcccatataaaaatgctaggctaactaagcagggaaacatatcacaattaaagaacaaggataaatacaaacgagtgaagagtaagaacggtaaagagtatcttattgacacttccaaaaactctagcaaacgcgatccagtaatggcacgtaagaaaagggtagttggctactatggaagtgtaggaagaaaaccattgtttgatttctacgaagacacagaaaaaaaagtaataaaacaactacgaacattacgcggtacgtttaactaccgttggagataa

SEQ ID NO: 267215 - DNA, 294 bp, Klebsiella pneumoniae
atgtttagcattatcgcagaactactatctaaggggatggacttctttctaaagagacagactatagctaaagatgtacatactactaatgccgaaggacagattgaagtaaacaaagaagagattgaaaaggtatctttccattggcgtaatgcccttggtttcgtgatcactctaatcatcctctacaactggattatcgtaccagtactagacgcgtttggaatcgtcgtgatccaagtgccactaggtcaacttatgcaagtcttacttatcatggttggtggtagttaa

SEQ ID NO: 267216 - DNA, 1329 bp, Klebsiella pneumoniae
atgacaacttctggtagttttgataatgtagtaaccaaaacatatacctttgcaccaacagcattagttagttctggtgtactagatgatacagtactaccaattaaccgtggtgattttggcgttggctctaatggtactacgtatccaagctggcaagaacgcgatggtaacggatttattaagattgccgcagcctcatcaccaactggtactgatgttctaggtattaacaatcttgatgcaaactttggtactcaattagtaattagtaaaactggcaaccccattattaacgtccgtaactacggatcatctatgggtgcatggtataaagtctataccagtgctgataagccaacactaacagaacttggtgcagcctcaagtgctagtcttgcaaactacgtactgaaaacacaaacagttaatggtaaacagctacaaggtaacatcacactagtagccgctgatatcgctgatgtgtactcacaaacttatatcactaatacatttgttcctaaagtatttcagttaaatggtcatgcactatctggtacttcattaaacttagtagcggcagatattttagatgtgtactcacagacacaaaccaatactaactttgttgcaaagactcagacgattaacggcgtggcattaagcggaaatattacactaggtgcatcacaacttaccgatatggcaagtctaagctacagtaacagtacttttgtacctaaaacgttcctagtgaataacaaagcacttactggtactaatattcaacttgtagccgcagatatcccagatgtgtattcacgtactcaatctaacgatctatttgctctacgtatcactacggtaaatggaaaaccattaagtagtagtgtagtactaaattatgatgatgtgggtacatattctaaggcacaaattgatgctaaggataaaacgctacaagacaatattgatactaaagtaacaatagtaaatgatttgctagcactaaatactctcacaggcactagcctagagattgatttatcagatagtaagactgcattcactgttaccctatcagcaggaacaactaattttaccattgttaatgcaagtggtaatactaagaatactcaatctttcactgtagctatgaaacaaggcacaggggcaaataaaatatcatggcctgattcaattttatggtcttatgggcgtgtaccagtactgacatttacgaaagattcaaccgatgtattccagtttgtttcttatgatggtggtagcacttggtacggctccttactaatggcagatctacactaa

SEQ ID NO: 267217 - DNA, 519 bp, Klebsiella pneumoniae
atgaaagaaaattacacaaacgaggaaatagcaatacgctacggtgtgaacacctctaccgtttcccgtgagtggtctaaacgtggattcaatattaaagcatccaagactgaatgtgatcagtggattctacttaatatcatccagccgctcagagaagacgacacaaagaaactaatcgagttagaacgactacgaaaactaaaggccgaagcagaccaggcagagattgaattgcatattgcaactggtcacttaattgaatccgactatgtagaagaaacactaacaagctacttccaacaacttaaatcagtactgcgatctattcccagtacttgttatgtacagctattcgaaagtacagacgcattagaattaaaagtaaaactagaacaaatcattgatgcaaaattaaatgatataggaaattacgaatatgaatcagaacaaccagaacaagatgatgaagatcttgaacaagagtttgaaggcgattcttccaccgaagaagattaa

SEQ ID NO: 267218 - DNA, 843 bp, Klebsiella pneumoniae
atgttagagaacttacgtgattatacttttgatgtaatgaactttccagaaaaggcaattgggtgcgtactcgcatgtgatcagcagcttgaccgcctagaggtcagtactttggcgtttgatgaaaagaatgtttggttagttgatcatcgctatttcaggggcgtggattgtactaaggccgaagataaagcctatgccgagttagtagcatattccaattcaaagtttactacaccccttggtaaaagggtgaaggtactacgttgctttatagatagttcgaatggtggtgcaactaaacaagtttataagttctgtaataccaatagaaactggactccaattaagggtaagtcagtaactactggtgcattcacaaatgatagccgtgaagctggtcatgaattagtaaatataaacgtacatgaaggtaagaatacagtacgcaaactattactacaggcattgaatgaaccaggaatagaaaaagcaatgaacgtacatttttcccattcattaccagatgattactttcttcaattaacagccgagaaactaaacaaacaacgtcgatgggaattacgtgttgaaggttcaaggaatgaggcattggactgtatcgtgtatggccttgctgcaatagatcacaaagtaaatgctatgggtgctcaaccctataaacagttacgtattcatgatcaccgccaaaaagaacttgcagcagaaaagcctaaatataaagaagaagaaatactaaataaaccaacaacccctactaaaaagaaatcatcaccaaagaaaaagggtatatctcaattaagaaagggaggttggttctaa

SEQ ID NO: 267219 - DNA, 1149 bp, Klebsiella pneumoniae
atgttacctgcaaataatggtgcatgggttacacaggacttcactcaattagatttcaaacttaacagctatcaacctaaccattcggaaggggatgaacaacccgcagccgttaccctaacaggccgtgaagacttcactattttacttgatgatgttccagtagatggggtatcaggccgtattgattggtattgtgttaacgaactacctgagctatatgatgatacgggtactggtgactattcagtactggttaatctaacattcaatgacagtactagtagtggttatacggcacgtcttggtgactgtacgataaaagattatatgttaagtagtcttgcttatactcccggtctaatcccgttcagtaatattacagatccatatgctcagttatattctggctggcgtggtcttccatatcctggctaccaattacctactatttggtgtttcaaaggtactactattgatacagaaagactaaataacagtatcaagttcttatgtgatgcacaggattggtttactaataaattctatcctacgttacctggtccttgtgctcaggcgtttgtgtggaaccgtcaggatgcattagcgtacttaccagaaggtgagaaagtagatacatttattatggatcacttctactcagaggcatggtctggttatgaaccacgtgcattctatgccggatgtaatgtagtacatgaattgtggtcacgtggagattatacaatcccctctaatataattcagtactgtaagaactggatgaattacttgaaatggtttatgaaaaataatgatggtcatgcaccaacacgtttcaaaaacaatggtgaagtaatttatgatgggtttacccctcatatgtcaggtctatggctagcaggtgcttgtattatggcaattgctggttatccagatgatgagttaatacaaatgttgtttgaagaagtacagagtttctatgaggtaatcacaccaaatcatgtaatgaatggtacgtgggcagccgctatacgttctggtactccaacaacagaagaaaacaatagtatgttctttggcttttatagcggtgaagtactaagaggattgggattatacattgagtactacaatcttcataaataa

SEQ ID NO: 267220 - DNA, 1155 bp, Klebsiella pneumoniae; identical to SEQ ID NO: 195428

SEQ ID NO: 267221 - DNA, 1659 bp, Klebsiella pneumoniae
gtgcgggttaaatcgattaagcttaccaatttcaagaaattcaaagatgagcattttgaattcaacgatgacgtaaatatctttgtaggtgataacaacgccggtaaaagtactattctggaagccctggaaatcgtacttaattacagctatcggggccgccccttcaacagcgagtttacgccagacatttttaataaggatgcagtgcagctttttttggcttcagataaatcggccacgcacttgcctgtcttggcaatagaggcattcattgagggggtgcctgaataccggggtacaaataatttccttaaagccgatgctcaagggatcacggtgctggtgcgctttgatgacacgctcaaggacgtttacgccgaccacttactgacaaacccacacattacgagtatcccgatagaattctacaagctggaatggctggatttcggatggaatcccgttaaagccgtagcgaagaaattcagggcgttatacatcgacccaactcgtatccaccccactctgggcaagaatcagtacatctctaccatacttaataccgctttaaagaaagaggaactggttaagctgaccctcaattatcgtgagaatcagcaggtttttaacaactcaggtgaggtcaggacagtcaacaccggtctggatacggaccacttgatcacagaaaaaaagctgtccattgccgcaagcactttacctgcgggatctattcagaccagccttcaacttgaagtagatgatgtccctttccagttcattggcaagggtgagcagagtaatgtgcagatcaagctcgcgattcagaacaagtcgaaggatatcgatttggtgatgatggaggagcccgaaaatcacctttctcacactaacctcaataagctggttcactacattgaaaatcagcggggcgacaaacaactcttccttaccactcacagctcgtatgtgctcaacaagctgagcattgataaaatctgcctggttcagtcgggatacaaacgtcttcataagcttgcccctgcagtggtcaaaaccttaaagcgcttaccgggctatgacacattgcgcgtggcactgtcgcacaaagtcatacttgtcgagggaccgtcagacgagttagtactcaagaagatttacctccgcaagcacaaccgcctgcccgagcaggatggtattgatatcatcgtcgtgcgcggagtcgggtttgatacgttcatctccgttggtatggaaattggtacccggataaacgtcctcagagataacgatggcgactatgatgaaaacgtcgtgaaagtgcgtgccgattatgcggcctatcccaatatcaaacttatctcctctgccaaaaatgaggagttttcgcttgaacccgcgatgatatatgccaatggaaccgacttggttacgctggacgctttcgccaaagtggtgttatcgacacagacgtttaacctctacgataaagtagtcgacttagataagagacgcgacttcctgatcgactggtttcgaagcgtccagggaaacggtaagggcgctcgcaaggtcgattcagctatcaagctgttcgatggcactctgaatttcaggtatccccctttcctcgatgaggtgttcgactttgcctaa

SEQ ID NO: 267222 - DNA, 387 bp, Klebsiella pneumoniae
atgcctgtaactagtaatgactttatcagttttgcgaaagattgttcctctcgtaaagatgagattggttatagaaatgcaattgctagagcttactatggtgcatatcaccatatcctcccatatatgaagcatggacctaaggatagtcaccaaggccttattgattatttgtctaccatggcttggaaagatggagccgaaatatatcccaagcttacacttaaggctttaggatttgcgttacaagcattaaaagatcaacgtattattagtgattatcgattagaagtaacaatcaacgaactagaagcgaatgtagctgttagaacagcagaaaaacttttgcaaaaatgtgaagatatggcaaaaagtaaagcctcataa

SEQ ID NO: 267223 - DNA, 147 bp, Klebsiella pneumoniae
atgaagttaaaacaatccttcgagcgtacacagcctaaaacagtgaaggatttttttatccttgcggaaaaaaggacaagtaagccaaagtctggtgatagtaacaattttttcacacagttggtccaacgttcgcaatctgcttaa

SEQ ID NO: 267224 - DNA, 780 bp, Klebsiella pneumoniae; identical to SEQ ID NO: 230646

SEQ ID NO: 267225 - DNA, 207 bp, Klebsiella pneumoniae; identical to SEQ ID NO: 230649

SEQ ID NO: 267226 - DNA, 4005 bp, Klebsiella pneumoniae
atgaccttacaagaattctatgcggctcgcttcggtagcgatccgtattcattgcttgaagcagcgcgggatgagctgtcagagctggccacaatggctggcattaactggacagcatgcgctgataacattcagttgaacccgcgcggcggggaagaacgttattcaaaatataacggtggcgcccccgaggctctggaaaagagcctcaaagggcgtgtggaaatctactcccgcaaggaacaacacaaaagcggcatcagctacccattcgtcaactttgtccagaaagggcatgacgaaggttcctggagcggcttctccttcctgttcgccgaataccgccgtgaacaacaaagaaaccatgcgaccgtggtcgcacaacctgctgaagaactggcgcgtattgaacgccaggcagaagcccgcaagcgccgcgccgaacagcaacggataaatgaacttaaaaacaatcagttagagcaagagcggttgctcggatggttggcgttccacagtgcatgggaacatgcgccagctgaggacgggtcgtggccttacgcagtgaaaaaaggcattcgtgacgtattcagcgcttgcgatattcgtcgcgtgaccagtcacgacaacgcaaaatggagccgtggaccgactacatacatggcgattccgctggcccacctggacggacgcaaagacggacgaattgtcggctggcagcgtatcgaccagcgcggcggtaaattccagaccagcgcgatcaccagcggtgatttcgtcggggcgtgctttgttatcggcaacctgaacggcgcgcaaaatattgcagtggtggaaggtttcgccaccggcgcgtccgtatggctggctacccgtaaggacccgaaaaaaagctttgatgctgtcgtggtcgctgtggccgcaaacaacatgatccatgttgttgagcagctggtgaacatgtacccggcagcaaaaattacctgcgccctggataacgaccgcaaatcatcggctgaaggtaaaggcaacaccggcttacgtaccggcttcgacattctcgcaaaatttagcggcatcaaatgcgtttatcccacctttgaagacgatccccagctggagtgcagcgacttcaacgacctgcatagattacgtggactccgcgagacctgtcgccagctattcgccaaagggaaccgcctgagtaacagcactgatttgctgtccctaacgctaaacaagctgaaaacggctaaacgtgacaaccgcaggacgtttgctaaagaactgctaaacgcggtggatattggcatgctgacctgcccggtaccgaatagcccggcggatctgtttaacatgttctgcatcgtgctgcgtgatatgggactggaaagcgtctatcgcgccacggttaaagaccacatcgcacgccgcctgaaccgcaaatgccgtactgcccaggcaccccgttcctttagcgagcggatcaccgacccgaacaagcgtccccagcacatcacgtataaacgctttgaaacatccgtgatgacggatgaaattctgcaatacgtgcagcagctgcagggcatcgttattgttcgcgccggtatgggatcaggtaagtcgacaggcctgctgcgcccactgatgcataacgctgatcgcggcgtttccgttgcgcaccgcgtaagcctcatcggtggcctgtgggaaatgatgacagagcagaaagggaccaaggccgatattctgcattaccaggaccccggctatcaggaaatggcgccatacgccaataagctgaccatttgcatcaactccatcgtcaaaggctgctggcagccgctgatgcgccagcatgactatttcggctttgatgaggcaacgcagggacttcgcgccatcctttctggccgcgcaatggagaacccggtcgccgttttcaatacgctgatcgacgcgctggccagaactgaattgcaccccatcatggtagacgcagatgctaacgatctgctggtcgacctggcagaactggcgatgaagcgccgcgaagaaatgggcctgccggcatggttacagattcacgtcatcgagctgccggtcgacgttcgcaaccgcgaaacgggcgaacctatccgcgtattctacaccgagaaagatcgcatcatgaccgaggtgattaaagcggtggaactcggtgaaaaaatcatgctggcgaccgatagctcaacgtttgccgaagacgttaccgccacgctgcgccagcgctacccggagaaaaaattcctctgcgtaaaccagaagagcaagccggaacccgaggttgaagaattcaccaataaaccgaagaagatggtgaagaagtacgacggcctgatttacagcccgtcgatatcctccggcgtctccatcgagcaaaagcatttcgaccgccatttcggcatgttctgcggcgaagtggtccccagcgatgcgatccagatgctgcgccgcgaccgcacagccaaagagttcatcatcggttttgacaaggttcgcgcacgacgcgaaaccgatccgcaaaaaattgagcgtgcgtttgtccaggcattgctggccactgccggcatgaacggcgaactaaccgacgttgttttcgacggcgaccgcatttctatgggtgtggccaacaccgattttacccggatgaaaatcaaggcagcagcgattgaggcctccgcgcgtaatgactacgccagcaatatgatctgcataatgcacagcgacggctacaaggttgcccccctggcatccgacgagctggcgaactgcgtcggcaaggagctgcgcaaggaagcccgcgaaattgtctgggaacaaacgctggatctccacctgaatatcgaaacgccgaacgaatctgaacgggaagccattctgaagaaacgcgccctgaccctggaagagcaggcgaagctggtccgctgggatatcgagcatgagctgaaactgccggtcaacgaggacaacctgaaattctacttcgacggcgcccgcgataaggttcgccgttatgaaaccatgctgctcgatgagatcaccgcgcggcgtttcgaccgcgaggaatccgcgatcaacttcacctacgctttcaggcaggcgggccaatggcaatactttaccgccaccgcgatgacccgcgagcaggctgatgaagcattccaggcgaaacaccctggcatcaccgagtacaaagtcaaatcgacacccgcggtcgaggtcggtatgcgcggcttctacggcctcaaatctacggtgctacgccagtacttcattgactgcggcatcgacccggaaaccatgaccggagaagccacccaggcgcgcctggcatacgccagggataaactcatgaccgccgaacggagagacctgttaaacaacgtcctgcgcattggtggctttatgacgcccaaaggcaagccgaaggtccccgaggcactgtttaaaaccatctgcgagtcgctcggcctgaaaaccgacaagcgccgcgccagggacggagacaagcgcccgaccatacgctttgtggatcagcagtcggcggcgttcatgatggaaattctggagaaccgtaaagacgacggcctgtctctgcagttgcgtaaagccgagaaagccaccaccgaagtggatcacggtttagatctcaatatatatatggatcataaaacgcgatccacaaacgagcaggatttggacgcccctcattcagtaataactgaggcgctggccgagctgccggtgccggtgccggaggcctgggcgatgaccgcgctgtctgatgatgagctggccactatgacctcctggtcgccagccagcatagcgatgaccttcgcgtccctgtacctcacagagttcatggaccgcctctccagcaacgaactgcgccggctgcgtgaatacatcaccggcacggttacgggcggctacgacgcgcaggaggcgttctatggctaa

SEQ ID NO: 267227 - DNA, 204 bp, Klebsiella pneumoniae
atggaagatacggtcctctcaaattgtgaaaggctggacgctgagctgagtgatatcgatgccgtattagatatggtatcggtggcgatggcatccccggaggccagtttgcatgtggctcaaacaatgcgcctcatttgtatgtcacgtcggatgttgcagcggtgccgggatctcaacaaggttgaaggaagaagccactag

SEQ ID NO: 267228 - DNA, 639 bp, Klebsiella pneumoniae
atgaaaacgccactcacgtatggtgcccaccgaattcttcacgatttgttttcaaaaggcgcgatgttcaaaggtgcgttaagccgtgaaaaattacccgaactggaagagcgtggctttgtcgctactaacgccaataatcttgtatatctgacccccaccggccagcaatatgcaattgaatcctttattggtgagcattccaaagtttcgcaaggtctttgcggcaataccatcgagcaggaaacactttcatcagtattagcgcattacctgcccaacactcctctgggtaaagccagagaccacgctgtgatgctggcctctgcggtcaaagcttcttttgcagaattgaagcactccaccggtggtttcgtaatttcccgcgatggcgccgctcaggttattggcgaaaaaatttctgaaacaataatccctgcgtcggcctttaaaccgagcacagatggaaaggaaaagcggggggcaacctttacgataaatattgaggtggatgccagcaaagccattcaagcgcttgatgagttcagccatgcattcgataagcgcatagcctccgcgttagaaaaaggacttatgccaggcggttcattatggtttgcgattaagagtcaacgttaa

SEQ ID NO: 267229 - DNA, 429 bp, Klebsiella pneumoniae; identical to SEQ ID NO: 230652

SEQ ID NO: 267230 - DNA, 201 bp, Klebsiella pneumoniae; identical to SEQ ID NO: 230653

SEQ ID NO: 267231 - DNA, 1146 bp, Klebsiella pneumoniae; identical to SEQ ID NO: 246014

SEQ ID NO: 267232 - DNA, 1185 bp, Klebsiella pneumoniae
gtgattcggattccgacagcgattcggactctgacagcgactcggattctgacagcgactctgactcggacagcgactctgactctgacagcgactcggattctgacagtgattccgattccgactcggacagcgactcggactctgacagcgattcggactctgacagcgactccgactcggacagcgactccgactctgacagcgactctgactccgacagcgactcggactccgattcggacagcgattcggattctgacagtgattcggactcggacagcgactcggactctgacagtgattccgactctgacagcgactcggattctgacagtgattcggactcggacagcgactcggactctgacagtgattccgactctgacagcgactcggattccgacagcgactctgactcggacagcgattcggattctgacagcgattcggactctgacagtgactcggattcggacagcgactccgattcggacagtgattccgactccgactccgactccgacagtgactcggactctgacagcgattcggactccgacagcgactcggactctgacagcgactccgattctgacagcgactctgactcggacagcgattcggattccgacagtgactccgactccgacagcgattcggatgctgacagcgattcggactctgacagtgattccgactctgacagtgactctgactccgacagcgattcggattccgacagtgattccgactctgacagcgactctgactcggacagcgattcggatgctgacagtgattcggactctgacagcgattcggactccgacagtgattcggattcggactccgactctgacagcgattcggattctgacagcgactctgactctgacagcgactcggacagcgattccgattcggacagtgactcggattctgacagcgactccgactctgattccgacagcgattcggactccgacagcgactcggattctgacagcgactcggactctgacagcgattcggattctgacagtgattcggactctgacagcgactcggattctgacagtgattccgactccgacagcgactcggactctgactccgattccgattcggataccgaaccgcaggcaaataatgatacccatacggcggctatcgataccgtag

SEQ ID NO: 267233 - DNA, 351 bp, Klebsiella pneumoniae
atgacgcgcgaaatatcaagaaacccatcattcaccccgtcgcctaaacttcgagctcacctcaatgagcatcgtgagggtgttacagaacgccttaacaatatgttcgaccgttacgatcatctgttgcgtagttgcgcgctaacactggagccagatgaaaaacaggttctgctgaatgtcctgtccggtagttttgtagagcctgcttttatcgaatatctggctcaggaggtgatcgactccgatgattatatcgatgggaatcctgcagcaagctctctctatgagaagttcagaaacgcgacctatcctcaactgttagcaacagtggaacgtattggtagataa

SEQ ID NO: 267234 - DNA, 363 bp, Klebsiella pneumoniae
atgaaaactatcaccatcaacacctatgacccggcaggccgattcgatatgaacgaagccgaggcgaaacagtttttctcttacgtggaaagacaagccaccaaggcaggacacatcgtcgcttttgttgaggcaaattacgtcgatgaattcagcgagcaattcgtcgaaatatgcttttctgaatacatcccggactcagcaaaaatgctcatgaacccttataccggctcagtagacacagaagagaactggctctgtgagatgccaacctgggatgatgacccggcggaatgccagcgccagttcgacaccctggtcgaggtcgttaaaaccgaaaatggcgactgggtggaagcttaa

SEQ ID NO: 267235 - DNA, 483 bp, Klebsiella pneumoniae
atgagtatttttgaaatatattttgaatacgacgaaagttcaccaagctacctgaagaataaaatcgggcgtagcagtaaggcaaaggctggcatggtggcagggacaaaaaacaatacagggcattatcaagtaatgcttcatggcattcgctatcaagtccatagggttatatttcaaatattccatggtgaaattcctgatggctatttggttgaccatatcgatggtaatcgcggtaacaatcatattgataatctccgcttggctactcacagggacaacaccgtaaacagcaagaagaagacgtgccagaaaatgttatctaaagggataactgaggcaactccgggatactatgttgcgcaggttaggtatggtgagctttctcggcgccgatcttctcgtgacatagacatgctccgatcgtgggtgataagcatgcgtaatgagttgcacgggcaatttgccaatcacggataa

SEQ ID NO: 267236 - DNA, 699 bp, Klebsiella pneumoniae
ttgataattgaaatacttcaagattcggccgcgacattcaataaaaatgattgcgtaaaaggcgtatatactgaagagtttgaaacatgttcaataattatatttgaaagtctaaataaattactggtaatccatgatagcactcaactagatttaactgatataattaaagaaacaaaaaaaatcggcaagataattaaagtcagtcaaattaccaattcaaattatatggttgcatcagaagataatctgtattacgcaaattttggcgtggaaacaggtgaatactatcgctctcaacaatcccaaaggcataagtctcgactaacaaaaatcataaaaaaactaaacatcaaaattgccccatcttatataaaaacaaaaaactctaaactgataatttcctccaagaacgtcctgaatgataacaatgtagatatcgacagtttaatgacaacgttgaaccctttacctgaaaaagaaaaaagaaaagcaataatccaactcaataatatatttttagcaccaaactcgcaaaaactaccccttgatcttgaatttaacatcaataaatatacatcctctccagttttactaaaaagtcgtgaggagatgaaaaatatatcattaaggatgcagaaggagggagataatgattatatcaatctatttgagaaatggtctcctttcatattttaa

SEQ ID NO: 267237 - DNA, 684 bp, Klebsiella pneumoniae
atgactgaatggcttaatgcacattttggtgcagacgcagctacctatcttagcttattagtcggcgtactggcactgtttggtattgggggcggtgttacatatagaatcagacagcaaaacaacattaaacagaaggcaaagaaaaccgagggtgatgtgaaccaggccgggcgggatattaatcagaccaccaacgtttaccacacatccaatgaatctgctgaggaccctgtaaaaaaaaagcaagatgaatatgatctgaagatcatcgaccagatccttgaattgctgccttatgaggatactactcaatgggttgagcagagctacctgagcggtatacggcaagatgtttgcttaaacattgaaaaagctgaaaaatttagcggtgaaaagtatcggttattcaatactgaagtgaatggtgcgaaagacgcttttttggacgctatggccgcatacgtagatagtacgctaccgtttatgagtgttgattacccgaacagaaagccagtgatgctaagccttccccatgactggaagagtaagagtgttgaatcggaggcaaacttccgctttcatcagcaaaatgtgcgtgaaacatcgggggtgatgattgcgcgctatgaggattttgtcaggacatttaaggctcatggattcataagcgataaactgtaa

SEQ ID NO: 267238 - DNA, 372 bp, Klebsiella pneumoniae
atgcaaaccatatcatcacacccgacacgggcggctcagccctgcctgtcacccgttgaaatctggcagttgctgctgactcatctgttatcgcagcactatggcctgacgctgaatgacacaccgttcagtgatgaagccaccatccaggaacatattgatgcaggaatatcgcttagcgatgcggtaaactttcttgtcgaaaaatatgaactggtaagaattgactgcgatggttgctctgtcatggagaagtcactgtttatcaccagtatcgatattctacgtgcccggaaagcctccggtctgatgaaacgcaacagtcacaaaactgttaccagggtaacggcaggtcaacatcaggagctataa

SEQ ID NO: 267239 - DNA, 327 bp, Klebsiella pneumoniae
atgacgatttacgccaaatgttttattgcgcttgacgctaataagcgtctcacgggagcaaccactggacagcttcacccttacgacagctacacctgccacttctgcggcagtaacccgcaataccatcctgaatacatcaccgaacgcccgtggtttgcacaccggcacggcgatctaacagagaacgggcgacagcactgcccgtatgtaaatcctgattcgggtgaaaggcaattagccagacggctacagcacttcatccccaatgctatcctcagggtcagtaaagccgactggctctgcgcacaatgcgagaccagttag

SEQ ID NO: 267240 - DNA, 585 bp, Klebsiella pneumoniae
gtgttcgacgacggtcgcctcaccgacggcaagggccgggtggtggatttcaccaacaccatcatcatcgccacgtccaacctgggttcggacatcatccagcgacggctgaaggcgcgcggggcggccggcgaggagtacgaaaagaccaaggccggagtcatggacgtgctgcgcggccatttccggcccgagttcctcaaccgcatcgacgagatcatcgtcttccatgcgctgggcaaggaggagatccgccacatcgtcggcctgcagctcgatcgcgtggcgcgcagcgccgccagccagggcgtgacgctcactttcgatcagacgctgatcgaccatttcgcggaagaaggctacaagcccgagttcggtgcgcgtgaactcaagcgcctgatccgcagcgagctggaaactgcgctggcgcgcgagatgctcggcggcggcatcggcaagggcgatcacgccagcgcacgctgggacgacaaggccgaacgcgtggtgttcgaacgcaaagagccaccgcagaccccggccgagccggagcagccggatgccgcgaaggcgagcgacgcatcttga

SEQ ID NO: 267241 - DNA, 204 bp, Klebsiella pneumoniae; identical to SEQ ID NO: 235788

SEQ ID NO: 267242 - DNA, 129 bp, Klebsiella pneumoniae
atgcaaagcaaatacagcctgacagggaaaaagcttagggagagctggatgctggttttttattgtttagacctcttaatgatccgctttttgcaggaatccccgttttcaaagaaaaaatgttattag

SEQ ID NO: 267243 - DNA, 1170 bp, Klebsiella pneumoniae
atgtctgacttaaatgatatacacaagatagtaatagaagttttagtgaaggaattgtatagagatctaaagtcaagcataccttctctttttaaaaaaatatctttgccggttataaatgcgggtgcgaaaaggtttcaaaatcctgaaagtcttttggaagggctgaaaactggtagtgtaaaaaataacgaaatggttgtgttggaatgtaaaccaactacctttggcccatatttaagaagtcactaccttatgccattgattggctctagtagtgatatgcgtttgggacctgtttttttaagcggaaatcaggagtttgattttatttatagtatgtttgctcagatcaccagtcatttagcgcctgttggtttatatccgccaattgataatgatgtgtcacaaatcacattatatccttctgacgcacattgttatggctttatagggagtgtgccaggcgttaataatatcattacatcaataacagcgataactagtcaggataaaattagtttttgtggtgcgccatctcatgttaaagggatagtgcgacaggttacacaagctatgtttattgataaagggttgccgattgaaatatatgaggaactaaggcagtctggcgatatatggtatttggatgtttattcagaggggaccgaaataaagcctatgcatgatggtgttgttactgaaatgtggggggggctttatgcttcaggacatattgagatggaaggagagttgttggccgaacctttgattaatggcgttatggatgcatttagaaatgcagggtacaaccccgagtttgtgcaaaatatggcctctgctagggacttaaatatttatgcaagggggatgcgattctccattaaaccgggtacatgcttttattctttgcatatggatgcagagttggcaatgggttataaaaaaagtagaaatactttcaacaatgtgtgtgataatttgcatgatgtgataatagagtcggcaaaaaaaagcaatgttaacttattaaatccaagggatttggattttacctatacagatacggcaaagtcattctctatacttgaatcaaaaggagcgggggaaataaaagacccagtcgctattgttgtcagggattggttcagaagaaagaattcatcgtaa

SEQ ID NO: 267244 - DNA, 1350 bp, Klebsiella pneumoniae
atggcttacttacgagatatggaagaattaattggaacaattgaagatataaatatgcaaagctatatgcgagaggctcttcgctgctacatggctgacgcacatagagcttgcattataatgtcatttataacaattcatgaaaacatatatacaaagctagatagattatccttggttaacagcactgccaagaaaatatatgatgaaattactccactaagagagaatcaagcagtatttgaaaaagaaatggttgaccgcctatctaaagaaaatataatctccaaattagacgccagtttcgtgacccttttaggcaacttaagaaataaatcggcccacccttcaggacattcaccatcggctgaggaagcaagatatattttctctgagtccatctcaaggtttttatcaaaaccaatattgtcagctcatcaggtttcagatgagatattagaaagcctaggcggggggaatttattcccaacattaaaagtttcagactacgcgataattgttcaacatgaattatcaagaatgtcgttggaaggtttaccatacctattgaataaacttatatcaaatctggactcccctaatgaaacaatcaaaacaaacgccttaagatttattttagggatgggatctgagggtgctaaagacgagaccatatcatcgataaaaaggatattaatagagaaacaaatccataaaacagaacgagaaaactgtattgctctgattatctcttgcaactataaattactggaagacttaagcccaccaacctacataagattaaatgaagttatcattaaaaacaatgaccaagcagatctggcaagcccaacaaataaaacaaagcatcctttacagaatctcaagtcaatatcaaagctctcaccagaaatttcaaggttacatttcacacgctccgcaagcgcaataataaataaattcaaatataatacagacttgtatcaaatcgtcgaaaacagctcttggatggtggatttattatttgaggcattgctgaatgaagctcgaaactatgatttcgcgaacgcaaataattttgctaaatttattgttaatgtagatgacactgtttgtaaactctttaccagcaaacaatgctttagtctacttgcaggtatctataaggcaaatacgtacggagcaaattattcagagaagatagtagccaatgaatataaatccataccattaataaaagagaaagctctagtcggtgtagggaaagaaaaggaacagtatcaggagattttaaaagaaatttcaggtgacgattccttgcatattgatacattcctcccatctgagtag

SEQ ID NO: 267245 - DNA, 573 bp, Klebsiella pneumoniae
atgattgagaccaattttaataacgaggcgttactaaacagaatctgcgaggtttatggatttactcagaagatccaactcgctaatcacttcaaaatcgcagccagttccttacagaaccgctatacgcggggcaacatgtcgtacgattttgctgtgcattgcgcgcttgaaactggcgtaagccttaaatggctgatgactggtgagggagagaaaaacctgtcagctaatgaacctcaacactcaacggagcttcctttattcgaattaagtgaaggtgagctatccaatattggtactctttcgtttgaccagcagcttttcactaagcagccgaaaaagggtgcctctgtgaaaagcgataacagcacctatgtaatcgagcaggagtcctctttgtctgatggcctttggttagtagatattgaaggcgcactgagccttagggaaataaccgttttgcctggtaaaaaattacatgtagccggtggaaaagtaccgtttgagtgcggagttgatgacatcaaaatgattggtcgtgtggtgggtgtatacagcgaggttaattga

SEQ ID NO: 267246 - DNA, 405 bp, Klebsiella pneumoniae
atgaaaattgaactcattaacaaaaaagttgaaagcttggttatgaagccgctagaaggtgattcagctgcaaaaaaaaccatgagcgcaactgttaagctgaacaatgaactttactctaatgtgaaggattccaaactatttagagtaagatattttgcctccgtaaccattgaaggtcgtcttgaaatggacatcacatacgactttgactttcattcagaagatgatttttctgatgaaatggctaaatcacatgagataaggtccatagttccaacaatggcatatccctatatcaaaacatatgccgagcaaatcatcctcatgtcaaatcttggtaggttcaatctgccttactttgatttctttgacagccccatggaaacgaatagcaataaatga

SEQ ID NO: 267247 - DNA, 513 bp, Klebsiella pneumoniae
atgaacatcgaaacagtaaacgggctcattcagtcgctggagtcggcaggcgagctgtcgatcagagagcagaagttcctgaagctggcgaaagagtttcgcatttgcagcacctcactggatgctgccataaaaaccgggaatgtgctggcagaccaaaattctcagctggctgcggagaatgcggcgctgaaggacatcaacgcatggtgcaaaacggatgcattcaaaaacatgtaccgggagtttaaaacagcagagtctcttgggtgctcagatgtggattgcatgcatgatgcaatgcttgtcgcaattatgcatgcgcctgccacccccgccaccgatcgcatcgtagccgggattaaggctgatgaagagaaggcagtgcttaatgacctactacgccacctcgacaaaatcggcatagaaaacctctcttctccatgggaactttcttccgaagttgtagcgtttgtcaattcccgcttgctgcgcgagggggccgacaaatga

SEQ ID NO: 267248 - DNA, 1056 bp, Klebsiella pneumoniae
atgggccagctcggcaatcgcatgcaccgccgccagcttcatctcttcgttgatcgccgtcgcgccgacgtccagcgcgccgcggaagatgaacgggaagcaaagtacgttgttgacctggttagggtagtcggagcggccggtacagatgatggcgtcatcgcggacctgcttcgccagcggcggcagaatttccggctccgggttggccagggcgaggatcagcggcgcccgcgccatcttcttcaccatctcctgagtcagcactttcggaccggagcagccgaggaaaatgtcggcgccgtcgatcacgtcatcgagggtgcgtttgccgtcgtcttccaccgcataggccgctttggtttccgccatgttcggctcacggtctttatagataacgcctttcgaatcgcagaccacgatgttgtgcttttgcatccccagcgccaccagcagattcatacaggcgatcgccgccgcgcccgcgccggagaccaccatccgcacgtcggacagattcttctcgacgacgcgcagaccgttgaggatcgccgcggtgctgatgatcgccgtgccgtgctgatcgtcatggaagaccgggatattcatccgctcgcgcagctgctgctcgatgtagaaacactccggcgctttaatatcttccaggttgataccgccgaaggttggttcgagggcggcgacgacgttaatgaatttgtccggatccagctcatcgacttcgatatcaaacacatcgataccggcaaatttcttaaacaggacgcctttgccctccattaccggcttaccggccagcgcgccgatgttgccgagccccagcaccgcggtgccgttggagacgaccgccaccaggttgccacgggcagtgtatttgtaggcggccagcggatctttttcgatttccaggcagggggctgcgacgcccggcgagtaggccagcgccagatcgcgctgggtggcgagaggtttggtcggcgagacctggatttttccgggaaccggaaattcgtggaagtcgagggcgctctgttttaa

SEQ ID NO: 267249 - DNA, 831 bp, Klebsiella pneumoniae
atgaagaaaggtatattggcgatagtactggctgcgatttgtacgatgggccttagtggttgtgatcgtgtagagccaggttacgttggcattaaggtcaacaaactaggcgaagacaagggaattggggaggttgttggcgtgggccgtcagtggacgggcatcaataccgagctctacgtattccccacatttaagcagatgaaaacatacgatgaacctttcacttttcaaatgagtgacggtactgcaattggtcacaaaatcggtgttgcgtacctggtcaatcgcgacaaggtcaccacagttttccaaacttatcggaaaggtgttgatgatattaccgacactgatcttcgccagaagattgccgactctttaaacagacttgccagtcgcatgacaaccgatgctttcattgacggtggaaaagcggcactgctcgataatgcactcaaagatattcagaaagaaatgaccccggtaggcatagaagtcttgagtctgtcgtgggtagggaaacctgactaccctgacactgtcattgaatccatcaatgccaaggttaccgcgaaccagaagactctccagcgccagcaggaagtcgagcaacgtaaagctgaagcaaacatgctacgcgaacaagcggaaggggaagctgatgctattcgtaaacgcgctcaagcagaagctgatgcgatcaaattacgcggtgaagcgctacgccagaaccctaacgtcatggaacttgaagctatcaataagtggaatggtcagttgcctcaatacatgacacagggcgcaaacactcctttcattactattaaatag

SEQ ID NO: 267250 - DNA, 204 bp, Klebsiella pneumoniae; identical to SEQ ID NO: 194326

SEQ ID NO: 267251 - DNA, 129 bp, Klebsiella pneumoniae
atgcgcaaaatattttcctgcgcgctgaggaaaagctatcagcagagagggctctattacgaaatctggaatctggcgaacggcctgaagagctggatattatacgttcgcagaggctttgttgaataa

SEQ ID NO: 267252 - DNA, 147 bp, Klebsiella pneumoniae; identical to SEQ ID NO: 183389

SEQ ID NO: 267253 - DNA, 228 bp, Klebsiella pneumoniae
atgaatatgacgaaaaaaggcgacaagcatctgcggacactttttattcatggtgcccgcgctgtcgtcagggttgccacgaataacaatgatggccatatgaatcagtgggttaaccagttaaaggaacggcgcggatttaataaaacgaccgtggcggtcgctaacaaaaacgcgcgaataatctggtcgatgctgagaaatgagaccgagtatcaggtagtgtga

SEQ ID NO: 267254 - DNA, 789 bp, Klebsiella pneumoniae
atgaatatcgtatttctgggtattgatctggctaaaaatgtttttcagctctgtgggttaaaccaggccggcaaaccggtttatacgaaacgaactggccgaaaagaattgctccagacgctggcaaatattcctgcatgtctgattgggatcgaagtgtccaccggggcattttactggcagcgtgagtttgagaaactggggcacaaagtaaaggtcatcagtcctcagtatgtaaaaccctttgtccgcgggcaaaaaaatgatggtaatgatgcacaggccatcgcagtggctctgatgcaaccgacaatgcagttcgtgccaccaaaaagccccgaacagcaggatatccaggctttacaccgggcaaggcagcgtattgtcaatcaccgcactgctacagtttgtcaaataagagggctgttacttgaccgggggatccccattggcagtgctgtctccagagttcgccgggctattcctcttatccttgaagatgcagaaaacggtctaagttcccgtatgcgcagaacaattgccgagctctatgagctctttaacgatctcgggcgtcggatccatttttttgataaggaaattgaaacagtattcaggcaatcagaagcctgtcagcgtatcgccagagttaaaggcattggccctaaaacggccacggccgttgttgctgctattggcaaagaactgaatttaagaatggccgcaactttgctgcatggctgggtctggttccacgccagcattcgcgtggtgacagacaggtgctga

SEQ ID NO: 267255 - DNA, 366 bp, Klebsiella pneumoniae
atgccgatgattgatgagatgttgattaaggcatttgccagaatggatccaaacagcaagccagttcttcattcagatcagggctggcagtaccgtcatcgatggtaccagtatcagctccgcgattttggcgtcacgcaaagtatgtcccgcaaaggtaactgcctggataacgcctgtgcagaatgctttttcgggactttaaaatcagaatgcttttacctcggtaaatttaaggatatagatgaacttaaggatgctattgaggattacattcggtactacaacacccggcgaatcagccttaaatttaacggtctcagcccagttgaataccgtctgaaattccatccattgcgcatttaa

SEQ ID NO: 267256 - DNA, 162 bp, Klebsiella pneumoniae
atgattacaccccggtacttgaagagcataaaaggaaataccaggtatgctttccagtctgagggtatcctcattttgctggctgatatgtgcaagacgcacgtccagctctttgagccgctgttggctgacctccagttcctgcaatatctcgtgaaatag

SEQ ID NO: 267257 - DNA, 381 bp, Klebsiella pneumoniae
atggaacaaattatcggaattgatctggcaaagcgaatttttcaggtgaatatcgtgtccgcacagggtgagaagaaagtgaacaaaatgatcacccgcgaaaaactgatggcgtttattgctcagcagcctctgtcctgtattgtgatggaagcgtgcggcagtgcaaattactggtcacgccagttcaggcaatatggacatgaagttaaacaaatcagcccacagtatgtcgcccccttcagaatggggagtaaaacgataaaaatgatactgctgcaattgtggaagctgccagtcgcccgggaatgcgctatgtgccggaaaaatctcttgaacaacaggatattcagtgtctgcaccgggttcgccagcggctga

SEQ ID NO: 267258 - DNA, 1293 bp, Klebsiella pneumoniae
atgagccaactcgcagagaaaaaagaaaaaatacgttttttacctcgagcgcatactatatcatggctaatgcttttggtgaccacgctcgcaatattaatgaattcaattgacagactaatcttacctacattaatgcctgcaatcataaaagagtttgatttgacaaccgttcaggctggctggcttaattcattaagttttgtcggcacatttattggagcactcgttctcggatttatttctgactatataggttctggctataaaagagcgaggagttggttgattgctgtcgtgattgaaatcgccgcaggtgtagcgacagccttttgcagcacgtataatttgttcatggcattacgcgtcttcatgggactgggtactggaggctcagagccaataaacgtagcactcatcggtgagtggtggcaaaaagagaatcgcggatttgctataggagttcatcatactgggtttccattgggccaatttattggccctgtattaattggccttgttatagccttaacctcttcatggcgagatgcttttttattcatccctatgcttggtatacctattattatcgtacaaatgttcatcgccactaaaaagaatcaagagagagtctataactggatagatgaccatggcatgactccaccagagattatatcaatcgaaaaacccttaacatttattgaaacactaagggaaggtcttaaatgtttggcaaatcgtaattgtttatcagctatcattttaatattttgtttcatttgggctgaaatgggtgtagctacattccttacgctacaattaacccaagaagttggattagatttagctaccgcagctattatttcaggagcttctggcattactggttggctcggacaaatattctggggcggattctctgatgtaaaaggtcggaaatattgtctggcaattatcgtcgtcggttgggttgtcgcaacagtaggctgtaattttatcacatcggtaactagcggctggctaattcttattttctgggggttattccgtaattctccattcccagtagtttatgccttacttattgattctgcaccaaaaacagccgcatccagtatggggttaatgatcggcattgccgttggtagcgcaggtttcctggttgcaccatttgctggttggattatcacagatttcggttttacaacacattacatcatcattgccgctattatgttgctgtcatttattccactatcgctggttcgggaaacagtaaagaaatcttaa

SEQ ID NO: 267259 - DNA, 687 bp, Klebsiella pneumoniae
atgaatattatcgaaatgttaaaaacatataatgcggttgacttaacacacctcatggaattagatatgcctgtatggccaacacatccgcgctacttccaaaatgaggtggaatcttgggataaaaatgaagactcatatttaaatcaattatccttcggtgagcatacaggaacacatgtagacgcccccgtccattttattaaaggaggaaagagtattgcagatatagatgcacttcatctcatttcacatgcagtaaaaatagacatgtcttacacgcccccaactcaatcaattgggattgaacaaattaagctatgggaggaaaagcatcaacctatcaaagaaaatgatattgttattttttatactggatatcaacatcggtgggccaagcgtccaaacgataaagaattcttacgtgactggcctggattatcacgggacgttgcgcaatatctagcgaacaaaaaaattaaagcagtaggaactgatgcaatgactgttgatgcttacatacacgataactatccagctcacgacattttcctcaacaaagaaatacttattattgaaaaccttaataacatagataaattaccggataattttatctttatcgctctccctttaaaaatagctaatggatcagcatccccaatacgagcagttgcattgtattaa

SEQ ID NO: 267260 - DNA, 510 bp, Klebsiella pneumoniae
gtgtggctggaggtgatccgtgagaaccatgtggcggtggcactgtatcaatctctgggcttcgaggtacggcacgggctgtgtggccatttaagttcgcagactgtcagcgaggggccatcattattacaaggttatgatgtgctgactttgatgcgcagagccggtactgaggttaacggccagttgccgaggctgatggacccgctcactttcagcaccctgccgtgccgggagtttaccctcaatcagcaggcctttgccgtgcttgcgacgttaaccagcaggccacagctccagtttttgtgggttgaacccgccgcacgcgggcgcgggctggggcgggaaatgctgattgcttttacccgccagtttccggggctcggcacgtcggtgaccatcccggaaacctttaccccgctgtttaaagccgcaggctatgcgtccctgacactaccgcagtatgagatgagtgtggaatttaacgccccgtcgtcagcagggcgttaa

SEQ ID NO: 267261 - DNA, 792 bp, Klebsiella pneumoniae
ttgcatgttctgaagcatcgtcccggggactggcaagacgggagaaaaaagcgccagaccgatgacgccgacgtgcttgagcggatccatggcgttatcggtgaagtgccaacctatggttaccgtcgcgtctgggcattactgcgccgcgaatctgagacgctggcagtggcggtcgtcaacgccaaacgggtgtaccggatcatgtgccagcatgcgttgttgctgggacgaaaacccagaatgcagccggcaggtcgggcgcataccggaaaagtggccgtcagtgaaagtaaccggcggtggtgttctgacgggttcgagttccgctgtgataacggtgaaaaactccgcgtcaccttcgctctggactgctgtgaccgcgaggcgttgcactgggccgccggtaccggtggcttcgacagtgataccgttcaggacgtaatgctgggcgcggtggagcgtcgcttcggacagcgccttccgccagcccccatcgagtggctgacagacaacggctcggcctacagagcacatgatacccggcggttcgcccggttgctggggctggagccgaaaagaactgcggtacgaagcccggagagtaatggcatggcagaaagcttcgtgaagacgatgaaacgcgactacatcagcgttatgccacgtccggatgcccgaacggcagtgcagaatctggcgatggcgttcgagcattacaacgaatggcatccgcacagtgcgttaggttaccgttcgccgcgggaatatctgcgacgccggcaggcctaa

SEQ ID NO: 267262 - DNA, 273 bp, Klebsiella pneumoniae
atgacgctaacgcccgcgtttccctgtaaccagtgcggcgcttgttgtcgccacgtcaatcgcgccagtgaaacgcaatttctcgatcgtggtgacggcatttgtcgtcactatcagatggagacaaagctgtgcgcgatttataaaacacgtccgcttatttgccaggtagaaaaacagtatcagcttaactaccaacagcaatatagctggcaggaattcattactcttaatcgtgaagcttgtttaattctagaaaaacttgagcagtag

SEQ ID NO: 267263 - DNA, 1572 bp, Klebsiella pneumoniae
atgaacacagccagatttgactggggtgaagagttacatcagacggtagtcaagagtctggctacctcttttgggttggatttcctcttgctggaggataactacggcggcgatgtgaataccattcataacgctcgcgagggagtgtatgcctccgatgccgagcgtcaacggtacgagcaacgcgaagggtatgattctcatcattaccatagccacgaaaactacattgccaccaaccgggcgggaaaaaaggcgcacgaggtcggtacgttgaccgatacctacactggtgagaaatttgcggctaatgataaaaagaatctcgaccatattattgccgcccatgaaattcacaacgatccagggcgtatccttgccgaatgcgatggtgccgacctggctaatgattcatcaaatctgaccttcacgaatgagtcgctgaataaggcgaagaaggcgaaaacgatggatgccttcgtgcaaacgctacaagaacagcatgctgtgactacgcaggaaattgcccgtttgcgcagccaaccaacgctttccgagcaagagcaaaaacaactgaataagctggaaaataaagcagccgccgattttgaacggatgaaagaggctgacaaaaaggcgcggggaaaatacaacagtacgatcaatcaggaatattataccagcagcaagtttgcgaagaatgtcgccactgccacaatgaacaatgcatttcgcatgggaacgcggcagatgttggggctggttctggcagagacctggtttgagttccgcgagcgcattcccgtgatgttcgagaagcatcgtcgttcattcgatgccggagacttcctgcaagatgcggcggaggcattacgcgcagtctggcagcgagtgcagggtaaattcagcactttcctggcgtcctttaaagacggtgccatcggtggcgtgctctccagcattacgacgacgctcttcaatatcttctttacgactaagaagatgatggtgcgcctgattcgtgagatgtggaacaatttggtacaggcctttaaagttatggtctttaaccctgaggggttagcgccggggcagctggctaaagcagtgagcaagctggtggctgcgggtgtggccgtggctgcgggtgtggtggttaatgaagctttagccaagatgctcgtctttccttttggtccggaactggcggctttctgcggcgcgctggcgactggtcttctgacgctggtgatgaactacttccttgaacacagcgcattgatgaaaaaggtctggacgtttctggatacgtttaaagataagcatcagaaagcactagagtattatcagcaggtgaatgctgaactcgatcgttatctactggagctttcggcgttagagtttgctattgatacgtctgcgttatcgcgtttctcgctgcatcttaacgaggtgaatagtgaaattgagcgcggtttgttgctgcgtgcagaggttgagcgccgtaatattgcgctaccgtttgaagcagggaatacccgctctgtgcgtagctggttaagtaagctatga

SEQ ID NO: 267264 - DNA, 1098 bp, Klebsiella pneumoniae
atggcattaccattcattattctgggcgtcgcggcagcggcaacggcgtttggcggtaaaaaagcttatgatggctaccagaaaaaatcggaagctgatgatgtattagatcgcgcgcagcgtagctttgataagcataaagagagctttgatctggcaaatgaaacaacgtcgaaaaaactggccgaactgggtgaaaaagagctggaaatcggtaaagatttcaatgagtttaaaacgattgccgacgatctgctggcgcgtatggcgaaagatgggcataaagatcttcggctgaaggtaccacagcataacatcaataaaattcagaacttggcgatttccgccacggaatacctaacgacggtcatcggtgccggggtttctggtgctgccgctggttttgccgtgtacagcggcgtgatggcgtttgccgcagcttctaccggtacgccgattgccgccctgtctggtgcggcggcgtataacgccacaatggcggcgattggtggtggttccctggccgcaggtggttgggggatggcgggcggcgcgatggtgcttggcggtgcagtggtggctccgctgattgctattgcgggctgggcttacgatagccatgccgaaaaggcgcttaacaatgcttatcaaagctcccgtgaagtgaccgcggcggtggaaaaaatgaatgcggctgaagcgcagctgacgaaggtgcagcagtatgtaaatagcatttacgaatcaatcacccgtatgcatagcgtctttattcagcactactttgagccgctgaaagctatgcatgccgtcattgttgaacgtcatgagaagaatatcactaccgagattagtgagtcggaagagatcatggcgattatcgaccatggttatgaattagccgccataatgaccgacgtgatcaccacgccgttgttcaagccggtgacgcaggaaaacggtgaagccgttatcgaagatggcgtgatccaactgcagaccgacagcaacggtatgaacctgctgaacaaagagattctggacgaaaaactggcggcttctgattctgagtttgacgcattttcttctcgtatttaa

SEQ ID NO: 267265 - DNA, 447 bp, Klebsiella pneumoniae
atgtgggagctgtccggctataaccgcgtggcgccgcagtgggcggtccactatagcctgacctacaccagctggagtcagttccaggagctgaaagccaccggcagcaacggccagacgctgttctataaagaggaaggcttcaaggacgcctatcgtcttgcgctggggaccacctattattatgacgataactggaccttccgtaccggtatcgccttcgatgacagcccggtgccggctaataaccgctctatctctattccggaccaggatcgcctgtggctgagcgcgggtaccacctacgcgttcaataaagatgcctcggttgacgtcggcgtttcatacatgcacgggcagcatgttgaaattaaggaaggcccgtataccttccgttccgaaggaaccgcctggctgtacggcgctaacttcaactaccgcttctga

SEQ ID NO: 267266 - DNA, 531 bp, Klebsiella pneumoniae
atgcggattcctttcaaaagttgtctggagagtggcatggaattaacatttaaagacctgaaagaaaagcgactaaagcttgtcgaggctcagtggaagttgctggataagctccaggagcgagctagtcagttacttcaggagtactcggattctcttggcctgacatcacgcgagtggatcggttcagatggaacacgttggccttatgttgacattggcgtctgggaggataagggcaaattcttgcctgccctcatcccacagctcgacatggatagcaactaccatttgaattttgtgattgcaaccactcttgatgattcgcctttaaccggtggttatagacatggtgttagcgtttctatctggtatgaaaacgcgtcatattacgtgagtgttggcgcgggaacggatgctacctgttttcctgtttcaccacaccccggaggatttcatcaggtgtgcagcgcgattaaggctctgattaatgcatcaatggaccgttctatgccattcatgccttattaa

SEQ ID NO: 267267 - DNA, 1065 bp, Klebsiella pneumoniae
atgagcaccggcagcggccccgcttacccgccagcgttgaggatgagcaccggcagcggccccgcttacccgccagcgttgaggatgagcaccggcagcggccccgcttacccgccagcgttgaggatgagcaccggcagcggccccgcttacccgccagcgttgaggatgagcacctgcagcagccccgtttgcccgccagcgttgatgattagcacctgcagcgaccccgcttacccgccagcgttgaggatgagcaccgtcagcgcccccgtttacccgccagcgttgaggatgactaccggcagcggtcccgtttacccgccagcgttgaggatgagcaccggcagcggatccgtttacccgccagcgttgaggatgagcaccggcagcggccccgcttacccgccagcgttgaggatgagcaccggcagcggccccgcttacccgccagcgttgaggatgagcaccggcagcggccccgcttacccgccagcgttgaggatgagcaccggcagcggccccgtttacccgccagcgttgaggatgagcaccggcagcggccccgcttacccgccagcgttgaggatgagcacctgcagcagccccgtttgcccgccagcgttgatgattagcacctgcagcgaccccgcttacccgccagcgttgaggataagcaccgtcagcgcccccgtttgcccgccagcgttgaggataagcaccgtcagcggtcacgtttacccgccagcgttgaggatgagcacagtcagcgcccccgtttgcccgccagcgttgaggataagcaccgtcagcggtcacgtttacccgccagcgttgaggataagcaccgtcagcgcccccgtttgcccgccagcgttgaggataagcaccgtcagcggtcacgtttacccgccagcgttgaggataagcaccgtcagcgcccccgtttgcccgccagcgttgaggataagcaacggtagcggatccgtttacccgccagcgttgagaatgattcccctccaccgaccccgtttacccgccagctttgacactaccagcgactag

SEQ ID NO: 267268 - DNA, 3120 bp, Klebsiella pneumoniae; identical to SEQ ID NO: 162843

SEQ ID NO: 267269 - DNA, 285 bp, Klebsiella pneumoniae; identical to SEQ ID NO: 162842

SEQ ID NO: 267270 - DNA, 264 bp, Klebsiella pneumoniae
atgcagtcgaggcctgacgatcggtttgtggtggccgcctctccggtgtacctgcgtgccgtcgattcagatctgtatgcaggaagggaggcgctctgtaccccggaacagcttgttgtggtgacgtcaaaaggttaccagggaatcctgaagggcagcgtcatttataccagtgcagacatgataaatgcgctcaacacgaatatgactggcctcaatatcagctatgccactcagttacttgttaacgacgtatgtaaataa

SEQ ID NO: 267271 - DNA, 2022 bp, Klebsiella pneumoniae; identical to SEQ ID NO: 162839

SEQ ID NO: 267272 - DNA, 498 bp, Klebsiella pneumoniae; identical to SEQ ID NO: 162838

SEQ ID NO: 267273 - DNA, 672 bp, Klebsiella pneumoniae
atgtgtggacgtttttctcagtcacagacccgcgctgaatacctggcttatctggccggtgaggttgatgccgggttttctgcagtaccggagcctatcggacgctacaacgtggcgccggggacccgggtactgttgctcagtgaaagcaatgatcagctgcagctcgaacctgttctgtgggggtattccccagagtggtggcacaaagcgcccctgattaatgcccgtgttgaaaccgcagctgagggacgtatgtttcgtccgctgtgggaacgctgccgcgccgttgtgtttgctgacgggtggtatgaatgggtacgtcagaggaacaaaaaacagccgtatttcatttaccgcagggacggtcagcccgtattcatggctgccattggcgcacgaccgtttggtctgagggatgacggggaaggctttgttattgtcacggcagcagcggacaaggggcttatcgatatccacgatcgtcgtcctctggtgctgacgccggatgccgcgcgcgaatggctacgcgaaagtctcagtggtgacgaggcgggcaggacggccaaacagggggcggtgcctgctgaggcattcacctggcatccagtttcccctgcggtcggcaacgtgcggaatcagggggcgtcgctaattgaacctctctcgtga

SEQ ID NO: 267274 - DNA, 330 bp, Klebsiella pneumoniae
atgacagagaacaaccaggaacttatcgcggcaggatttaccagtaaggaaatagcgagaatcaaacgtcaccaggcgacgggggactcgctggaaaaggtgctgaaggatctggccggctatttcctgtcggtagcctggatctccggcgggatggtcatcatcaccctgctcaccgcgatttttggcagcgccagccatgttatctcctgcgtggttgccgtcgtctttctgctgattgtgttgcttctggtgatgccggtcagacttggctataaatcatggaagctgatgagatcacatatcagcgactccggtcatcacgggtaa

SEQ ID NO: 267275 - DNA, 804 bp, Klebsiella pneumoniae
atggatatcgcgctttttcccggtcagagccggcgccagtgggctgatacaatgatcaatctggaagcccgaaagcttgttaataccgcaaataccgtcgcggccatgcacctcagtgattcactgacccgtctgaaatttgtggatgaaatcagacaggttgtcatgcaacagtttgacgcggcaaggagagcaagaaatgatgaagagtgcatttcctgcctgaagaacctcagggctgaaaatgagtttctacttgaacagtcgcgtatgctgaaaaccggttatgcccggatctacgctgaaatacagtacgtaacagagcagaataaaattgtcggatacttcatatccggcattaaggtcgttctggccggcgtacaggctgtgtttggcggtgttatgatcgccaccatgacaccagctggaatgcttgccggtgccgttctggtcggtgatgcccttaatacggtatcacgggaagcagcccgtcagctcctgaatgaacctgcttcagaggggatcctggcggacggcgccatgtccgtagcggagtttatgggtttcagccgcgatgtcgggctggggatttttaatgcaaccacgcttgcagccagcgtttatggtgtgtttggtctgaccgggaaagctgaggcctggcgtcttttccgttatcttcccggagactattaccgcaaggtggaaaccatgtctccgggcaaactgacgatgaaggttctgggatggggggtcagtgcaaaggtggtactggaactccttacccgtgatgaccggagtcgctga

SEQ ID NO: 267276 - DNA, 477 bp, Klebsiella pneumoniae; identical to SEQ ID NO: 110164

SEQ ID NO: 267277 - DNA, 372 bp, Klebsiella pneumoniae
atgagctggaatccagagaccccttacaacgatctgccgataccgccgcccgatctggagcgcgttgaaacacgcaatgtactcaacgcatgcataagtgcgcgtgcagcaattgcaaagttgaaaactgtcagtgagctgatcccctatcagagggtactgataaacattctcccgatgctggaaacgaaagattcttcacgcattgagaacatcataacgaccagcgatcagctctttcaatatgctgaccgcgcaagtggtgcagatccagccacgaaagaagcactgcgctatcgtacggcgctttatgacggttatatccaccttgaggcatatcagctctgtgaaaacaccgcgataactatctga

SEQ ID NO: 267278 - DNA, 288 bp, Klebsiella pneumoniae; identical to SEQ ID NO: 224608

SEQ ID NO: 267279 - DNA, 375 bp, Klebsiella pneumoniae
  misc_feature (6)..(15): n is a, c, g, or t
atggtnnnnnnnnnnttcttccctaatcttaagtttgcaacgtatatgaaatttttagcagctcgcaagaagcctaaaatgattcattatgcgggtgagaacaaaccatggaataccgaaaaagtcgatttttatgacgactttattgaaaacatcgctaacactccatgggagatggaaatctataaacgtcagatgtcgttagcggcttcgattggtttaacccatagcgagccgcaacaacaaatcttgttccagaccaaaatcaagaacgtactgatgccttatgttaataaatatgcaccaataggcacgccaagaagaaacatgatgactaaatattattacaaagtacgccgtgctattcttggataa

SEQ ID NO: 267280 - DNA, 579 bp, Klebsiella pneumoniae
atgtgcgaactcgatattttacacgactctctttaccaattctgccccgaattacacttaaaacgactcaacagcttaacgttggcttgccacgcattacttgactgtaaaactctcactcttaccgaacttggccgtaacctgccaaccaaagcgagaacaaaacataacatcaaacgaatcgaccgattgttaggtaatcgtcacctccacaaagagcgactcgctgtataccgttggcatgctagctttatctgttcgggcaatacgatgcccattgtacttgttgactggtctgatattcgtgagcaaaaacgacttatggtattgcgagcttcagtcgcactacacggtcgttctgttactctttatgagaaagcgttcccgctttcagagcaatgttcaaagaaagctcatgaccaatttctagccgaccttgcgagcattctaccgagtaacaccacaccgctcattgtcagtgatgctggctttaaagtgccatggtataaatccgttgagaagctgggttggtactggttaagtcgagtaagaggaaaagtacaatatgcagacctatga

SEQ ID NO: 267281 - DNA, 3189 bp, Klebsiella pneumoniae
atgcgcaagaacaaggagactggggtcgaagaacagaccaaagtcaaagcttggcagcgttttcctagtggcgggaagataacattatcactagtagagggggctatttcccctcaatctttagatagttcatctcctgaagtactaatacagggcaccattcgtcccaagaatgaaaatggtgatcgtctggtcactatatttcttgtaaatactcagaaagagccagaaaccaaccgagatgcagcatgggtattccaaccagaaatcattgctcgcccagtgaaggacgcagtcgaaagatctatttttaggcgcaagccagttttggattgtgacggtatggatcctgaacgcgaagcgctggaaatgatttaccgtaaccatgttgaatttgcagtcgggcatggtgttgcagtacatgctgaacctgcagataacactgaacttgcgactgaaattcgtacaactgtcatgccacagtatgaagttcagagaacagagacccccggccttgatccatcagatcgtccggcgatgcaagaaatggtcaaaagtggtttacttgacatgcagaaactggccactttggaggtggaaccactgatcgatgcattgaatgtactaaccaaggactatctggattggattagtgaacaacgtgccagtgtaggtattaaaattacaggttttgaaacccaatctcagatcgcaatggatcgttgtaaggagatccattctcgcctgcaaaagggtattgatacacttaagcttaatgaaaaagcgctggcagcatttcgtttcgccaacaaagcaatggcaacgcagcgagtacgaagtttatacgcgttggctaaacgccgtggtgaagatacgactatcgaatcatttgatattgaaaagaatcgtagctggcgtccttttcagttggcattcttgttgctctctataccttcgttggcagacccaaaccattccgatcgtgtgcagcctgtaaatgcatatgctgatcttttatggttccccacgggtggtggtaaaactgaagcttatttaggcgttgcggcttttacaatggccatacgccgcatgcagggtaatttgggggggtatgatagttcgcgcggtttggcggtaataatgcgatatacattgcgcctgctaacattacaacaattccagcgtgcgacagccttaatttgtgctatggaagttttgcggcgagaagcactcaataatggcgacgtgtctctcggattagaaccatttactattggtctttgggttggcaacaaagtaacgcctggttcgactgaagagagtcatcgagctattgaagatgcccgtaatccgggaaaaaaccatgcgggaacggcctcacctgcacaattaactagttgtccatggtgtggttcatcaattatccccggacaggatgttgaagttaaaaaggataaattggggggaaggacgtttgttttttgcggtgataaaaaggggcgttgtgacttttccaaaggaaaatcaagtaaacaagcccatccaggattgcctgtattagtagtggatgaagagatctatcatcgccctcccacaatgatgattgctactgtagataagtttgccatgatggcatggcgtggccaggtgagaacgcttttcggccgtgtaggattggaatgtgaacgacatggtttgctctggcagggggctagctgcacaggaaatcatcccgcagccaaaggacaaccttcaactaaagttagggttatcaatccaatacgaccaccggaccttatcattcaggatgaattccacttaattagtggacctttgggcactatggttggattgtatgagactgctgttgatgaattatgtagttggaatcttgacgggaagtcggtcagaccaaagatcattgcttcaactgcaacagtccgtaaagctaaggaacaggtaaataatgtttttatgcgccaagtggcagtatttccaccacatgggatagacgttgaggataactttttctcagtacaacgacctataaaagaaaagtatggacgtcgttatcttggggtatgctcgcctggcagttcaaggcccgcaatgctgatccgtgtttacactgcattcctgaccgcagcacaggaattattcaaccactttggtgagcctgctgacccttatatgacaatggttggctatttcaactcgctacgcgaattaggcgggatgaagcgacttgcagaggatgacgtacaaacacgttcttaccgggtgcgaatgagcatggtggaaagaccggcattggcacaacgtagtataagtaatgttcgtgaattaacttcccgagtatccagtcaggatatccctaaatatcttgataatttagaggttaagtttaaatctgaatttgatactactactggtaagtatgtgactaaatggcaggagggggatactcgggctatagatatcgtccttgctactaatatgttgtctgtcggcgtcgatgttaaccgacttggtcttatggcagtaaatggtcagcctaaaggaacggccgaatatatccaggctaccagtcgtgtagggcgttcatttcctggtttagtttgtaccgtactaacttgggctcgtccaagagacctttctcattacgaaacattcgaacattaccatgccaccttctacaagcatgtagaggcccaatctgttactcctttttctcctcgagcgatggaccgtggtttaacaggtgcgttattaagtcttgttcgtctggaaaacgacgaattcagtcctaacgatggggctggtaagttgaatatgtctaatcaagccgagatcagtaatgcgattaaagcactggcgaatcgcgctggcaatgttgcagaagataattctcgcaaaaaattggcagagaatgaactgaaagaacgtgccgacgaatgggcaaaaaaagcgtcaatgggcggacggattctggcatatgaaaagcgcgggcctgaaaaagataagactgtcagcttattagactctccaggcctgaagccttgggacaactggacagtgcctatgtcaatgcgagaagttgaaccaggtgtgagacttataatgaacaccaaccatatagcggacgatcacgattggaagcctcgtcccgcaactaaggatgaggactga

SEQ ID NO: 267282 - DNA, 306 bp, Klebsiella pneumoniae; identical to SEQ ID NO: 266945

SEQ ID NO: 267283 - DNA, 225 bp, Klebsiella pneumoniae
atgaaagtaggacagaggcaaaaactgtttcttaaggctatcgctcagcagggaaacagtgactttgtattctcgggcggggtcactgaccaacgtgtaagagagggattagagaagaaggggctacttaaagttgtgcgtcaatctcccggctattacccaatctacgaactgaccgaggctggaaaagtgtactgcaaattacacgggtgggaggctgagtga

SEQ ID NO: 267284 - DNA, 207 bp, Klebsiella pneumoniae
atgaatcagcacaacacccgccttattcgtttaccagaggttctgcatcgcactggatacggtaaagcctggatctatcatctaatcagcaaaggatgtttcccatcaccagtgaaaattggatctcgtgcagttgctttcattgaaagtgaagtggaagagtggattcaattaactatcgaaaattcaagaaagcatgtcgcctga

SEQ ID NO: 267285 - DNA, 480 bp, Klebsiella pneumoniae
atgactcccaaaatgaaactcaaacctaaaacgcccaagaagatcaactctgcgataaaaaaattattgaaggaattaggcttaaaagatcttccagtttacttgccattaacaaaagtaacaggttctcgcgctggatattgctttaataattgtgaagattattcaaaatgtaataataatgcttcgattgtatacggttggatgttctgggaagacagaaaaaatggattcactgaagctgaattccatgcagttataaaagaaaatggggtgttaaaagatataacgcccagagtaaataatgaatctagtattctttttgtcactgacacccaacgaaatagcggtagaagaatttttgactcgtggtactcatgggcaaatataaaaatgtttgatgacatagttgtcgaggaaacatatccactagaaataaaagagcttgataatgactatagtgaaataattcgtttataa

SEQ ID NO: 267286 - DNA, 1302 bp, Klebsiella pneumoniae; identical to SEQ ID NO: 266913

SEQ ID NO: 267287 - DNA, 657 bp, Klebsiella pneumoniae
atgcctcgtgaaagaagagagtttgacagaagaagtggggtaaaagacccgtctttaattgtaattgcttgtgaaggagagaaaacagagcaggactatttcaatagtatatcggaactatgtgatgagttaggatcacgtttacaacttaaagttctcccgccgcgagaagaggggcatagtgcgcctagacatgttttagaccaaatggataaatataaaaaagaatttggaattaaagtgaatgatgaattatgtctggtaatcgatagggataaacaatcatggacagaggctactataagtgaagttgctcagttttgtcatgccaaacaatatattctggctttaagtaatccatgttttgaattatggcttcttatacaccattatgatgtaatgctcctcggtgaggatgaaaaaagaagtattttaagaaataaaaatgggtatatgaaaagcaaactacgggatgttattggacaatataacccaagttctattaatattcatgatttctggggggtaactgaaatcgcgattgacagagctaaacgtttagatgttaatccagctgagagatggcctaatgaaataggaagtcgtgtgtatataatcatggagaaaatacgtcagtcaattaataatcaattataa

SEQ ID NO: 267288 - DNA, 345 bp, Klebsiella pneumoniae
atgttgaaagacaaagtttatataattgatgaaattgatcgtagtttgcatccaaagattacaaaaacatttatgaagttattctctatgaaaactgtcggtaaagacagtcaactgatagtcaccactcatgaaaccggtcttttagattttgaacttatacgaagagatgaggtttggtttactgaaaaaaataaaagtggaatttcgagaatttattcactcgaagaattccagcctaggtttgataaagatatacgtaaaggttacttagtggggcgttttggtggaattcctaaaataaagaatatattatcaaacgttgaagattttcagaaggactaa

SEQ ID NO: 267289 - DNA, 513 bp, Klebsiella pneumoniae
atggccgttatactgctgttgtgcgcgctggcctgtatgctcttcccaatatatagcggtgtggtcattagcaccctgactggtgctttaatgttcatctgtggcatgtactctgtggcgatggcattgatattcattaaatacaatactcgttcttacatctcatcgttgttatttggaattatttattttggcgtcggctgtggttttatctttagcacgtcattcggtattaatactttgtcattgctgttttgtgttttatttatccttgccgggtatagtcgtatcgccatgggatttaaagatcgggctatgaagggtcgttattggtatattttcattggcataatagacctcatcatcgccctggcctggctccgcgctagcgaagacgccaactatatcatcactgtcaccttcattggtctggaaatgctgttctgtgccgggttcttcttagtgctcagctatgcactgaataaagcacaaaaaaaattaattaccacataa

SEQ ID NO: 267290 - DNA, 564 bp, Klebsiella pneumoniae
  misc_feature (482)..(490): n is a, c, g, or t
atgcatcgtcttcatccctatcctgatgtgcaggtgatgtttcgccgcctgctgatcgccaccctgattggccttctcgccgccctggcggtggcgctgtttcgccacgctatggtggttctggaaacgctgttgctcagtaatgacagcgggagcctggtcaacgccgcacagtcgctgccggcgtggcgtcggctggttacccccgcgctgggcggcctgacggcgggaaccttactctggctctggcaacgacgcagcgtcgcgcgtccgcatgccgccaccgattatatggaagccctggagaccggcgacggctgtttcgatacgccggcaagcctggtgaaatcgctggcgtcattgctggtcgtggtgaccggcagcgcgattggccgggaaggcgccatgatcctgctggccgcgctggcggcctcgctgtttgcccgtcgcttcacgccgcagagtgaatggaagctatgggnnnnnnnnngtcgcctgcggcgcggctgccgggatggccagcgcctatcatgccccgctggccggcagcctgtttattgctga

SEQ ID NO: 267291 - DNA, 1137 bp, Klebsiella pneumoniae
atgtttaaaaaaagaccatcgcaacctgaaacaggctcggttcaggacgtggtatcgcgtgaaagtaagaagttttaccgtttgtataaatcgcatgtgttatcaaaaataaccctgacgattattggtattgggtttgcaggttttagcggctggtccatgtatcaggataaacagaaaaacggtaaaggggcagaccatatcgcggttatccgtatccatggtgaaatgggtactggctcgcctacaggcgacggtgtcattattgcccgcgctttacgtgaagcatgggataacccgcacgcaaaagcgatcctgattgaggccgaatctggcggcggtggtccgtctgacgctattaatatttatcgtgagataaacgagcttcgcgactccctccatggagtaccggggctcacaattgaaaactccgaccccacaacatccccgaataaaaaggacatgccaccagcgccctctgaagcggttaaacaggcgttgctgaaagccgtgggtactgggcatggcaaactgccagccgccgcccgggacgtccgccccatcatcgtcagtattaaaaatatgtgcgcctccgcctgttattacgcagcctcaccggctgatgcgatctatgcggatcccaacgccatcattggcagtattggcgtacgtatggaccactgggatgtgtccaggatcatggaccgtcttggtgtggctaacgaaccgttgacggccggagcctggaaggcctcacttgacccctggcgtccgattgatgacgaaaccaaggcctttctgcatagtgagttactcaacaaaatgcatgaccagtttatcaatgatgtcgaagccggtcgtaaaggaaagttactttcgcgtgaacaggcggacaaagaacagctctacacggggcgtttctggctgggggaccgtgcgaagcagtttggccttatcgatgatacagccaccagcacagaggtgcgtgaacgcctgagtattgtctacggcaccacgcgttttcgcgactacaacgcgccaaaagcatcgttaagcagcatgttaggattgtcactggacgtgaaccttaaagaggctttatccagtgcgcttcacaccaccagcacagtgaggtag

SEQ ID NO: 267292 - DNA, 324 bp, Klebsiella pneumoniae; identical to SEQ ID NO: 227619

SEQ ID NO: 267293 - DNA, 648 bp, Klebsiella pneumoniae
atgagtatctccactacgaaacaccataacattggtctgtctgagctacagcaacaagaaatcattactaataaattcgaaggtgaaacttacacgttcgttgagactttctctggcacagtcatcgattccgatcctggaaatggtcagatctgggtaaaaaccgacgctggggataagaagcagatttccgactatggtatcccgttcagaaattcacacactatctataaatacgagcttcgccagtatagtcagaatggttcatatgatgtgtataaagatgcacttatcgttaataaaaaaacgggtgaacacaaggtaaacttaaaaaggaaaaccattattatccccgcttttctgacaatgttatttcatactgcctccacagcatcgtattacagagctatgcccgttccaaagatgctcaccgttatttttattttactttgtgctgctgcgcttatttcatttctcacactgccttggggatttaaagacggctatatgtggagcgaccacaaatacatctggtttacatatcttttctcaagaattggaagttttatttgtatcagatggattaaaagaagaagcaagaaatttgatcatgaactaagaaaccttatcgatttaataaaaagataa

SEQ ID NO: 267294 - DNA, 414 bp, Klebsiella pneumoniae
atggaaaaagtaaatattaatctcatggaaaggtatcttcttttgcttgatagattcgttgataaactctctgaatcaggctttgaagaaaaggaaattatagagcaatcatacctgttttgtgccggtttttacattaaataccagtctgaaatagaaaagctaacgttctcaaacagggaagtggtattgagttttttgcttctttcttattattgctatatcaataaaattgaaaatgacatgatcgataaaggacgaatgaaaagtgtatgttcttcacttatcgatttcattgtgagcaatggcagtagaaccgaaaaagtctacattaatgagagaaggaaacatgaggcttctaccctaaaaagagagttatacatcaaagagaagaaaagaaaatatggattgtga

SEQ ID NO: 267295 - DNA, 1098 bp, Klebsiella pneumoniae
gtgattgcaaccgacgtcttcagtggaagagcgatcgaattctcctatgcagatacacctaatacttgtgttatacaagcgatatgtgcttcctgtgcatttccagttttcttcgagccaactgaattaaacgggtattatttggttgatggtgggctttcatgtaatttaccatcatatatttttcacaaaaagaaacacaaaagattgcctgtctatgcattcgatctcgtttcttcggttcaggatagtaaaaaccttcgagggtataatatattcaaacatatcaaaaatatggtttatgctgcattggatgctagtaataacataatatctaatgtggtagaaggaatagcagtgcctataaaaatcagtgcggagatcaatacattagatcttaacataagatcgtcccaattagatcagctgtacgaaagtggttattacgaagcgaaaaaattttttaattctcataatttgacgcatttatataattctagcttatccaaaaatcaagtgggaagattaatctatggtagagctgagtcattgttatattattttggaagggatcttccacttacgtcaacaacaaaaatttggttatatgcttcgataactgctgatgatagcgaaattatatctataggcaaatgggctaagggttttttaaatgttcaaaaaataataaaaaaaataccctctaatgataagcctacaattccttttatattccagtatgttcatcaaagtgatcatgtttttcatttcgcatcaaatgataaaaaacaggtaaagaatgagtgccttacctcctggcgaaaaaaatcaataactgtttcttattccgctaataaaacaagggtgtgttatccaatttttcaatatggttcggatgaagtctttgctttaatcagtatttccttcaattcacattatagtgaatgtctttacattgaggataaaagcttaccttgttctgaagaaattattcttgacattgacagtaagtttgctattcttttagaggaactatctgaattaattagaagttcattatatggacaacaatataatttcatgaagtcattttgttaa

SEQ ID NO: 267296 - DNA, 207 bp, Klebsiella pneumoniae
atgtctaacaaaacgaaacgcacgatcatattgacggtaaaaaaacatcctgatgctcttacgaatgataattttttcactagagatgacgctgttgtaatcagtaatgctcgtaatgctcttgaaatgaagcaagctaaacaggtgaatcgaaaaactaatcagcttaagcgctttttagcagcaaataaagcattagtttcttga

SEQ ID NO: 267297 - DNA, 657 bp, Klebsiella pneumoniae
atgttttttcgccagagagacggcctggcgggaggatgtcaggcaggcgtccacagaacgaatagcggcatgctcgccaggaggaatagcatccccaaaacgagcccgccatatcgcctcattttgctttattgtcggggtatgctcgcaatgtgttgccacaagacaaggggcattagcgaaaatactttccagcacctgttcatcgtccaccagcatattcccggtagaagcccccataaagaccttcaccccacaggcttgcgaagccgtaagcgctttcagttcgtcaaggttatcgttcgtcgcgccgaagtaaaaactgtggttcgccagcgaagaacgcgaggcacgctgaaatttctcacgcagcgcctgacgggttgtcgtgggtggcgtaacgttcggcatttccataaaactggtaatgcctcccattactgcggcagcggattcagtggcaatggttcccttatgcgtcagaccgggttcgcggaaatgaacctgatcatcaatcataccggggatcacccatttccctcgcacatcaataaccagccattccggtcgggagggaataaacgaggcaattttctggatccgtcccttatcaatgaggatgtcggcctgatagcgcatgtcctcactgattattaa

SEQ ID NO: 267298 - DNA, 624 bp, Klebsiella pneumoniae
atggccttatcatctgtagctattgtggctggtgtagctactttggcagcatctcttttcaaaaatacagaacttcgggtgatagatatcgttgagttgtcaaagctcagtgttaacgatattgaaaacaaccctcagttaaaaattgtcaaaaatgatattaatgaacatataacaggcattaaagaccctgcatttcatgaggttctaattgaaattatggctaagcataataaacctgttggttacttcaaaaaagttgatggtaggttgcagtatgaccattcctattatatttcaattaataagatgggctgggggcaatacattaaaaagttaattaataatccaaatgattgggttgcaactttgatatatgttatttttattataacaatgttcggaatagcagtagatcttgataaggatccacaaacatttaatcaaggtctgtctatatttttatcaggtatggggggattaatgtttagctttttattaaaaggcttatcggttcaatggagaaatagctttcataatgtcaaggatttcgaatataaagaattgtttaaagagtacgctaacagtaaaatagatgaaatcatatcatcaaactctaaataa

SEQ ID NO: 267299 - DNA, 366 bp, Klebsiella pneumoniae
atgataaaacagaagttaaagaatgactgggatattcctgcaattcttcgtcttactaaagaacaaaaaaggctaaaattgtctgttcaagaagttgcagaccttctggacttaagctcatacttttttgagttagctgtcgatgagaaggtggatttcaaattttatgaccttcctgaaaaggttaaaaaaaatctgcattatgcaggttttgatattttctatttaatgactggtgagtattcaggtagtgaaccggcattgaaaatcgccagttttgaatattctataaaggatatgtctcctgaagaaaaaaatgaagtgagagtgttgatagaaaatataccgataacaaaaccacactaa

SEQ ID NO: 267300 - DNA, 162 bp, Klebsiella pneumoniae; identical to SEQ ID NO: 161727

SEQ ID NO: 267301 - DNA, 1095 bp, Klebsiella pneumoniae; identical to SEQ ID NO: 235317

SEQ ID NO: 267302 - DNA, 423 bp, Klebsiella pneumoniae
atgactaaacctacccgcgctgaacgagaaaaaatcctggcgatgctgccagaagattacatgaatcctgtgcaacaggactacttccggcggcttatccgccacgaaaggcaggaggtgcttgatcatatagaccagatgaagcaacaactgcaggataatccagaaacgggtgacgaaggtgacatcgccattcgtgaagaacagttacgtctgttgttcagacagatagacagagaaagccgcctgttgccgaaatatgatgcagcgctgatacggcttgaaaatggagaatatggcttctgccgggatacaggcgaacctatcggtctgcaacgcctgctactcaggcccaccgcagaattaagtattgaagccaaaacaaaggaggaaaaagttgagattcagtaccgaaagaaataa

SEQ ID NO: 267303 - DNA, 426 bp, Klebsiella pneumoniae
atgctgaaaaatatcctccgtcagttcattacgcaagccatgccgttattcctgattatctgcagtgttgcggggatgcttgattacgcagggatcactcgctggctgagtgaaacgacggcacctttacttcatctttttaaactgccagcagaactgatgcccgggatcattttttcactgctaaggaaagatggtttgatggtgctcaatcaggatggcggcagcttaatacagtccctcagcacatctcagttactgctacttgtctggctcgcctctacgttgatggcctgccttgtcacggtatttaccatcgcccgggaaataaactggcggtttgcagcagcagtggcgggaaaacaggtattaagttctctggtggtggctctggtgatatcccagttatttattcatgaggcataa

SEQ ID NO: 267304 - DNA, 204 bp, Klebsiella pneumoniae
atgctcaaccctgatatcaaatgcttcacaaaagggtgcacaacgaaaaacgttattgagccgacgggcagcatcttcgcaaaacatcagattctgaccgttagccaccgcaaaagcctgttcgtcgctccgcttgacaaccgtttgcacggctgtcccgagagcaacttcagcataatcaatcagttcaatcacaggcagtga

SEQ ID NO: 267305 - DNA, 204 bp, Klebsiella pneumoniae
atgaccaaagagtacctgccacaccagaaacgtgtcatggatgaacacgaagaactgtgtggccgcatcaaagaactggaggcgtacattgcaggcgacgagtttgctcgcctgctgtatgtcgaccgcatcatcctcattaagcagctggacacgatgaaggcgtatgacctgattcttcgtgcccggatcgctcgtttttaa

SEQ ID NO: 267306 - DNA, 549 bp, Klebsiella pneumoniae
atgactaatatcaccgaactggcgcagcgtatgcgcacggcagcagagaaagccggagtcgagcagtgggttaacaatcgcggggaggtaaacacagccgattatgaggttgatggtggcacgtatatcgaccacatttgcgactgtgaaatcgtcggaacagaaagcccgcgtgcagaattcatcgccatggctaaccctgccaacgtcatcgacctggtagaggcgctggagaaggcgcagcgctacatcgaggagttgcgggagtggaatgctggtctcgcgcaggagtcatgcgaacgtcaacaaagaatatccgagctattggaaggaaaagtaggcaacgctcttcttgagcgtgaaaaccatcatgttgagctggttgggaagttggctgagcgcatcgccgagctggagtcccgcaccgtcaccgtgaagctgccggagtcattcaggttggctaaatcatcgagcggattaacttactactacgccgacgaggtcgatgcagcgcttaccgccgctggcatcaaggtggaggctgagtga

SEQ ID NO: 267307 - DNA, 1125 bp, Klebsiella pneumoniae
atgagtgagtggtcaaacgtaaatctagcgtcattgttgtcgtttggtaatggcaaatcccggccattagattctggaaatattccagtatatggcggcaacggtattatgagctatgtatctcactttaactatgatcatgaaacaatcataattggtcgtgtaggggcctattgcggtgctacttattatgaaaataagcccatttggatttctgacaatgctctgtcagccaaagcggttggtgaacataatacaaaatatttatattatctattaaaaaacttagatttaaatcaatttgcagaaggttcaagtcatcctctgctaacacaaaagctgttaaattcaattgaaacaaaaacagcattaaatcctaatgaacaaaaatctattgcctctgtgctgtcctctcttgatgacaaaatagatctgcttcatcgccagaataaaactctggaatctatggctgaaaccctgttcaggcagtggtttattgaagaagcacaagatgaatggcctgaaaaaagcctcaatcaatatgttgagctaaataaatcatcaataagtaaaaagtatgatttcaaagagattcaatacttggatacaggttctctaaccaaagggaaaatatctgaacttcaaaccatgctgttatcagaggcaccaagtcgagctaaaagattagtcaatgagtttgacataataatatcaacagtacgcccagatcagtgtcattatggtatttgcattgatccaccgtcaaatctcgttgtttcaacaggtttttgcgtcatttctggcaaatcaattagcccattttttatttactatcttttaacttctgaggatatgaccgaatatctgcactcaatagcagaaggttctacgtcaacctatccttctttaaaaccagaagacattggcaatgttttattcctctatccaggtgaggaaaaattaaaaaactttcataaacttgttggctcttactggaacaagattcataacaactacaaaaaaatacagaccctagaaaccctccgagatactctcttaccgaagctgatgagcggtgaagtacgggttcagtatgcagaacaagcaatcgcgtcagtaggataa

SEQ ID NO: 267308 - DNA, 267 bp, Klebsiella pneumoniae
atggtaggactggagcctaaacatacggcggtacgcagcccggaaagcaacgggatggcagagagcttcgtcaaaacgatgaagcgcgattacatcagcatcatgtcgaagcccgacgggttaacagcggtaaagaaccttgcggaggccttcgaacattataacgaatggcatccgcatagtgcgctgggatatcgttcgccacgggaatatctgcggcggcgtaccagtaatgggttaagtgataaaaagtgtatggaaatatag

SEQ ID NO: 267309 - DNA, 792 bp, Klebsiella pneumoniae
atgaaatatctacccggatcacttgaaataaaactttatgaaagattatcgaaaaccgatatacttgacatcttagcggaacaaatgactatgcttgaggaaacatttggcatcgaagagtttagtctaaattactatcttggatgttatattgatagtaagaaacaatccttctatcatgaagaacataacgctattgtagagtcatttaatttaaaaaatgatacgaagcttgagaacacgtctaaactcatctcaaaaaatggtaatgcccgaattgtttcctttgataaaaatattaatgtagataaaattcgctcaaccgtagaaagcattcagatgcataatccatatcgatattggtctaataatatcaaagttattccatcatccgtagttaaaaacatcattcaagataaagagagaaaattacaactagaaagagataaaattaacttactcaaccaactaagacgtaaacaacaagaggagcaaaagagtaaggagcgtgaagaatttgatcgtccgttaaaatcactcattgcaagaaagatcatggaaagcggtctaactgatgtagagttcaaaagaacaatatgttccagcttcgactatataaaaagcggcgctgtaatagcaaaatacctagccaataaacctgatttattagaaaaatatcatgattcccgattaataagaatgtccatcaaaaatgatgaaggtaaagtcggcaaggttgaactctatgatctttctggagcactaatttttgaaagctataaaaacaaataa

SEQ ID NO: 267310 - DNA, 267 bp, Klebsiella pneumoniae
atgacagaccatataaaaaaagaaccggaagatgaaacaattattgatagtgctaaaatttacgatgcgcttagaaaaaattattttgatagatgcttcctttcttcttacttagatgaaaaaatagatgataacttacatcctttcagtgacgaagcatataataaaatgaagtccttgcatgatgaaagagatctcatctctgtttcagaagatgccatttttgttgattatcctgaagatgttgatcaagaagaaataatatag

SEQ ID NO: 267311 - DNA, 1005 bp, Klebsiella pneumoniae; identical to SEQ ID NO: 227861

SEQ ID NO: 267312 - DNA, 957 bp, Klebsiella pneumoniae
atgaaaaaattgtttatatccctgctgtcggtactgtctgcttcagtagccagtgctgccgattttcctgttactattgaaagttgtgggactcctgtaacattctccggcccgccgaaaagggctgtgatcaacgaccttaatatggcagagatggcgtttgcactggatttgcaggatcgtattgttgggctgaccggtattagtggctggtacaaaatgacgccggaatttaaaaaggcgatgggctcgatccctgaactggcacccaaatatcccaccctggaaacattgctggcagccgagcctgatttctttttcgctggctggaactatggaatgaaagtaggcggcgaagtgacgccggatacgttaagcaaatatggcatcaagactttcgttctgagtgaaagctgtgtgttcaccactgcgcacaaaaataaagccacgatggatctgctgtataacgatatcctcacgctgggtaagatttttggcaagcgcaatgacgcactgtccctagtcagcggctggcaaaagaggctgagtgaactgccgaagccagcggcaggtacccgtcctttaaaggtgttcgtctacgactcaggtgaggataaaccgtttaccagtggtaaatatgcgatgcctacggccatgattgaggcggctggtggtaaaaatgcaatggaggcgctggataccagttggggaacgacgtcttgggaaagcgtggccgctactgagccggacttcattattttgttagattaccagacgggcagcggtgcggatacactgcgtcattttcttgagaatcatccgttaatgaaactgactccggctgttcagcatcatcgatacctgaaattacaatatgctgaactgacgccgggaccagctaatgttggtgcggtggaaaaactcgcgtgggcaatgtacccgacagaagcgaagtga

SEQ ID NO: 267313 - DNA, 459 bp, Klebsiella pneumoniae
atgattcaacgctccacgcgattgcagcgcctgaaggccaagcatgacgtgacttacgacagagttaaaactggcgctgaaaaagatatccaatcaatgaaagaacaaataactgaatctcaggcaagaatgggcgagcttaccagtgaacgagacgagttacgtaaaaaaataaattttttaaataaagaaattcaaaaccttaaatcaaatattgaggacgcaaattcaattatcactgagaagaatgagcgcattagccagcttgaaaactcaagagaatctttattggcacaattcaatcttgatattgcatcacaaagcaaactacagcagtcttctccgttggcatcggctagcgcattagatatgttaaaaacaaaagttgacaatgcatttcttaaacatgaaaaaaataaagaatatatcattaaagattcaaaaaacattaaagattag

SEQ ID NO: 267314 - DNA, 720 bp, Klebsiella pneumoniae
atgaaagaacgcggaatgatttttaacggggagatggtgcgggccatcctcgacggtcggaagacgcagacacggcgaatcatcaagccgcagccagaggcgacattaagcggaagtttatccggtaagtggttaagcagacctcttaacggactgttgttgccgaaaattgaagatatcgcaatccattgtccgttcggtgtcgtcggtgatcgcatctgggtgcgcgagacgtttcaggggccactgttcgactacgacataatggatagctattgcaaagaccccactccgtttgagaagccagaattctgcgtttacaaggctgatggagtgccagcgccagagttttacgatgcagatgatgaactgcattgctgctggcgaccatctatccacatgccgcgctgggccagccgtatcatgctggagattaccgacgtgcgcgtggagcggctgaacagcatcaatgaacatgatgctatcgctgaaggattggcagaaataagcaaagactggcgtacctataaatatggcgttcccgatcgtgacggatacccaggcactgatgattgtggttggccgtggcacgagtgggagtgttatccaattagcgcttacagcaagctatgggaatccatctacggcgctgatagctggcaggctaacccatgggtatgggtgatcgagtttaagcgcgttgaaggcggtgcggcatga

SEQ ID NO: 267315 - DNA, 234 bp, Klebsiella pneumoniae
atgctgcacctgttcagcggcaaaccgatccccgacaaccgggaaaacatcaccattcatctggatgaccacatccagtctgttcagggtaaagaggactatgaagatgagatgttcagcatcagatactttaagaagggctccgcgcatatcacgttcagaaaaccagaactggttgacagactgaatgacatcattgcgaagcattatccggagcaactatcagccatctga

SEQ ID NO: 267316 - DNA, 228 bp, Klebsiella pneumoniae; identical to SEQ ID NO: 8593

SEQ ID NO: 267317 - DNA, 1605 bp, Klebsiella pneumoniae
atggtaactaaaaaggtaaaaacaaaccacccgtactatcgtgttttatccggcacctccatgccgtttccccacatacatgaagctgtttccgaacagttgcttctactcattttcaaagcacgcagattgtatctggatccagaatatcgtccttggtttgatgaacaacatcggattctctcggcattacgcgctaacacaaaactccaaagtattttagagaaaaacagagagaactactccataagtgagaccgataatccactatctaaagatctgtatgctgcttttcaggttatgtgccatttatacaatggttttgataacagactcgtcagcctgaaaacctggggagatatgaacagggaaccaacagcaaaatttgtcggccaaaatagtggtggctggaaaacacctgagatggaagaattcgtcagaaacgatttgttcaatattctgacagattgtaaagctcattgctcaccacttcccgctctggttcgacaaggatattgccatcaggatctttctgttgcgcactcatgtactaaagaattactggaacaactgaaccgataccatcaaattgatgaatcagcgatacttgccagaacccttggtttggctattaacaactgctatcactcagaaacagagattcctgaatggctttctccttttgaaaatgaatacaaaagtccctggaattgtgagaaaccagatactaacgatgtgagtaaacttagaaaacaattgctaacaatcgggcgtacagaattcgtggacaaaatgttttcgctagccaacaaaaatgcaacaaagataatatatgatggatacgttaaactttatgctctggaaatatatgaatggttaaataaattagtgcaatattttaaaggaaatgattttattcgttacacctggaagttcacaacaattatttccgatgaaagtgacacgattgaaaacaccaccgcatgggaaaaagactattgtcaaatcactatacagcgtgatgaacttctgaaactgatttataccaataccctgcaggatgcagcaatgaatcttgctgattgcctgcaacaggcatacacagaaccgttaaaaatggaaataaattatccaggaataaacattgatgcaaaagagcgtaaaattagaaaatctattgaattcaggagcgaactgaataacttcacaaacatcatgaaacaactggaaatatttgaaaaatggtataacgccaataaaattctgttggtaagtaacaaaaagatacgtacagaaaagattgacgtgaatattcgtcttgcaggactaaaaggctatgatctgaatgaaggtatacctgatggtcagggacgcagaattaaagatggtgtgaatgaacttgtcaaggcagatggcagtctacaacttccacaagatatcagtgacacttcgcttaatcgttaccgtcaagcagttcaacacattattaaggatgagatcgacacgttgctgatagcacagagggaaaaaaataaaataaatccatatagcgaagatagatactcgatacgacctttatggggaaaatgtctggtcgaacagtaa

SEQ ID NO: 267318 - DNA, 597 bp, Klebsiella pneumoniae; identical to SEQ ID NO: 8595

SEQ ID NO: 267319 - DNA, 1317 bp, Klebsiella pneumoniae
atggccgtcaatcttactgaaacagccatccgagcattgaaagcaaaaaagacatcgttctatgtctggagcaacagctctcaacgtggcactggacgacttggtgtcaaagttcagccttctggcagcaagattttctatttccgctattacgtggaaaaagggaaaaaagaaagattcattcaattgggtatatggcctgagatgaaactggccacagcgaatgaactggcaaaaaagtatggtgcctggctcattgaaggaaaggatccccaggcagaactggaacgacaacagtttgcagaacagcagcggatacaactccatcaatcacagggctcatttgaagcattgattcatggttatgttaacaaaatgaaaattgataataagaggacatggcaggatgttctgaaacgccttgaaaatgaatgctatacagtgatcccccgtgaaactaaagctaaagatgtgacttccggacagattaaacatatcctggccgggatcattcagcgcggtgctgtggttcactctaaccggatccgttcttacctgatggctgcatttaactatggactgaaagcagataacgatccgatgaacacaagtgtagggattacttttgggctggaggcaaatccggtgtcagtgataccgaaacagtcatctgctgaaaaagtcggtgatacctggctgacacttgaagagttgcgttttctaatggaacattttgctgaagcaaccaacgttggattattgatgcaacatttgatccgattctgtatctataccggagggcaacgtcctttcgaaatgatcgccagtcagtggtgtgatgttgattttcaacaaaaaacgctgctggtgactgctgatgtctctaaaaataaacgagagcatttgataccgttgactgaatcagcattacaggaattatcctgtgtgcaggagttaacaaaagaaaaatccagcccttacatttttccactttcgactaatggtaagcgtccggttcgtacggacagtctggctcgcgctatcatgtatttccgggcttttaatcctgactttaaaatttttacagcacgtgacttacgtcggacctgtaaaacgttaatgggagaagctgggatcagtaaggaaatccgcgatcgtattcaaaatcatgcgttgaacgatgtcagttcaaaacattatgatcgatacgattatttgccagaaaaacgcagagcacttgagatctgggaggaccgggttaataactatcaacagcaaacaggcaataatgttgtcaatctgtttggcagaaggtga

SEQ ID NO: 267320 - DNA, 204 bp, Klebsiella pneumoniae
atggatcagcttagcgcgcaggcgcagcagctccggagtgggcattacacgacgcgggtgctgaaacagctcgtggaactggtcaaccatcttgtaaatactctctgtcgcttctccaaaaccggggttcagctcatatggctctggtttgaagcccaccagcttatcggtggccagcttgagatggtcggtcagtttcgttaa

SEQ ID NO: 267321 - DNA, 261 bp, Klebsiella pneumoniae
atgcctagccgacgcgacaccgatagcaacgaaaacgaaaagccggtgccagcggagcggctgatttttgcccgcaatttccgtaaggcacgcaaggccgcaaaactaagccagcgcgcagtcaaggataagacggggttcgcacagtcatggatcagcgaagtagaaacgggcaagtcaccgctcaacatcgacaacatggccgagctggccaaatgtgtcggtgtgccgctgtggcagcttctcgttcctccgtcgtaa

SEQ ID NO: 267322 - DNA, 1242 bp, Klebsiella pneumoniae
atgaacgggcctaagccaatcagtgacattgtggggggcaatctgctggcaagactggagcagacgcaccagaggtatcgtgaaaaagtggaggccgcagccctgcccggcgagacgttcgagcaggccgagaagcgcctacgcgaagaaggcgaacgcgaacagaggcggaaaagtaacgaggtcgcccagttccaagccgaggcaactttggccgcacagttgcgagatagaagccctatcccgcgaagcccaatccctaacacatcgtcccccagtggacagaccaaacggaacaatccggcctcaatgcgtcgccctcccgagagcgaccgacagcccgactttttcgtgccgggtctgtacgacgtagccaccaaggacaaccgtagcctgatggacgttgcgctgttccgcctgtcaaagcgcgacaagcgagcaggcgaagtgatccgctacgacctaccggacggcttcgttgaagtgaaggccgggccggatggtatggcgtcgatatgggactacgacattgtgctgatgctcatctcacacctaaccgagtcgatgaatcttttcaatgccgggcgcggtgccatgccgggcaagaaattcgtcccgcacgcttcggacattgccaagttctgccgccgtggcgacggcggccgtcaggccgacgagctggaagccgcgcttgaccgcctgctaggaacgaccatcaagagcgtgcgcgagacaccatcgcgtaatggcaagcgcgtcgtgcgcgagacggaagcggaaagtctcattggcccctaccgcgttgtgtcccgcaccgataccggcaaggtcgccagcgtcgagattgaggcaccaaactggatttaccgggaagtgaccggcggcagacagcccgacgtgctgaccgttcacccggactacttcctgatcgagccggggcttggccggttcgtctaccgcctcgctcgccgagctgctggcaagagcacggccaaatgggcgttcaagaccatctacgaacgcagcggcagcgcgggcacgttcaaagagttctgccgcatgatgcgccgcctgatcgacgccaacgacctacccgaatacgacttgcgcgaggaagacggtcagagtgggccgctgctgcttatcacgcgccgcaccgacgccgtggagctggccgctgacgacgagccagaaccggacggcgacgagcaggagaacggcaagaatgtgcccggtgtgtaa

SEQ ID NO: 267323 - DNA, 444 bp, Klebsiella pneumoniae
atgcagatacgtgaacagggccgcaaaattcagtgcatccgcaccgtgtacgacaaggccattggccggggtcggcagacggtcattgccacactggcccgctatacgaccgaaatgcccacgaccgggctggatgagctgacagaggccgaacgcgagacactggccgaatggctggccaagcgccgggaagcctcgcagaagtcgcaggaggcctacacggccatgtctgcggatcggtggctggtcacgctggccaaggccatcagggaagggcaggagctacgccccgaacaggcggccgcgatctggcacggcatgggggaagtcggcaaggccttgcgcaaggctggtcacgcgaagcccaaggcggtcagaaagggcaagccggtcgatccggctgatcccaaggatcaaggggagggggcaccaaaggggaaatga

SEQ ID NO: 267324 - DNA, 327 bp, Klebsiella pneumoniae
atgcagcagatacggcactacctcgaccccaacggacgcgaccacttcgccgagtggcgcgatcaggtgcgcgataccaaagcgcgaatcgccatcgaccggcgcatcatgcgcttggaacttggcaacttcggcgatcacaagcccctgcgtgaaggcgtgtgggagctgcgcatcgacgtagggccgggctaccgcgtttattacgccaaggctggcttgaccgtcgtgctgctgctctgcggcggcgacaagcgcaagcagaacgccgacattgaccgggcctgcgcctattggcgtgactggcagcaacggacaggagattga

SEQ ID NO: 267325 - DNA, 312 bp, Klebsiella pneumoniae
atgaaagatcgagcacacgacacggctatggccgaagtgttccgcaacgaccccgcctacgcggtcgagctgctgaacagcattcttgaggatggcgaacaaggcgaactcttgattgccctgcgccagatggccgaggccttcggaggcgtgcgacaggtggccaagtcggccgagctgaaccctaaccagctttaccgcacgctgtcacatacaggcaacccggaggtgcgcagtctgaccgcgatccttcgcgctatgggcctgcgactggccatccagccgctgcaccctaccccggccgcccactga

SEQ ID NO: 267326 - DNA, 291 bp, Klebsiella pneumoniae
atgaacgaacaaagagccatcgagctgctgcaagcgcaagtcagggactacgccagacaacgggccaaagacgtggcacgaggcgcagaaacgccacgtctggcggccttgcttgtgcagaagtacggcaagggcgtggtggatgctctggccgtggtctttgatagtgcccggtcggccgatccaatcatggccgtggtagacgaggaagtaagccggattgatccgctctggcaggaacacaaccgggaacgctgggcaggtcgcccggctgatgtggttgccagctaa

SEQ ID NO: 267327 - DNA, 369 bp, Klebsiella pneumoniae
atgggattagacattggacaattaagcccgtgggtggtcggtgcttacttagtagccctattggcggttctggcgtggatcgcggtcggtgcattcaaggacgacgaactgccgatgatgccgggggttttggccatcatgctgatgggattcggcatgttcgccgtctacgaacccaagcccgacgagtgggaaacgttcaaggccgcacacaactgcaaggtcgtggcgaagcgtgacggtcatagcaacaacggaatcggcgtcaccactcgcggcagcgtgggctacatcatcggcgacgatacgcccgatcaggtcgcctaccagtgcgacgacggcgtgacctactggaaaaatgcgaggtag

SEQ ID NO: 267328 - DNA, 411 bp, Klebsiella pneumoniae
atgaggccgccgggctacggcccggtgcctccccacaataggcaacagcttatgaaaatgatggtgtttcttctggtcgtcatggttgcgtacatggcgtttttccgtgatgacggccgggacgcggcggcagtgacctatgccgcgcagcggatcaacgagcaggacaaaattctggttgagcttcaatcgctcaacgatccccacgtatcggatttcgtccgcgattggcgctactacgcgccaacgccttcgcctgagcagctttctgagcttcggataattcagcagaacatcaggaacgataaaagcgttgctgaaaagtacacgctggaatggcaaaacaagaatggcttctgctcaaaagttgaaggcatgtttggcaagatcgaatgcacgcccggcctctga

SEQ ID NO: 267329 - DNA, 456 bp, Klebsiella pneumoniae
atgatcgactttgacgagatacggaaacaggtggcgatcaagcacaacgtgctgatcggcaaggacgatccgatactggtcacggtcacggtcagcgatatggtcttgggccgctacctcgaactggtttccgaccagtacgacgaagccaacagggccttgaccgtgagcctgcaacagcaggtcgagcagtccaaggaaacggccgggaaggtaatcaccgacgcggccaactacgtcagcgaacaggtgcggcaggccgtgactgccgccctcgccgatgctggcaacgacgtgcggcggcagatagccaacgcgcaggccgcaagccgcgatgcggtggccagtggccgggatgcgcaggcggcgaagaccggcgcatacctggctgcggccttggccggggtcgccgctctggtggccgtggcggccttggtggtcgttcttctgaaatga

SEQ ID NO: 267330 - DNA, 756 bp, Klebsiella pneumoniae
atgaacgacgtaaccactccggccctgaacaccctcgcccgtcaggttcatttcacgctgcaaggcaagggcggcgtcggcaagtcctttatctcgtccctgctcgtccagtacctcggcggcaagggcctgccggtcacggccgtggacaccgatccggtcaatgccactctcgccggttacaaggcgtttaacacccagcgccttgagctgatggaaaacggctcgctgatcgaacgtaatttcgaccgcctcattgagcaggttgtcgaggaagacaccaatttcgtgatcgacaacggcgcggcgtcgttcatcccgctgtcctactacatcgccgaaaacgacgccatcaacctgattggcgagaacggcaagcaggtcatcattcacacggtcatcaccggcggccaagccctgcgcgacaccctcggcggcttcgcctctctggccgagcagatgccgggcaatgccgagctggtcgtctggctcaatgagttcttcggcgacattgaggccgaaggcaaaaccttcgaggaaatgaaggtctaccagaacaacaaggatcgcgtgcgcggcatcgtgcgtatcgctcgccagaccggcagcacgttcggcgaggacgtgaaattgatgctcgatagcaagctgaccttcgatgaaatcaagcagtcgccagacttcggcctcatgtccaagtcgcgtctctcgaaggtcaaaacggcgatcttcgagcagttggccaccatcatctga

SEQ ID NO: 267331 - DNA, 384 bp, Klebsiella pneumoniae; identical to SEQ ID NO: 165300

SEQ ID NO: 267332 - DNA, 300 bp, Klebsiella pneumoniae
gtgaacaacgacgaaaaggccgagctggccgaccgggctgctcagtccggtttgtcgttgtccgcctacatgaaagcggccggactgaatgcgcctattcgggcaagggctgacctgtcagccgtggccgatcttgtgcgcgtgaacggcgaccttggccgggtggccgggttgctgaaattgtggctcgcggagaagcgcgggcagggtgcccggccggtggacgtggaagccatgatgaaggactttcgcgccctacaggatgaagtccgctcgatcatgatccgggtggccagatga

SEQ ID NO: 267333 - DNA, 2697 bp, Klebsiella pneumoniae
atgattgcccatcgcatcgagcgcaagccgcaccagtcatcgaacccggccaaactggtcaggtacatggtggcggccaagggcggcatcgacccgacgagctggcagcgaacagccgactacattctggacaccgcgaacgacaccgcgaaaggcgagaaggtcgaaagctaccgcgttaccaactgcggcacggacgaccccgccgacgctgcaatcctgatcttggccactcaggcggccaacaccaggtcgaagggagaaaagacctatcacatggtcttttcgtttcaggcgggcgagcggcccccgctggaagtcctgcacgccattgaagacgaactttgcgaatccatcggccttggcgatcaccaacgggtgtccgccgtgcatgtcgatactgaccacctgcatgtgcatgtggccatcaacaaggttcatccgaccggcctacagaacatcgaaccttattacgacaagcgcaggctgatggaggcctgcgaacgcctcgaagtccaatacgggcttcgccatgacgaccacggcttaggagatagaaaccatgagcacaccagagaacgaagcgaccgaatccagcttgatcgaggtcagcgaccagagcagcgcgatagtagatttcgacgatatttacgagagtcctacgatctctcgtttgccgatgaaccagaggccaaaaccctcaacggtctgcgaacgctgtccggctgccgtatggttcgcgcttccgaaagaacttcggtgctattgtcgggtgatacacgcggtgatctacagcaacgaggaaaagaacgcgctgacggcctgcgacggtcgggacatggcgatagaacagctattggccaagcaggaagcggcggacgcggccgggtaagcggcaaagccgccgacgcagaggctcacagcggcatcgagacgctaaccgggtacgcggcccgcgagctggccccggcgatgcgacaggcgacgagctggcaggagctgcacgacgcagcggccgagcatggcctagaggttcgccagcgcggcgctggccttgtcatcggcgagccagatttaggcatttgggcgaaggccagcaacgtcggccgcgacctttccatgaaggccctaactgaccgtcttggcccgttccagccttccgaacggcaggccgaggcgaaggcgaaccgcaagcggtacgagccacgaccccggcggccggataacccgacgacagcgggcctgttcaaccagtaccagcgcgagcgacaggcggccattttggcccgccgtcagggcctcgaccagatcaagcgcgagagtgcggctttcaatgcgcaggtgaagcagtggagccagacagagcgaatgcttttgaaggtcgcgggcaaggggccgaccaaacgcctgatgtacggcactatcaaacagcaggccgacgcctcgcgccaaaagaaccggcaaagcgcagacgctcgccgtcaggcgctgttcaaacagacgacgatgcccacttgggccgactggctgacgcagcaagccgagcgcggcaacgccgaggcgctggccgtgctgcgcgaccgcgaggaacggacacgccgctggaacggggagctactgaccgccgaccgggccgacaaggccaaggctgttgttctcgacaagctcaagcccaaggcccggaaagacgggacgatggcgtacagcaccatcgacggcggcatggtgatcgaccggaagacgcacgttcaggcgcagaaagccacgaccggcgcggcactggtagcgctcgaactggcatccaagcggttcgagggccaagccctcatcgtggaaggcacagacgagttccggcttgaggtcgcccagctcgccggtatgcacggcctcaaggtcacgttcaccgatccggcgatggagcaaatgcgccgcgagacggccgagcacaaggaaatggagaaggcctttcaggccgaaatcaaggcatcgagccgcgccgacttcgccgaactggtggacttcggcgaagcgccgttcgagcacgtcaagggcaaccgcaagagctacttcgtcacgctgcgcgacgggaacggcgaagaccgaaccctatggggcgtcgatcttgaaagggcggtggcaaatagcggtgcggccgtgggcgaccgcgtgcgtgtcaatcacatgggcagcgagagcgtgacgctaccggacggccggacggtggagcgcaacgaatggcgcatggagatagcaccaaaacgaagccagacagccaagccgaaaccgaaccggccagcccctgagccgaacgatatggatgcggcgtttctggccgaaactggcctgtccggcaagacgacgggaaaccggacaggcggcaagcccgcgcagcccgtggattctggcccggcggtgcaaaaatggattgaagaacgcaacaaaaatagagacaaaatatcgtctatagactatcatcggctttggcaatccaccgacgcaggcagggccacatatcaaggtcgcaggcgcatggaagacggtagcgaagtgctgttgttgaagcgcggcgatgaaatgttggtcaagccatccaccccccgcgtagtcgccaaggcggcgacatggaaactaggtcgcgtcgtccagttggacggacgtggacgattcactgacaggagtaacgaggtcgaactatga

SEQ ID NO: 267334 - DNA, 1959 bp, Klebsiella pneumoniae
atgagcgataaaaattcgtcggcgggtaagctgcggcttatcggcggcgtttatttagtgctgttcatcatcggtttgaacagcatatgtacgcaatttattgcgtaccgggttggctaccacccggcacttgggccgtcactgttcgggcagctttatatgcccttcgactggtggcgatggctgttcaagttctacgactcagcgcccaattcctacaactatgcctttgtgattttcgcgctcggcgtactggtcggcctgctgacctatgttctctggatcggcttcaagacgcgcagctcgcgcaagcatgaagacgttcacggaacggcgcacttcgctacgctggacgaggtgcgcgaaacgggcctactgccgcgtgagggcaagcaagggcagggcgtctactgcggggcctatgacgaccccgaaaccggcaccacgtactacctgcggcacgacggcccggagcatgtttgcgcccttgccccgacacgttcgggcaagggtgtgggccttgtcattcccaccctgttgagctggccccactcggtgttcgtgctcgaccgtaagggcgaaaactacgccatgacttcgggctggcgtcagaagcacgccaacaacgtgatcctgcgctttgacccagcgaagccgggcaccggctgcgcatggaacccattgggcgaaatccagttccgcacccgctttcaggtcagtgacgcgcaaaacatcgcgctgatggtcatcgactccgatggcaagggcatcgagtccgaccacttccgtagtgccgcgttcgagctgctggtagggctgatcctgcacgcgctctacaagggcgaacaggtaggccgcacgccctgcttgcaggacattggccacatgctgaccggcgtgggcgacttcgccgcgccggacacggccaacgaccttgtagacgacccggacggcgacccgaaagcactggccgggctgttcgatgaaatgcgcgaggtgtccatcaatgacggcgacccggcgaaccgggaagcgcagcttgtcattaccggcgtcggcacccgcatggccaacaccccggcccgcgagctgggcagcatcatttcgacggcgaacaacgcccttgcgctgtaccgcgaccctatcgttggcgagaacacttcgcgcaacgacttcaagattgccgacctgatggatcacgaccggccggtgtcgctctatctcatttcgacgccgaagacgtccaagcgccttgtgccgcttacccgcctgttgttgaccatgatcgtgctcacgatggccgacgaaatggagtttgacgacggccgggccaagacggcgcacaagcaccgcttgctgctgatgctggacgagttcccgacgctcggcaaaatcgaagtgttcgaggaagccttggcctacatcgccggttacggcatgaaagcctacctcatcacgcaggacgtgcagcagctctacaaggcttattcaaactacgaaagcatcatttccaactgccacgtccgcatcgcctacgcgcccaacaaggtcgagacagccgaatggatgtcgaagatgacgggcaccaccaccgtcgtcaaagagcaggtgacgacttcgggcaagcggttcggtgccgtcctcgacaacgtttcgcgcagctatcaggaagtgcagcgcccgctgatgacgcccgacgaaatcatgcgcctgcccggcccgaccaaggacgccagcggggagaagatcaccgcgccgggcgaaatgcttgtgttcgtcgctggccagccggtaatccgcggccgccaaatcctctacttctttgacccggttttctccaagcggtcgaagctcaagcccgtaccgactgacgttgtgcgcgtggcccagcaatccaagcccaccccggccgccgccgggccgtccaacaacagcaacgggggctttgtcgtccaatga

SEQ ID NO: 267335 - DNA, 567 bp, Klebsiella pneumoniae
atgaaaggtcgccgcttcggaatcgccgccttgtgcgcggccgcagtgatcggcgttgcgatcacgaccggctatcacgcaggcctgcgcctcaacttcacggactcggccccgcatgggctttggcttgtgcagaccgccgaagcggccagcatcaagcgtggcgagctggtcgaggtgtgcccgcccgcctcgccgattgttcgcctcatgggcgaacggggctacctcgcgcccggtgactgcgaggattccggcgtaaccccgctactcaagccggtgtcggcggtagcgggtgacgccatccagttcgagccgggccaacccgtgaccgtcaacggcgtggccctgccgaacaccgccgctatgcctgcgctgccgggctggcctgccgggcgctacatcgtgcagcccggcgaggtctggctgttttccagctacagcgcgggcagcttcgacagccgctactttggccccgttgtgctggccagcgtgcgcggcattgcccgcccggtcgccgtgatcggcgacccggcggccatcactacgggagtaaccaaacaatga

SEQ ID NO: 267336 - DNA, 897 bp, Klebsiella pneumoniae
atgatcggcctcgacatgatgatggcgtgcgcgccgaacgtggccccggccacgatagagaaggtcattcaggtggagagcggcggcaaccccttggcgctcaatgtgaacgtcaagtgggtgatcgagcgtgacgagaagggcaacccgatcatggtcacggccgcagacggccagaccaagccgaagcgccgcaaggtcgtcttcaaaagccctatcgccatcaagaccgcgcaggacgccgtgaccgttgcctacatggccatcgacgcggggcactccgtcgatatgggctacatgcaggtcaacagtaccaaccttaaatcgctcggctacaccgtcgaagacatgttcgacacttgcaagaacctcgcagccggtgcgcgagttctgaccgcgttctacagcaacgcgctgccgaaatatccgaacgaacaggccgcactccgggcggccctgtccgcctacaacacgggcgatttcaacaagggttttttgaacggctacttggcccgctacggcgtcggtcaacaggtcgccgtgagcgttcccgcgctcaatccgtacacggccccgactgccgtgtttgtacgtcaaccgagaaaggaagaagccatgagcaccaaagaagaagcgagcagcacccagcaggtcgcggaagcgaaaaccgccttggccccgcgtgtcgatcccgtcgtgagcaagtcgcccgaagacagcggcacgcccggcgtgcaggtcgagcacacggcggccgaagcggaagccaacggcgcattcaaagaaacggccatgtccgaagccgaggcgtgggcctcgaacgcggacttgtccactgacccggaaggaaccgccatcgtcgtgaacggcaaggccgtgcggaaggggggtaactaa

SEQ ID NO: 267337 - DNA, 3318 bp, Klebsiella pneumoniae
atgaaaaaggaatacgccgaggaagtcgcggcgcggatcatagagcagttggagcagggcaccgcgccgtggcaaaagccgtggcagcccggcgagctgcgcttgccgtacaacccgaccaccggcaaggaataccgtggcatgaacagcctttggctgcacatgcagggccacagtgatccgcgctggatgacctacaaccaagccgccgccgaaggcgcacaggtgcgcaagggttccaagggaacccatatcgtctactggaagttcagcgaggaacgaaaggccaccgacgagcagggccgcccggtcattgacccggacaccggcaagcaaaagaccgtgaccgtgcagctcgaacggccgcgctcattcatggccgtggtgttcaacggctcgcagatcgacggcttgccgccgctggaagcacgacccaccgggccagagccagagcgtcacgcccgcgccgaggccatcttggccaattcgggcgcggtcattcgccacgaacccggcgaccgggctttttaccgtcccagcacggacagcatcacactgcccgagcgcaaccagttcccgaccgccgacaactactacgctaccgcgctgcatgagctgggccactggacggggcacccgtcgcggcttgaccgcgaccttgcgcacccgttcggttccgagggctacgcccgcgaagaactgcgagcggaaattgcctcgctcatgctgggcgaacgcctcgaaatcggccacgatccgggccagcacgcggcctatgtcggttcgtgggttaaagccttgaaggaagatccaaaagagatcttccgggctgcgtccgacgccgagcgtatcagcggctacgtgatggacttcgagcaggaacagatgcagacgcaaaccgtcgagcgtcagcccgtgccggaaatcgcgcccgaggttgcggccgagctgcaacgcgatcacgaaaacgccgtggaaggttattcgccgctggaaagctggcagatgatgaaagccgaagccgagcgtaacggctattccgcccggataggcttcgcgtctggcgagctgggcgacttctacgaaatcacctaccacgaccaacatggcgagccgtccggcattcgcacggaaatgtatggcgatagcaagctgatgaccgagtacaacggcacgcgcttgtcacagttcatatcgaacgacgacgaaagccagcctgcaacactccgcgtagctatacaacagcacgaagccgccaagcaggcgcggcaggccgagcagcagagtgcgccgtacacgcccggccaagagccgcctgcttacaccgtgcagagccgccgcgttgtgccggagaacgccgccaaccatgcaggccagaacgccgtctatgtgcagctcgatgacggccgcagggcttggggcttcggtgcgaccgacgaagccgccgagcaatccgccgtagaacgtgcgcagcgcgtcggcctcgatgccgaccgggcaccgacccgcaccgttctgcatgagcaaccggagaagcctatgcaatcgcgcacctatctggccgtgccctacgccgagaagaacgaggcgaaggcgctgggagccaagtgggataaggaagcaaaatcatggtacgcgcccgagggcgtggatgtaaccacatcgggccttgcccggtggagcgtggacaaggccaacgtcgtcaccgcatcggaacccaagcccgccatcgagcagttcaaggacgcattgaaggatgcgggcttgcagctcaagggcgaggtcatcacggacgggaagatgcagcgggtgcccgtcgaaggcgaccggggcggtgccactagtggcgcatacgcctaccacgaagccgggcgcacgccgggcggtttcatccagaactacaagaccggcgaagtcgtacattggaagcccgaaggcaagacgccggaactcagcgccgccgaccgtgcccggcaggccgccgaggcggccgagcagcgcaaggcacgcgatgcggcccgcctgtccgagcacggagcgaccgccgccgccgcgcaagcgttgtggaacgaggccccggccgcgaccgctgacaatgcctattgcaaagccaaaggcatcgccaacccggtaggcctgcgcgttgtgccggacagcgtttcgccggaggctgccgcgcacgggatcaagatcgccaagacagccaaggaagccaaggcgctgcgcgaggctgacccggccaaccgggttttcaaggcgggcgacctgctgatacctggcacagacggcgaggggaaattgtggacgctgcaaagcgtcaatccctacttcaaatcgttcatgaagggcggccggaaagcaggcctctacaccgttgccggtgcggacgatccgcgcaaggcactggcccaagacggcgattcccctttggtgctcgccgaaggctacgccacagccgacacggtttcgcgtctgctgggcggtaagccggtcatcgtggcattcgatagcggcaatctcgacgcggtggccaccgagctgcgcgagcgtcacccgtcgcggccgctgctgatcgccgccgacaatgaccacaacgcgccgaaggagctggacgccaacggcaagcccaaggtcaacgtcggactggtgaaggccacagaaaccgccgagaagcacggcggcggcgtcatggccccgcagttcaatgacggcgagaagggttccgactggaacgacctcgccgggagccgtggcgacgaagctgcccgccggatgctcgccgagcaaatggcggtagccaagcgtgatgccgccataactgccgaacggctgaccacccttgcgcgtacccgcgacatggaagcccgcaacgacccgacgacgagcgccgacgatgcggccgtagcaacagagcgcgggcacgcggccgaagtattggccggtgcgcaatccgcgctcagtgaggtgcgcagcatggccgccgatggcgtgaccggcaacaccaaaggggcaacccgttcggctgctgccgtcaaagccgggatcgaccggaagaccgaggcgatgcacgaccgcgccaaagaggaacgcgaggaagtgctgaaccacggccagaccggcccgctcgatggcgtcaacgctggcgtgtcgtggaaaaaactacccgagcaagccaaacaggcgctcatcgaggacgtgaagaacggcaaggacgtgaccttgccgaaggacgccccggccaagctcaaacagatggcaggccttgaaccgacccccgcgccgcgctcgcgcagccgtgggattgatgcaggcctttga

SEQ ID NO: 267338 - DNA, 2016 bp, Klebsiella pneumoniae
atgactacattggtaatcgtggaatcaccgaacaaagtaagcaaaatcagcgcgattctcggcgacggctacaaggtcatggccagcgttggccatgtgcgtgacctgccgccgaaagagctgggcatcgaaccgccttccttcgagctgacctatcaaccgaccgagcgcgggcaaggcgttttggccaaactcaaggccgccgtcgctcaggccgaccgcgtgttgctggccaccgaccccgaccgcgaaggcgaggcgatttcgtggcaccttgccgacgcgctacgtctcaagaatcccgagcgcgtgacgttcacggccatcaccaaggaaaaaatccttgcggccttcgctgcgccgcgcccgctcgacatgcagcgcgtacacgcgcaggaagcccgccgggcacttgatcgcatcattggctaccgcgtcagcccggcattgtccgatgccaccgggcagcgccttggcgcggggcgcgtgcagtctccggccgtccgccttgttgttgaccgcgaacgggccattgccgcattcaaggtcactcagcactacggcgccgagctgattttcgagaacgacgacagcactaaatggaaagcacagtgggacacaaaaccgcatttgcccgagggcgaaagctacctgctggattccgcgctggccaagctcgccgccgccgttcgcaacgtatcggtcgccgaatacgaggacagcgaaaagggccgggcacctgccgcgccgttcaccacctcgacgctgcaacaggccgccggtcaacgtctcaagttgaagcccaagcgcacgatggaactggctcaacgcctttatgagcaaggcgcgatcacctaccaccgcaccgacgccccgaacatggacgacgaaggccgggcagacattgccgcctatgcgcagggcgcaggtctgccgctggccgataagccgcgcaagtggaaggcgaaggagggcgcacaggagggccacgaagctatcaggccgacccatgccgccgatcttgaatgcggggagaacgacgacgagcgggcactgtaccgactcatctggcaacgtgcggtcgcgtcccagctcgccgatgcgacctatgccgttcgcaccgtgcgcctcagtggcgacgccgagggcacgccggtatcgttcaaggcgaccggccgcaccctgctgacgccgggttggctcgccgtctacgccgacgatgccgaggacgaggacagcgaaccagacgaggccgccaacaacccgattccggcgctcgctgtgggcgcggagctggtagcggcggacggccgcgtactcagcaagaagaccaagcctcccgtccggttcaaggaacctactcttgtcgccgaaatggaacgccttggcatcggccgcccgagcacctacgccgcgatcctcgacaacatcaccacccgcgaatacatcgtggccgacaagaaggggtatttgcagccgtcgtctatcggcgaagtggtgcgcgatggtctggtagaccgcttcgcgtttatcgacctcgattacacccgaggccttgaggaacagctcgaccagatcgcagaagggcaggccgactaccttggcgttgtgtcggccgcttgggccgcgctcgatgacgagctgggcaagctggaatcggccgacctgccagttgcgcatccgtgcccgacgtgcagcaagccgctgcgccggatcaaggggcaacacgggttcttttgggcctgctctgaccgggaatgcaagaccacgctgccggacgccaaaggcaagcccggcgaacgtaaggccccgccgccgccgaccggcattgcgtgcccgaaatgcggcaaggagctggcccaccgtgtcgggacgagcaagcccgtcaaacgcggcatgaagccccggccgtatgacttctatagctgcaccggcttccccaaatgcgatgcgaagtacaacaccggcccggacggcaagcccgtgttcggtgatgacgagaaagccgcaggctga

SEQ ID NO: 267339 - DNA, 708 bp, Klebsiella pneumoniae
atgttcgacaatctgcgccgccggttggcatggcgggccgagctgcgcgagcttgaccagaaacaggccccggccacgctggccaagcccgacgacagcaatcccggtcgtcttctttggtgcctgccggtgcccggcaagaccaatgttttcatggctctggaaaagggcgagcacgccgatcacgacaggttcgtggtgccggtgaacgccgtggcgttcaatcggctatggctggccggtggcctcaattcaagggagcggccggacggctgtttgttgcgccgggacatgcccgccgatagcaaataccgtcacgcggccgcctgctttgccgaggggccgcagtcgcccgtgccgctggccagcgtctcgctggaacgcggtcgggacggcacccaatcggtcagcttcggcgacggcgtgacgcgcacgttttggcttctggctaacaacgtcgccgcgtttcccgtcctgatcgcaggcgaggccgccgcaaagcagctcgcgcagctcgccgggacggacggcagcaccttgcgcgtgtccgaggctttccgacaggtcgaaaaggccccggccagcccacagaagccggtcagcaccaaaaaggaaggggtagggcaggggcaggcgaacaatgcgcctcagcgggccgcacagggccacagaaggccgtcccgaggtggcggcatgggtatcgactga

SEQ ID NO: 267340 - DNA, 726 bp, Klebsiella pneumoniae
gtgaaagctcttaaatccacggccagcccgacgattcaggcctatggcgagctacaggcagcgtttgagcactacaacgccgctctgttcgatggccagctcccgcactgtctcatcacgatgcagcgcgaaaagcgcacctatggctatttctcgtcgcgtcggttcgccaaccggcacgaaaagaccatgaccgacgaaatcgccatgaatccatcctattttggtgtcgtgccgctgctcgaaatattgcaaactctggttcacgaaatggcgcacgcttggcagttccatttcggcgagccgggccgacgcggctaccacaacaaagagtgggccgacaaaatggaagccatcggcctgatgccttccgataccggcaagcccggcggaaagaaaacgggcgagaagatggccgactatgcgattgacggcggccccttcatgcaagccactgaggcgctgctaaagaccgaattccgcattacatggttcgacaggcacccgcctgcgggaaccgaaatcgcggcgatcttcggtgacgccgacgacggcgacgacaacgacggcggcctgatcgagcccgccccggccgggaacaaatcgaaccgggataagtaccgctgcccctgctgcggtgcgcaggcgtggggaaagccgggcctcaaactgctgtgcggcaatgacgattgcaacgccgcgccgttcgagctggccatcaactaa

SEQ ID NO: 267341 - DNA, 231 bp, Klebsiella pneumoniae
atgagcggtatttcaatcaacacccggcagctcgccgacctgctgaatatcagcgaaggcgagctaatccatgcgatgcggtcaagcgggaagctgcacggtgtgccgtttcccgatctgctcggcaaccataaggccaaggtgcgcaagttcaatttcgcggccgctctgcggttcgtggatcaggtcaacaaagcccgctcggaagggggaaacagtgaaagctcttaa

SEQ ID NO: 267342 - DNA, 666 bp, Klebsiella pneumoniae
atgagtgattggctgataccggcgctttgcctgatgggcagcgtggtcgggtttgttttcttggtgtcaatgattaggcgggatggcacggcggggcgcggcttatatatcttcatgggcgtggcgctcggcctcgtcgcccttgtgtatttcgtcgcggactcccggcaaaggagtgaggaaatacgcaagaccgctccggcggcgggttctgaggaactgatcggcaaggctgtccgcgtcctcgatggcgacacgttcgacctgctggttgatcggcagtccgtgcgcatccgcgtgaccggcattgatgccccggaaaaagatcagccatttggccagcggtcgcggcagtcgttggcgggcatgattgatggaaaccctgtagcggtgcgcgtaaagggcaaagaccgctacggccgcacgctcggcacggtctacgccaagatatgcgccccttctgctccttgccgtgccgtttatgtcaacgctgaacaggtcaagacgggtatggcttgggcttaccgattccacggccaagccgtcgatccggcaatgctgaaactcgaaacgcaggcccgtggcgagcgcgtcggcctgtggtcagcgccgaacgcagtggagccgtggaagtggcggcaccaaatggtgagcgcgggcaaatga

SEQ ID NO: 267343 - DNA, 378 bp, Klebsiella pneumoniae
atgaaaattgggctggagttagaaaattgttacggcattaataaactggtgggggagttagacttaaccagatttgatggcattgacggtgtttgttctttgtatgcgcccaatgggacattgaaaacttctctggctaagacactgaaggacattgaagaaggcaatctatcaaaggacaatgtttttcctgatcgtgaaacaaaacgaattgtcacgttagatggccagcctgtcgcggctgatcaaataatggtcattaattcatacgatgaaagctatagctccaagcaggtatctacactattggttaatgaggccctaaaacgcgactatgacgaagccttaaaagaagtcgatgataaaagaaaccggtaa

SEQ ID NO: 267344 - DNA, 174 bp, Klebsiella pneumoniae
atgatcgactatgcctgcactgttcggcagatcgccgctgaactgaaacggcgcccggtgagcgtcgttaaaaagctggcgaagtacctggacgatgacactatccagaatcgtattactcaagatttttacgatgtccctgtccgggagctggttcattggggcttgctgtaa

SEQ ID NO: 267345 - DNA, 615 bp, Klebsiella pneumoniae
atgattacgattgaaactctttacggtgaatgtcatgaggctcacgggttaaaaataagaaaccaggtgaataacctcttccagaaacatcccagaataacggcaatacgggtggatctccattatcctcccgtgattgacaacggggataccattacctgttttcctaacctgagtcccggagagatatctcgtttccgtaactcgctgaatgcgaaaattaatgcagatcaacaccgtaaaaaacaacaaggcaaacgcacctacgcaacgtcggtttgtattatctgggcgaaagaatatacgcagtcctttaaatgtcattatcacgtctgccttttttttaacaaagacgcctattaccacctgggagactatgagcgctctgacaccctgagagggttaattaccggagcctggtacagtgccttagggttagaactggaagatcaccagggactagttcatttccctgctaatggacgttacatcctggatattaacgatcctgatttccctgagcaatatcagcgcttattggcacgtctggattatctgacgaagctcgacactaaagcatcaggccagcgtaactttggctacagcggtttttga

SEQ ID NO: 267346 - DNA, 561 bp, Klebsiella pneumoniae
atggcgagttttgcatacatagactctgaaaaatggtcaaaacttaatcgcttaaaatccatgattcagagatattttaaagaaccactattgcagttaacaggcgaattgggtcgcccggattatactctggcagacagaaaacggttagttcgactcctgacgcaggatatgcaaaggggtgatattctgattactaaatcgttaacttgttttggtaatacgccggaaaaaatacaggaggttttatctttaagtatcagacaaggtattaatatttgcttttttacgtcatcagagttgccggatggtgatgatattcctgtggtactcaccgggatgattttacctacagatattagaggaaaaattcccgacatcagtatccggaaaattaaaagaaaaccaggaaggaaagaagggagtattcatagtaaaaatatcagacagttgaaattgcaggggttcagtcagtcacaaacagccagaaaattaagcatcagtttatccactgtaaaaagacactgggataaaggtattgttgatctaactgcagagtaa

SEQ ID NO: 267347 - DNA, 726 bp, Klebsiella pneumoniae
atgacaaagaaggaatgggatgagctacaggcccagttcctcgccgatcatgccaggactggcatcaagctcaaagagtggtgcaaagcgcgggggatggagttcaattctgcgcgccgatacatcaaaacgagaactgcgcaaaatgcgcaggaagatgcgcaaaaaactgcgcaaaaaaaagtgcgcaatgcgcagagagaggaagcggaagccagtaaatccgggcgagtcaaaaaggatatccccgacacaggcgcatgctcaaaatctccagaaacgaaacgcgctcattataattccagacccggcaaccagaatgcattaaagcacggtggctacggccgccggatgctgctctctgacgctatcaccgaagatgcccagatgctcacgcttgacgatgagcttttctggctacgtgcggcgagcctgacagcggcagagaatatcgggcgctggcagacagagctggagacggcaggcagcgagcaggccaaagatctgcacgaccttatctcacaggcgcagaaagccatgcatcgcaacactgcgcgcattgagtcgctggagtacaccaaggcggcgattatcaagcagcgcgttgatgccgcttaccgcgaagccgcgaccgaaaaggttgagctcgaaatcgatgtgctgaaagacggcgacaaggataacgcgatcgtcgtgcataactcgctgccaatcccgggaagataa

SEQ ID NO: 267348 - DNA, 597 bp, Klebsiella pneumoniae
atgaaagttatcaagtattggaaagttcagcttctgcagctttctcagccttccggcaatattcccggcattatgaacgcccgcactctggtcgaaagcctgttgtttgaggggtactcgaaagataaaccgaaaattaacctcggttccggagtaaatattgagttgtttacagcacccgattcgctggaaacccgtatctttcgtgaccacctcgttgacagtgtgcgttgcttcccggtgtgtgaagatgatggtgacaaaagtgagagggtagagattaccatccaccttgagcctcagatttccaaatgccgagccgtcatggttggcgcgggcgcagcaaaggcgccagaaaaaatccatgaccatgcctgtattaactgcttccttggtcgcggtccgtgccttggcgagtgccatgtatccgacgttaataaggctcgcagctcctccttcgaagacgtagtgaagccggtaatcaaatggcttaacgaaaacgccaaccctcatacatcagtgagcatcgacgcgactagtgctcagctgcttactggtgaaatcggcattcacacggaagagtacattaaggactga

SEQ ID NO: 267349 - DNA, 279 bp, Klebsiella pneumoniae
atgcccatggagctggacgcctggctcgcggaagaaacgaaagagctcaagctcaacctgcacccgcgggcgccctacagcatcaacaccctgccggtaccggagcacggggtgcgcctgctgatcggcccggaagggggcttgtccagcgacgagatcgcccgtaccgtgcaggaagacttcaaggagatgctgctggggcctagggtgctgcgcaccgagaccgccgccctgaccgccatcacggcgctgcagtgtcgcttcggcgatctggcctga

SEQ ID NO: 267350 - DNA, 951 bp, Klebsiella pneumoniae
atgaccatcaaactcggcatcgtgatggaccccatctcgtccatcaacatcaagaaggactccagcttcgccatgctcgaagaggcgcagaagcgcggctatgagctgttctatctggagatgaaggatctctacatggaggccggacgggcgtttggcaccatgcgtccgctcaccgtcaggcgtgattacgcccactggttcaccctgggcgaggtggtggatcagcccctctccaccctggacgtgatcctgatgcgcaaggatccccccttcgacaccgagttcatctacgccacctacatgctggagcgggccgaggacgagggctgcctcatcgtcaacaagccccagagcctgcgcgacgccaacgagaagctctacaccgcctggtttgccgagcacaccccgaccacgctggtgacccgccgcgccgacaagctgcgcgccttccacgccgagcacaaggacgtgatcctcaagcccctggacggcatgggcggcgcctccatcttccgcatgaaggaggatgacgccaacgtcggcgtcatcatcgagaccctcaccgcccacggcagccagtactgcatggcccagacctatctgcccgccatcaaggagggggacaagcgggtgctggtggtggacggcgagccggtgccctactgcctggcgcgcatcccggcccaaggcgagacccgcggcaacctggcggccggcggccgtggcgaggcccgtcccctgagcgaggccgactgggccattgcccgcgcggtgggcccgaccctcaaggagaaggggctcatcttcgtcggcctcgacatcatcggcgatcgcctgaccgagattaacgtcaccagtcccacctgcatccgcgagatagaggcggccttcccggtgcacatcagcgccatgctgatggatgccatcgagcgccgactgggtaaataa

SEQ ID NO: 267351 - DNA, 555 bp, Klebsiella pneumoniae
atgcagacattgcaaaatcacttcctgctcgccatgccgagcctcacggacgcctatttccagcgctccctggtctacctgtgcgagcacagcagcgaaggcgccatgggcttggtggtcaacattccggtcgacatgtccctggacaccatgctgaccaagctcaagctgagcccccccgatacggccgagatgaagcagccggtgctgcagggcggcccggtgcacggggatcgcggcttcgtgctgcacagcttccgcccgggcttcaactccaccctgcaggtgagcgacgagatgatggtcaccacctccaaggacatcctcgagactctgggcaccgacgaggccccggaccactggctggtggccctcggctacgccggctggagcgcagggcagctggagcaggagctggcggatggcgcctggctggtgatcccgcccaatcccaaactggtcttcgacacccccatccacctgcgctggcaacaggccgccgcgagcataggcgtcaatcccctgcatctctccagccaggtggggcatagctga

SEQ ID NO: 267352 - DNA, 423 bp, Klebsiella pneumoniae
atgtcatcacgcagcatcatgggctttgattacggcaccaagagcataggtgtcgccatcggccaggagatcaccggcagtgcccgcccccttcgttccctcaaagccaacgacggcattcccaactgggacgagatagaaaaattgctcaaggagtggcagccggacctgctggtggtgggattgccgctcaacatggacggcacggatcaggagatcacggtccgggcccgcaagtttggcaaccgcctgcacggccgcttcggcaagccggtggagttcaaggacgagcggctcaccaccacggatgcacgcgcccgcctgttcgagcgtggcggctacaaggccctggacaagggcagcgtggatggcgtctccgcccagctcatcgtcgaggcctggatggaagagcagtacgactag

SEQ ID NO: 267353 - DNA, 1149 bp, Klebsiella pneumoniae
atgcaacaacgacaatccatcctgtggggggccgtggccaccctgatgtgggccggtctggcccatgcaggtgaggcttcaccggtcgatcccctgcgccccgtggtggatgccagcatccagccgctgctcaaggagcacaggatcccgggcatggcggtggccgtgctcaaggatggcaaggcccactacttcaattacggggtggccaaccgggagagcggggccggcgtcagcgagcagaccctgttcgagataggatccgtgagcaagaccctgactgcgaccctgggggcctatgcggtggtcaagggagcgatgcagctggatgacaaggcgagccggcacgcgccctggctcaagggatccgcctttgacagcatcaccatgggggagcttgccacctacagcgccggaggcctgccactgcaattccccgaggaggtggattcatccgagaagatgcgcgcctactaccgccagtgggcccctgtctattcgccgggctcccatcgccagtactccaaccccagcatagggctgttcggccacctggcggcgagcagcctgaagcagccgtttgcccccttgatggagcagaccctgctgcccgggctcggcatgcaccacacctatgtcaatgtgccgaagcaggccatggcgagttatgcctatggctattcgaaagaggacaagcccatccgtgtcaaccctggcatgctggcggacgaggcctatggcatcaagaccagctcggcggatctgctgcgttttgtgaaggccaacatcggcggggttgatgacaaggcgttgcagcaggccatctccctgacccaccaagggcattactcggtaggcgggatgacccaggggctgggttgggagagttacgcctatcccgtcaccgagcagacattgctggcgggcaattcggccaaggtgatcctcgaagccaatccgacggcggcgccccgggagtcggggagccaggtgctcttcaacaagaccggctcgaccaatggctttggcgcctatgtggccttcgtgccggccagggggatcggcatcgtcatgctggccaatcgcaactaccccatcgaggcgcgcatcaaggcggcccacgccatcctggcgcagttggccggttga

SEQ ID NO: 267354 - DNA, 450 bp, Klebsiella pneumoniae
atgtcgctggcaaggaacgccacggcgagtcaatcgcccactcaaacaaacggttacgaacgccaccaacccgaccagacgctgctctaccagctggttgagcagcactacccagccttcaaagcctcactcgaagcccaaggtcaacacctgcctcgctacatccaacaagaattcaacgacctcctccaatgtggccgtctggagtatggtttcatgcgggttcgctgcgaggattgtcatcacgagcgtctggtcgccttcagctgtaaacgacgcggcttttgccctagctgcggtgcccgccggatggccgagagtgcggcgctgctgatagacgaagtcttccccaaggagcccattcgccagtgggtgctcagctctgaggaatcccctaatgattttgataaaaatcataaatttaaggtagatgcacatcttgtcatgtga

SEQ ID NO: 267355 - DNA, 726 bp, Klebsiella pneumoniae
atgaaacaacttcctcctgacacaccagaacaatcactgatcactcagtacaaagggcctcgccttgtcgttaaggcctacgctggaacgggtaaaaccacgacactggtgaagtacgcccacaacaacctcgattcacgtatcctctacttggcatacaacagggctatccgcgacgaggcaagagaaaagtttcctgcaaacgtagactgcaaaacgtcccaccagcttgcctacgccactataggaaggggctaccagcacaaactctccggcaacctaaggctcaccgatattgcccaagcggtgaataccaagaactggacgtttgccaaagatattctcgatacgctcaacgcctttatgtgtagtgcagacatgcggattctttatacgcattttgctcgcgccgatacgggtaaagtgcttacgtccaaacaggagagataccaaatccaggtggtcgaaggtgctgagctcatatggaaacggatgacaaacgttcaagatccgttcccgaccgtacacgattgctacctcaaacagtatcagctcgggatgccgaatctgtctcgccggtacaccaccattctttttgatgaagcacaagacgctaaccccgtaacaagtagcatcgtcctacagcagaactgcaaggtaatcctggttggagatcgccaccagcagatctatagtgttgtggtcaaatttaaatggacactttga

SEQ ID NO: 267356 - DNA, 1263 bp, Klebsiella pneumoniae; identical to SEQ ID NO: 67462

SEQ ID NO: 267357 - DNA, 723 bp, Klebsiella pneumoniae
atggataagatattgaataaaaaggttaatgtaaaacaggctaacgaattgactgaagccgcatattatctctctttgaaggccaagcgcattctgtggctgtgtcttatgcaaacttacttcaccgcttcatccactgatgatagcgataaacctgatgtagtattgggagatgctgtattcaaagtatccgttgctgaatatgcaaccgttttcggtgtgacacggaatcaggctgtcaaagatgtaaaagatggaataattgaattaagccgttcttcagtcgttttttacccaaaagaaggtcgatatgattgtgttgccagaccctggcttactgaagctggcaaccgttcagcaaggggggtatgggaaatagagtttaaccataagctacttccgtacatttatggacttaccagtcagttcaccacttattcattgcatgattgtggaagtctacgaaatccgcgcacaataagactctacgaaagcctctgtcagttcaaatcaactggactttggataaccaatcatgcttggctcaatgagcggttcgtgctacctgagtctcaacagaaaaatttagccgaattgagacgatcttttttagatccagcgctaaaacaaatcaatgaaaaaacccccttaaaagcatcttactctattgatagtaatggtaaatttatattcagtgtcatcaacaagccattagctgcatag

SEQ ID NO: 267358 - DNA, 717 bp, Klebsiella pneumoniae
ttgttcgcgcattaccgtgacaagcgactaacgggcgaaatctactttagcgagaagtggaaaaaaggtgccagcccggtaactatcaatctggagcaaagctatctgagcagcgtgtttagcgagctggcccgtcttggagaaggggctgcaccaaacccactggaaagcatgcgcaagttcactattgccgaaaaagaaatggcctggctaacgcatgaacagatcacagaacttctgtacgactgccaacgccaaagcgccctactcgctttggtcgttaaaatctgcctgagtaccggagcacgctggcgagaagctgtgaacctaacccgttctcaggtcaccaaataccggatcaccttcgtcagaaccaaaggcaaaaagaaccgcagcatcccgatcagtaaagagctgtacgaggaaataattgttcttgacggtttcaggttctttactgactgctacttccagtttctgtcggtgatggacaaaacctcaatagtgcttcctcgtgggcagcttacccacgttctgcgccacacgtttgcagcacactttatgatgtccggcggaaaaatccttgccctccagaaaatcctcggccatcacgacataaaaatgaccatgcgctatgctcacctggctcctgaccatcttgataccgctttacgcttcaatccgttggcaactctgtccacaaaacatccttattaa

SEQ ID NO: 267359 - DNA, 225 bp, Klebsiella pneumoniae
atgactaatagaacccaaccgcagaaggtgcgggatgttcggaggattattgattttgtccaagaacatgggcgcatcactaccgaacaggtcgctgaaatgactgtgctttccataaagaacgctcggctggatatgcaggttgcgcagaaaaccggggagattatccgctatggtggtcagggatcattctgggataatcgtgcgactaaagatttaacctag

SEQ ID NO: 267360 - DNA, 1311 bp, Klebsiella pneumoniae
atggggagtaagtggacaaagacaaaattaaaagatttagggaagattgtcactggcaagacgccttcatcaaaaattaatgagccattttcttcacaaggtgttttatttgtcacaccacgcgatatgaaaggccagcgctggattgtacaaactgaacgctatctcaatgatgacggattaaaggcaataaaaaactcttttattcctaaaggtagtatcgctgtatcctgtatcggttctgatatgggaaaaacgaatataattaaagcagatgcagtaacaaatcaacaaataaactctataattgtagataaatcaaagcacgatcctttgtttatttattatagtctctcgttgatgcaggagtatttcaagagcattgcaagcggatccgccacgcccattttaaataaaaatgactttagcgaatgtgtaattgatattccatcaaaagaatcgcaaattactatcagttcatttcttgatgtactagattctaaagtcgaaattaacaataaaatcacccaaatcctggaacaaatgtcccaaaccctgttcaaatgctggtttgtggatttcgacccggtgattgataacgcgctggatgcgggaaacccaatcccggaaacgctgcaatctcgcgccgaactgcgtcaaaaagtacgcaatagtgcagatttcaaaccacttccggcagatattcgtgcactattcccggctgaatttgaagaaacagagttgggccgggtaccaaaaggttgggaaataggaaaacttcaggacttacttattttacaaagaggatttgatctaccttctacccaaagaaatatcggcttacacccaataatagcggctagtggctataatggcacacatgacatcgcaatggtgaaagcccctgggattgttactggccgctctggtgtattaggtaatgttttcctaattcttgaagacttttggcctctgaatacaacgttgtgggtgaaagaactaaagcatgccacaccatgttacggatatgagttacttaaaatgatagatttctcttcatttaatggcggctcagctgttccaacattaaaccgtaatcatattcacaacctggattccttgcttccacctaaaattttaattgaaaaatttgaattattttctatgcctttacataagcgagttcacgaattccaaaaacaaatccaaaacctaaccgccctccgcgacactctgctccccaaacttatctccggcgagctgtccctggaggatctaccagatttagtaacccaaaccgaacccgcttaa

SEQ ID NO: 267361 - DNA, 564 bp, Klebsiella pneumoniae
atgtctacgcgaacaggctcgcaccacagaaaggtaaatacgatgaaatatccaaccgtatcagtaaacggcgtctccgttcgcgtagatggcgcaggtcgctacaacctgaacgatctacatgctgcggctgtggcggaaggcaaagccaccgaatcacagcgacccggtgaattccttaaaacaaagcaagtaaggcggtttgtgcaggccctgagcgatgcgaagaaaatcgcatcggtgttaaccatcaaaggtggaccgcttcaggggtcatggggcctcgaattaattgccatccgttatgctgcgtggcttaaccccttattcgagataaaggtatacgagacattccagatgctaatccgtcatggcattgacgctatgtcccgcctgaacaaatcgaccatatcatcaacactgaaaccaaagcgattagccagtgtgctagccagatggcgaaatggggagtcggcggacgtaagcagctactgcacgcagcgcgggagcgggccgccgatgaagttcagttgtacttgcccggcattgtttagccatttttaa

SEQ ID NO: 267362 - DNA, 297 bp, Klebsiella pneumoniae
atgtcttttcaacgaactgtaaaagttaacccgacaaagttgtatcaggaactaggaggattgcaggtcgctcaggaggaagaggaggtggcggcgacttatacagcgttccgccttgagtcacttgatgctacgaccaggcttgccagcgtttactacagcatcagcctggagaatgcctccatccctgggtatggatacgctaactttacctatgaagatccgggtaatttgctggcggaggcggaaacctatctgaaaacatcttttgatgtcattgagcagaccagctattag

SEQ ID NO: 267363 - DNA, 1029 bp, Klebsiella pneumoniae
atgaagacccaccctacccctgacatgaagcatacttccaactgtttcgatataatacgtcatgctgctgcatatttagttatgattagccatcattatgctttaaatggattcccagaacctaaaatatttgaatccactaaacttggtacgtttgcagtcataattttcttttcaatatctggttacttaatcacgaacagctttcttaactcaacaaattcatattcttatatgaaaaagaggactttgagaatatttcctggacttatcgcatgttcatccataatgacattgttaatctttcctttttttggaataaaaaacaatgcgttggattggttgttatcacttagcccaatcaaatcattcttatatttcagcttgttcgggtctcctggtgcgggggagatagttaatggattcacaagcaactatatattcaatgactctgccaatggtagcctgtggtcactgaagtttgaattcttagactacattgcaattatgctaatatttagcttaatcaaaaaaccaattctaggctcaatcgtttttttgacaatttcagcggcaggggttctaataaataacaaatatcatatatcagattattatttttatcgtgccgctgcgtactcaattccatttgcgatgggatcacttcttttcgccacaaggaacatctggcaaaaacactgcatgtacaaatatattctaatgaccctggcgttcattggattacttgccacacctcatcatgacgaacttggattcccgattctctttctggttcctgtagttatcataatgatgggattttcttttaaagacttccttataaagggtagatttgacatttcttatggggtatatatatatgcatttccaatacagcaaataatcagcaatcactttcctggtaagttcggcctatcattcacgatatcattaatagcaaccacggccatgtcacttgcctcatggtttataatagaaaaaagattccttgcaagaaaaaataaataa

SEQ ID NO: 267364 - DNA, 4971 bp, Klebsiella pneumoniae
atgtcagatttaaattattcatcaggtaataatgggggggaatgggcgtccgtatctccagaatattctcttgtaaatattcctgcgtggcttgactctcctccagatgaagaatttcccgctttacctattaatactcgtctgcagaccctgccttttggtgagcttacttgggaaaattttgaacgtttaatcaaacgtattgtctctcgagaggaaaccatagctgattgttggatatatggagttccgggtcagaagcaattcggtttagacattcttgctacagcgaatgatgattctgattattttgtttgttatcaatgcaagcgtgttaggaattatacatcggatgatataaagaaagctgttgataaatttctggaaggtaagtggtttaataaaacaaaaaaactcgtattgtgtgtttcttcaattttgagtagaactgaatgtatcgatgaagtcaataatcaaattaaacggctttctttatttaacattatttttgaggtctgggatggtgctgaaggaggcgttctcgctgaaaaactaaaagtatatccggatttagtggacgattttttttctagagaatgggttagacattttaacggagaggatgctgcaagtttactaggggaaaggctgcaaggattggagctaaatcaactgcgtcttcaacttaatgatatctacaagaccttattcctcaggcatgacccaggacttcgtttaggttcgcaaagaccctcttctcttatatcccgttatataccaccgactgtaattgaatctagaaacgttatgtcttcagacatggtttcggaagaaaaagcatatcggcaatatgatgatggtactgtaaatagtgattctaaaccaaagcaatattctaggaataaacctgcaggaacacaagaaattaatgtttcattagatgagtggtttacaagacagcatcggagtgtgattctcggtgagcctggctttggtaaaagtactttactgcgtgttatggcattgcaactactttcaacatttgatgaaccaataaaaacctcgtggaacaacttattgcctgtatggatttcatttgggggttttagttctgctttgcaggcaaacccgctcttgagttttgaagactattttgataattggttacatcaaaatgcggcagatgatgttcgtcctctatttcgtcgagctataaaacaaggtggtatgcttcttcttgttgatggattggatgagggacaagatattgatgttgcgaagcaagctatggataggattagttctttcttagcaattaggtctatacccgcagtgttcactagtaggccacggggctatgaaagagtacgcccggatgggaattggccagttgctaaattaagtgcctttgataaaagtcaaatagagcaatttgcaaatatgtggtttgagtatcttgagttaccggatgcagggccagttgaacggatctcagaacgcgtacagcagcgcacgaatgatttccttaaagctacccaagtgaactcgagaataattgaattagctcagactccgcttttttgtcaacttcttatagacatatttagattttctcatcatttacctgagcaacgcgtaaaagtttatgaaaaaataatagagttattgatttctgaccatccctcagcccgttctcaggctgcaggtatttctgggaatatgctcccccgttctgaagatatgcgtgaaatgctaatgaggttagctcttgatattcaagagcgcggtggtgcaggtgttgtttcagtagaagcctgtcaggattcattctgcaattttttaactgatgatattaatgggcctggtcttaagaagtatgatgcaaagtatcaggctcagattataacagattatgctttatctggtttaggattaatgattgaacggtctccaaatgaattgggattttttcatctcacaattcaggaatatctcgctgcccaagctatgctccgtaaagaagaagaagaacaactcaattggcttattagggtttggaatcttcctcaatggcatgaggttatccttgcatggtttagcatacgtggaatggatcaaggaaagggagcaaatcaacgcgcgattgattttttaaaaggatcggtaattactccatgggaaaatattcaattgctggttcttagaacagaactggctgcaaatgattttggactatctccaagggaagctcgtgctactattgagcaagcagcaaaagaaatagaaataaccccttttagaaaaattaggttagtactttcaggatatatcgcgcaagggcttcgctcgtcttctgtgaatagtatctgtgaggcttatataacaaaatggacacagaccagagacgaatggtgtaaagccaggctttttcgtacattatgtggttggaagccctcaggcgatttattacaagccttaaaattgggtttgcatgatgaagatctcaaatgccgctgggcttctgcagaaagccttgcaaaactgtactctggtaacgatgaggtaaggaatgagctatcacaaaaagttaggatgtggcctgacttagaggtacgagcagcagcgttatactgcttgtggaagggatggccaaactatgaagctcttaatgaatatgctgaagttgcaagtaagtcaatttgccaaagttttgctatagctggtgtattaattaaaatttcaaagaatcaacatagtgatattgatcttgaaaagatctgtcaaatgtattttacaagaactgttgactatgacttagaagggatatgctgcgagttattagttaaaggttggggaggtgacgagaaactaaaagagaaagtattaattgaatttgatttaaaatttaaccaaggtgtatttgaagttgaacgctttatttcttttttggtacgcgcgtggcctggagataatgatgttgccaatcatgtagttcgctatgtcaaaaaatatagtatcgccatgatgcatggaagtggattgtggcaggctattatatccgggtttggtggaaataaagaattaattaatgctataagagatgtattaatagagcgaagagagaaatataaagctatttattgggggccggatacgaaaaatgcttatcttgcaatcggtgatgatgtagcgaaaaaagagatgcttgaagcatattctcaagttgatagtatcatggataaacattggatatgttcgacacttatgactgggtggaaaaatgatccggaggttcaacgatttttttctctagaatttttaaaaccaccggttgagaatgccattcttgccaattgggtgcatgtttttataaatgacaaagatgctagacgttcgtggttgcttggcgcaattactacaggtaatgataggggcgccttatcagctgttggtcggttacttgatgagtttaatgatgaagagtgcatagataccgttaaggatattttaaccaaaaaaaaatacaactattattcagaaattgatataaagaatagacttattgaaattgtacctaaagatccagttgtcaaacaatgggtgatgaattcttttgaagaaattgatagtttgtctttatcttcaatagcgataggttatgaagataataccactgtaagagaaaaaatattaaatgcgttatgtccaattcattcttatgctagaacggaaatatttcgaattattcgagagcacttgatgccttcagaatctatcatgcgagtgacctcaagtatttttgtagaaactaagcccttgattcgtacttcaggtctcattgcgaggtgtattgcaattcagcattatccagatgattttttattgtttaaacagatgttgtgcaaggaattagcctcagtaggcatggtttatgaaatgcggaggcgtagcgcatttgctgctttattatttctaaaagagtacgattactgtgcggagtatctaagccgagaacaggggtcttccatgcattggttatttgatcataagcatgaagatattttatcagctcggatcttatttgaatcttgggatgcgttaaaaaacaacaaatatttttctaataaagatgttaaaatatcatggtctaattttattcatgatgggactgctagaggaagtttaaatgatagttcttctagaggtcaacttgttgcctgtttgaaaaacatgtcaattaaagaacataattctcaaagcctttttttaatggccgatcttcttcctgcatcaaacgaattacgagattgtttggtcgagataatgagtcagcaaggaaatatttcttattatgttgaagaagaaaaaatagctattgctcaaagtatttatgcagaacaatttcatggtgatgctgaagcatataatgctttggaagagatctggaaatctctgaaattagatgaggatattcattcggaatatttatttaatgtgctttatgccttggctgttggatggccaaattcaaaattaattcaagcttacgttcaaataactgagcagccgaaagtatttttacatattgctttaatactttgtggtgtgacgggagatttagaaagagcacaggaatgtattgatgcgataataaaggaggctttacatgtaaatcatcctttcctctctttatacatagaggcacttaacaaatggtcatatacagagtcagctgatattcttttgcaaaaattccttaaaggggagatgtcttcacatttcattactgccttgaaattacttacatctactgggcgtgcaagcgaagagtttcgcctaaatatggttggttattttaacaatcaatttaattccgatgcgataattaatgaaggtgtcgatatttttaatggggaagttgtttcagttatccagataattgtggatgaatgtatgctaatgaccctttaa

SEQ ID NO: 267365 - DNA, 807 bp, Klebsiella pneumoniae
atggtaggaattgaagatgtgcctcagctcgaaggaatgtgggcaccactcgatgtccgtcgtgggctcaggcaaatatttagacgttggctacccactactagtcatctgcgctctggtttcgggcaagtagaaatgttcgatgaaatagagctcctcgatttttgccagcactaccgactagagtattttggtgcagcaaaggatattgccaaaatctgggacgagtcaaaggaacgtattgccgatggaggtcctactttcagtgagctaactcgtctaggttggatagttttcgacggtggtcgctggattatgcagtgctcacctccgggcacgctttcgcacatcacttacccaagtccaagcacgcaaaaatttctacatgaactttctaaaatcaaatgtattgagaaaacctctaattttacacaaagtgtccaaaagcaagcagccatgatattggatgaacagttattggagcgatacatcccggctagcagacctgactggcttgcaggacggacagacgcgtgtccactatgggcgggtaagatcagatatactctcctggctttgaagcagataaatatatgtaacggaccatgccggggattagggatggaggcggaaaaatgtgcgtctgctaatgataaatatgaatcctcacgacgtggagactggaaaaataaagcggctgccattaatatcctagagaaggaaataattgattttattgatacagggccgcctaagaacgcctactactcatcatgggaatcactgcatcgaacaataagtgattag

SEQ ID NO: 267366 - DNA, 1950 bp, Klebsiella pneumoniae
atgactaactcatcagcccttgacgacaatgatcgcgatgcaggggtagttgaagagatttgcggctaccttacagacataccaccccgtaactacttcctttttgcaggggctggttctggtaaaacacgaactttggtagaagttttgcgtcgccttactggtgtgactgagcatgagaaggggggacaattagcacggtccctgaagatgtatgggcgttcgattagagttgtgacctacaccaagaatgctgtctctgtaatcaacagacgtcttggggacaataatttagtcagtgtgtctaccatccattcgttttgctgggagttaattaatgggttcaacgatgacattcgggagtcccttatagcagtaaaagaagctcaactcgctaaagagactgcagaggcacaagcgaaaccgaggggtattactgcagcaaaacagcgtgaccttgacgaaatcacgaatgaaatcgaggctcttcggacaactgaagtattcaaataccatcccgatcgcaatacatatggacctggtgcactaccacacaattacgtactcgatgcgacagcttggttgcttcaaaataagccaacactccaatccattctcaaagatcgacatccaatcatactgattgatgagtcgcaggacacgatgaaaggtgtactggactccttgatggtgcttgccaaaaaaagtgagagagatttgactcttggtctgctgggagatcatcgacaacgaatttatatggatggtcatgccgatcttccaagcattgttccggaaagctgggcaacgcctgagttacaaatgaatcatcgcagtcaacgacggatagtcacactgattaataaaatctgggaaactgaatttgaaggcaggacacaaccaacaaagggttcagcacaacatccccgaacggaaaaagctggtggaacggttcggctcttcttgggggatacatcacgaagtccagaagataaagtgcttagtgaacgctggtgcgctgagcgaatgtttgaaattagtggtttagcagattggaatcaagggcaatatcagttgcttgcgcttgagcataagcttgtcgccactcgtggctcgtttcttgatgtctatgaggcaatggttctgttagatcccaacgctgcagcaccatctggcagtggggacaataaggggccttcatcagtacaaattttgcttaatgagctggcgcatttagaagcctgcgtcagtgatgaaggaatcgttaatgagtttaaggccaccgaggtttttcgacgttatggcggtttaggcaatatgcctgaagactcagaagcaagagttgaacgtactgatgaaatgctcgaggcgatagcgatatttgcaatggcttgcgccaactctgagtcaacgatcgctgaggtgttagcgccagtcttgagtgcaaacttattcgaggttgatcatcgactcctagaggcttatgtcgacaagtcaccagccccgcaagctcctggacgtggtgatgatgagtcaaagcaaaccagaatgcgccgcggatggtgtgcactgtttgcttctccatggaaacaacttaagtgctatcggaattaccttgctgggatttcagagctcgcaacacatcaggtagttaaaggctctgagttcaatcacgtcatggttgtaatggatgatgctcttgctggtgggactctcatcaagtacgacaaaatttttggtggtacgcagttaagtccaacagataaaaagaatgcagaggctggtaaggagacaacaattgaccggactttacgtttgctgtacgtgacttgtagcagggcgcaagaatcgctcgccttagtgctttggtcgtccgatccagctgcagcaatggctcgaatcaaggagagtcaatggtttgctgaagatgaaatacaaataatcacataa

SEQ ID NO: 267367 - DNA, 2310 bp, Klebsiella pneumoniae
atgtcagcagcagacgccactacatcattatctggacagatatcccttcggtttgttgagctttgccagttccgccgacttggtaaggtccagcttgagattgatcctaagactactattctcgtcggtgctaataatagcggcaaaacatcaattctggcagcgctgcgccacttcctcgcagatggctcgtcatttggtgctttcgacatcagtgtgtctcaatggccaaaattgcgggaacttggaagagtttgggacgcattagaagaagacccgtctacgtctggcgcatccgaagatgaatgggaagagcaacttggaaccttaatttcggcgatgccaacgctagatctatggttcgatgctaaggccggcatgttccactatgtctccccgttcttgtcaaaattcagttggaaggggggcggggtaggtgtccgattgcgtctggaacctgctacgaacattgaggatctgaagcagttggcttggaagtatcacctgacgagaatacctgtgaaggatatgggaaaggattcgcttgcgtggccgattgatcttcttgatttttggctgcgagaaccttctcaactcggccaagttcgggcctacaagttagatgccgataacaaccctttggacgggataaagacctacgttagccaggtactggatgctgactcaagcccaattgatcgtaagcatcttcagaaacttataaaagtagactttgtggctgcacagcgtggccttggtagtgaggaagctgattcccggtctgcttctggcacccatcgcataggtttattctccaatcagcttctcaaatttgctcgacagcatctaaatgtggcagcaacaggtcatgggcaccgagctgacctcataaaagctgttgctgatgcccagcaggaactagataaaaagattcatgaggctattggaccatcggtagaagaggttaaagagcttgggtaccccggcttgcatgacccccaagagattcgtttccgcacgcgcatacagacagccgaattactcgaccatgggacagctgttcaatacagcatgcagaaggattcactagaagagcttctcccggaatattccattggtctcggttatcagaatttacagtcccttagttaccaactagtttctttcaaagctgctcgcctaaatcctgaaaagggcactcccgcacctgttcatctggttatgattgaggagcccgaggctcatttgcacgtacaggtacaacgtattttctcgggtaaggcacataagctcatcagtcctaacggtagcgatgagtcaggtcttaaaagccaactgattatcagtactcattctagccatttagctcatgctgagaattttgaccggctacgatatgttcgccgcgttgccaagagtgaagaacaaaacatgcctaccactgaggtggttaatcttgggcaagtttttggtgatgataaaacaactcgtcaattcgctgaacgttattttcgcgttcaacacacagatcttttatttgccaatgctgcaatctttgtcgagggggttgctgaacgaatgctgttacctcttttcattgaaagagattttgcaacactcaacagtcgctatctgtccttccttgatattggtggcagccatgctcatcggctaagagctctcgttgaaagactccgtattccaactgtaattattactgatatcgatccagttgaagaaagaccaggtaagcctaaaaaaaatggggatccgactacaaccttagttgctgtggctaatacaggacaacccggactgcaatgtgggaacccgactcttcgcggatggcaccctaagttgcaacagcttgaggatttcaagaacccgaaaaatgagcatcttgtctggaaagaaattgccgagtgttctgtacgttttgcatggcagttgcctgtagtcgaagctgatggtcaatggccaagtacttttgaagactctctaattctgagaaatatctcttggtttaagcaacttattgatgaaaaagtcgatggcgatgggaagcaaatcaaaccgccgaagggagcactgggctcagtagcaagacaggtcgctgaaaatgataatattccagaactgctcgcagctctgcataaattaatgcatggatcttttaataaaggagactttgccgcaagtatctttgaaatggttgctgcggatgagccgatagtctgtcctaaatatatcgaggatgcattggaatggctccagacacagcttgagccaagcaaggaggtgatgccatga

SEQ ID NO: 267368 - DNA, 1743 bp, Klebsiella pneumoniae
atgaaaacgcagaaattcgtaagtgaactttttttagaaaatgggcagttcattctagttggtttaactgggagaactggttctggttgtaccacagcagcaagtattttagaaagtaacgagacagtttttcctgatgtggataaattaactgatttttatagtggtttagatttacaaagatataagatagtcaaggatttcactgaaagtcattgggaagcattttactcaatcaaggttagtgacttgctatcagtttatttattggcaatgtcacacgatgagctcgtacagtttatcatatcgtcaactacagatagcattgataaagataaattgaacaagatacttcatgatggggcattttcaaaaacacaacttaggaaaaaaaaggcgaagattttaagagaacttatcgatcatagtcaagaattagatctcgattatctagatgtaacaaacataagaaaaacattgcatttggttaggttttttaccaataagtttaaaaaagagcttaatgaaataaatactgggctttatgtatcaacttatcaggctgctggaaaatcaattagacgaattggtgaaataaaaacaaagtttgatacggaagaatttcgtccaaaatcggtatttcatttacctgaaactattaatagagtcattaagctaattagaaaaagccaaaatggtaaggcattagtagttattgatgctatacgtaatccatatgaagccaagttctttaaagatagatatgctgcattccatctggtatcaattaatgccccggatgagcataggaaaaaatatttacagaagttacataaattttcatctgaacgaattaaacacattgatgatattgagtcaggtaaaggagataaagacaatcaatataaacatttaacgaaccctaatgtaactaagtgcatagaaatctcggacattcatctttttaaccctaaaaatgaatttgataataataatatactgaaagcacaactggcatggtacatcgctctaatgaaacatcctggattgatcactccaacagcgatggagcgagttatgcaggttgcatatactgtgaaattaaattctgggtgtatatcaagacaggtcggtgccgttgttacagataatgataattctattaaatcagttggttggaatgatgtagccaaaggacaaatgccatgttcaatgagatcactcgatggagtgataaatgattttgattctaaagtatatagctcatatgagcgaaatgatgctcttttcagaaagaaagccaaaggtaatttaataaagttcagatcgattgaatcaagttcggaaattttcaaaggacgaaatttatcatattgctttaaggatgttcataatagcctagatgatgataaaaaagggaatcaggtccataccagagctttgcatgcggaagaaaatgcgtttttgcaattggcaaaatatggtggcgttggagtgcaaggtggtaagttatataccactgcaagtccttgtgaactttgtgcaaaaaaggcatatcaactacaagttgctgaaataatattcattgatccttatcctggtattgcacaagaacatattattaatataggtagtaacccacctaagttaattcaattcagaggtgcgattggtaaatcctatcatcgattatatgaacaaattattcctatgaaagatgagttggattatttattaatgtaa

SEQ ID NO: 267369 - DNA, 1623 bp, Klebsiella pneumoniae
atgaaaagaataacaacagccagggtgcgggagtatgccgcgttgcccgtcaccgccggacgggcgctggcgctggcgacgctgccgacgatgatctgttgtctcagcccgctgagccgggcgctggctgacgactattttgacccggcggcgctggagtttgccgacccgcagcagcaaacctccgatctgcactacttcgccaaacccggcggacagcagccggggacttaccctgtcaccgtggtggttaacgaccaggagctgggccaggccgatattacgtttgttgacgatggcgggaagctgcagccggtgctgacgcccgggcagctggcggagtatggggttaacgttagcgcgtttccggcttttcaaacgctgcatgagggtgagaccttcacccggatcgagaagtttattcccgacgccagcagccgcttcaccttcgctaaccagcgcctgacgctgagtattccccaggcggcgatgaacgtgcaaagccgcggctatgtcgatccctcgcgttgggacgatggcgtgccggccgcgtttgtcgattactacttttccggcgcgcaaatcaagaacgccgatgacggggagagcagccgctcaaactatctcaatttacgcagcggcgtgaacctgggcgcctggcggctgcgcaacgtctcctcaatgcagtacgaccagcagcgccgacactgggattcacagagcacctggctgcagcgcgacgtccgctcgctgaagagtctgctgcggatcggcgatacttacaccaccggcgacgtgtttgacagcatcccgtttcgcggcgtacagctgatgtctgacgatgagatgctcccggacagccagcgtggctttgcccccaccattcgcggcgtggcgcacagcaatgccaaggtgaccgtctcccagcacggatatgtgatttacgaaacctttgtgtcgccgggggcgttcgccatcagcgatctttatcccacctcgcagagcggcgatctggaggtgaaggtgaccgagagcaatggttcggtgcgcacctttacccaaccctattccgccgtgccgtatatgctgcgcgaagggcgaggcaaattcagcctcagcgccggccgctaccactccggggcggattcggtgcgctcgccggaattcctgcagggcaccctgttctatggtttgtcggcgggatttaccctctacggcggcacgcagctggcccaggactatcagtcatgggcgctgggcctgggccgcggcttcggcgaattcggatcgctgggaggcgacgtcacccaggccgtcacccgtaccccgtcgggtaagcgctatgcgggccattcgctgcgcgctcagtatcagaaaaattttgtcagctcgggcaccgcattcagcctcgccagctatcgctactcctccagcggctattacgattttgccgaagccagcgccctggaaagcgcgcaggggcaggtggacaaccggcgccgacgggaagagatctcggtgtcacaaagccttggcgatctggggagtctggcggtttccgcctggtcgcaggaatactggcaccggcagagccgggatgagacggtacatctcgggttctaa

SEQ ID NO: 267370 - DNA, 1134 bp, Klebsiella pneumoniae
atggttttcccgttcaacatgcctgccattattgagctgggtaccgccaccggcttcgactttgagctgatcgaccagggcgggctaggtcataccgccctgacgcaggcgcgcaatcaactgctgggcatggtgaaacagcatccggatcagctggtgcgggtacggcttaatgggctggaagatacgccgcagttcaaactggatgtcgaccaggaaaaagcgcaggcgctgggcgtatcgctctccgatatcaatgaaacgatatcagccgcgctgggcgggtactacgtcaatgactttattgaccgtggtcgcgtcaagaaagtgtacgtccaggctgatgcccatttccgtatgctgccgagcgacattaacaatatgtatgttcgtagcgccaatggcgaaatggtcccgttctccgccttcgtcacttcgcgctggatttatggctcgccgcgtctggaacgctacaacggtttaccctccatggaaatcctcggtgaagcctcgccgggtaaaagtaccggggaagccatggcgctgatggaagcgctggccagtaagctgccgagcggcattggttacgactggaccgggatgtcttaccaggaacgcctttccggcaaccaggctcccgcgctttatgccatctcgctgattgtcgtcttcctgtgcctggcggcgctgtatgagagctggtcgattccattctcagtcatgttagtggttccgctgggggtgatcggcgcgctgttagccgccacgctgcgtgggctgaataatgacgtgtactttcaggtaggccttctgaccacgatcggtttgtcggcgaagaacgcgatcctgatcgtcgaattcgccaaggatctgatggagaaagaggggaaagggatcattgaagcaaccctggaggcatcgcggatgcgcctgcgacccattctgatgacctctctggcttttattctcggagtcatgccgctggtgattagccatggtgccggcagcggggcgcagaatgcggtaggtaccggcgtcatgggcgggatgctaaccgcgacactgctggcgatcttctttgttccggtcttctttgtggtcgtcagacgacgttttacccggcacgctgaataa

SEQ ID NO: 267371 - DNA, 807 bp, Klebsiella pneumoniae
atgctgtacgctgccggaaaacgcgggctggatattggtattttctgtgccctccatacgcatggcagacggctcaactggcatccccatgtccacgtctccgtcacctgcggcggtatcgatgagcacggaaagtggaaaaaaatcagcttccgcaaggatgccatgcgcacccgctggatgtggaatatccgccagttactgctgagcgtctggtctgaaggcatcgcgctgccgcccctcctgtcgcacatcaccaccggatcacagtggcgcagcctgatactgaccgccggcggcgattactggcatgtgtacatgtcaaaaaagacggcgggtggcaaaaacaccgtaaaatacctgggtcgttacctgaaaaagccgccgatagcgggttcccggctggcgcactatgccggtggcgcgacgctgagctttcgctaccacgaccacaatacgggcgagcaggccacagagacgctgacgcagcgggaaatcgtggtgcgtctgaaacagcacatcccggagaagttcttccggatggtgaggtattttggctttctggccaaccgggtgtgtggagaaaagctgccgcaggtgtaccaggcgctgggaatggacaaaccggagccggtgccgaaggtgtgttacgcgcagatgagcaaacagttcctgcggcgtgccccgttcgaatgcatcctgtgcggcggacgtatggtgtaccgccgtgcggtggccggtctgagtgtacaggggctgaaaatccacgcccgtgacatcagtctgatgcggtatatcccggcctga

SEQ ID NO: 267372 - DNA, 1233 bp, Klebsiella pneumoniae
atggaaggagtaaaagaaaaaggattgacgccgactctgaataatgtcaagaaatatcttatatatgcgctaaaaatatcacccatatacatggttctatcagtaattatcgtttggggttatttggggcatttctctcgacttgatttgctggttggtgctattgaaaataaaacgaatctgttctcaatatttttctcgtttatttttatatctctatttatgtcatttgcatttatacttccaagttttaacttgatattattctcttcttttgttaaggatagttatatcactagcacaaaaaacatgccatttatcacatttataacaatagtggttatgttagcttctgtttttattttttcatctgatgtgttctcttctttcgttaagaattatagctatatagataaggttttcttctatctggatgagccattacgctctctgcttctatctttcatagcatcaattgtttctgtagtagctatagcgaaagtaaaaaatagtcataaaaatcgttttagtgggtctgctaaaattatcagaataagcgcttctatcattattacatcaataatatgttttttgtcttcaatttcaataagtatatccatctctttagtattgaagagtattgatgggcatacattttttgggtatgtatatgctttcctttttctctctgcttactcgtttctttcattattcccggcaatgattttttattcaagaaattattctttcaataatgttggtgtttttagttataaagtaatgaaagagacttcattagctattatgggatcattgttctttattgtttgtatttggcctaatggttttttgttcattggttcaaccgcgctgagtacaataggtgtattagataaaagggttcattattatcatattacatctgaaaagtactataaggagttattccctgctactatatgggagactaaatatttagaaggaagacgtgatttttttattaaagctgttaatatgttttcttttaacgggaataatcttgtttgcccagtgtatgtagagagccttaggaaaaaaacactggtttcaagctttgataatttttctcgccaaaaagacaaataccttaataatcatttcaaaactatggcaaaaggttgtgttgttcttactagtgatgagtttaaacaatgggatacaattatggatgcgaaagggaattttaaaatttag

SEQ ID NO: 267373 - DNA, 255 bp, Klebsiella pneumoniae
atgctacctcatcgcttaaaagccgcacgtttaaaggctggcctgtcacaggaacggttagggattcttgccggaatcgatgaagcaacagccagtgcccgaatgaatcaatatgagcgcggtatacacacgccagactttgaacttgcctgtcggttggcatcggtactacaggttccggcttgttatttttatgcggtggaagacgatctggcagaaatgattctcggatattcagaatcgcaggaaaaataa

SEQ ID NO: 267374 - DNA, 267 bp, Klebsiella pneumoniae
atgaagaaggtaaacagtctgctatttgatcaatcgtcagtagtggtttatttctcagataaatgcctacacgttcaggctaaagggaaagcactgctaaatatccctctccaaaacttcccacgccttgaacgcgcgacagtagaacagagagagcgcttcatccttaatgcaggtgggggaattcattgggaggaaattgatgaggatatcaatattgaggcgctttatgcgggagcaatcagggatatgactcatcgcaaatga

SEQ ID NO: 267375 - DNA, 261 bp, Klebsiella pneumoniae
atgctacctcatcgtttaaaagctgcacgcttgaaagctggtctgtcacaggagcggttaggaattcttgccgggatagatgaagcgacggccagcgcccgtatgaatcagtatgagcgcggtatacacacgccggactttgaactgacctgccggttagcgtcggttatggagattcctgcctgctatttttatgcggtggaggacgatctggcggagatcatactggaatatgcgaatagtcgtcagtccgggatctaa

SEQ ID NO: 267376 - DNA, 858 bp, Klebsiella pneumoniae
atgaaaacgcgggctaagcacgtcggtggcagctttaaaaccgttcacgatcgtacccgtatcattgatcgattttgtcgccatctgatggcgctcaatatccaggtcagggatgtccagcatctgaaaactaaacatatcgaaagttatattgccaaccgccaggcaacaggtattgctgttcgaacgcttcataatgacatgtcggcactgcgtgcagtgtttcggctggcaggcagggaaaagcttgttacatcaacacgtttaacgaacaaagcactgggattaagcggagcaagtcgcgcaggtacgaaattcgcgattccggatgagcgatttcaggcagtattgcaaagcgcccgacagtatgaccaggggcttgcctgtgccctccagcttgccagattgctggggcttcgctcacaggaagctgtgcagtgcgccagttcactgaatacctggaagaaacagcttgaacaaaatcaatcaaccctcaccattgtttttggcaccaaaggcggcaggccacgtgaaacacgtatcctcaaccgtaacgctgtacagcaggcagtaaatgacgctctgctgattgctaaaacacgtaacggaaagcttatcgacaagcccgatttaaaaaccgccatgaacttctggcgcacacataccacacggttagggttgatcggcaattattccccccacagcctgcgctacgcatggcctcaggatgcccttcgctattacctgtcacaaggattttcccgcagtgaagccagagcaatgacgtcaatggatctcggccacggcgatggtaggggtcgctacgtcgagcgcgtttacaccaggaaggagggctaa

SEQ ID NO: 267377 - DNA, 1377 bp, Klebsiella pneumoniae
atggagctatttcgacctagactaactgactatcatggagttcataagtctcaagcagacttggatttcgcaattcaattttttgatgaagatattcctctttacgtcgatccttttttgctttggaagtcaccatctttgcaggatcagtcgttacataccgctattacgaactctttcaatcatttaaattatttgattaaaaaaggacgtggagaagatgcaatcaacgtacttgttaacctttctgaatgtccagaggttggtctcggtgtctccaagtcgcgaaatggagtaaaaattgggattaaacaagcaaaggaaattcttagcttgtttgtggatattccagaatatagccagttcggattcacgcattttgaaataatacaactttatatttctggaatatcaaaggatcgagttagtgacattgcctgcaactatatcaaatcatttttgattgattatacaatagaacagtgcgaaatcaatcgaatacccactgagggagttatccttgattctgtatataactatcaaaaacatgctttcgattttaataaaaagttgctgcttccagtaaaccctaagactcgggagccattaatattcactcccaagcgttggctaagatttaacccttggattaattttgaggattattttaagtcccattgcccgagggatgagatatttaatccgaatgagcctgaagaacgggtgaaggtattgaattttaatagggacaatttcggggttatagaggaatatgtaaaatataaagatcggacttcaaaggattgtcaaaatgaccctctgtttagtcaaattcctgtcctatcagcaaaaaggaaattatctgagcttttaaagcttgaaacagggaaagacgatggtgctgacatgaagtacgaagatttatcagctagtttactagctacattattttatccacatttagactttgctgaaacacaaagtcggacggaatcgggaaggcatattcgggatttgatattctataataaccgcgatgttgatttcttagatgaaatattttgtgattacgataaccgtcaactcgtcattgaaatgaaaaatgtaaaaacgattgatagagatcacataaatcagctcaaccgctatctccaatccaatattggaagatttggaatttttctgacccgtaatccgttaccaaaggcaatgtttaaaaataccattgatttatggtcgtctcaaagaaagtgcataatcgcaattacagatgatgatttaaagttaatggttgatgtatatgaaagtaagcaaagagcaccgattgaagtcttgaagaaaaagtacatcgagtttagacgagcatgtccatcatga

SEQ ID NO: 267378 - DNA, 405 bp, Klebsiella pneumoniae
atgaatagagctaatgtagatacttttgaaaaaatatctggtcaattgttgagtatatatgaagaaatatcattactatcaaaaaaaagcccgaatgatgcggtgaataaatttaagctaaagttcgtaaacaaacttttatcacagagtaatgactatctgggtgaaatgtataagccgttcgacgattttgatagctttgatgaagacgatataccacaaaacagtgacgttgtttttatactttctcaatatctgcaatgttttgagaagcaaaggtctgataatgttgttattagaaacggaaattggttttggcgagttataggtgaagcaactgataaggtcgatgaagatggtatggtattaattcgtaccgtaaagccaaaaaaacttaaggattaa

SEQ ID NO: 267379 - DNA, 309 bp, Klebsiella pneumoniae
atggtcacctgttttctaaagtacgtcatagatccctataagctggatgagtttgagtcttacgcgcgggcatggattcctattgtgaaccgtatggggggaagtcatcacggttattacctgcctcacgagggagcgaacaatctggcctatgctctttttagttttcccagacttgcggcatatgaagcgtaccgtgaagaaatgaagagagatcctgaatgcctttctgtctttgcaactgaacaggttaatcgaagcatcataagttatgaacggagcttcatgcggccagtcactcaggggtag

SEQ ID NO: 267380 - DNA, 996 bp, Klebsiella pneumoniae
atgtttccagtcggtattgacgtcagcaaagacacgcttgacctctgcatgctttatgacggcatcaaaggccgcgttaagacacgtaatataaaaaatgatcgcagtgcggttgagaacatcagccgctggctgagacttcagcactgtggatcggaagatgttcatgtagtgatggaggccaccggtgtctatcacgagcggctggccactgcccttcacgatgcgggtttttatgtgtctctggccaaccctcaccgaagccgtgagtttgcccgtggcatggggattatgaccaaaacggacaaagtggatgcgtatatgctcgcctgttacgcgctgctgaaaaaaccgcaccgctgggagccgcccgcagcggatatcagtcatctcagcgcacttctgcgtcggcgggatgtcatactcgctgacgccgtgcgggaggaaaaccggctcgaaaagtatcagtccacagacacgcctgcagacgtcgtcagttcatgcatcaggatggctcaactgttacgcgaagaggtaaaaagtatcgaacggcagataaaggcgcatattaaggccagtcctgacctgaaacgggattatgcgctgctgacgtcgattaaatctgtcgggccccagttggggatgcatatgctggttgtgcttcgcagccatcactttgaatcagcagaccaggcggctgactttctgggcgtggtgccagtcgagaagcgctcgggcacgtcggtccgggggcgtccacgcatgtctaaaatcgggccgcctcagttgagagcaaagctttacatgtcagctctgtgcggaaaaattcataacaaacgtatgcgtactgtctacgaggaaatgtgcctgcggggcaaacctaaaatggtggctattggtgcactgatgcgaaaactggttcactggtgttatggcgtactgaagacgggaactgcttacaatgacggaggcccccgtgctgcgctgaatacctga

SEQ ID NO: 267381 - DNA, 564 bp, Klebsiella pneumoniae
atgactgatatcaccgaactggcgcagagagagaaattcgaagcgtggtgggagcgcgagtataaacatctcgaatcctcgaaatataccgatgctgtgccgcatatcaaatacggtttctggatggcatatcaggccggtggcgctgagctggtagaggcgctggagaaggcgcagcagcggattactcagatggagtcccgcaccgtcaccgactggatagaacatgacgggaaatggcgaccggaatcgctgggtctggatgaacttgtatacctgaaaaccagaaaacaggagctgaaaattccgtacccggcgggaaaggttaaagggtggatgaataccggcggagacatggatgttatggcgtacaagctggcgtcgccacaagccagcaccgtcaccgtgaagcttccaccaaaaattgagcgcgactatgttgatggctggttttcacacaaaggtggtctcgtcggtggtcgtgccgctgagtggtacaacaaggcgctggatgacgtcattgcggaactggccgcgcagggcatcaaggtggaggctgagtga

SEQ ID NO: 267382 - DNA, 249 bp, Klebsiella pneumoniae; identical to SEQ ID NO: 109956

SEQ ID NO: 267383 - DNA, 555 bp, Klebsiella pneumoniae
atgacgacgattttcgttgctggctctataaccattaaagaacttgatccgctcatcattgagcggttgaagaagattgtagacaaaaagtatcgtgtggttgttggtgacgctaacggcgtagattcatcagttcagcgagcgcttattgcgttgaattgtgaaaccactacagttttcagcagttcgccaaagccgcgaaacaacttaggtgcgtggcccgtaaatgttgtcaaaacagattacaagcgcggaacacgtgagttttacactgctaaagatatccagatggccgagcacgcagactgtggcctgatggtgtgggactgcaagagtcctggtacgcttaataacgtagtagagttgcttctgcgaaataagtattcagtggtgttcgtcaacaaaatgcgtgactttattaaagttaaaacgcctgacgatattgatacgctgataaaaatgatgaaaactaccgatctggaaaaggcagaagacaaaatcagtttaagcggcaagctggcgcgtttgaaaaacaatcagatgtctttgctgtaa

SEQ ID NO: 267384 - DNA, 582 bp, Klebsiella pneumoniae; identical to SEQ ID NO: 109938

SEQ ID NO: 267385 - DNA, 264 bp, Klebsiella pneumoniae
atggatgagaaagaagtgacgttttcactcagctatgagcagctgacccggttcgcggaacaacgcatccgggaatgtaaactggacagcgagggcctggcatatatgactgcatcgaccgaggccgccaccgttctgagcttctggcatgaactggccatcaatggctatgcctcagttaatgccttaaagagaaaagagctcatagacgccgatcacctgcgactcagacaactcatctggccggaggcggacaagcaatga

SEQ ID NO: 267386 - DNA, 171 bp, Klebsiella pneumoniae
gtggtggcggataatgagtacgccatctggaacgccttcggcaatcagtactggccggcgcattacattttcgacgctcgcgggcagctgcgttataccgcattcggcgaaggggattatgcccgccaggagcaggtgatccagcagctgctgcaggagagcaaagcctga

SEQ ID NO: 267387 - DNA, 231 bp, Klebsiella pneumoniae
atgataatcgcgcatgaggccagcgcatcgaccgctagctatctgtatctgggtcgctacgcgttgctaaaaagtctgaaagttactgttagcagtataacatgttttttacataatatgttctggtatgcgaaacgaatcagtcaatgggtcgtgcaatgcaatgttatgttatgtaacatttacaaactccctctctttaaggatgctgtcgggtgttgttcgatatag

SEQ ID NO: 267388 - DNA, 1104 bp, Klebsiella pneumoniae
gtgttgttcgatatagagaaaatcaaagagctacttcgtgaatttcctggactgacagggaagcaaatagccaaaaagcttgggtatcctgataaatctgccctgaattcatttttatacagcaatctagagggcctcaaacaggtcgaatggaaatggtatgtagaagatgaatatgtgttggttttggatgctgacgtttggatcgatgaagacatttttgaagctaacttatcggctgcaggctgcctattgggcgcttcagcaaacaggtgcagaatatgctttccggagaattgccggattttattggcagctggtgcgagagtgattgctctgtcaaatcaggctgcttttttggggaaggcgatcgaactggatttcagtaaatgtccatcgacgaaagactttttggaccggttgggtttttttgaccatttacatccggctgtaagggtccagccagagaggccaacggaatctagggcaaaacgctaccggggaaataatgacaacctggttgagatagcatccattaacttggatgatttcgatgattcaattccggtgaaactgactaaacaattcgcgctccatgccggccaggaatattacatggctgtgtttacaattttttctgagctcattggtaatgtacgagatcatagcgagactcctattcctgggttcgcggcgttgcagttgtacaaggggaagcgacgtcatatccagactgtaatttcagatagtggtttaggcatagcaacaactttgaaacgaaaccttaaaatatattaccctgaaatttttaaggaacttgaatctttatccgaagatcctgacatatttttggttaagcatgcactaaaaaaaggtgggttgagtcagtttggctccgcgcctgatgaggcagctcgcggactgggattgaaacggtctcaagagttggccgccagatatgatgcagttgtgctggttcgacagccaaacttcgagttgagaatcatatataaagacggtgaactcaccgacattataggaaaaaaagggttggcgttgatcaaaggtacccaagtttgctttgatttttttcttaggctatga

SEQ ID NO: 267389 - DNA, 549 bp, Klebsiella pneumoniae
atgaaagtcaaactgctggaactcactgaaaacaatgaccacccatttggaaatgttttgggacgggaagtgtttaagcgacttcaaagagttgttgactcacatcctagttgcaaggcatttgaaatttctcttgaaggtatcatcgctaccgattcttcctttccgcgggaaagtgtaattgcacttgcaaaacagctttgtggcgaaaagtacttctttatcacagatgtcagttctgtagatctcattgataactgggattatgcggcaacagcaaagcagcagtctttgattgtgatgcttgataaggaagtgcgtatcattggtcctgaagcaaaaagttcgacaaaggcattgctcgatgtcgtgttaagccgggatggagccagtaccgccaatgttgctaaagccctcaatatcactgtacagaatgcaagtacaaggctcaaaaagcttgtaagtgaaggacttattatgcgttcagaggtatcatcaccaacaggtggtattgagtttatctacactggccccggaatttctgattaa

SEQ ID NO: 267390 - DNA, 1089 bp, Klebsiella pneumoniae
atgaacgacctgcaatcacaacatccccaccatcgtatcattgaggtggcggacgagagcctcgcttaccgtcaggtaaccgtggaggataacacgcctaccggcgcacagatttcagctgcatcagggtttaaacctgatcagctacctgtagtgctgatgttgctttctgatggctctctggaggacatccgtcccgatgaagttgtggatcttggctctgaggttcgccgctttatcattgtcgagtcagaccgcacctatttgtttactattgatggcactcgtatggagtggccatgtcgtttaattaccggctatgttgtccgtaaacttggcaatgttgatgataataaaaaactgttactggagcgtgaagacgaagctgatctcgaaatccagaatgaccagtttatcgatctggatggggatggtattgagcgcttcattagcaggaaggaatcatggaaactgaatgttcagggtaaggaatttacttttgataccccgacaattgtaatccgtgacgccgttatccgtgcagggctgaatcccggtcaggcatggcatattttcctcaaagtcgaaggacagcctaaggttgagaagaatattgatgacgtcattgatttgcgtacgcctggcattgagaagctgcgccttacgccgaaagatgtgaataatggcgaagcatccggggtaacccgtcgtgagttcaatttgctacctgcagatgagcaatatcttgatggaatgggatattcctgggaaacctgcctgaacggcaatgctcgctggctgattatccacgattatgaactaccggaagggtataaccatcataacattaaactggctctgttgattacctccggttatcccgtaaacatgctggatatgttttacgtatatccgccactgtcgcgggtcaatggcgtcaacattccagcgacggaagctacggcggttattgatagtgtcgcgtatcagcgatggtcccgccatcgctcatgggatcctgaaacagattccgtcatctctcaactggcgatggcggatggttgtcttcaaaaggaggccggacaatga

SEQ ID NO: 267391 - DNA, 1371 bp, Klebsiella pneumoniae
atgagcaccgggagtcgcctgatattgacgcaggagcttcatgcctcactccggaaacatctgttcccgggagacggaaaagaggctgctgcaattctggtctgtaatcgttacgacggtactcgtctgaagctcctggctaagaagctcattcttgttccatatcaagagtgtaaatccaggacgatcgattttatttcttggccgggtagctatctggagaaggccattgatactgcagaagaaaaatcgatgtcaattatcctcgtccattcgcatcctggtggtttcctggctttctctgatatggatgatgcaagtgatgtgcagactatggcgtcactttttcagggcgttaataccattcatggttcggcaattatgattcctgacgggaatatgcgtgcacgtttctaccgggaggggaagtactctgagaatgtggaactggtaaccgtcgcgggtgataatattcactactggtgggacgggctcgctgagccacgaccgcctgcaatggcttttacatcggggatgacggacacttttaacaagctcaccgcagctgtcattggggtatccggtacagggtcgattgtggccgagcaggtagcaaggctgggctttggcgaaattattttgattgatcatgatcatatagaaaagaaaaatctgaaccggatcctgaactcgacccttgaagatgcgatggtctgccgaccaaaggtagacatgttcgcggaagttattaagcgtattcgagggggcgatattgcccggcccattcacaatactattttctcgcgggaggccgttcttgctgcagcaaacgcagatataatcttttgctgcgttgatacctaccatgcccgaatgattgcagatcgtattgcttctgcttttttaatcccattgcttgatgtgggggtgaaaattccgactcatgttgatcctgacgatgggcgaaaaattacggacgtgactggccggatcgattatgtaaaacctggtggttctactttatctgatcgtcatgtgtatacacctgagcttatataccgggaaaacctgagcgcgaaggattatgaagatcaggtcgggagaggttacatcacgggggttcaggaagaggcgccatcagtaatcaccctgaatatgcgagcagcatcggcttgtgtgtcagaatttatcgcaaggtgtttcccttttcgcgaatatcctaataagagatttgcccgtactatgttcagtctttcaggtgctgaagaagactatatcgatgaaagtgaaatagagaaggcgctgaatccacggcttgcagtcggatgtgaagagcctcttttagggatcccggaactgggagggaaataa

SEQ ID NO: 267392 - DNA, 357 bp, Klebsiella pneumoniae; identical to SEQ ID NO: 265628

SEQ ID NO: 267393 - DNA, 585 bp, Klebsiella pneumoniae
atgagggacttaaaaatacaacttgatgatattcaaagcaaactttcatcagcagaaaacaactacaaagaaaataaaatagatgacctaatccaatattacaataatgcagagaaatatgattacatacaaaaatctccactacagggcattatttcttcagtcacgaaaaaaaatggtgcacaaatccagaatggtgaatatataatgtctattatacctgaaaattctaggtatcaggctgttatgtttatttctccggaaattattggtcgactgaagttaaacagtgacattacgctacatatcgattcatatccttatcaacgttttggggttgtttatggaaaaataaaaagcatttcagatacgccactaagcgtagaaagtatttacaataactataatactaaagtcgaacatccatcatacatagttgttgccagcattgaaagaaatgaccaatctctcaaactaatccctaacatgacctttagcgcagatataccactggagacgcgatcattattcaaatggatatattcctctctatttaagactgaaacaggtattacgtttaaatga

SEQ ID NO: 267394 - DNA, 2145 bp, Klebsiella pneumoniae
atgattaatgacaaattgaaatttaactttaaaaaacaagtcccgttttattttcaaaatgaaaactcagattgtgctttgacctgcatcagaatgttagcgtcttattatggcaaggagaacatactggagtatacgcttgataaagtggatgcaagaaaaaacagtttgtcggtaagcgacataatgtatattttgcgcgcaaccggaataactccaaggccagttggattagatatggatgaattccatcaattaaagttgccatgtattcttcactgggatatgaaccattttgtcgtactagtaaagagaaagggggacaagtatattatccatgatccagataaaggcatccgtattctctccctgaaaaaaataagcgaatcatttaccggagttggtatcgaggtttacaatgacgaatcgctgtctcctgagcaaaacaggataaagaaaaacaacaaaaaagagagagcgatttatcagtacattatcagtagtctttattcaggaaagaaaacacttatctgtctttttattcttattctctttgctgaaattattaatatcacgataccacaaataacacagttaataattgataatgttatcgttaataacgaccatcgattattgattacagcgataatctttttcctgttcctgaatgttatgagtatggctattctttccacaagggactggcttgttacatggttaaatgcgaatgttggcattcagtggtcaacaaatatttacaacaggctcatgtcattaaaaatgggatatttccttgcaagaagtgttggcgatatattatcaagaataaattctcttgaatatatccgaaatcttattgtatcccagttgacgaaaatgtgtttagatgttcttatggcatttggtgcatttgccgtaatgctttcatatgacatcaagttgactctgtttgtttttttatattcatttctgtacttcattgtaaaagctatttacttctcatcactgaagtatttaaaccttggcaccatcagtattaaggcaagacagcaaagcgcactgattgaatcaataaaatataatcatactataaaactctattttcctgagtacatgtcatcatcggcgtatatcaacagcatggttgatggaatcaacacaaaaacaaagatggatatattaaatattattttgtcatcttcaaataatttcctgtcaacattaaagaatatatcaatattgtattttggtggtttacttgtcattaattcatcatttaccattggcatgcttgtagccttcattgcatattccgaacagtttagcaggagaatgataaatattattgagttcattttcgaggctggaattatcaaaattcatgttaacagggtttcagatatatgcgatgcaaaatgcgaaagccagttttcactctcaaaatcgcttcataacatcgtagggtctgtaggcgttgagtgtaataatttgagtgtaagatatgacaacagtgaaaaaaacgttttaaagaacatgaatctgacaattcatccgggcgaaacagtacttctcagggggaaatccggaggtggcaagagcacgcttctaaatgctattctgggtttggttgatttaagtgagggctctgtttcagtcacagatgaaaacgccagtaataaaatagaatttgtcagaggtatatctggtgctgttttacaaggagatactcttttaaatggaacaataatctataacataacatttaatgattcaacaccgtcatctgaagttattgatttaacaagaaaaatcggcgttcatgacattatagaaaatctcccgatgggatattttaccccggtgaatgattgttgcaatgttctgtctgcaggccagaaacaaaagatattattagccagagcattattcagaaacccaaaattattagtgcttgatgaagcaacaagtaatcttgatgcccagtctgaagatgaaattaatcagcttatattgtctcttgactgcacaaaaattattgtgagccataaggatgaagctatgagcattgctgataaaattatagatatagacaatggagaaatcaaaagcactaccgttataaacaacaaggcagggtattaa

SEQ ID NO: 267395 - DNA, 276 bp, Klebsiella pneumoniae
gtgcaggtattcaccaccggacgcggcaccccttacggcctaatggcggtaccggtgattaaaatggcgacccgtaccgagcttgccaaccgctggtacgacttaatggatatcaatgccggtactatcgcgaccggcgaagagacgattgaggaggttgggcagaaactgttcgagttcattctcgacgtcgccagcggacgtaagaaaaccttctccgatcaatggggtctgcataaccagctggcggtgtttaacccggcgccggtgacgtga

SEQ ID NO: 267396 - DNA, 810 bp, Klebsiella pneumoniae
atgaacagcagcgagtcatctgccgaaaagcgcattgcgggaacaagtgaaaggcgtgagcagatcatccagcggttgcgacagcagggaagcgtccaggttaatgacctggcggaggcgtatggtgtatcgacggtcacgatacgcaacgatctggcgtttctggaaaaacagggcattgcggtgcgagcatacggcggcgcgctgatttgcgatagtcatactccaggcgttgaaccttcagttgaagataaaagcgcgcttaatacggccatcaaacgccaaattgccagcgccgccgctgagctgataaaaccgggacaccgaattattctcgactcaggcactaccacctgtgaaatcgcgcgccagctccgacagcatagcgatgttatcgcgatgactaatggaatgaatgtcgccaacgcgttgttagaagctgaaggcgtagaattactgatgacgggggggcacctgcgtcgccagtcgcagtcattctatggcgatcaggctgagcagtccttgcagaactaccactttgatatgcttttcctcggggtggatgcgatagatctggaacgtgggatcagcactcataatgaggatgaagcccgcctgaaccgtaaaatgtgcgaagtcgcggagtgtatcgtcgttgtgactgattccagtaaattcaatcgttccagtttacataaaatcatcgatacgcagcgcattgataccattattgtcgatgacgggattccgcaagaaagtctggaggggttacgtaagggcgggattgacgttattctcgtcaaatcataa

SEQ ID NO: 267397 - DNA, 1296 bp, Klebsiella pneumoniae
gtgaaacatcttacacaattggtggtgcgacacaaacagggtgaagcgaatggtatttacgcggtgtgctccgcgcatccactggtactggagtccgccattcgttttgcccaggcaaaccatacgcccctgctcgttgaagcgacctccaatcaggttgatcagtttggcggttataccggtatgacccccgctgatttctgcggctttatctatcatcttgccgatacactggggttcccccgcgacgggctcatcctcggcggcgatcatctggggccaaaccgctggcaacatcttccggtcgcacaagccatggcccacgccgacgatctgattaaaagctatgtcgccgccgggtttaaaaaaatccacctcgattgcagtatgtcatgcaaagacgatcccattcccttaaccgatgaccttgtcgctgaacgcgccgcaaggctggcgaaaatcgcggaagaaacctgtattgccctgaaaggcaaatcggatctcgtttacgttatcggcactgaggttcccgtgcccggtggcgctcacgaaaccctcaacactctacaagtcaccaccccggatgcggctcgcgccactctcgatgcacacagggtcgcctttaccggtgtggggcttgagggtatttggccgcgaattatcgcgctcgtggtacagcctggcgtggaattcgatcatgcacaagtcattgattacgaatctgaaaaagcaaaatccctcagcgctatggtggaagactatgccacattgctctttgaagcgcattccacggattatcagaccccgcatgcgctacgccaactggtagtcgatcatttcgcgattttgaaagtcggcccggcgttgactttcgcgctgcgtgaagcgcttttcgctttagcagcgattgaagaagaaatcgtaccggcaaaatcctgttcgggattacgcatggtactggaaaacgtcatgctcgatcgtccggaatactggcaaagccactaccacggcgatggccacgcacggcggttagcacgcggctacagctattccgatcgcgttcgctactactggccggacagccagatagacaccgctttagcgcatctggtgcgcaatctggccgatgaagccattccgcttccgctcattagccagtatctgcctttacagtacgtaaaagttcgcgagggggcgctcagcgctacgccgcatgaactcatcattagccacgtccaggacatcttgcagcaataccatgacgcctgtcagggcatgacatctcataacggataa

SEQ ID NO: 267398 - DNA, 435 bp, Klebsiella pneumoniae
atgttaggaatcattttgaccgggcatggcggatttgccagcggcatggaaaaggcaatgaaacagatccttggcgaacagtcgcaattcattgcgatagattttcctgaatcctccacgaccgccctgctgaccgcacagctggagcatgcggtaaacgagctggatggcgaagaagatattgtttttctgactgatttacttggcggcacgccatttcgcgtcgcctccacgctggcgatgcaaaaacgcggacgagaagtcattaccggcactaacctgcagctactgctggagatggtgctggaacgagaaggattaaccagcgaagcctttcgtcttcaggcactggaatgcggtcatcgcgggttaacatgtctggtcgatgagctgggacgctgccgggaagatcatgctgttgaggaaggtatatga

SEQ ID NO: 267399 - DNA, 1134 bp, Klebsiella pneumoniae
atgagccgcatactgcgcgccaggcgcttactcacagagcaaggctggcttgatgatcatcagctacggtttgaaaatgacgttatcgtggcgctggagccgatccccgcgggtgttctcactcgcgacgccgagctgctgtgtcccgcatatatcgatattcatgtccacggcggcgcaggcgtagatgtcatggatgacgctccggatacgttagacctccttgcgaaacataaagcgcgtgagggggtcgccaactggttgccgaccaccgtcaccgcgcctttagcggaaatccatgcggcgctggaacgtattgcgcgacgcgttcacgcaggcggtccgggagcgcaaattcttggcagctatcttgaaggcccctacttcacgccgccgcataaaggcgcccatccggcacaatggttcagagaactggatcttgccgaattcgatcggttgattgcggtttctcgcgagacgctacgcgtcgtcgcccttgccccggaaaaagagggggcactgcaggcgatccgtcatctcaaacggcaaggtgtacgggtgatgctggggcatagtgcggcaacctgggaacaaacctgttccgccttcgatgccggtgcagatggcctggtgcattgttacaacggcatgagcggtttacatcatcgcgaaccaggcatggtcggcgctggattaaccgataaccgcgcctggcttgaacttattgccgacggtcatcacgtacatcctgcggcaatgcagctatgttgccgttgcgctggagatcgtatcgtgctgataaccgacgctatgcaggcggcgggtatgcctgacggtaattacaccttatgtggcgaaagggtagaaatgcgtgatgggatcgttcgtaccctcagcggtagcctggcggggagtaccctgtcactggattccgccgtgcgcaccatcagttcattacccgggatgacggctgaacgggctatacatatggcttctctacacccggcgcgtctattagggctggatcggcaattaggatcgttacagccgggaaaaatggccgacatgattgcagttgataacgagctgcgggtggaaaacatttggatccgcggcgaagcgttttcgctttaa

SEQ ID NO: 267400 - DNA, 1155 bp, Klebsiella pneumoniae
atgtcagaaagatacacccctgcgccatcaaccactggtacctggaccgaagaagagatccgccagcaaccaggcagttggctccaatctttaaagcatatcgatcgtttacgagcggagattgacggctttctcacgccgctactacgaaaaaacgatctccgtatcgtccttaccggcgctggaacttcagcatttattggcgacatcattgcgccatggttatcccgtcatagcggtaaaaattttagcgccgttccaactaccgatctggtgaccaatccgatggattatctggatcccgctcatccactgctgctggtctcattcgcccgttcaggtaatagcccagagagcgtggccgcagtgaaattggcgaatcagtttgttacagagtgttatcacttaccaattacctgcaacgaagcaggtagcctgtatcaaactgcgctggatagcgacaacgctctgccgctattaatgccgccagaaactcacgatcgcggctttgcgatgaccagcagtattaccaccatgatggccagctgccttgcagtgttcgcacccaacctcattaatagccatacattcagcgatgtcgctgactgctgccagacgattcttaactcgctgcacgatgttaacgctggggttttcggcaacgaagcgtggaaaaggatcgtttacctcggtagtggcgggctacagggcgctgcgcgcgaatccgccctgaaagtacttgagctcacggcaggtaagctaaccgcgttttatgactcgcctaccggcttccgtcacggccctaagtcactggtgaataacgaaacgttggtggtgatgtttatctccaactacccttatacccgccagtacgatctggatcttctcgctgagttgcgtcgcgatcgccaggccatgcggatagtggccatcgccgcaggaaccgatcctgttatcgaggcaggcccgcatatcatcatcccgccatcacgccgtttcagcgatgtcgaactggctttctgcttcctgatgtatgcccagatcttcgcgcttaaccaatctctcgccgtgggtaacaccccggatacgccttccgccagcggtaccgttaatcgcgtcgtacaaggtgttgttattcatccctggcaggcttaa

SEQ ID NO: 267401 - DNA, 873 bp, Klebsiella pneumoniae
atgagcattatttccaccaaatatcttctgcaggatgcacagagtaaaggttatgcggttcctgcatttaacattcataacgccgagacgatccaggcgatcctggaagcatgcagtgaaatgcgatcgccggtgatccttgccggcacgccgggaacctttaagcatatcgcgctggaggaaatttacgcgctctgccatgcctactccgccacctacgcgatgcccattgcactacatctcgaccatcatgaatcgctggcggatattcgtcgtaaggttaatgccggggtccgcagcgcgatgatcgatggcagccattttccgttttcagagaatgtgaagctggtgaaatcggtcgtcaattattgccacgcgctggattgcagcgttgaggcagaactgggacggcttggcgggatggaagacgatcttaacgttgatgcggaaagcgcatttctcacagacccgcaagaggcgaaacgctttgtcgaattgaccggtatcgacagcctcgccgtggcgatcggtaccgcgcatgggctatatcaaaaaacgcctaaaatcgatttccaacggctggcagaaattcgggaagtggttgatgtccccctggtgctgcatggcgcaagcgatgtaccggatgactatgtccgccgcgctatcacactgggaatttgcaaggtcaatgttgctacagaactcaaaatcgcgttcgccgccgcggtgaaaacatggtttgctgaaaacccgcaagggaacgatccgcgttattacatgcgtgttggcatggatgcgatgaaagaaatcgtgaaaagtaaaattaacgtgtgcggttccgctaaccgactattacaggccgcagaagcctga

SEQ ID NO: 267402 - DNA, 576 bp, Klebsiella pneumoniae
atgagaagattgacagccgaagaatgcaattgcatttatggtggtggtgttggattgggtgaagctttagagaccatcatcgatgggatcgttgaagccacccatgcttcggaaggtgctttgtctttagctgaggcgctcggagcttttgacggtaaaaaggattttactgttccaaaatatacaacagataaagatgtacttcagatggacgtggatgttgctaacagctatatgcatgagctacagacacataccggtagtgataaagtttctgatagcgcccgggaagcctgtattaatgagttacaaaatgatggtcgtgtttattacaatcctctggaacacaaatttgacattttagggggagcgcctgaatctggagctgtcactcaacgtgatttaaaagatccagatatccgtaacttctataattatattatggaacaggatgttaaaaacattaactcttcagatcccacgactgctaaaaacgctcttgaatcaatccagtatagtaccagagaaggagtatatcattatagcgtgactcaagggaaatttgtgctgggttaa

SEQ ID NO: 267403 - DNA, 312 bp, Klebsiella pneumoniae
atgaatgaaggcatagcatgctgtccggaaaaccggacatcaacacgggaggcggtggttgacgccatgctggcgtcaggcgatgaacttgcacaactgcagccggcgctgaacctgctttcgcccccgctgaacgccacgcctggtgaagcgctgctggccagctgttatgaggccggcgctgaccacaacgctgacgaggcaacacgggcggtgagcgccttaccggcggcggtcgtgcgctctgctgtgcatggcggccggggcgctcagcgcccggcaacttccactgacgcacaaccggctgtgtga

SEQ ID NO: 267404 - DNA, 966 bp, Klebsiella pneumoniae
atgataaaaagaatgaaggttttttgggatgaaaatgctgtttatatactgcctattgcaggtattgtatgtttggctattggacaaatattattggcctttgggtatatcgaacgctttgctaatatacttacaaacaccggaatagcactattgggtggtgcgttattcacggctattaccaaaacaacccactacactaaattttttcaggacaggatttttgatgttttttacaatcctgaaaaaggagctttaattgaatccataaaaacaaaatggcaaacattaactcattatttactgctaaggactgctggtgacttacgagaagatgtagcgaaagagttgttaaaaaggttctttgatagcgatataccttattatttccctgaaataacagaaagttatgacatggttcttcttgaggataacaaaacgctaattacaaagaaaaaagtaacttgcagattagtgataaactccagtagagatgaggctactcttactcaaaaaatcactgcacagagtaagcatgagcttaaggctatttatgttgaccaccagatttatgatattacagataatattgtcgaaaaagacatcataaaagatggtataaaccaaaaatacttggagatctccataaaattaaaaaacaatggtaaacctatagtaatcgaacgattttatgaaaaagagcaagatctttgcaatgatccttggacaatagtcaataatagtaaatttatccagcaactagtagttaaatataaagcaagtaactgtaaggtactcataactccaacaggcacaatcacttcacctgaaaataacttaaacacatatattgaccaggacgggtacaccagaattgtattatcccctccaggtggtttgacgctaccgggtgaagggtatatattacttgtgcaaccagagagcaaggagtgtgcaaatgactaa

SEQ ID NO: 267405 - DNA, 603 bp, Klebsiella pneumoniae
atggactgtgatacggcgtgccagatgatccagtcgggggggaacagcatcgttggcagctattttctaggcttcgttcaagcccttgtcctgtctcatccattcgcgtgctgcttccggcgtcagaaccagcggctggcggtcgtgaatatcgaccaacctctgatcggccgcagcggtcactatcaaaaaccctttggcttcgttgccgcgctcaaaaggaacgcagccgatcgcagccatgaatattggctggccatcagcaagatgaatgaaatagggctgcttcttgtcgccttcttttttccattcgaaccattcatcagcaaagcagatcgcccggccatgttgtcacagaggtttaaacattctgctgctggctgccgtctcaacccgggcattaatcagcggtggtttatcccaccaccttggtgcgtaaccccagtggaccggatcgaggtgcaactgttcgtcgcgttcgctcaggagcaaaactttagtccctggcaccacgttgtaccggccgattggttctggatcataggcgatatcccgctcagcttcttcggcaaaataagccaggtattcttcacgtgtctgtga

SEQ ID NO: 267406 - DNA, 732 bp, Klebsiella pneumoniae
atgggcttccacgctgctggagcagcctactacaactcaccttccctgttccgcaaccgtgagcatatcccggcaaaaggttatatcagcgatcaactaacggatgaggcaattgccgcgattggcagggcaaaaacactggatcagccgtttatgctttatctggcttacaacgccccgcatttacctaatgatcatccagccccggctcagtaccagaaaagattcaatactgggagcccgacggcagataacttctatgctgcagtttactcagtagatcagggggttaagcgtgttctggacaaactgaaagaaacaggccagtacgataacaccattatcctttttacctctgataatggtgctgtgattgatggcccattaccgcttaacggcgcacagaaagggtataaaagccagacatatcctggcggcacccatacgccaatgtttatgtggtggcatggcaagctgcatgctggaaattataacaagctgatttcggcaatggacttttacccaaccgcactggatgctgcgaaaatcaccttgccggcaaacctgaagcttgacggcacctctctcttgccttacctgacacagaaagaaaagggtgaaccgcataaatatttgacgtgggtggcctcttactcgcactggtttgacgagaagaatatcccattctggtatttttcggatctgcggtggagaaatgagaaaacaggatag

SEQ ID NO: 267407 - DNA, 303 bp, Klebsiella pneumoniae
atgcgctgccgctgtctgcttcagaatccgcgtatcaaaatcagcattgaaaataaccagcaggcgccggccgatatggtgctgcagctgctgcccaatatcgggccaggatggcgcactgaccagatcatcgtcactgataccgtgtactgcagctgcttccggatcgatgtcgacagtgggtttaaggcgggtctcaaatatcctctcaccgcgggcattcaccagaccgatttccagcgcctgcgcgccggcatcaagtccggtcgtttcggtatcgaggaagacggggtccagcgctaa

SEQ ID NO: 267408 - DNA, 1545 bp, Klebsiella pneumoniae
atggcgccgcacgatctcgtcgctccccagcccgttgagtccgaagtgattatcgaaacccgcggcctgtcgcgcgtctatcccggcgtaaccgccctggataatgtcaattaccgggtctatcgaaataaggtcaacgtgctgatcggagaaaatggtgcgggtaaatccaccatgatgaaaatgcttgccggtgtggaaacgccctcctccgggcaaattatcctcgatggtgaagcagtttcattacagtcgacgcatcaggcagaaaaactgggcatcagtattatttttcaggaactgaatttatttcccaatatgaatgtgatggacaacatcttcatggcgaatgaattctttcagaaaggacgcattaacgaaaaataccagtacgcgctggccaaatcgctgctggaacggctggagctggatgtcgatccttacgctccgctgggtgaactcggtatcggccaccagcagttagtcgagattgcccgcgccctgtcgaaagacacccgcgtgctgatcatggacgagcccacctcggcgctgagccagtctgaggtcaaagtgctgttcaaggtgatcgcgcagcttaagcggcgcggcgtgaccatcatctatatctcgcatcgcctcgaagagctgatggagattggcgacaacatcaccattttccgcgacggtcgctttatcagcgagcgtcacgtcagcgacgccagcgtaccgtggatcatcgagcagatggtcggtgataagaaaaaacattttgattatcaaccggcgccaaaaggcgacgcagtgcttgacgtcaaagggctgaccgcgctgcatcccagcggcggttacaagctcaatgacgtcaccttcaccctcagcaaaggcgaagtgatcggtatttacggcctgctgggcgccgggcgcaccgagctgtttaaaggcctggtcggcttgatgccctgccagcgcggcgaggtgcatcttaacggcgaaagcatcggcaaatctcgctttcaacagcgcctgaaaaaggggctggcgctggtgccggaggaccgtcagggcgaaggcgtggtgcagatgatgtcgattcaggccaacatgacgctctctgatttcagcctgcaggggttccgccgcgcctggcgctggttgaacccgcagaaagaagagtcctgcgtgaaagagatgatccagcagctggcgatcaaggtcagcgacgccacattgcccatcacctcgctgagcggcggcaatcaacaaaaagtggtgctgggtaaagcgctgatgacccagccgcaggtggtgttcctcgacgaaccgacgcgcggcatcgacgtcggcgcgaaaaccgacgtctatcacctgatcggcaaaatggctcagcaggggctggcggtgatgttctcatcttcggaactggatgaggtgatggccctggccgaccgcatcctggtgatggccgatggccgcattaccgccgatctaccgcgtcacgcggtgacccgcgaacagttaatcgcggcttcaacacctcaagattaa

SEQ ID NO: 267409 - DNA, 174 bp, Klebsiella pneumoniae
atgagaagggcccgccattcccagcgcggcgactacgtaaccatgctgtcgcagaggaagcgcgaggcagttaagtccttcctccgcctcttcaaaatcaagggcatacccagatttagcgatagagagcagctcgctattgagtttgtcattaataaatccttccttatctga

SEQ ID NO: 267410 - DNA, 981 bp, Klebsiella pneumoniae
atgctgaccagcaactcgcgctgtcaggagccgcggctacgtctgctgcaggcagggtgtaaggctatgcagcgtattcaccccggtttgctggcattgtccgtgacagcgtttgctattggtatggccgaatttattgtggtaggtattctgcctgaaatcgcgtcagcactgaccattgctctaccccgagccggcaaccttatgggtttgtatgtgctggctctggctgtcggtacaccgttactggtgatggctatcgctggtctcccgccaaaaagggtgctgacagccctgatcattatgtttctggctggaagcctgctttcggcactggcggacagttcccccctttttcttaccgggcgactgataaccgccgttgcgcatggcagttttttcgccatcggtgcaacggtagccgccaggatagcccctgcggggaaagcaggtaaggccatagccgttatgtttgccggactgactctggccatggttattggggtaccgctcggcagctttattagtcagataatgggctggcgggtgccattaatcatggtgagtttactggccctgcttgcattactggcaacaatgttctggctgcccggtgtcagaaatagcggatccgggaatgtaagggaacagttgcaggcgctgtcacatccggcaatcctgaccatgatgagcattactgtgctggggttcgggggagccacactgacaggtaacctggctggcggtcatttttcatcgacccggggctggtccgtaacgctgggcacacagattgtgttgctggcagtgacattaatcgctctggccctctttcttcagtggaaagcggctgttattggggggctcttcctgtggggaacccttgcatttgggctatctcctgcggtacagcagggcatgttgtcagtggctgaacgctactgtcggatttgcctcagccctgaatatatctgcttttaa

SEQ ID NO: 267411 - DNA, 219 bp, Klebsiella pneumoniae
atgaagagttgccagatcattttggacaaatatattttgaattggctgaagcatgtattcaagcactggaacagaatgatgaaaataagcttagcaaggttttccctatgttcatgttcttatctctgcaagcatcagaaaccaaatttgtggatccaaaacttgatgttaatgatgagtttcggttacaccttcgttcatccgttatcaatgacctga

SEQ ID NO: 267412 - DNA, 468 bp, Klebsiella pneumoniae
atgactcgcctaaccgccatcggcagcgctgtgattatctcccttattgcctcaatggcatgggctattcaccattaccgcgacaacgccatcacctacagagaccagcgcgataaggccgctgaacaactcagcctggctaatgccaccatcaaagacatgcagacccgccagagagacgtcgcagcgctcgatgccaaatacacgaaggaattagccgatgcaaaagctgaaaatgatgctctgcagcgcaagcttgataatggtggtcgggtgctcgtcaaaggcaagtgtccagtgtcagccgcaacccaaaccgccggcgccgccagcatgggcgatgatgccaccgtcgaactctctgcagttgctggacgaaacgttctcagtatccggtccggaatcctcagcgaccaaacagccctgagagccctgcaggaatacatcaccacgcagtgcctgaggtga

SEQ ID NO: 267413 - DNA, 231 bp, Klebsiella pneumoniae
atggaaaataaaccagagtggcagaagcaagccgagaagttggcgaaactgcacggaatgagcttcgttatcttccgaaacggacagcagccggaatgcgcagacccaacaaggctggcaatttcattcaccagtgaggatgaaaaccgaatccgtgagagaagggaggaaactcgccgggagattagtatgggcgccagaataaccagccatcgattcataccgaaataa

SEQ ID NO: 267414 - DNA, 240 bp, Klebsiella pneumoniae
atgtctaagccacaactgtgctatatcgctgaactaaaaaatcttgaagagcatgagcaggaattgcgtactgcccaagcaaaaatcgtggcgactatgctggtgtgttatcccaatgcaatgcaggacggtgaaattaccgcgattggccagttatttgagtctttggccactaacctcgatagctttttgaaagcagagtgcgagcgttttgaaagttgttcggaggttcagtcatga

SEQ ID NO: 267415 - DNA, 150 bp, Klebsiella pneumoniae
atgttcggaggattattgattttttcaaagagcatgggggacatctctagcgacaaaaacgtccacatttcatcacgcacggcctcaaaggaagccttagagctagcggagtatctaaaatgcaccgctcatttgtgtgaggccggttaa

SEQ ID NO: 267416 - DNA, 168 bp, Klebsiella pneumoniae
atgaacgagaagaaaaccaaactaccgccgtccacatcgttgatgatcccggatgagacatttcagattctgttcagagaagcgaagcgccgaaaaatgagcgtaagcgcactccttcttgaagaatgccaaagtctggcggtcaaatactcgaaagctggcgcgtaa

SEQ ID NO: 267417 - DNA, 798 bp, Klebsiella pneumoniae
atggcaaaaaccctcgcccagattaaggcaaaacacgagcacacgtatcaagatgaagacggaaaaactgtaacatcgcaaaccttcattaagacattcaacttctttgaagacattgaatgcctttactcaaaactctgtcccgaagggataaaaatcgacagtcttcatgtcgctttgtattgccgctttttgagttatcaagcgaacggtgataattgctacgagagccacgctacgttagcgagaaaacacaaaacatcaccttcgacggtgaaaagacggattagcgacttgaaaaagctggggctggtgacaacagaaccgaatcccgatcccaagtatgacacccttcagtacactgcattaccgcttactgatgctcacgttatcccaccagatcaactaccagcagcgcccattaggatttctgacgtagtggcagagccacctgcacccacagccgcgcctaatcctgataagacagcagcggaacattctgttcctgattttgatgatcttccgtttgtctgggatgctccacagtatcaaccaacaccaacgatccccactcagcagaacaagccagaacttccctggggcggtgtagctatctgcaaaccgaatggcgatcccattgatgccgctttgaaatgggcgctaacagagacaatgggcgatgaggaagcagcctaccaacttatttcccagacagcgaccaaacatcttggacgtgagattattttaaccgtaccaacgaatgaaaccatcgacgaatgcgaggatctaccattttaa

SEQ ID NO: 267418 - DNA, 999 bp, Klebsiella pneumoniae; identical to SEQ ID NO: 209454

SEQ ID NO: 267419 - DNA, 1215 bp, Klebsiella pneumoniae
atgatgagtacaggtgatagtcaactgctgccagtattaagcaacgcatcggatagcgaattggccccgctggtggaatacatcacgaaggcgttcagcagcggcattgagagtaaagcacgttataaaacccattgcccggcacacagtcagtatgccgatctgattgcccacgagctgtgcgagtttggcggaaataccgtcgtcaatctgtttcgcggcggtggccctgagtggaaaaccgtggtgatcgatgtggcggacaagcttgacgcgacgtacgagaaggactggggcgttgaccttatcgaactggctgtgctggcggcgattactcgcaaggcttggtcggatatggaccaagctcaacgcaaaaatctgcttgaaaaaatggatcttactcagggtagttcgatgcttttcccagaagcaaaattaatgacgcagttgcagtctagccgcttctcaagcttgctcttggcatcgttaattgccaacgtctttgccagccaactgctcggacggacggtggtgatgtccgcagcctcgtttgtggctgcgcgaggggcagcttctttcttggggccgattggctgggtgattactgggctatggaccgccctagacctggcgggaccagcgtttcgcgttacgattcctgcagtggttcaggtagcactacttcgccaacggattcacgctacggcggaagccgataaagtttggtgggagtatcatcgctggcaggatgagaaagatgctgacagctgggtggcgaacatgtttcgtatggtaggactttctactgcagccagtgtaaggcgtgagcgcaatatggcgtttgagcagggagtagtggccgggcaacagcagacgacggaagagtatgcagataaggtcctcaaacaaatggatgaagttcagcgttttggaaaacgttgtgaggcaatgctggctgttgcctttgcttgtgctaaagaggaaggtatcgcgccgtctgacgtgcgtagcgatatcgaaacctgctgcttggggatgatgagcgggcatctttcctcgatattacaagccacaattaatcgtcttattgccaatccgcctgatatccacactgcgcttgaacaggcgttcgagttaggtattcaggaaactgaggctgctgagctaatggcggtgcttcgtgaggcatttagccagcgtgcaggtgtgttttaa

SEQ ID NO: 267420 - DNA, 1587 bp, Klebsiella pneumoniae
atggacagaaaaacacttttattgcgtctgaaccagcagcgtcaacgacagacaagagagctcataccatcaccaacaaaagaggtcgttacagtatccgatgtcagtgtttggcaggcacatcagcaagttcggcagtatcaacagaagtggcgcacggaacaaacaacattgatgctggctgagtgccgacagcgtcttctgcatagcattattggtccgtttgggctggggagtattgtctctgcatgggacaaggtgggggggaatgtcgataccattcataatgttcgctccggggtgtatgccacggaagaggagcaagtgcgttatgaaagccgcggtaagtacaacagtgatccataccataagcacgacaactacaagaagaccaacgccgaaaacagtaaaaaacaggatgcaggcgaagcagtggatgcctataccggacaggcactgagcaggaataccgatgcggagcaggatcaccttatttctgccgcctcaatccataacgaccctgcggtttggctggcggaagcaaatggagctgatctggcgaaccacaaaaccaatctgcatcagacgcaccactcgatcaatgaatcgaagttgcaaaagagtgcagaggagtacatcgcctggttgaacaaaaaccgcgccgatcgcgattccaaaattgcccggttggaagagaaagccaaaaatgagcctctgagcaaaaaagatcagaacgcactggagaagtacaaacagcaaaacgccgtcgatcaggaaaaattgcgcgagctggatgaagtggcgcgcaagcagtatgaaagcagtcttcgttggagctactacggtagtgcgaaattcggtgcatatttactgaaaaccagcgctgtcgaagcggggaaaatgggcctacagcaggcgattggcttggtgttgacggattttgtcgacggcctgttgttggaagttcacgacagttggcataacgggttttgtgatggggtggaccaggagcatgtttgggaggcattaaaaatccgtgcggggcgggtggcaaagagctgtctcgataactggcgcaacgtgctaacagcttttcgtgacggggccattagcggaatcattagtaacttgatgacaacgctgatcaacaccttcttcacaactgcccgcaacctggtgcgaatgatccgcgaaggcgttttttcgctgttccgcgcgtgcaaaaccgtattgatgcgaccagagggtacaagccgtgccgaagccctggatgcagggctaaagattgccgtcagcggcgcattcgtcattggtggcgtactgcttgaagagtacctcagcaaaactctcggtgcgctgtttaccgttctgcccggtgggctgatcactaccctggtggcagtgctgacggggtgcgttaccggccttggtaccgtatttacggtctatatgctcgatcgattagatttgtttggtgcgcagcaccagcaggaagacaatgcagtactaacaatgttacaggacggtaggacgcaggccgatgctcgcttgcaggcgctgttaggatcggaccctgaaccagcctaa

SEQ ID NO: 267421 - DNA, 555 bp, Klebsiella pneumoniae
atggatttaaatggtcatttgctttatgtggatatcacccagatctgcggcatcggctgtgcgttctgcatgtatgcggataagcacgtaacgggtaagagtatggcgctgtcaacgcaggcacgtgacaacctgtcggcgctcattaatgatccatctgtaaagcgtatttccgtgagtggcgaaggtgaaccgctcaataacattcataccttttatgacttactggcgttgtcccgagggggcaacagctttgagtttattaccagcggtttttttcgccatgagaagatggaaaagatctttgatgagatcaatcgtcttgtctccgccaatggtgatacctgtaatattcgcctgagttcagatagccaccatattgaaaaagtaaaatggcgtgcacatggatttagcctggattatgttcagcgcaaaaaaccgtcatcgctcagtttttcatttcgctcaattgatatcgatcgggccttcactcgcgaatatcttgtgagtgaactggcctcatggggaatgatagccaccatattgaaaaagtaa

SEQ ID NO: 267422 - DNA, 672 bp, Klebsiella pneumoniae
atggggaatgatagccaccatattgaaaaagtaaaatggcgtgcacatggatttagcctggattatgttcagcgcaaaaaaccgtcatcgctcagtttttcatttcgctcaattgatatcgatcgggccttcactcgcgaatatcttgtgagtgaactggcctcatggggaattaacgctagcataaagccagtcagcgtactggaagacaaattattaataggtgcggacacgtttaacatcgactacaaaaatctggttcatccggcaagagatacgccggagggttatctggacttacagggatatattgccgcgattgagtccaaagtggataaaccttttacctttggtagcctgaaccgtgcaccccagcccaatggcatggacgtgacaattaaacccaacggcgatgtgtttctgtacggtattgagaccgagcgtgttgcaaatatccattctgatgcgatcgactggcatcatctggcgagccatgtgcgggagaatcccttgtcgcgcgcgttatatacccagccgttaactgaactgctggcgcggctggaagacaccccgcagcttcgcgcgatcatcgcgaccgccaataatccttactggctggtcaaagagatggggaagcattccgggttgcttgaacaatggaaggcagcatga

SEQ ID NO: 267423 - DNA, 846 bp, Klebsiella pneumoniae
atgattgattcgcactgccactcgttctactcgaaacatgctgtaggtaccatcgacgaacttgtttgtgcctcgattgctgcgggggtgacggtactcaccatcactgatcatgctccgttcccggtggatgcgcagaaccgtttgctggaatcggaactggagagctatttcaccgatattgataaggcgcagcaggactataaaggagagatcacgctgctacgcggtctggaactcgattatatgccgggtactgagcgttataaccggcaattacttgcccgctatccaatggattttgtcatcggttcaattcactacgtcactgttgccgaagagccgatggtgaaggtctgggaactgccccggttagcggcagactcctttctggacaagtactttgctcagcttgaagcgttgctggaaagccggttgtttgatgcggttgggcacgctgacacgctactgcgcgcaatcccagaggatgtgtttttgcgtcgctttgaaccgttgattgcgccgctcgtacgcagcggtattgcatatgaactgaatgcttcgggcctgcgaaaatccagccttgatcctacgacgggtaaagaaattgcaggaagatggtcctatccttcccgcgctttgctggagaaattactgaggaacaatgttccattgaccatcggatccgatgcgcatgatcctcgtgatgccggaacggggatcgccgagttgatggaggcacttaggccattagggcttcaatccatcagctattatcagcagcgtcaacgtattgatgttctgttggatgaccttcaatttcacactgtgccagtgtctcgctaa

SEQ ID NO: 267424 - DNA, 1131 bp, Klebsiella pneumoniae
atgaatggactaaaaactccgcattcacttgcgtggaacacgttgcacaacgaaccgctcgcaacccagttggcaatgtttcgccaggccagtgcacagatcaatgcgcaggatgttaaatccggttttcgcgcgtttgcgaccgatttgctggcgcgcggtttgatcgacatgtccgattacgtcgctatttttggtggtaaggcgctgcattatctgacgccgaatgcgactggatcattttgcgatatgcgcactggtgctgacgctacaacattggcgggcatttatagccgtgcgaaatatggcggagtgagcgagatacgctatctggcacggtgcgttatcgactatcttgccgcagaactggatgacacctcctcttcatggtcagggttgttttgcaaggccaaagaggagggagagagtgttgtgatgatgaccacgggctggcgtaatgtgccttccacggccaatgtgctctacgatatcgtggttgaggaaattaatctcacgttggcgcataaaggattgcccaccattatcaacgttaaactgcccaggattgcgccgccgtgtgaaaattatgccagcctcagccaggccgagcgcgatcgggtcaatcttgtgcaggatcatgtgattccagcggagaatttttaccgctggagcggcgtgcatgtcattttcggagatgacgtgctggtgactggtgcaacggcggacaaagtgttgtatgaatcgctgtgtaacggcgctcggtcatttcgtgccatttacccagtggcgctagatccccgggcggcattaactgatgcgtcggtggaggatcggctgaacagcgtgagcgtaaagaagcatttggatgaaaacgtcgcgcaactgctctctgctccgggctatcaacccattctgcgtacgttgcgtctgttatttggcgaagacaaccgggatagtttactggctttcctgccaaatgtgccggtgcagacctggcttaatctgtataaatcagcgttaaataatgagtttttggctcagcctgcatgcgcgccatcactggtgatgctcagaacatatctgatgcaaaatgggctgttgtgtgcgaaaggtaaggtgctggtgaaatga

SEQ ID NO: 267425 - DNA, 792 bp, Klebsiella pneumoniae
atgatgtccgacactacccattacgttagttactgggaaaacgcaccgggtcagaccatgccggcttatgttgccctggcactggtttctatgcgcagagctctgggcgatcgttttcttctgcttacgccgcgaacggtaagcgagcacatcgatgctgacatcatgaataaagcttgggcttttgaaccgctgagctttacgctggcgaacggcattgaagctattgtggcgaagagcgatttcattcgcatggcgtttgtacatcgctggggcggggcatggttggatgcggatacgttgctgtttagagatccgagtgttgagttatttccgacagggctgagcgataaattgcactggcatagcgagtgtattttcgcgtccctgccaggaaaccccatacttgcgcaagccttagctatagggcttgagagcgagaatcacgcttggggtaatcctgggagaatcaaaaatatcattgcccaggctgccgatgctgccatcccgattggcggggaggtcatcgatcccggataccgtcctcgttacaactttgctggttgcgaggtgatgcgtcgcaccgatattgccgtcggggcatttttgattaacgacgtggccattctcaaactttacaacacctatttccggcgtaccgaagcccggagagaaactgtggctgaattcctggcgggtggctcgctgctggcaaaactgtttttgcatattgaggcgaatacggattactgggttgatgaaagtgacaaattgatagcttccgttgcctga

SEQ ID NO: 267426 - DNA, 1311 bp, Klebsiella pneumoniae
atgcataccaacaccttcggtgtggatgaagtcatcgttacgaatccgcatccagggcttggtgaactacgcagattggtgaaccagctaagtaatgtcgatgtcgttgttcatctggttggacgactgcaacctgccgaaatcgtttttatgcggttactccgcccggggagtctctattcccttgatgattcgctgcgctgtgtgaatcgtaaaatgggtttttctgcaaacacgctcaatatcgtggagcagtacaaatatattctgcaggatctaggcgcgaaagtgatcgacacccagtacattgtgccgttgcctgccgagctcccgcctgcggcactttccccccaaatactttttaatccttatgccagccgaagagacaaggggctatccccttcccgtgcaaccgcagctctacaagctatcaccgacgagtttcccggccattccgtgggaattctttgcagcccttcaacgctgcacagcgcacagcatctggaaaactcagttgcacgcgataatgtggcagtcttgcacgacgggctaacacccgaaaaggttgcaggctatattcgccgcgcgcaggcagttgttagtgtggatactgccattgtgcatatggctgttggcctgaaagcgaagctggtggcgatctacccgttgattgcaggtcaacacaacccatggttgccgcctcgctcaccttttacacaagtgatctacagcgagcaacagccagacacactccgtcgtacgggcaaaaaaaatatggatgctttttcgctaacgtcattaatgaacgcattgcagactctcttaacactgccagcagaagcgaaaaacagcatgtcgcttaacgccagaatcatccctgggctaggggtagcgacgggcacgctggcgcgacaactgcccttaatctgtgaaaaatttcctgaagttgcaggctgttatgccgggacgatcaaccttgaattcagcgttcctgtcgcagtcgtgcggcccgatcaccgtaccgcaccgctggcctggactcccagtggacgcaccaccgagatattcgatctactgcgcattgaacttgaattcagccatttaactgaacgcatccccgcatggctgtatattgcccacagctcgccacaccgccggacgccgaccattcacgaagcaatcgcgccgcgcattaacctcaatggcgccacgcactgtcgactccacttacccgctgaggttatcgtactgggcgaaagcggtactcaggcaacggaagctatcaatttgtcactttcatcaacccagtaa

SEQ ID NO: 267427 - DNA, 1899 bp, Klebsiella pneumoniae
atgccgacgagtaatgatttagccttgctgaccatcgaacagttattcagcgctaatagccattatgttatccctatttatcagcgtaactacgcctggggcgcgcaggagattgaacagcttattcgggacattgcagatgctgctgaagcccttaaaaatgcagggcaacaggaagacacgaaatactatctgggcagcttggtggtatatgtcagagatggcgctgatagcgcacaccaaggcgtaatagtctatgaaacgattgatggacagcaaaggtacacaacgctgtcgattttgctcgcatacttaaaaaaagttgcttgttgcagcgaacaagatttatccccgcttcaccttaatctcgactttgacagccgccctaaatcagcccgaacgctacataagctgtttcaacaggatcagagcaatgatcctgaagaaccctcaatccgagcggcgtttactattattgaacgctactttgagaaagaggacatagacaccaacaacttttgccgatatctactcaaacacgtcactattttacgggttcctgtgccaacagagactgatctcaaccactactttgagatcatgaataaccgaggtgaacagctagaaaaacacgaagtgttgaaagcgaatttgatgtcagtttacaacggtgaagctgccgcaagaaacggcttttctgccatatgggatgcctgcgctgatatgaatcgctatgtgcaattgggctttagctcagaggctcgcaaagcattatttggtgagcagtggttaggattcccggcgagttttgaagagataaaatgcgcgatagaaactaatggtgatacagacgaaaagctgactatacgggatattatcgaaagacgacgctttcatcacactgatgacaacgatgaaaaagcaaaagagcagcgttttgattcgattatcgatttctccaacttcctactgcatgtgctaaaagtgacagtggataatgacgtgtcattggacgataaaaagctacttcaggcatttgaaatcataaaaaatgaccgaaaaaaaatcacccagtttgcttttaacttgctgaagtttagagtcttatttgatcgctatatcattaagcgcgatcaggctgagaagtggagcctgctgacgcttgagtactatgccagagacaggaattcgagctttagctataacaactctttcgatcaagatgaactgtctggtgtaaataaacaactagcgatgatcttgtcgatgttccatgtctcccaccctgcctatgtttataagcgatggctcaatcgctcactggccattttgaatactctggctttgggtcaactgaacgttgacggagcggcttacctcagagagcttgagcaactcagccatgagtttttggctgagatttgtggtgaaaaggagcaattcgatgcagaggctctgcaccgcggtaccagcgtacagaactttgtgtttaatctgctcgactatcgtttgtggcgtgatcttactacgggccaatcattcgatggtaaagggcttaataatccagatattaagaaacactttgatggctttcagttttcatcgggccgaacatcggttgagcactactttcctcaaaccgatccctctggcgcaaaaaaaatgggggatgatgtccatcgtttcggtaacctctgcctgatctcaccaagcagcaactcgagacttagtaattattcgccagcagacaagaaaaaattctacgtcgaaacagaacgagcagagagcctaaaacaagcaatcatgatgagctatgaggagtggggtccggagggacaaggctttaaaaacatagtaagccatgaatacgcgatgctgacgttgctcaggagacattga

SEQ ID NO: 267428 - DNA, 1341 bp, Klebsiella pneumoniae
atgggaactgtatcctatcaggtaaaaaaaacgaggatgctgctagagcagcgcctcactattccgtcataccagcgcccctacaaatggcaacaaaaacacgtcaatcaactaattgatgatgtgttaacccaccaaaataaacagagctatcgccttgggactgtggtgttgcatcgggataagttaaatcccgcttatgaaggtgagctcgatatcgttgatggtcagcagcgccttctgaccttaaccttgctttgctcagtgctcgatcagagtggtgagttttcaacgcctctgttggaacaatcttttgcttcaaggactagcatcaataaccttgagcacaatgccaaagtcattgagaaccgccttgtgggactaaatgataacgagcgcaaatcactacttcacttcgtgtgtaacaagtgtgaactgatcgaagtgacgctcgatgatttgagcgaagcctttcagtttttcgactcacaaaatgccaggggcaaggccctcgcgccccatgacttgctaaaggcataccatttgcgcgaaatgatggatgccacagagcaagcggaacgactacatcacgttagcctgtgggagcagggtgtcagtccggatgatgaatccgctaaccttcacctcattatgggcgagtatttgttccgcctgcgccgatggctggatggcgattatggcgtgcagttcagccgccacaatcttgaggtgttcaaaggcgtcaacctctccacctctgattaccactatctgcagtctctgctcgccctggattttgcagttgagcattacaataacgaccctatcaggaagtgggacaagcagaataaaccttatccgtttcaagttaatcagttaataattaacggaaagcgcttttttgagtatatccagcactacaaatccctgcatcacaccctatttgaaggtgacaacgcgctgcttggcaatttcttaaaaaaacatacccgttacgctggcagttcacgcaaaggggatatgtatattaaaaatctctttatgtgtgcagtgatggcctattacgataagtttggcgacaaagaattaattcaagccgcaacaatctgtttttgttggagttactacttgcgcttgcaatatcaaaaaatcggcatggacagtgttgatggccatgcgcgtgagccccgaggactattgagagtgctcgataaagcgatccacccacaacaagtcctacgctttcagccaaagcgttgtataaacattcgttttcaaaatgccaaacccgtagaagattcaatcgctcagatgctgggagatgtagatgccgacgagtaa

SEQ ID NO: 267429 - DNA, 2106 bp, Klebsiella pneumoniae; identical to SEQ ID NO: 209493

SEQ ID NO: 267430 - DNA, 411 bp, Klebsiella pneumoniae
atgggttacgatgaattagatcccagtacaaggcgcgtgttacaacaagctgaatttatgagaagtaaggaggctaaattagctcaaattgcactcattaagcatcacaaagcctacctagactggagaatagaaaggggcgactttggcgactcactcccagacacaaaggaggctaggcttgaactgctctggaaacgtcagaacatactggggcatgaaacattggccgtgctggaatacaactttgagcaattgtatgatgccgtagatagtgcgctgtcagatgctatcgcggcaagggacggggtagcgaaagaatgggctgctatttctgatgtgtcggaactcaataccttgtgggagtggttccgtgaaagactgcctgatgactatgtgccattgtattaa

SEQ ID NO: 267431 - DNA, 378 bp, Klebsiella pneumoniae
atggatggattattcattttaataatgcttttaataccttacatgattccttcaatcatagcttacagaagatggcaccgaagctataaagcgatcattgccttgaacatccttttaggatggactttcttaggttgggtcgtctgtttggtatggtctctatcgggagatacagaacccaaaacgcttgttgagatgaagccgaaagatttagtgaagaaatacttcatagttagtgctgataccaaagaaaggattacagggttttatactgatgatggggccttgaagagcattgatgataacggtttgaaggtctcaaacgtcagtaagaatgcagagggcggaatggatttcacagtggaagtacctagctga

SEQ ID NO: 267432 - DNA, 147 bp, Klebsiella pneumoniae
atggagatcgggaagagacagaatcaagagggatcacccaaagatgagttagatcgcttgctagatgagcttgaactcacacaggcgcaacgggagtttatcgaatccatgcggcaagagggcggagatgataacaacaaggagtag

SEQ ID NO: 267433 - DNA, 1305 bp, Klebsiella pneumoniae
atgaggttaaaatcgcttccgtacaccttcaaaaggtacggtaactattacattcagattcgcttatctaatgggcggtcatacaaaaaatcactttttactgccagctatcgcgaagcatctgctttgatgattagcatcattccgcacattccttttgttaaatcattagctacgccgcttccagtgttcgaatcattcttatcaaatctgattgcctcagaacgcaaggctgggagaaatctactcataccccaccagcagatgattgttcctgctgtaatcgtagagtctcaaccgtcagccgaagcggaaaaagtgctaaccctttcggatgcgtgggcgatgtacaaagatgaaaaagggcgcaactggacgaaatcgatctcaatggcaaatgaacgttacatggaagtattgttaactgtcttgggaaagaaaactgatgtaacggcgatcactaaacaggacattaaacaagtgatggaagtggttgaaaacctccctaagcgcgttgttcagccttaccgctcaatgaccattcagcaactgatacaatgtgatgacgtgccaccggatgatctggttggtgttgaggccatccataaacatctcaaattatacaaatcactgttcaaaactttcctcacagaaaacaaagacattttatctaaatcgccaactgagggcgttgtggctgcaccttctaaagcaaggtttggcgcatacagcgcaacagaaatgaaaaagtttgtggggtgggcgcttaaacagcctgataactggcaaaagtggatcacattgctgttggcatacaccggagccagaagaggcgagattgccaaactggagaagtcacagatcaaattcgatgaagacagccaacggcattacttcctgattgcagagggagggcaggggaaaacagaaaacgccacgcggcaagtggtaatccatcctaagctgatcgaatggggatttatggattatgttgatcgccaatggaaagagcggattttctcagaagtggctggtacgaacatgacaaaaataggcaaaatgtttgctgatctccgtgatcaacttggtattccgtatctggatgactacgggcaacggcgattactgcattcgatccgccacagcgtctgttcttctgctatggctggttgggtgaaaaacattttgcacctacagcagacagtaggccatgagaagagcggcggaatcacgaaacgctatctgcatacattcccgctttcctctgtttcttatgtgattgatggtattgattgggagtcctaa

SEQ ID NO: 267434 - DNA, 294 bp, Klebsiella pneumoniae
atgctacagcctgttcaacttttcaaaattctgtcagatgaaacccgtctggctatcatgatgcttctccgggaatccggtgagatgtgcgtgtgtgatatttgcgcgccaccgccgagtcgcagcccaaaatttcccggcatatggcaatccttcgggaggctgaactggtgctggaccgtcgggaagggaaatgggtccactaccggctctctccacatatgcccgcatgggcggcagaaactatcacaacatcctggcactgcctgcgggaagatgttcgtcagtggctag

SEQ ID NO: 267435 - DNA, 294 bp, Klebsiella pneumoniae
atgttcgcgcaaccgacatggctgcacggattggggggggaggaattcgctgtgttgttggaagcggcatcgatagaagacgcccaagtatgggcggagcgattttgtcaggacgttgcggcgacagcgctggtgtgtggagaggtgtcgatcagctatagcgccagcatgggggtggctcccctcgacgtccgcttaaactcttccgagcaggtgatgcagcaggcggacagcgcgctctaccaggcaaaaagacaagggcgcaaccaagttatggttgccaatgtaaattga

SEQ ID NO: 267436 - DNA, 1707 bp, Klebsiella pneumoniae
atgcaggatttgctcggcactaccctgatcctgctggcggcgtgcagcctctcggtggtggcgacggcggcgttcagagtacccgccttgctgggttacctcgccgtcggcgccttgctgggcccctcggtcagcggtgtgatcgcgccgggagaggcgttgactttcatatccgaactgggtgtggccctgctgctgttcatggtcggactggaattctcgctggggcacttctggctcactcgcaagaccgtactggcgtccggcagcttgcagatggtcgtcgtggccgcgccactgaccctggtgctgatcgggttgggtcagccagctcagagcgctgcactgctcggcgccgcagcggccatgtcgtccacggcgctggtcagccgacagctggccgaccaaggcgagctcaccacccgccacggccgcagtgccatcgccgtgctggtctttcaggacctggccagcgtgcccctgctggccctgctggcgatctgggcgcgcggcgactcgccgaagatcgagagcgtgctgctcgaagtgttgggcgtgctggtgttgttcgcggcagcggcggttgcctcgcgtcgtctgttgcatggcctgctgggctgggtggcgcggcagggccacgaagaatccttcgtgctggtctccttgtgcgtggtcgtggcggcagccgctgctgcacacgccgtcggcgtatccgccgccctgggggcctttctcgccggcatggtcctgggcgagagcgacttccggcaccacatggaaagccacctcaagccctttcgtgatgtgctgtcgggcctgttcttcgtgaccattggcctgcagctggacaccgcgcagatcgtggccgcaccgctggcggtactgggttggctgttggccttggtgcctctcaagatggggctgaactttctggcgctgcgcgcaacccgcctgtcggcgctcgacgcctggcgcgcaggcatcgtgctgggtcatggcggcgagtttgcgctgctgctcctgggcatggtcatgcagcagcacctgatcgccgccaccatggtgcaaccgatgctggtggcgctggtgttgagcatggggttggcaccgctcctgatccgacaccatgaccgatgggcgcgggctttcagccgctcgggcgcactcggtcagccaccgcaggccgaagaaggcgaagtcgccgagcgggcgcggtcgttgcgcgaccatgtgatcatctgtggggcggatgacgtcgggctgctgctgagccgaacgctgcgcctggcaggcataccgcatttgctgctggaatcggaccgccaacgggtcgaagcggggcgtgctatgggggcgccggtgtcgtatggcgatgccagtcggctcgacaccctggccgccgccggattggcccatgcccgcctggtggtgctgacgtttgcccgtccgcagacggccctgcgtatcgctcaggcggttctcgaccgccgcctgagcttgtccgtggtggtggccactgagcgcgtaacggatgcccagcttttgcgtaatctgcccaatgtcagactgtacccgttgtacctggctgcgggactgggactggccgagcaggtactgttgatgttgggcatcaacgccgaccaagtcgaccaccggatcgaggaattacggcaggcactcagtcagtcaggcggggatagaccatga

SEQ ID NO: 267437 - DNA, 222 bp, Klebsiella pneumoniae
atgatggcgccgcagtttcaacaagccgcgcgccagctcgaacccgggatcaggctggcaaaggtgaacaccgaggctgagccccacctggccgcgcagttcggtatccgcagcattccgacgctcgccctgttccaggacggacgtgagatcgcccgccaggcaggcgccatgggctcgcaggacatcgtgcgctgggcctctgcacaggtgggacgctga

SEQ ID NO: 267438 - DNA, 567 bp, Klebsiella pneumoniae; identical to SEQ ID NO: 247093

SEQ ID NO: 267439 - DNA, 207 bp, Klebsiella pneumoniae
atgctgatgaaatactcatggtttcaccatctcgaatgcacaacccagcaggccgaagaattggtagcgagatatcgtcagcggggcgtaaaggtcgaacgaagcttaaaccctgactttatgacatggaccgtcagcgcgcagctggtggaggacaaaaacccgccgcggccagactctcgctggcgtaacaggatgtgggggtga

SEQ ID NO: 267440 - DNA, 645 bp, Klebsiella pneumoniae
atgaataaaaaacttaatatgctatatgtcaacaacattaacgcattaaataattaccgtgagaaacattcagataataacttacatggccccctccttttaaagctaaaaaattattttcatcagcataataaattgatggttataggacaggaaacctatggatggtgcaactctcccgatattaatgaacagcttgaaacatatgaggagttcgattttggcgtatcatattatagcagtccattctggaatatcataaggaaagtagagcgagcgcttagtattgaaccatatgcaattgcatggtcaaatctgaatcggtttgatgttgattgcggatcaccagattataccgagctagctagagatatatcatcgtttgattatatattaaaggaggaaattaatattcttactcctgatatatgtgttttcttcacaaatcataaatatgatcatcgactaacgtctttatatgaagatttaatgtttgaaaacataaatggattgccagaaaaacatttcgtaagattataccatccagacctcccagaacatacgattagagcgcctcaccctaaaacaatcagaataaaaggatgggaaaatgattttataaaatatatagaggctattaaatga

SEQ ID NO: 267441 - DNA, 672 bp, Klebsiella pneumoniae
atgaagccaccggtaaagacgagctttcgcggcagggacgtcgcctacctggtaatttccattgttttagtgggcgtaggttacgcagcctaccgcggcttatactttgttggtgaaaacgttccttttgcccaagagatgatcctagtgttcctgggtgcagctaccactatctatctgacagctgtgctcctcaatcgccagactgagcttgagttaagaaaagaagggcaagttcttctttttcaacaaaagcatgacacatatatgcgcgtcatcgaaaaggttgctgaaatcgtggagcgtgaacgtcatgattttgcgctcattgatgaactcagggtcatcagccacaagcttgccgttgtcggcagcgcgccagttgtcgaagcgttccgacgcgttcttgatctgcttgttgatggacttgaggatggccagttgaacggcaatgacgcagaacaggtgatgcatgccgtagctgaagtcacgattgcgatgcgttcggacatcagcagcgacaacgaccctgaagcgcttcggtcggctgcagaaacgatcatggcgaactcacgcaagatcgagcggctggacgacatcgagcactcaaagtccaagccagacgcaaatgcagccaacaataaacagaagaaaggagattcgaaagattga

SEQ ID NO: 267442 - DNA, 192 bp, Klebsiella pneumoniae
atgacacggccaaaatatacatatgaagtggaaagagatttctcgaactgggatgaaacgattttcgagcgctgtctgcgggatgggttcaatgtatttggctctggaccaacccctattctcttgcggcccgaaaaggagaccgaacctgcccctgacacccgttcgctaggcaacgacagccatgattaa

SEQ ID NO: 267443 - DNA, 912 bp, Klebsiella pneumoniae
atgcattttttgaatttgcaggtcacacaggcagagctcctatccggccttatttccgtttcccaaacagttgcacagattgtgctcgtcatgaccgtggcgtggctcgtgtccgcagtgctttcgcgggccatcacacgcatcagcaaaagaacccgcacttccaagagatctgcagatgaggtcaaacgcattgaaacatctcttcgtctgatccgtttcgtcagtcggctggtcgtgtgggccttggccgtgaccatttccctctcaatccttggcatttctgtggcaccgatcctgacgactgcgggggtaagcggcatcgcagtggggtttgctgcgcagagcctgataaaagactatttttcgggtttggtcttgttgctggaagggcaactccgcatcggggatatcgtggatattggcggtgtggcaggccaagtcgaagagatgacgttgcgctatgtgcgcctgcgtcaactcaatggtgacgtggtctatgtgcccaacggagccatcaccaatctgacaaataagacaacggactattcgatggccgtaatcgatgtcggtgtcgcctatcgcgaaaaccttcaggaggcattgaacgttatggagagtgtcgcccgtgagctagcttcggaaacaacctggtcaacgagaatattagccgagccagaggtctttggggtcgaaacgttgggtgactcttcggttatcctgcgtcttcgcctcaaggtcttgccaggtgagcaatggtcaatccggcgcgaatatctgcacaggataaaacagcgcttcgacgaacttggcatcgaaatcccttatccgcatctgacgctttatgccggccaggacaaggatggaaaagcccctgcctttcggatcgaagctccggctggtgcccaatga

SEQ ID NO: 267444 - DNA, 675 bp, Klebsiella pneumoniae
atgcagatgcaatatagctatcgagctatcgacaaagagcttcgtgaaccttggcagagagctttgggaaatgtgatcgagcacgccctcaagccattgctcgacaaacacgctaaagattcagcgcgacttcaaatcgtccttgatcgcgacaagaccaagcggcaatttctggccagtggctatatgcacctgcccggcaaaaagattgtcagcgttactgcatcacatgacgagctgacgcccctcgcgcggaagctcgcacagtcgttgttccgtcaggccaagaagcattttgaccggctgcatgctcaggaccaaatcaagcgcaaagcacgacgcgagcgcttgcgcgagctcaaggtgcgaattgccgcaaaacccgcgtcagccgcccatgaggccaaagtgacccgaatgcctctactgtcgaaacttgaggctgtcgcaaggcgtgagctggcttatctgcgtgccgtcggcgatttaccgcgcgattatccgacgctgcgcgacgtggtggatgaagcgattgtccaagctgaggtggaatggcaatccgtgccggaagaaaaagcggttcggtataagacatgggggcagcaccgtaccggaaaggtcaggtgttgcactcagtttttgccgccgccaagcatcaaccagataatccgatga

SEQ ID NO: 267445 - DNA, 297 bp, Klebsiella pneumoniae
gtgctttacgttatctacgctgaagatatcgccgattctctggaaaagcggctgtcggttcgccccgcgcatctcgcgcgtttacaactcttacacgatgaaggccgactgcttaccgccgggccaatgccggccgttgacagtaacgaaccgggcgcagcaggattcagcggctcaacggtgattgccgagtttgaatcgctggaagcggcccaggcctgggctaatgacgatccgtatatcgccgccggggtttaccgccaggtctctgttaagccatacaaaaaggttttttga

SEQ ID NO: 267446 - DNA, 687 bp, Klebsiella pneumoniae
atggatgcaaagcttatcgatcgcttgaatggaattcttagtttggcgaatcagcaaaactgggaagacgaatccttttctctcaataaagcgcaggtgtgcgtcgaattatcctctatagtttacgaagatgttcaagagtatgaattgaagaaggcaagtcgaattcatctctttgctagcgacacttatagaggcttgattacaaatcgcacgaccaactcaattcttgatggcctaagtgaagcaaatctggatgctaggtttttcgcggttcgtggtagatatgcgctagtgctaggcacaatttttagcgacgtcgtgattcttactataagaggcaccgtattccgcgagctttgggactggaaagcaaatatagatgccgaaaagtaccatgttcgggtgggaccacactttcatccatttcattatggtcatgttgaatttgacgaccaattctttcaccgaggattctttgagtcgatcattcctcagttcgcatctatctctgaccacattaaccaacgaaatagtttggggaatgatctcaaggtcgtttggactggccactccctaggtggagcaatggccgcggtaggctatgcgattcacgctaagcttaataggggtcacctcagaaaacggaatctatggtcactcccgtttttgcaacaccgattttga

SEQ ID NO: 267447 - DNA, 492 bp, Klebsiella pneumoniae; identical to SEQ ID NO: 98250

SEQ ID NO: 267448 - DNA, 1881 bp, Klebsiella pneumoniae
atgccgtcacaggctggtgttgaatcactggtaaccatgactgttggggatcttctcaagcatgacgatgccgacagtttaatttttcagctcgttgacatccttggatatcgccagttttatgccctgactagcggtgagtttgggaccagcaagtccgtcgtacgaccagatggcctggctttatcggcttactctctgggcgttagtcctgagagcgggttttatatcgagaattctgctgggcagcgtgtttacattgtcgacggaactggggtcgtagctcctcgtagcgtccgaattcagcgcgacggcagctatggtactgattcagcaatgctgggccgcggcggcctggcttttcagtcagagaggctggacatttctggtcctgagtttctaaaaataaaagatctaactggccaggtaaaagtcatcattgacgcaaatggcaatttaccagcaagtgacggaaacatagcaattcaggataaaatcagcatcctgaataactcaaattacgcctattactccagggtgcgcagcaatttcaacgcacaaatcgagcgactggtatttgagctgacacacatcatctggtacgggcagtctttatctaccgatcaggaatgctggccggcattaacgcggtcagcatacagtaccctgggaaacctgatgcttggcgacagttgcaggccggcaagtcgggaggcggccgcgttctcccctgtgggaggggtgggggtttttaggcctctgaaagcggttactcagtcagtatctggctcgtcagttctgactgcagaagaagagtctgctcttactccgggggcgtcaaacgaaggcgagggagcagtagctgctataaacatgctgcgaaaactctttctgcagcataattctctgctacaggatccatccagacagtttattttgtccagttgcggagtgtctggtagaactatcgagcaactttctcctggcgccacacccgagctatataacagggtgagagaggctatatcgcaggtaaaaacaatagcaggtaatcagaataaggcatatggcatcggcgcattctgctttcttcagggtgaatataattacgatctgtctcatggaggtgacggaacccgggcgggataccgagcactgatggagagcctgtattcggatttcgtttcagatttttgttcgggtcagaatccacctgctatgtttttatatcaaaccagcggcgcattcaccaatgacacaaatgaactggctataggtatggcccaactggatctagccacgtcagggcaaaattattttggcgtgtgccctgcatacccatttcctgataaggggtggcatctgacggggaacggtgcacgctggatggatatgttttttgccaaagtgatgtttcgtgttcttgtgctcggagagggatgggagcctctgcactgcacgtcagcagaagtaaccaaaaattttgcgcttttaagttatgccgttccatacccacctctccagtgggggaggccgtatgttggccgtactgcgactgattattcagacaagggtttcagggcaaccgatgaaagtggtgaattgcccatattgtctgtcgaaatagtagcggacactgtcgtcaaaataacatttgttcgtgatgccgttggtgatgttaaaatatggtatgcggataaaacatcacataatggcaacggctgcctgtgtgactctgatccgtttatttctatggaaaaatatgagtataacgcaggtagtgggcagtatgctgatgaaaatatcactgaactggttggaaagccttacccattgaataactgggcgtgggctcaggtaatatattctacagtacaataa

SEQ ID NO: 267449 - DNA, 249 bp, Klebsiella pneumoniae; identical to SEQ ID NO: 225766

SEQ ID NO: 267450 - DNA, 804 bp, Klebsiella pneumoniae
atgaaatatatgaggatttataacccctaccaatatgccgagaagcaggtcagagagctgattgcgcagctaaatgtgtccgtgctgttgacgaaatttgatgaattaatggaagtcactggaagcctgctggataaagccaaatcttgggggccggaatctattcgccagccgattgagacgacctggaaattactggtttctattcgtagtcaggccaatactatgctggagaaggcactggctccgctgaatgagacactggaaaagctggccgcgcgtctacgacaggaaggcgataattattataaggcgcatactggcgctaatccgcatcgcccgactcgtcttaaagatgcagaagaggctgagttattggttcataataagccggactgggtggatgtgggggtaactgagaaatatccagggttgaaacaggcgagcgcagaacagaagagtctgatgcgactggaaaaggataaggaaggctggcctgctttgtcggaagataatataaaaagctttcatcaaatgcgttatgttgagctgccacagaatgaaaaattgtaccgtgtattggatcctgccagtagtgataacagtttttgctggatgcgtgaggctgagtttatggctctgaaaagcaaatcgcagtggcggcgacgttttgcggtatggaagagctggaatgaaaatggcgaatatgtggtgtataccgtcccgccaggcaccacaatgaaagtctgggaaggtcccgctgcctcacagtcgcgtagtgtgactgataatgggctttgttga

SEQ ID NO: 267451 - DNA, 288 bp, Klebsiella pneumoniae
atgagtgaaaaactgataaaagaatctcaaaaagtatttatgcatatggcaggtttgttttatgaaatgaaaataaatacgcttaaggaagtccgacccgatgaagcagagatgttaatggaggatgatgcattcatggatagtatttataaggattgtatcaaaaatgcaagcgcatcttttaaaaaggtagtcagatgggagtgctttgaacaagggcattcagtaaaaatggttgataaggaggtggtgttgataacattacgtgttaatcacaaacgaagataa

SEQ ID NO: 267452 - DNA, 225 bp, Klebsiella pneumoniae
atgatgaatacccagaagcttctggatacatatatgttagttggtgccggtctttctcgcgtcaaatatgagattttcacgggagatgaagggtcatatgcatttattacgatttatgcatatgagcctcatctccatattaagggctatgattccttaaagttagacgaaactgttgatgtcagatctcagatcgaagggcatttcgcatatacctaccagtag

SEQ ID NO: 267453 - DNA, 309 bp, Klebsiella pneumoniae
gtggtggcttaccagaaccaggatctgatctattcagacctcgcagctggccgtctggatgcggcgctgcaggatgaagtcgccgccagcgaaggcttcctgaaacagcctgccgggaaagatttcgccttcgccggcccgtccgttaaagacaaaaagtactttggcgacggcaccggtatcggcctgcgtaaggaagacgccgagctgaaagccgcgtttgataaagcgctgggcgaaatgcgtaaagacggcacctacgacaaaatggcgaagaaatacttcgattttaacgtgtacggcgactaa

SEQ ID NO: 267454 - DNA, 657 bp, Klebsiella pneumoniae
atggcatggtggggaggacgtggagctgccccggtaatttcccatgaaaatgaggcaattcttctggagcgtgccacggggcccgcatctctgtccacgatgtccagcgaaggtcaggacacagaggcttgccgtattctgtgccttacagcaaaccagttgcacataggtcagaaacagccaataccacaacttacttctcttcatgactggttccacgcccttaaaccagccgcccggatgtatggggggattctgaagcagtgcgcagaaatatctgaagatctgctatcttcgccgcgtgatgtgaccacgctacatggcgatttgcatcacgctaatgtccttgattttgggtcatccggttggctggcaattgacccgaaaggcttaaaaggtgagcgagggttcgactatgccaatattttcacaaatccggaccttggtaatccaacttctggaatagccgttgtcccggaaatatttaaacaacgacttaatatagtgaccgaaactgccggtctggacagagagaggctgctgatgtggatctgcgcatggtgtggattatccgcgtcttggtctttggaaagtaacgacccggtcactgttactacgaaaatagcagagctggcactatctgaacttcactactga

SEQ ID NO: 267455 - DNA, 645 bp, Klebsiella pneumoniae
atgttcatcagagcttatttaagggcatcgacggaagatcagtttgccgatcgggcaaaagagatgctagagcagttcgttcaggagcggggacataaaatagccagttactaccgggagaacatcagcggtacaaaacttgaccgtccggaactgggacgcttactgatggacagtcaccacaatgatattttactggtcgagcagatagaccgactgacccgtctgagtaacagcgactggatgacgctgaaaaaacagatagaacaacacgagctgcgtattgtcagcctggatgtccccacatcatggcaggcgctgtcagataaagatccttcgcaggctgatccaataacccgcgcagtgataaccgccatcaataacatgcttatcgacctgatggccgcgatgtctcataaggactggctgagccgtcgccagcgccaaaaacagggaattgaacgggcccatacgcagggtaaataccggggtaagcaggccgacctggaacgtcaccagaaagtcctctactatcggcagactaagaaactgagcattcaggaaacagctgaagctacgggctatagtcgctcacaagtctgccgtatacagtccctttaccgacaggaagataaaggattatga

SEQ ID NO: 267456 - DNA, 924 bp, Klebsiella pneumoniae
atggataccattgaccttttccgtatatttatcagggtggcggaaaatggcagctttatccgggcggcagaaactctgaaccgacccgcatcgaccgtctctgctgccatccgtgaactggaatgcaggctgggtacccgcctgcttcaccggaccacccgccgggtgtcgctgacctcggacggggaggcgttctatacgcgctgtcaggctgtggttcaggacgtggaagatacggaaaatttattcagacaaaccagtgaccaggtgacgggaaaggtgcgtgtggatgtaccgggtcgggtcgggaggcgcattattatcccggcgctgccggatttttttgcgcgtcacccggccattcaggtagagcttggcgtgacagaccgcagcgtcaatctcgccgaagagggcacggactgtgccgttcgtgtcggtatgctgaacgactcgggtatggtcgcgcgcagggctggctatctcaggctcatcaacgtggcatcaccggactatcttgcccgttacgggcacccgttactgccgcaggaactggccggtcacgttgctgtggggtatgcctctcccactaccggtcgccgtgaacgctgggagtgggagcagaagggtgagatattcagcactggggtaaatacctgtctgaccgttaataatgccgaagcctatattgcagcctgcgtggcgggcatgggtctgattcagatccccgagtatgacgtacatgagatgatcaccgagggtgctctgtgcgaagtgatgccggatttcctgccgcgcccgctgcctgtgaatattctgtattcagacaggaggaacctctcacgaccgttgcggttatttaccgagtggctgatgcctctgctgcaggaaaaaatgcagttaagggcgctcagtgatggacagtaa

SEQ ID NO: 267457 - DNA, 774 bp, Klebsiella pneumoniae
atgaccgaccatactctcaaaggtaaaactgtccttattgccggcggcgcgaaaaatctgggggggctgatagcccgtgatttcgcacagcatggcgcgcgcgccattgcggtccactacaacagcgatactacgcgtcaggacgctgaagcgaccgtcacggcagtgaaggcagcgggtgcggaagccgctgcgtttcaggctgacctgacgtccgcagccgccatggaaaaactgttttctgacgtggcggccacgctcggacagccggatatcgccattaataccgtcggtaaggtgctgaagaaaccgatggccgaggtttccgaagcggaatttgacgaaatgagcgcggtaaacgccaaatccgcgtttttcttcctgaaggaggccggaaaacacgtcagggataacggaaaaatctgcacgctggtgacgtctcttctgggtgcatacacgcccttttacgctgcgtacgccggtatgaaagcaccggtggagcatttcacccgggcggcgtcaaaagagctgggagcccgcgggatttccgtaacggctgtcggccccggcccgatggacacgccgttcttttatccggcagaaggcgctgacgcggtggcctaccacaaaacggcagctgcactttctccgttcagtaaaaccggactgaccgatatccacgatattgtcccctggatccgctttctggtgagcgaggggtggtggatgaccggacagaccgtgctggttaacggcggttacaccaccaaatag

SEQ ID NO: 267458 - DNA, 267 bp, Klebsiella pneumoniae; identical to SEQ ID NO: 205332

SEQ ID NO: 267459 - DNA, 1191 bp, Klebsiella pneumoniae; identical to SEQ ID NO: 205331

SEQ ID NO: 267460 - DNA, 579 bp, Klebsiella pneumoniae; identical to SEQ ID NO: 205330

SEQ ID NO: 267461 - DNA, 702 bp, Klebsiella pneumoniae; identical to SEQ ID NO: 205329

SEQ ID NO: 267462 - DNA, 1230 bp, Klebsiella pneumoniae
atgaaatacgactttgatgaaatagtggacagggcagggacggacagcttaaccgtcgacggctggcgcgaatatatgttcggtgcccatgaagaccgtgtgccggaagtgccggccaatggttttataaacctctgggtagcagatatggctttttccacccccgagccggtgcttgaagctatacgttcccggttagataaaaaaattcttggctacacccgcgtttatgacaggggttactatgagatttttggggcgtggtgtgaaaggcattacggataccggtttccggaagaaagcattgttttctcccccggtattatccctgcgcttaaccgactggtaccgttgctcacccatgaagaagacagcatcctcatcctgaccccttcttacgcaccgtttaaaaaagccggagactatagcggccgccgcgtcgccgaatgtccgcttaaaaatagccaaggtcactggacaccagatttcgaggcgatggaacaagctctgtgtgatgaacagaaacggattaaagtcttcttcctctgtaacccgcataatcccaccgggcgcgtctggcgacgtgatgagttgcagaaaatgatagcgttatgccttcaacatgacgtgtgggttatttctgatgaaatccactgtgatttatcccgctcgggcgtcaggcatatccccgccgcgtcagtttttcccgaaaatcataaaattatcacctgcatgtcgaccagcaaaacgtttaacctggcgggtaacctgctggcaaacatcatgatccccgatgcttcagtgagggcagaatggcttcgcctgcatgatgattttatctctccgcttagcctggtggctaacaaggccgcctggtccgagtgcgatgagtggttgactcaggtcaggcactacattgacgagaacttccgttttctacgggactatatggggacatatcatccgcaggtccgttttatcattccggaaggaacttatctggcctggattgatatatcccctctgctggatgtctgtaatcatgaagaggtaaccctcttttttgccagacatgcgggtgtattgcttgaaggggggcaaatgtttgtcagtaatggcgacgggcatatacgcctcaacctggcatgcccccgcgttatgctggctgaagggctcaggcgcataagtaaggtattgagcgggagttctgtcaaaactcctgaatcttaa

SEQ ID NO: 267463 - DNA, 849 bp, Klebsiella pneumoniae
atggggcggtctgttggattcaggatagtgacagcaatgatggcattcgccgccaattctgtgctctgtcgggttgcgttgaaaggcgaacatattgatccggtgacgttcagtgaccttcgcctgattagcggggcggtggtcttgttaccactgttgttacggcgtgaggggaaaaagcagggcgtctggagcatgaaaagcgggttctttcttatggcctacgccctgtgtttctctcttgcctacatccatttggataccggaacgggggcgttactcttgtttggtgtggtgcaactggcgatggtggcccatggtcttttctatggggaaaggctgtctttttccagagcaacggggcttgggctggctgtagccggcatgattgctcttctcttaccgggtgccaaagcgccccccctgggcagcgctgttctgatggcactttcaggccttgcctgggcggcctacaccctctgcggaaagcgctctcccgatgcagcacaggtcactgcggcaaatttcatccttgctgtgccttttgccctggtgttgtcgccgttcattagccagggagcgcacttcgacattatcggtattctcctggcggtattctccggtgccggtgcttctgccggggcctatgtcctgtggtattcacttttacctcgtcttgagtctgttgcagccagtacggttcagttgagtgtgccctgtctggcgatgctggggggcgtaacatttttgggcgagtcactgaacctcagaatggcattttcaacgctggcagtccttgcgggcattttgttggtgatcagggcaccgggtcacaaaatacagcactga

SEQ ID NO: 267464 - DNA, 252 bp, Klebsiella pneumoniae
atgatcacccgttcaggaccgataccactgaatgtcgaacctttcccggaagatgtacttcgtctgattcaactgatgaaaagctttgagcaattgaccattgaggcagccatcagtggcaatcggtatacggcatggcgcgctttggttattaatcccctggtcaaaagcgggcaactgcttgaaaaagcactggacgaagtgatcgaacataataaagcgttgatgccggccttccaacacaataaataa

SEQ ID NO: 267465 - DNA, 258 bp, Klebsiella pneumoniae
atgaaactcgaccctcaacaattcaccgtttacgacatcaccgacttccccatcgtcacggtccgcaatggagccatcgttcctggctacgcagcgcaatgggaagctgaattgaatgcccttgtggcgcagccgcaaccctttgttctgctcttcccagcaggacgtccggaggaggaaaatcacgaggatcgaaagcgcaggtgggttggttcaagaccaacaagcagcgcttggcaggtgtgtgcagaggactga

SEQ ID NO: 267466 - DNA, 1527 bp, Klebsiella pneumoniae
atgagccggatcgctcccgccgggagctttcatccacccagcgtggcctggacgaccgtcgggctggcactggcggttttcatgcaggtgctggatggcacgatcgccaatgtcgcgttgccgaccatcgccggcaatcttggcgtcagcagcagccagagcgcttgggtcatcaccagcttcgccgtcagcaacgccatcgcgttgccgctgaccggcttcctcgtccgtcgggtgggacaactgaggctgttcctgtgggccacggcgttattcaccctggcatcgctgctgtgcggcctcgcaccgagcatgggcatgctgattctgtttcgcgccctgcagggtgccgtggccggccccatgattcccatcactcaagcgctgatgctgtcgatctatccacccgaacggcgcggcttcgcgctgtcgatgatcgccatggtgacggtggtggcgcccatcgccggtccgctattgggcggctggatcacggacagctattcgtggcgatgggccttcctgatcaacatcccggtgggcatgttcgcttgcagtctggtggccaaccaaatgcgaggacggcctgaggtcaccgagcgcgccaaggtggacgtggtaggtcttgccgcgctggtcattggcgtgggtgctctacaaatcgtgctggacagggggaacgaagctgactggttcaattcgccactcatcgtcacgctctccatcatggcggcgatcgggctgctgttcttcttgatctgggaattgaccgaagcacggcccatcgtcgatctgcgcctgttccgtcatcgcaacttcgctgccggtgcactggcgttggtatgcgcctactccgcgttctacgcggtgaacgtgatcatgccaatgtggctccagcgcactctggggtacacccccatctgggcgggactggccgtggcgccgatgggtgtcttgcccgtactgctgacccctttcatgggcaagtacgcgccgcgcttcaatctgcgcctgctggtttgcggtgccttcatcctgctggccagcgcatcgtttctgcgggccggcttcgtggttgacatcgactttcagtgcattgcactgatccagctgctgcaaggcctcggattggcactgttcatcatgccgatcaacgccatcctgctgtcggacttgaagccagaggagatcgcggcagggtcagggctgtccaccttcctgcgaacgctgggcgcgagcctctcggtttccatcacgactctgctgtgggagcggcgcacgacggagcaccacgctcggctgggtgagtcgctcagcgcttacgacgccacaacccggcaggcgatttccacactgggccacggcaatccggcacagggccacgaactgctgaaccgtctcatcgatgtacaggccacacagattgccttcaacgatgtcgcactcgtgctggggtcggccttcctggtggccatcgccttggtgtggctggccaagcctccttttgtcccgcgagccaaggcatga

SEQ ID NO: 267467 - DNA, 1254 bp, Klebsiella pneumoniae
atgaacaacaacacctccatttctccatcgtctgctgcccctccgaacggcagcgtggcaccaccgacccgcagcaagcgcacatggctgctccgcgcattggccgcagctgtcatcctgggagccatcggctggggcagctggtatctgatgtatgggcgttggtacgcgaccaccgacaacgcctatgtccaaggcaacgtcgtccagatcacgccgcaggttacgggtaccgtggtatccattggtgcagaagatggcgacctcgtgcacgcgggcgatgtgctggtacgtttcgacccctgcgacagccagctcgccttgcagaatgcagaggccaatctggcaagcatcgtgcgcaaggtgcgcggcctgtacaacagcgcagagggagcacaggcagaactctccacacgaagcctcgcagtggacaaggcccgcgccgactacgagcgccgcaagaccttggccgagtcgggcgcgatttcggcagaggaactggcccatgcccgcgacgccctgctggctgcacaaagcacgctgaacgccgcgcgccagcagtatcaatccagcaaatccctggtggacgacacgatgctgacctcgcatccggaagtccaggccgcgatgacgaaccttcgcaccgcttatctcggtcaggttcggaccactgtggtggcaccggtcagtggttacgtcgccaaacgctcagtgcaacttggccagcgtgtccagcccggagaacccttgatggccgtggttccgttgaaagaaacatggatcgaggccaacttcactgagacccagttgaccgacatgcgcatcggccagtcggtcgagatccatgcagacgtctacggaaacaacacccgctacgacggaagggtgcagagcctgggcatcggcacagggagcgcctttgcgctgctgcccgcacagaacgctacaggcaactggatcaagatcgtccagcgtgtaccggtccgcatcgtcttgaccaagcccgaacagctggacagccacccgctgcgcatcgggttgtccatgcacgcgagtgtggacctgcacgacactagcggcaccttgctgtcgcagcaatcgcccaaggaaccagtgctcgacacggctgtgtaccgtgatcagttggctcaggccgattcgctgatcgaacgcatcctgcaagccaacggcgggcacccccaaggcggccaatctacgcacggtaccggcgaacacgcgccggggcgctcatga

SEQ ID NO: 267468 - DNA, 1515 bp, Klebsiella pneumoniae
atgaacgatcgaatgactggtggcagtcgaagaaaacgacccatggggcgactgcttgccgtgccggtgattcttgctctgctgtccggctgcgtgagcactgctggcctgcatccccaagccacgcagttgtcggcagatgaactgcaaacgagccggacgcttggcacgagaggtgcgggtgagtggcccacggaaaactggtggagccgcttgggcgaccctcagctttcgggcttgatggcggaagcgttcgagcacagcccagaccttgttgccgcagatgctcgcgcacgccaagcctctgctcaggcggctgcagccgatgcacagcgcggcccccgagtggatgccaatgtccaactgaacggccagcggcaatcccccagcacatggccagcggagtctggcggaggcaccttcggctggagccattcggccgatgtcggattcagttgggggctcgatctgtggggcggtcagcgggctgcttggctggcgacattggggcaaatgcaggttgcgcaaatcgaaacgcaagcagcgcgcattcagctatcgacccatgtcgctcgcgcctatacacagttgggtcaggccttcatccacctggacatctgcgacaccgagcgtcggcgtgccgaagaggtactgacgctcactcggcaacgccaggcacagggtctggatggcgacctgcagcgccagcaggctgaaggtgccttgaccaacgccagccagcagattgcggtggccgagcgcagtgtgatggcagcgcggatggccttggcaatcttgatcgggcgagggcctgaccgcggcctggagatcgcacgtccaagcatgctgcccgccgagccgctcagtgttccggcagacctgcctggcgagctgctagggcgtcgcgcggatttggtggctgcacgcaaacaagtggaagttgctgcccgtcgcattgacgcggccaaggcccagtttctgcccaacgtcagcgtcacggcgttgattgggtttgcggcgcaaagcagcgccaatctcttctctttggccaaccggcaataccagattgcacctgcgttcaacctgccaatcttcgatgcgggccggttgcgggctggcctggccgagcaggatgccctctacgaccaagcagtcgcgcactacaacaagacgctcatcagcgcattgggtgaagtcgccgaacacctggatgcaatgcagtcacttcgacggcagatcaacatccagcggcatgtcatggcgcttgcgcaggcgagctgggacatcgcgaaacaacgctaccgcagcggtgtgggcagctacctggaagtcctgtcggcgcaacagcccttgctggacgctgagcagaaggccgccacgctgaatgctgagcagatcgacctgagcgtgcgcttgatcggggcgctcggcggcggctttcgcacagaacagcaaagtcctgtcgctgctacgggcgagtcaacttccaactcatctttcaaggaattgccatga

SEQ ID NO: 267469 - DNA, 822 bp, Klebsiella pneumoniae
atgtcgaacaatgctgagaaagcgcatggagtggtgctggatcatagtgaacgtagcgacggtccagcattgatcgcgttgaggggcgaggacacgcccgacaatgagtttcggctgggtactcgtgagtacgactggcaccaccacttgcgcggccaggtcttctgcgtggagagcgggctcgttcacgtccgcaccgtccatggctcatggttgctgccacccaaccgtgcggggtggattccttcccatgaggcgcacaaggtcagcatcagtggtgccatgagcggctggacggtattgatcacgccagaagctgcccgcgacctgccggatcaaccttgcgtcatcggcatcagcgaagtgatgagcgcgctggtgcgtcgcgcggtgtcctggtccggtcaggatgtgttggcgcccgcccagaaacgaatgatggcggtcctgctcgacgagatccggcaggccccgcacgaacctttgcatctacccatgcccgttgatcgacgcctggtgcgcatcgcgcaggcggttctggagcagccacaagacacacgcaccctgcaagcctgggcggcttgggcgggcttatctcccagcactctgtcgcgcctattcttggccgagacaggcagcagcttcgcgcagtggcgccaacaagcccggttgacgcatgcgttggaaatgcttgccaatggcgtttcggttgcccatgtggctgatgccttgggctatgccacccccagcaacttcattgcgatgttcaagcgatgcttcggtgattcgccagcccattacttctcgaagcggtcgcattga

SEQ ID NO: 267470 - DNA, 372 bp, Klebsiella pneumoniae
atggcaagaatcaaactcaccaagaccgccgtggagttggcgcaaccccaggctaaggccttcgaactgcggggtaccgtggtgcccggcttcctatgcaagattactccaacgggccgccgggtgttcatgctccagtaccgcacgaactctggggagcgccacaagcccgccttgggcctgttcggagtactgaccgtggagcaggccagcgtcatggcgcaggactggctggccgaggttcgccggggcggcgaccccggcgcggccaagtctgccgcccgcaaggcaccgaccatgaaggagttttgccacacctttatggaggactactccaggcagcgcaacaaacctagctcgcagcgcggctag

SEQ ID NO: 267471 - DNA, 468 bp, Klebsiella pneumoniae
gtgagcatttcagagaagtatgagtggcataaggatcactacctggtgagtacagacatggaaaaactggatgtacaggctatccatcgctatctgacgaggtcgacctgggctagagggattgacctgtcaattgtgggcgcatcaatcgaaaacagtcttaatttcggcgtttaccatgatgaaaaacagataggtttcgcgcgtttgataacagattacgctacattcgcttatctatgtgatgtttatattcttgaggaatatcagggagagggcctgggaagatggatgatgcaatgcatacatcatcatcccgtctttgagcagcttcgcagaatcatgttgtttacaacaacagctccctggctctatcaaaaatttgggtacgaacccgttaatcgggaaaactatgcgtggagtatcacccggcctgatatttataccaatggaaaaaatcgcggctga

SEQ ID NO: 267472 - DNA, 966 bp, Klebsiella pneumoniae
atgcgaatttttggcttgatcgctgttcttctgattatggggatatcgttaacggccgccgccgggacgccggtgttccatgccggggtagcccgcccgtccgttacaggcgagaagccgttcgagatgctcgtctggtatcccactgaggctgacgaggtggcgtggcaggcggggccattcacaatgtctgccacccgcaatgccgttgtggcaccgggtcgctttccgatcgtgctgttatctcatgggggaggcgtcggtgggggtacaccacttatccttagggaaattccggcagcgctcgcgcggcgcggctttattgtcatcgctccttttcatggcaaggtcggtctgtctggacggacagtccagataaggcgcgcgctggacgccgttgtcgctgatccccgtttcgcttcgcacatggaccagacgaggcttggtatgcttgggttttcgcttggcgcagccgttaccctggagcttgcaggcgccgttcccaaccccgcccacctggttgcctattgcgcgtcccatccgcacgacgccatgtcctgcgatcatgcaccggatggtaataatggcacagcgcccggggctaccccggagcccaccgagcccgtggcgtcgctcccactgaaagcaattgtgctaatggacccgtatgcggtgttgttccaacgacctgaacttgctggcgtgtcggtaccggttctgatcttccgtccggctgacagtgcactcccggccggggcaaacgccatcggcctcgcagcggccctgccacgttccccccagctccaaaccattcctggcgggcattttgttttcaccgacatctgttctccttccctgaaggcctcgtcaccggaggtatgtgaagatcccccgggggtggaccgggctgctgttcatgcagcccttcaggctcagatcatcgggtttttcactaaaaacttgtaa

SEQ ID NO: 267473 - DNA, 519 bp, Klebsiella pneumoniae
atgagttcactcaaaatgcatttcaacattcttgccggctacaacgcctgggcgaatgaacggttgtattccagcgttggaaaaattggggaagatgcttaccgtaaaaactgcggcgctttttttgggtctatcgaggcgacgctgaatcacctgctcgtgacggacaggatatggaggcatcgtttaaacgcattacctgaaacagggtatcggctggaccagatgctgttcgacagtgattttcccggtctggaaatggcgcggagagaagaagataaaaagatcgttgattttatcatgggattatcagaaaccgatttagacggcatcgtctcctaccggcgggcttcaacaccagaactgaagcagcaggtaatctggtctgctctggctcactggtttaatcatcagacccatcaccgagggcaggtccatgcaatgttgacccgcgtatccgggaaggctcccgaactggatttgctgatgtatcaaaggcagctacacgacaaatattag

SEQ ID NO: 267474 - DNA, 1173 bp, Klebsiella pneumoniae
atggtacggaggcagattctttctctgtcggaaagagaatcattactggcattaccagacgatgaattaacgctgacccgaatggcatatttcagtgagcaggatctggcatttattaatgctcaccgtaaacccgccagccggtttggttttgccgttcttctttgctatctgaaaaatgtcggctttgcgccggataaaaaatcgtccccagcggcagaactgctcagagtcatcggcacccgccttaaactttcagtagaactctggcaggaatatatttccggccgtgatacaacccggcgtgagcacctgggagaactttaccggtacctggaactgaaggcctttaatggtgcgcttcagaaagaatgtatccagcatctgctccctcagtctacccggactgatcggggcatacttatcgcagaggaattactgaagtatctgcatcaacggcgaattatcgttcctggtattgatgttgtggaccgcacttgtgctgaagcaatgacgctgggtgataaagcggtttataccacgctgaatacgcaccttagcgccacgcataaatcagcgtttgatgcgctactgatgacaactgaaaagcaaatttctcgtttaacgtggttgcttcagcctccagggaagatcaatggaaagaatgtcctacaacatatcgaccgccttaacgccattgaagcactggcgctaccggaaggcgtggatagaacagtgcatcagaaccggctgctgaaactggcgcgggaaggccgcaaaatgagcagccgggatttagctgattttacccctgcacgccggtatgcaacgatggtctgtgtacagactgaggccagagccacaatcattgatgaaattatagaactgcacgaacgtatactgggcagcatgttcagtcgggcaaaacgtcagcaggccgaacgccttcagaaaacgggtaagctgatacagcaaaaattacgtcagtatgtttccgttgggcaggcgatcctggatgctcgcaacgctggcgaagaccctctgtctgctgttgaacagatattaccgtgggaagattttgccgccagcctggaggaaacccggctccttgcacgtaaggataattttgaaccacttcatcttattaccgaaaaattcagcacgctgcgttaa

SEQ ID NO: 267475 - DNA, 471 bp, Klebsiella pneumoniae
atgaagaaaaatcaatttgtcatacgtgcctgcagtccttcggatgctgagcagctcacgaagttagcattcctttcgaaggcgcactgggaataccctaaagagtggctggatttttggcaagacgacctcacgattacacccgagttgattgaagattcaattgcctacatcgccgaagctgaacagcagataattgggttctgggtcagggctgcaattgattccggcgagcctacctgcgggtggttatttgttcacccggatcatatgggtaagggcgtcgctcgtgcattatggtccgaagttaagaaagaggcagaagcaagaggaattaaaagattcgtgatcgaagctgatcccaatgccgtgccattttacctgtcactgggagcagaaaaaataggcgaaaaagaatcgactcttattcccggaagatttttccctatcattctgctgcctgtcgcatag

SEQ ID NO: 267476 - DNA, 1272 bp, Klebsiella pneumoniae
atgagcatcggtactctaagcccggtggagaaaaagaattttatctcattttttatattctttttcttctattacttcattatgtcagcctacttcccattttttccggtgtggctggcagatgtcaatcatctgagcaaaactgaaactgggatcgttttttcatgtgttgcattcttcggaattttattccagtttcttttcggttatatcaccgataaattaggcctacgtaaacatttgctttgggttattgttgcgggtctggtctgttttgcgccattcttcttgcttgtttttaaacctcttttagcgaaagatatctatctcggatccgttgtcggcggtatctatctggggttcgttttttcaggcggatccggagctgtggatgcttatatcgaaaaagtcagccgtgcaaacaactttgaatatggaaaagtgagaatgtcaggctgcatcgggtgggctgtttgtgcctctctgaccgggatgctgatgggaattaacccggatatcatattctggatctcgtccggttttgcactcattctggcgttacttctggtgattactcgcccagagccgctgtcgatgcaaaagaatattgaggtaacaggcaaaaaaggcgatatatcaatccccattgcattaggcttgttcaggctaccgagtttctgggcctttctgatctatgttctcggtgttgcgagtatttatgatgtgtttgaccagcagtttgctaactttttcaagggattttttgaggacccgcaaagaggtaaccaggtattcgggtttgtcacaaccggcggtgagttactcaatgcctgtatcatgttcattgccccattcgtagtattaaaggttggggctaaaaaagtgctgttactcgctgggacgataatgacgattcgcatccttggctcctcgatcgcaacaacgccggttgaagtggtgctgttgaagatgctgcatatgtttgaaatgccatttctgtacattggtactttcaaatacatcaataaagtcttcgatccccggctttcggcaacgatctatctggtcggatttaatgtggcaaaacatgtctcggctatttttctgtcgtcttacgttgggcgcatgtatgacacgatgggattccatcaggcctatttattcctcgggtgtattacgctgttctttacgattatatcatttttcttattaagaggaacgccaccggaagaaaaaaccgtgatggcaaaaacggcgccgggtaacacttaa

SEQ ID NO: 267477 - DNA, 3096 bp, Klebsiella pneumoniae
atgagtgaatatgaacacactttgtctgacattattaagcgtaaagactggcaaaatcttgttataacccaccataatcgtttgccggctcatgccagaatgaatagctggcgtaatgcgggggctgctcgcgaaaataaaccttcgccatatcggcagtgtcttgatggaaaatggaatttcaaattatatgataaccccgaacaggtccctgaggaatggctggaatatgatggtgataatgtcttccggattcctgttccggctaactggcaaatgcatggatttgatgtgccaatctataccaatgtgacctatcctatttctacaacaccaccaggtgttccagaaaataatccaacaggctgctattccagtgaaattgaaattaatgaggaatggttgcaggatgggagagtgagtattatttttgatggtgttaattctgcatttcacctgtggtgcaatggtcactggattggctattcacaggatagtcgtttacccgcagaattttcgatttcaccctgggccaggcccggcaaaaaccgaatttgcgtcatggttatgcgctggagcgtaggtacatggcttgaagatcaggatatgtggcgtatgagtggaatattccgctccgtatggttgcagcataaacccaaagtgcacctggctgatgtcattatcaaccctgatgttagcgctgattccgacctgggctatctccatgttgaagcaattctcgggggagatgttgatacacctgaagactgggcggttaaattgacgctttgggtaggtgaacgggagtgtgcggggaaaacgctcccgttcggtacgcaaaaaattgatgcccgtggcccctggcgtgaacgtctggatactcaactggtcatcgataatccattgctctggagtgcggagttaccgcacctctatcgactgaccgtgacgctgctggacccagatgggcgggccgttgaaagtgaagcatggaataccggcttccgtcgtgtcgcaatcgaaaatgggttactgaaggtcaatggtaagcccctgctcatccgcggtgttaaccgccatgagcatcatcctgaactcggacaggctgtggatgaagcctccatgttgcaggatatttttctgctgaagcagaataattttaatgccgtacgctgctcacattaccctaatcagtcccgctggtatgagctttgtgatgagtacggaatatacgttgttgatgaggcaaacattgaaacccagggaatgatcccgatgcggcgcttagctgaggattctgaatggctgcatgccttttcttcccgggtgactcgcatggtgcataataatcgcaaccatgtctctattattgtctggtcgcttggtaatgagtccggcattggtgcgtcccatgaggcactttatcactgggtaaagaaaaacgatccgatgcggccagtgcaatatgaaggcggtggcgcggatacttctgctacggatataatttgtcctatgtacgccagggtcgatgaagaccagccattcccggccgttccgaaatgggccattaaaaaatggatcggcttacccggcgagcaacggccattaatactttgtgagtatactcatggcatgggaaatagcctgggaggggtttataaatactggcgcgcatttcgccagtatccccgattacagggcggttttctttgggattgggttgatcaggccttaataaaaaatgatgagaatggccttccgttctatgcgtatggcggcgattttggtgatactcccaatgacaaacagttctgtcttaatgggcttttgtttcctgaccggacgccgcatccgtcactatatgaagtgaagtatctgcaacagtactttcattgtcgattaatcgggacgcaaccgctgagtattgaaatcgccagcgagtatcagttccgtaaaacggataatgaaatcttgcactggtcggttcaaagccggggagctaacgttgagcaaggggaattgatgctggatattgcccctgaaggccgcgtcacgctgaatcttccctgtgatttcacggctcttcgtcagcttcctgagctctggttaatgctggagatccgtcagcgcgaggccactgcatggagcaagccgggacatttagtcgcctggcaacagatggcactgccatcagactgcgtggaactgctgccagtggtgacgggaaatgttgtactgactgaggatgaagagcggtattacgtagttgcaggcgataagcgctgggagattgatcgggcaaggggccggcttacgcaatgctggcttgataacaggccgcaggttctgacgcccttcagcgatcagtttgtgcgagcaccgctggataacgatattggtaccagcgaactggggcaggaacaaccggatgcctgggctgtgcgatggcggcgtgccggcttatatgaaatggaaagcgaatgcctgagttgcagtgcacagcagcttgcggatagcgttgttattgtggctgatttacgctggcgggcgaatggcagggtcgccatagcgagtcgctggacgatgttgtttgatggtgaaggtcagctacatttgacggttgaaggatgccgggcacgttcgttgccaccgcttgcccgtattgggatcacagcgcaactggttatgcggcaggcgccggtaacatggctgggtaaaggtccatgggaaaattatccggacaggcaatcctccgcccagttttctcgctggagcctgcctcttgaggagatgtcgaccccttatatttttccttcggaaaatggactacggaccaatacaaaacaacttcgttggggagcgctcaatgttgcaggggattttgctttttccctgcaacgttatagtacacgtcagttgaaagacacttctcaccagcatttgctgaaagaagaagcaggtgtatggctgaacatcgatgcccgccatatgggaataggcggcgatgattcctggacaaccaatattgtgcctgaaacggaccagttaatggaagataactggcgctatagcattatacttacattttctcattaa

SEQ ID NO: 267478 - DNA, 690 bp, Klebsiella pneumoniae
atgactctcaataaaaccgatcgcatcgtcatcacgctgggcaagcagattgtcagcggcaaatacgttcccggctctgcgctgcccgcggaagccgacctgtgtgaggagtttgccacctcgcgcaatatcattcgcgaagtgttccgttcgttgatggctaagcggctgattgaaatgaagcgctatcgcggcgcgttcgttacctcgcgcaaccagtggaattatctcgacaccgacgttttacagtgggtgctggagagtgattacgacccgcggctgattagcgcgatgagcgaggtacgtaacctggttgaacccgcgatagcccgctgggcggcagagcgtgcgacgtcgagcgacctggcgcaaatagaaaaagcgctcaacgacatgatcgccaacaaccaggacagagaagcgtttaacgaagcggatattcgctatcacgaggcggtgctgcagtcggtgcataacccggttctgcagcagctcaacgtggcgatcagctcactacagcgggcggtatttgaaagaacctggatgggcgatgaggccaatatgccgaaaacgctccaggaacataaggcgctgtttgacgccatccggcatcaggacagcgaagcggcggagcaggcggcactcaccatgatcgccagctcgacacgtaggctgaaggaaatcacatga

SEQ ID NO: 267479 - DNA, 210 bp, Klebsiella pneumoniae
atgaaaactgtaaaatccgctctgatgattgccgtactctctgccgtttcatccgcaagcttcgcccaaagtatcactgctacggcttccacgctggatgatgcggaagcgcaaattgctcagcaggcgcagaaggctggcgctcagtataaaattactgaaagctatgccggtaatcaggtccacatgacggcgacactgctgaaataa

SEQ ID NO: 267480 - DNA, 966 bp, Klebsiella pneumoniae
atgatacgtcttgaagatgtgactttgttcgtccgttccgccgcgctgggcagcttttccagtgcggcacgcgaagcagatattctccccggccaggtcagtgctgcggtcaaccgcctggagcgggatctgaacaagcgcctgtttgcgcgctcaacccgcagccttcgtctcaccgccgaaggtgaagcatggctgccctatgcgcaggagatgctgaatattctgcaggcgggatctgaacgactgcagggcggggagaatgaaatacagggtgaactgaaaatttccgttccgtcagatcttggacgcaacgttttactgcccttgatcaccgcgttctgcgagaagcatcccgggatatcgctacgcatcttcatgtccgataatgtcagcgacgtgttccgcgatccggtggacgtagccatccgctacggcgttctggaaaacagcagctacgttgctctgccactggccgaggataaccggcgtgtgctggtcgcttccccatcctatctgaataagaatggccgcccccggcagcttgacgatctggttctgcatcactgtctgctttatacgcttaatggacatgtgtatgacaaatggtccttcccggaaaacggcgtcagacgccagctgacggtgtgtagccggatgctgtgtgacgacgccgatctggcgcggcgctgggcggtggcggggatgggcattgcgtataaatcatggatcgatgtgagtgcggacgtgctggcaggcaggcttgaggttctgctgtcggaacagcctggcgaaggggtgccgctcaatcttatctgtccccaccgtaaacagttctcgcctgcgatacgcgaactgcatgcgcagctgcgtgagcacctgaaagccgtgacggcgctgatgcgcacccatccagcttttgtcccgaccactcaggccacactgcccgcgaaccagagcgcataa

SEQ ID NO: 267481 - DNA, 564 bp, Klebsiella pneumoniae
atggccagaccgaaaaagataagtaacgaagacatcctgacccgcgtcattccggtcttctggaaaagcggactggcaggcaccagcctcggacagcttgaggaagccacgaatgttaaccgctcaagcctgtacgcgaccttctgcagtaaagaacagctgttcgtgagcgcgcttgaatactatgtcagtagcgcaccggcgcagtttttgctacaaaaacaaccgtatggctgggacaacattgaggcgttcctgttagctgcccccttcaacaatcccgcctttaacggctgctttctggtcaactcttcccgtgaggtgggcgaactgcctgatgaagcactggcgattgtacgtaattttcgtgacgcggtcgtggcgcagatacagctgaacattccggctgaagaggccggagataacagcggcgtaatggctgacatcatctggtctaccctggctgaagcctgccttgaggcgaacgatgccctcgacagggcggcctggcagcagcgtgtcatccacctgctaaagtttcttaagtcttcccactcaagataa

SEQ ID NO: 267482 - DNA, 1206 bp, Klebsiella pneumoniae
atgattgctctcctgaagtcaacccgctttgctttcgggatcagcgccgccgtcgtggcgcatacgctctggaccagcgcggctcccgcaatgatctatccgctttatgccgagcagtggcagctatcgatgacagtgctggcggtcatctttggtctctatcccctgggcgtagtcctgacgatgctgatgtctgctgggctttccgacaggctggggcgaaagcacgtcatgctgggcgggctggtcagctccgccgctggcgtactgatgtttgccgttgccggagaggtctataccctaatggcgggcagggtactgatggggataggtgtcgggctgtctgctggtccttccgccgcagccctggtggactatgcggggaaaggcggcacagcccgctctgcctctgtcaccctcggtgcgcagtcggtgggcttcgctggtgcgctgctactggctggcgcgctggtgacgtgggcgccctcgcctacgcgcctgagcttttacgttctgttcgcgctgctgcttgtgcttttgctgctgtgtctgttcatcccggctgaccggccatccgatccgacccgccgtctgctggcgcgccctcacgttccgccttacctgcgccgaagctttatctatgccgcgctggcagtgatgggcgcctatacacatggtgtactgatttcctccctcggtgctcaggtagcccgcagcctgattggctcaccgagtgcgtgggtaaacagcctggcgctggcgctgtttccggtggcactcggtatcgcgggcggccttgccagaaaggtcgaagcccggcgtgcgatcgtaacgggttccgtgctgtccgtgttgggcatggtgagcctgtgcctttcagtatcagctcacagtctggcgtattttgttggtgcctcactcgtgtcgggagccgggtatgcctttatgacgtttggcggactggcgctgatcgcgcaggaaacccggcgtgaagacaggggaaatgctatgtccatgctgtttgtctttgcatacctgtttaccggcgcgctggcgatcgcgctgggcaaaaccgctacgaatctgggccttgctactgccgtttataccggcgcattcatcctcaccgcagtctgtctggtgctgattattcagggcctgtatcagcggtgcccccggcatccgtttcccgtaaacgatgcctga

SEQ ID NO: 267483 - DNA, 855 bp, Klebsiella pneumoniae
atggccttaaaaatttacccactgaacctcggcaatatcacgctggacaagtcggggctggttttattccaggacgcaggaatcaaaaccaccattcccacactctcttttttgattaccggcggcgaatatcctgtgctggttgattcgggctcgcgttccacggcgtactacagccagtttggttttgaggcagagcagacgcgcgaaatgacgctggaatggcacctcgcacagcatggcctgacgcctgcagatatccgatacgtcattcatacccacgcgcacgttgaccacgccggcggggattatctcttccccatgaccaccacggtcagcctttcccgacgtgagctatcttttgccgcatccgggattatggggccggccatgtatgcccttgaggatacgcgtcacctgctcgacaggctgtatacgcgaggcgcgctgcgcctgtttgacgtggacggcagctttgaagaagaagtgatcccgggcgtgacggtgcgtctgagcgggggccatactccgggctcgatatccgttctggtggaaacagcggaaggactggcaaatatctgtggggacgtggtgtataacctggagggtagccttattgatcccttcctcgacagtctgaaccccggtgaaccgaccatcaccggtaaccgggcaatgtctacactggaagaaaaaacggccattaagaaagcgctgtccggcgtgcggtttatactgccaagccatgatctgccggcgctggtacagggaggacgggtgacaggtattctgcacaactccatatcaaatccaaaagcccgcgtcactgacccttcagcctacagccttctgtaa

SEQ ID NO: 267484 - DNA, 1002 bp, Klebsiella pneumoniae
atgaaagcgatcgtttatacccagcacggattacccattactgacccccgctctctctttgagaccgaactgccaaaacctcagccggttggccatgacatcttggtcaagatccgggcgatttccgttaaccccgcagacaccaaggtgcgcgccagctcacccgttacgcagccgcgcattctcggctgggatgccgtgggcgtggttgaagccatcggtgaagacgtcacgctgttcaggcctggtgatgaggtgtactacgccggcgcaattaaccgccctggctcctatgcagaatacggtctggttgatgaacgtatcgcggcccataaaccggcctcgctgagcgatgccgacgcagcagcgttgccccttacgtcacttaccgcctgggagttgctcttcgaccgcctggaagtcacagacggacatggtgatgcgctcctcattatcggcgcgggcggcggtgtgggttcggtgctcactcagctggccagcaggctgaccggcctgcgcgttatcggcaccgcctcacgagcggaaacggcagagtgggtgcgtgaactcggtgcccatgacgtcatcgatcactcccggccgctgctggaaggcctgcgtgaaatcggcgtctcttccgtacgctacgttgcaagcctgacgcacaccgataagcactatcagcagattgtggaagtactggcgccgcagggccgactggcggtgattgacgatccggattcgcttgatgcggttccgctgaagcgcaaatccgtttcgctgcactgggagctgatgtttacccgctcgctgttccagacccccgatatgatgcgccagaacgaaattctggaaaacgtccgtcgcttgatcgaggacggcaccctgcgtaccacgaaaggcgagcattacggaaaaattagcgcggaaaatcttcgcaaggcgcacgctttcatcgaaagcgggcgtgcatgcggaaaaattgtactggaaggtttctga

SEQ ID NO: 267485 - DNA, 1200 bp, Klebsiella pneumoniae
atgatgaaaaaacgtatgatgaaaacggcgttagcgctgtctgtagcgctggtggcaggcagcaccgccctgaatgctctggcagcggaagcccacgcactacctgctctcagcgagctggcccaggagcgcgccatcggaaaacccgaagtggtggcgacgtttagcggtgccatgccgaccggggttaccgtcaccgaaacgggccgtattttcgtgaacttcccgcgctggggtgacgacgttccatttaccgtggccgaggtaaaaggtaaccagctggtaccttacccggacgccgctataaatatcgctgacaattctgcgctccgcacgcatctgctgagcgtacagagcgtggtggccgatggtcgtggccgggtctggatactcgataccgccgcgccgggcttttcaaaaccggttgcaggtggcgcaaagcttgtcgcagttaacctcaaaactaatcaggttgaaaaaaccattgttttcccggctgacgtgatcagacctgccacctacgtcaacgatatgcgcttcgattttcgcatcggtaaagctggcgtggcgtacgtgaccgactcctcgctgtcagggactggcgctatcatcgtcattgacctggacaccggcaaagcgcttcgccgtctggaaggcgaccgcacaacctcgcctgaggcaggcttttcacctgtcgtagagggcgagacgctgttgcagcgtcacgcggatggaacgaccgcgccgttcagcgtggcctccgacggtattgccatttctccggacggtaaaacgctctactacagtccactgtcggggcgtcatctgtatgcggtttccacggcgctgcttcgcgatccggccgtcactgagtctcagctctcttcgtccgtgaaggatttgggtgaaaaaggggcgtcagacggcctggaaagtgatgcgaacggaactgtttatgccggtgactatgagcgcaatgctattcgtaagctgccggctggcggggaatggacaaccattgcgcacggtcctgaaattctgtggccggataccctgtcagtcggaccggatggctatctgtacttcaccacgaaccagctgaaccgccagcctggcttccacggcggcaaagatttacgccagaagccgtatgccctgttacgcatcaaaattaatgcagcacccgcaccaacgcactaa

SEQ ID NO: 267486 - DNA, 387 bp, Klebsiella pneumoniae
atgttcagtaaaatgtatgacgttaatgaaggccacattgattttcaggaggtggtcgacgggctttactacccgttttatatggagtgggagcgtcacgccttcatgaaagaagcgctggggatcgatattgaaggggagttcagccagggacgcatttatatggcgctggagtattccttacgtttccgtcagagcctgaaaaagggagacagaatggaggtgacctgtcagctggaaaaaaatgtgaagcgcaaccgcgtgaatttttaccagcaaattcgggttgagggcgtgatctgcgctgaagccaccttcaccgccacctgcctgttcaatggccgcccgtcgatgcctgaagcagtgatgaatgccttagccttctga

SEQ ID NO: 267487 - DNA, 423 bp, Klebsiella pneumoniae
atgacggatattactgcgaagaagtcagcgcgtttcaaaccggcagaaattgcccggaaccttccggagtcagccaccacgatgctggccgacatttatttaaccgaccgccctgatgccagtagccgggtttttcgggcttaccggggcgttccacctcactaccaccgtgaatgtgatgagtacctgtacgtgttatcaggccgcggaacgttctggatggaggatgctgcgacagaggccgaattcggtcccggtgatatgctgttttttgaacgcaacattgtgcatgcactccccgttctgctggaagagcccgtgatttttctgaccctagatacgccccggcgttcgcccgaagatgtcgtatttatcgattcagatgccggtaatgccggtacgtttatgcacagaaaccgctga

SEQ ID NO: 267488 - DNA, 537 bp, Klebsiella pneumoniae
atgagccgcttacataccatcaccgaaggcgaagcaaccggtaaaaccgcgcagctgttctgcgctatcaaaggcagtatgggtaaagtgccgaacgcctatctgaccattggcacacagtccccggaaatactgggccagatgctgcaactgaacgccgcactgcataatgggagtctgagtgcgcgtgagctggaagccattaatcttgcggtaagcgaagaatctggctgcgactattgtcttgccgcccatacgctgatggcaaaaaaagccggatacactgaagagcagacgcgtgaattacgcgacgcccgcttcagcgatgatgagcatattgatgcgctggtgaagttcgttcagtatctggtttcatcgcgcggtaccgtggcggctgaacacgtcgaggccttccgtcaggcgggattcagcgaccagcaggtcgtggaaactatcggtgccgttagcgccatcctgtttaccaatatggtaaaccgcgtgaacgatacccttattgacttccccaaagtgaactga

SEQ ID NO: 267489 - DNA, 705 bp, Klebsiella pneumoniae
ttgacgaaaaatgcagagaaccttcctgttgtacttattccaggatttatgcttaatgaaacgttgtgggacgattttatcgctgcatttcccgatatcaggcacttcattcctgtaagcttgaatgaaggaaaaacaatacaggatatagccaccaacatagcccagaaactacctgagcgttttgttctggcaggtttttcactgggtggctatgtagccagagctatttatgaagcttttccggaacggacggcagctatgattctcattgccacttctctcagggaagattcggttgaacagaagcgcgcacgtttagcgggtgcgagtactcattcctccagaggattcagtggaatgagtacaatggcaattaaaaaatcacttcatgccgatttcgccgataatacgattatgattgataaaattcgcgatatgggaaaaaggttgggggcaactgcattcagagcccagtcagggttaaaccgtgagcgaataacgttaaaaccaattacttgtccgacatacgttattgctgctgagcatgatcagctgcgttcaaaagaggaaacggaagagctggaaagcctaaccggaacttgtgcggattatgttgcaggttgcgggcatcttattcccttggaaaaaccatatgaattggcgaaacttatttccgcgtggctcaatagaaaaggtgtttaa

SEQ ID NO: 267490 - DNA, 510 bp, Klebsiella pneumoniae
atgttatcgggagcggaactaggcgcattctggcaagtcttagtaatttttggcctgcattgggcattcacaccgctgatgtttaacaatctgaccgtgtttgggcacgacaacatgatccctattcttgtagcagcagtaattggacaagtgggtaccgtggcaggcgtcttcgttatatcacgtgatcctcagaccagaactctggctgtgtcagcctttgttgcaggcatattcggcataacagaacctgcaatctatggtgtgacattatcgcgtagggtcccgttcatcatcggttgtatttcggatgcatcaggaggagcaataattggtctcagcggtaccctggtcttttcattcggctttcctgaccttctctctatttcacaaagattgccgcttgccggagcggatggcgcgtttttgggaggagtcaccggtgttgcgttgtcagcaatcatgtctttcttttatccgcgaaggtttactggaagacattgcctgtaa

SEQ ID NO: 267491 - DNA, 327 bp, Klebsiella pneumoniae
atgttagtgaaaaacgtagataaagatacttttgtacaggatgtcttgcatagtgaaatcccagtgctggttgacttctgggctgcctggtgtgggccatgccgttcagtagccccggtactggaaagcattgcagaagaaaatgagggttctctaaaagtcgtaaaagttaacattgatgagaatcctgaactggccagtgtttatggtattcgctcgataccagcttttaaggtgtataataagggcgatgttgaactacagtttgggggtgctttgcctaagagtcagtttgaagccgcgctggctcctttcctgacgaaataa

SEQ ID NO: 267492 - DNA, 903 bp, Klebsiella pneumoniae
atggatatcaaatccctacgctactttttgcaggtggcagagacactaaatttcaaccgcgcggcagaaagactaaacatctctcaacccgttgtcactcgcgtcatcgctcagcttgaacatgaagtcggttcaaaattattcgaacgaactacacggcgagttgcactcacgccagcaggtgctgtgctactgcgggaagtcagacctttgattgcgcatgtcgaagcggtgcagcaaactattcgtcattctgtagcagaaagaagtgggcgttttaccgtcggttatacgacccttgctatgcaaacagtcacccctgacctcctcaggaaatttaaaagcgaatttcccgagatagagcttgaggtcaatgagatgacaacccaggctcaggtcgaagcattgctctcagctgaaattgatgtaggctttgtgctgaccccagtaattgacgaagcattaacaataacgccattacatcgggagcgtctaaagctcgcagttccggattatcatccccatgcttccggcgcaggcgaaagtaccagagttcctctgtcagcattcgcaaatgattactttataatcccgtcaaaacagcaatttccggctgtctatgatgaaatcatacgtgcatgtgatggagcaggatttcgcccccgtcttaaagaatgtggcgaaaatcagacttgtgtaggcctggctcgtgctggtctgggagtcgtttttgtttccggacgtacaacagatattccttctgaagggctggtatttatcgaaattgatgatccggcgccagtgatggaaatcgccgttgcatggcgaaccagagacccatcacctcttctggcgttatttaagcaaaacaccctcggtgatttaaaggtagataccaaatga

SEQ ID NO: 267493 - DNA, 1428 bp, Klebsiella pneumoniae
atgtatctatacgaaaggcttgccgatgaaattgccacggctatcagttccggacagcttcaacctggaacgcgaattccatccgtccgggattatgctaatagccatcaggtaagcatcaattccgtgaaatcggcgtatcggatccttgaagatcgcggactcatcacaccccgccctcagtctggctattttgtgagctcggttcttccagagttagcgcttttgccgcgtgaaatgagcgcccgcgaagacatttccctcacgggtgtgagtaaactccttgcggtaatacttgagtcgcagcaaaacagtgagtttaccgacctggcgatggcatgcccaacagggagcacgttttaccccactgagcgcctcaagaaactgaccatgcaggttctacgtggcagcaaaaccagccgtgttgtatatgccatgccaccgggatcaaagcgcctcagatcacagatcgcccgaagagggcttgcgctggggatgatgctctccgatgaagacatcatcattacgcatggcacgatggaagcgctaagccttgcagtcagagcgtcaacccgcgctggtgatactgtcgctgtagaatcccccactttttacaatctgtaccctatgctggaggatcttgggcgtcgaatcgtgaatattcccacccatcctcagagtggtatgtgtctggatactcttgaatctctcgcaaaacagcaaaaaatttccgcggtgattactatacccagtggccataacccgcttggatttgtcatgccatcagaaaaccgtcagcggttggcccgcatggctgagacatgtgaattcgccgttattgagaatgctatgtacgccgagctgcagtttggcgaaaaatggataccaaatattcggtcctttgaccgtaaagggtgggtgctggtatgtgccagttataccaaaacggttgcgccggactttcgcattggctggctggaggcgggacgttttcgagatgtggcccggcaaatgaaatttacctctactgttgcagagtcagggttgctaagcgagagtctgggaatttttcttgagaatggcggttatgacctgcacctccgtcacctgagacgattgtatgagcgccagatcgatatcgtgagggcttgcattgcagaaagtttcccgccaggcacccgcgttagtcgccctcaggccggctttattttatggattgagttgccagaaggcaccgacacgctggccgttttccatgctgctttggatgcgaaaatattatgtatgcccggaattctgtgttcaggaagtagggtatttaatcactgccttcgcatggcggcatgctttgaaatcacggacattcatcgccaggctatatcaaaactgggcgctctggcaactgctcaattgaagaaaacgaagtga

SEQ ID NO: 267494 - DNA, 879 bp, Klebsiella pneumoniae
atgccgtcagttgattttaaacaggtcgatgtatttaccaaccgccctttcaaaggaaaccctgttgccgtagtgcttgatgcatctcacctgaatggagaagaaatgcagcagattgcaaactggacaaacctttctgaaacgacgttcgttttgcccccgcaggatgagaaagctcattatcgcgtgaagattttcacccccggcagcgaattgccttttgccggtcacccaactatcggcaccgctcatgctctgcttgaagccggagttatttcagctacagatggaggcgttattcaggagtgtgacgcaggattaataacactcaccgtcacgccactgcctgaaggtggtcagagcatagcgtttgaactgcctgcccccgctatccagcctctgtctccagaacaaactgacaaactcgaacagatactgggctgcgagctggaccgcacgatcacgccagccctggttgacgtaggtgcccgctgggttgtcgcgcgcgcagcggatacccaggccgtactgaaaacctgtccggattacgcacgactggctgagcatgacgccaacctgaaagtcaccggcgtatgtctgtttggtgagtatccgactgaagcagagatgaaaattgaagtgcgctcttttgcaccggcgtgcggcgtgaacgaagatccggtgtgtgggagcggaaatggcagcgtcgcggccttcctgcgtcattacagcgtggagctcccgacagatggtcaaatcgtttcaacccagggacagattcttggacgcgatggcaggctgaatctgaccattgataaggacaaaatcctggtcggtggacaggcggttacctgcatctccggaaccattaccagttga

SEQ ID NO: 267495 - DNA, 939 bp, Klebsiella pneumoniae
gtgccccatgaaaaagccgccccattaccggctacgcgcagtcatcccttaacagcgctgattgctgtgtttaccctcccgcccctgctgtgggcaggcaattttatagttggtcgcgcggtacgtgatgacataccgccggtcactctgacactcgtccggtggctggttgcgcttgtcatcattctcccgtttgctctcccgcacatcagacgtgactggcctcgctatctgcagcatgcgggacgaattgtggcgatctccttaagtggcattgcagcattcagtcttctcgtgtatttcggtcttcaccacacgtcagggactaacgccctgttgctcaactcatgcgtaccggtgcttattttgctgttctcagccgtgttctggggagcccggctgaatatgacgcagattacaggtctgctactgtcctgcgctggtgtgctgaccattatctttcggggcgatccgcgaggactccttacgctggcattttcttcaggtgacctgcttctgctgggcgcgatgacctgcttcgcattttacaccctctggcttcgcgggctgcccgccgatattaatcgtctggggctgctgggcgttcaggtgatgatcacgctgatagccgtttcgctgctctggccgtgggaacacgcctcgggagaatccgcaaactggaagacatctacgcttgctgcagtgctgttcctgggcgcgggcccgtcatttgtttcctatcttctgtttggacgatgcgtggaaatgataggtgcagcacgcgcggggctcagtatccatctgattccggtttttggcgtggctctgtcgcttctttttcttggcgagccactgcatttatttcacctggtgggcattgtgaccatcctcatcggggtcagcttcgcaacctcagtaaaacaaggtaatcaaaaatga

SEQ ID NO: 267496 - DNA, 387 bp, Klebsiella pneumoniae
atgaagaaaattattaaaagcgatcgtctggcggagcctgtcggcccgttttcagcaggcaccggttttgaacgcctgattttcgcctcaggacaggtgggacagctacccgaaagcggacaactcgcgggtgacgatctggaaagtcaggcgcgccaggcgctgaaaaacctgctggcggtgattgaagcaggcggtggaaaccgggatacggtgcttaaagtaaactgctggctgctgaccatgaacgactttgcagcattcaacgcaatctacaaagagttctttgataatgaaggctttccggcgcgcacctgcatcgccgcggctgaacttccactgggagcaaaggttgaagttgaagccattgcgcaccgcatgaactga

SEQ ID NO: 267497 - DNA, 462 bp, Klebsiella pneumoniae
atgagcgttgaaaaagttaaagagtttctgcttctgcacgcacctgatattcaggtgatagaactcgaaaaatctacggcaacggtcagcgaagcggctgacgcttttggtgttgaaagcggtcagatagccaaatcactgacgtttaccgtcggtgaggacaccgtgcttctggtcatgcccggcgatcgtcgcctcgacaacaaaaagtttaaaagtttctttggggttaaagcccgcatgctgcccgctgatgaggttgaatatcataccggctttaaacccgggggcgtcagtcctctgggtgttgcagccaaagtgaaagtttactgcgacgtaggtctgcgccagtacgaggaagtgctgcctgctggcggttcagggcaatctggcgtgcgcataacgcccgaacgccttgctgaggtcaccctggccgaatgggtagatatgagcagcctctga

SEQ ID NO: 267498 - DNA, 1020 bp, Klebsiella pneumoniae
atgaagacgttcaaagcaatgcaggttaccgaacctggtaagatggaactggtagagcgtcctgtgccagtacctggttacggcgaagttctgcttaaggtcgaggcatgtggcatctgtggtgctgatgctggcgtggttgaaggccttgaaaaaaatacgacttatccgcgtatccctggacacgaagtggtgggtcgaatcatttcattgggggagggcgttccatcatatctttttacaggacaacgggtgggggtcggtcgcctcgggggacactgcaacgagtgcgaacagtgccgccagggacattataatctgtgcactaaccagcccgtcgttggcagctcacgggatggtggctatgcagaaatgatgctcgcgcgcgccacgggactggttctcattcccgatgaacttctcgcagcagaggctgctccactgctttgtgcaggaattgcaacctttaacgctcttgccaaatcaggagccaaacccggcgatacgatcgctattcagggcataggtggtctggggcatctggccatacagtatgcacaaaaaatgggatatcgggtcattgcagttggacgtggaagtgacattcgccaggatgtaattaacctgggtgcacatcaatatattgatacgttacaatctgatgcggttgcagaaattaaaaaggctggcggtgcacaggttattctgacgactatcaccaacagtgaggccgcttcagaactggtgaaagcactcgcaccacggggtaaatttatgattgtaggcgcaggcagctctccacttttatttatgcccggcacaatggtcggaaacgagctaacagctgaaggatccatcaccggtacgccctacgaaacggaacgcgcccttaagttcagtctactgaccaacgtacgcgcgcagattgaaaccatgccactgaccagggctcatgaagcttttcagcgtatgcgatcgggtgatgttaagttccgtatggtattgagtatggatctttaa

SEQ ID NO: 267499 - DNA, 753 bp, Klebsiella pneumoniae
atgagactactcaataaaacagccgttatcacgggtgctaccagcggaatcgggcttgccaccgctgagatctttatcagagagggtgcacaagtgatccttatcggacgtaatcaagcacgtctggaatacctcaaaagaaagctcggtcaggccgcctcgattatttctgctgacgttaataacgatggagaccttatacgggcatgcgagttgattcaggatcagtttggtgaaaaaagcatcgacatatttttcattaatgctggcattgcctactcaacaccacttagcctgacggagcaacaaagttatcaggatctgatggatacgaatgtgaaaagcgttttttattcgatgcagaccttccttccacttctgaaggacggagcctcagtgatcctgaactcagcatggcttaatactgtaggaatgccaggtttttcagttttatccgcctctaaagccgcagtcagatcttttgcccgttcatggtctgcagaacttaaaagcagaaaaatcagggttaactgcgtcagtcccggggcaattgataccccgatttttgaactcgaaggtacagatgcacgacagatagcggaaacaaagggtcatctggcatcaatgatccctgccgggcgcctgggcacggcgaatgacattgcgtctgccgttctctttctggccagtgacgagtccaattatatgcttggcgctgaaatcgcggtcgatggaggtttcgcgcaaatctga

SEQ ID NO: 267500 - DNA, 1356 bp, Klebsiella pneumoniae
atgacccgacattttgattacattgccattggcggcggcagcgcaggaatcgcctccgtaaatcgcgcggctgcacatggaaaaaaatgtgcccttattgaaaaaggccccattgggggcacctgtgtgaatgtgggatgtgtgccaaaaaaagttatgtggtatgccgcacaggtggcagatgcaatcagaacttatggtcccgattatggtttcagggtatccggatatgaattcgactgggccactcttgtcaggaatcgcagcgagtacattgaacggatccatggttcctacgatgcagtactcagcagaaacgctgttgaagtcattcatgggaaagcacgattcacaggccgtaaaagtattgaagtcaacggtgaaacgctaacggcagattatattcttatcgccacgggggggcatcctgttcgtccttcagtacccggtgctgaactgggaattgattcggacgggttcttcgaactgaatgcattgccacgcaaagtggccgttattggcgctggctacattgcagttgaactcgctggcgttctgcaatctcttggctcggaaacacatcttcttgttcgtggtgataaacctcttcgtcattttgacccgatgctcggggattctctggctgcaatgatggatgagtcagggatccatcttcaccgacatgccattactgctgccctctcaaaagagcaggatggttcagtgacaattaccacagcctccggagagaaaattgttgtggatgttgtgatatgggcaacaggccgcaaacctaatacgtccggcttaaatatcgaagcggcagaggttgctctcagtgaagagggttacatcattgtggataaataccagaatacatcggctgaaggcatctatgcagttggcgatattaccggtcagcttgagctaacccctgttgccgttgcggccggtcgtcgcctttccgaacgtctgttcaacagcaagcccgatgaacatcttgattaccataacgttcccactgtcgtattcagccaccctcccataggtacagttggactaactgagcctcaggcccgtgaaaaattcggtgatcaaaacgtcaaaatctacagtgcttcgttcacttccatgtttactgccattacccatcatcgtcaggctaccaggatgaaactggtatgcgtcgggctcgaagagaaaattgtgggcattcatggcattggagaaggaatggacgaaatccttcagggatttgcggtggcactgaaaatgggcgcaacaaagagggatttggataataccgtggccattcatccaaccgcagctgaagagtttgtcaccatgaagggctga

SEQ ID NO: 267501 - DNA, 834 bp, Klebsiella pneumoniae
atgctctatgagcgtacacatcatcagccaccctcccgtcatccgggctacgtctcctccccaccgtctatgcgagtagcaggtgggatgcgcctgcttacggaacggctggaagagcggataaactctgagcgtctttacactgatacgcgtgtagtacgcattgaaaaagcgggcagggagattcagattcatacgatttcatctgaagagatttgtcgggaatttacagtgggtaacgtcctgctggcccttccacccgcgcttgcagcaaatatcgaatactatccggcgctgcctgcacggttatcagaagagtgggctaacacgggaacctggatggccccgcatgccaaatatgtggctatttatcaggatgatttctggcgtcaggcgggactgtcaggcgaagcccggagtgctgtggggcctatggccgagatccatgatgcttctgttcctggcagtgtttacgctctctttggattcctgggcgttccggcacgagcccgctggaccacaagtgaagaaaatcttaagtcattatgccgtgcacagttaacccgtctgttcggtgagaaagcatcagcgcccgttgctgaatattttaaagactgggcagacgatccttataccgcaacggcaaaggatttacttattcaggcagggcatacggtgcctgccgcttttcctgctatgggaccatgggcgggcagtttgtgtggaattgcaagtgaatggtcagaccaatttccgggataccttgcaggtgcagtagatgcttccctggaaggcgtcaggcaggtgcagcaaaaaatagtccaagataactga

SEQ ID NO: 267502 - DNA, 684 bp, Klebsiella pneumoniae
atgttagttaatcacgatttcgcccgccgggcttctgttagacccacagaatacgactgggtttcatccccccgggctggggtcgatcgtgtcatgcttgatcgaataggcgcagaaaaagcgcgtgcgaccagcatcgttaaatatcagcccgggtctcattttcctgaacatcatcatccggatggagaggaaattctggtgctttccggaattttttcagagggcaaggatcattatcctgcaggctggtatatgcgaaatccccctgattcagcacatcagccttcaagcagtgtcggtgcaatgatttttgtgaagctccggcagatggaccagggagagcacgcccacgtaaggctggacacgaacgacagtgataactggcataaagtcgcaagtggtgaagaatgtccgcttttcagcaatgcgcatgaaaaagtgatgctccgccgtcttcttcctcatagccccgtttcgatggacgcggttaccggaggtgcggaaattctggtgcttagcggtatgcttcatgaaaagagagtgatgtggcctgcaggcagctggctcaggtttccttcaggcgaccggcctgaactgatgtccggagataccagcacgctaatttaccttaaaaccggccatctggaacacgacgcttatacggggcttaatcatgaatga

SEQ ID NO: 267503 - DNA, 345 bp, Klebsiella pneumoniae
atgcttttagactggaatggccatcgtgatgaactgctcggtgttgtaggcgaatacgcgaaactgcagccagagtttatgaaaggtctgatgaaaatggatgccggtgcttcggctatgggacatctggataagaaaactcatgagcttatcgcgctggccgtagcgatcaccactcgctgcgacggatgtctgtcagttcatgttaaagctgcggctaaacagggcgccactcgtgaagaaattgctgaggcactcgccgtcgcgatttctctgaataccggcgctgcactgacctatacggcacatgcgcttgatgcgtttgatgcattaccaaaagagtaa

SEQ ID NO: 267504 - DNA, 282 bp, Klebsiella pneumoniae
atggcttatctgcaaattacgctcaatatcagtgaaaaaaaccgtgaagctgccgccgggatatatcagaaatacaaagcccctttcctgaaagacattgatggtgctgtttctaaggaacttctcgtgcgaaaagaagacgtccaggttttacatggctttaattctgaaaaacaggccgaagcttacctgacctcttcgctgttcacacacgatgtggtggaagggctgaaaccttatctcaacagtgccccggatattcgtatttacactgtcgcttaa

SEQ ID NO: 267505 - DNA, 936 bp, Klebsiella pneumoniae
atgaaaatccctgtccatctcaatgcattgcgtgcgttcgaagccagcgcacgtcatcaaagtttttccctggcagcagaagagctacatgtcactccggcagcggtcggacaactcgtcagaacacttgaagatacggtgggctatccgctcttccagagaagtggcaaccgccgggcaggcctgattctgactgaatcggcattaagagccttgcctgatattcaggcgggttttgacagactgagtatgggcatgacacggctgcgggaaggcgctactgacggagtcctgaacgtaaccctgagccctgcgcttgcggcaaaatggttgctaccgcgtattgaggattttcagaatcgctggccagatattgacatccggctccatacctatttgaaactacttgattttaatacacaagccatcgatattggcatacgctatggaagcggtaaatgggaaggagtggagtccgaactgctgatgtcggaggatgtttttccggtatgctccccgtcactactgaaggccaatccggtggtgaactgcctgaccggcgtcacctctcagatccttattcatgacctttcaatggagagtcataaagattttctgacctgggaacactggctaaaccattttaacaagcatgaaatagcacgccgtcccggactacgaatcaatagttctgctgcagtactacaggcggcagctgaaggacagggcattgcgcttgcgcgcagcatcatggttcaggacgatatcagaagtggacgcctggtacggttgtgtcccgaggtttgtctgacatcgccgctcgcatattatcttgtctatcgttccggttgtgaaaatctgcccaagatttcacttttcaggcagtggatgcatgagcaagccagggcggctataaatcttaacctgaatccctga

SEQ ID NO: 267506 - DNA, 927 bp, Klebsiella pneumoniae
atgcgatcacttaacagacttaaatggctacatgccttcgaagcaacggcgcgtcacggaagttttaaaggggcagctgacgagctgggcgtgacgcctgctgcggttggccagctggttcgggcgctggaagagtgggttggacatcctctcctgctgcgctcccgcagtggcaaatcacgtttaacactcgtaagtgaggcgcaggatgcattaaaggatatttcgcacggcctggatgagcttgaatcaggtctgaacaagctacgcggacgcagagcacgctccgttattgtattaacagcctcccaggtcctgctgatgaactggctgatggaacgcctcaaccgtttttcagagcaacatcagaatatcgacattcgtctggacgtgacggaaaggttatctgatgtgattcatggagaggccgatcttggggtcagatgtgggcccggggactggccgggcctgagcaaaacctggctcatggacgaggaagccgtcattgtctgcagtccccggcttctggcgtcaggagtcagccccacaccgcaatggctggcaaatgaaaaacgtatagaggacgatacgccacatccgggtgcaggatttccttcctgggagaccattttcaaacggatccaggcaccgccgtcagggagcacaaacttgcacatcaactcaacggcaacagtgataatgaccgctctcagcggacgaggcgtggcggttgtcagacgcgcgctggttcagcaactgattgacaccggccaactgatattacttttcccggaacatcgctggcccctgacgtggtcttattatcttgtcatgtcagagcaatcaagaatgcgtccggaagtaaaagtgctgcacgactggcttgttcaggacgtcagtgacagccttgtcagggattcaggttaa

SEQ ID NO: 267507 - DNA, 777 bp, Klebsiella pneumoniae
atgacagcactattttctggtaaaaaacttctggtcgttggcggcacaagcggtatgggctttgaaactgcccgtcaggttcttaaaaatggcggcagtgtggtgctggtggggaatcgtcaggataaagctgaggaggcacgccgtacgctgtcaaacgaaggtcaggtctcgatcatcgtcgccgatctcatgaaagaagaaggcatgaaacacgtgactgacgttatcaaccgcgaacacaaagacatcagcttgatggttaacgcggccggagttttctttccaaaaccttttactgagcatgaagaagcggattacgacatgtatatgtccattaaccgtgcttcgttcttcattacccgtgatgtcgttcgtaatatggtaagcggaaatatcaaaggctctatcgtgaatatcggctccatgtgggcgcagcaggctattggcgcaacgccgtcatccgcctattcaatggcgaaagctggcctccatgccctgaccaaaaacctggccgtagaactgggtgaaaaagggatccgcgtaaatgccgtttcaccggcagtggttcatacgcctatttatgaaggatttattccaaaagatgacgttaaaagcgtcatgaatagcttcgacagcttccatccgattggccgtgtcggtactccgcaggatgttgccgaagctgtatgcttcctgctgtctgagaaagccggttgggttactggtgccgtttgggatgttgatggtggcgtaatggctggccgcaacgcctga

SEQ ID NO: 267508 - DNA, 552 bp, Klebsiella pneumoniae; identical to SEQ ID NO: 168387

SEQ ID NO: 267509 - DNA, 834 bp, Klebsiella pneumoniae
atgtacagccgagtatttctggcaatggtggcttttgctgctaattcagtattgtgccgttttgcacttaaccagcagcatatagatcccgtctctttcagtgggctcaggataaccggtggtgcaatcatgcttggttttatgctcatgcagtcccgtccgcgacaatcttctgaactgagctggctcaacgccttgctgctgtcagtgtacatattcgccttctctatggcttacgtggcaatggataccggaacaggtgccctgattttattcggtacggttcagctgattatgacggcctggggcctttatagaggcgaaaaaatgacgtcgataaaagcaacggggctggctctggctgtcacagggattgccattttgcttctacccggggccagagcgccatcattattcgctgctttactgatggcgatatccggcgtggcctgggcagcgtattgcataaccggaaaaaaagtcaggcatgcaaccaatgctactgccgccaattttattatggctgcgccctttgctgcgctattcatgctgctgtacaggcatgatctgcatgcggacagtgccggtattctcctggcggtcacatccggtgccattacgtctgcccttgcctacgtactctggtattcgatcctgcccagccttacatcgacaatggcctcaacagtgcagctcagcgttccgtgtcttgcggtactgggaggcatactatttatgggagaggttctggatttccatatcattttgagcaccgtcatcatcctgggagggattagcctggtgataggctctgaaaagcagcataagacctga

SEQ ID NO: 267510 - DNA, 753 bp, Klebsiella pneumoniae
atgaaaaaagaaaaatttgtttttgaaaataaccaagggcaaaagctttctgctctgttagagttgcctgataaagtcagggcatttgccttatttgctcactgttttacctgtggcaaagatctgaaagcggcatcgcgtattgcccgagtactgacgcagcatggcattgctgttcttcggttcgattttaccggactaggaggcagtgacggcgacttttcaaataccaactttagttcgaacgttgaggatctcaggtcggctgctgcgcacctcagagataactttcaggcaccttcacttttaatcggccacagcctcggtggctcagccattctgtctgttgcaggtgatattccggaagcaaaagctgtcgtcacgatcggctcacccggagagatatcccatgtaaagcggctatttgaggatgacctgtatgccattgaaaaactcggcgcatttccagttcatcttgccggtcgtacgttcctaatccgacagcaactggttgatgatattcatcagcaaaaaatatcagaaaaagtgttcagaatgaataagcctcttcttgtttttcatgcgcctgaggatgatacggttctgattgaacaggctgaacatatatttaaatcagccagacacccgaaaagttttatttctctacacggagcagaccatcttctttctgataataaagactcagaatatgtaggtgaatgcatcgtgtcatggagttctcgttatctctaa

SEQ ID NO: 267511 - DNA, 339 bp, Klebsiella pneumoniae
atgacatcaaaatcagctaaccgttactcacctgaattacgtgaacgtgctgtcagaatgttgctggaacagcgtgatgattacgcctctgaacatgccgccatcaaatccattgcgcccaaaattggttgcagccccgataccctccggacctggctgcgtcagcatgagcaaaatgccggcccggcgtccgcgcggctcatccacaacgaggccggaaaaatagtcagaagcgttcccagcctcgcggccgcgattggctgcgtggccagttccggcgagggcgcgagcatctgtcccgcaagaccgccacccgacaaggtggcattttttatttaa

SEQ ID NO: 267512 - DNA, 375 bp, Klebsiella pneumoniae
atgcctgtaccgccttggggatctgtctggctggagcgcgataacctgctgatgggcgataccaccgctgagtaccgggcgtttctgcattctcagggaatgacttttaactcgcgtcagaatgaaccggaagatcagtttgggctgatgttgttagcctgtagcgcgctactggatgccggaaaagatgcggcggttaatcagttgttagaggtttatttgttaccgtggggatatcgctatcttgaacggctgcagtgcaacgtgatgagtccgttctatgcccgtcttgccgtagtaaccatgcgttatttgcaggatgtgcagcagcaacgagcgttgaaacctgcggtgaaacggttgtactttggatga

SEQ ID NO: 267513 - DNA, 1206 bp, Klebsiella pneumoniae
atgaagtacaattttgatgaaattatcgacagaaaaaatactgatgccctgaactacgatgggtggcgacaatatatatttaaagccgacaagaatgcccgctttgactttaaggacgatgaatttgtcagaatgtgggttgctgatatggattttgcgacacctccggagatccttgcagcgattaaggagaggcttgacaaaaaaatcctcggttacacaaaagtttacgatgatgagtactatcatattttccacaactggtgccagagacgctatgactggaatatagataccgcggaaatcgtgctttcaccaggcattatccctgcacttaaccgtttagtaccgttactgacacaacaggatgagagtgttttgatcaatacaccatcctatacgccttttaagcaggctggagactatagctatcgtcgagtgatctgttctgatttgctggaacaggacaatgaatacgttatcgacttcgacgatatggagacaaaactaaccgatccctctctaaatattaaactgttcattttatccaatccgcagaatccgaccgggaaggtctggtctgaacaagagttaatgagaatggggcagttgtgccttgaaaatgatgtctggattatttcagacgaaatacactgtgatttactgagaaacggaatcagtcatatcccaatggcaaaacttttcccagacactgataagatcatcacctgcatggcaccaagcaaaaccttcaaccttgccggaaacctgatgtcacatatctttatcaaaaatgaaaagatcagaaaagaatggctgcgtctttatgatgagtttctttcaccactgagtgtggctgcgaccaaggcggcctggtcccgatgcgacgagtggctggaacaattgaaacactatcttgatgataatttcagactggtagaaaaatttacccaagagcactttcctgacgcaaactttaaaattcccgacgcaacttatctggcatggataaatattgagaaatacctgccaccgcaggtagacagacaacagctttctctctacttcgccaaccagacgggaattctgctcgaaggtgggaacatgttcgtaagcaatggagatggttacatccggattaatcttgcctgtccacgcgccgtggtacaagaagggttagagagaataagaaaagcactgaaatag

SEQ ID NO: 267514 - DNA, 1308 bp, Klebsiella pneumoniae
atgaccatattagaacagaacatcgacagggcctcattgtcaccagaggagtggaaaaaactaacccgatttgacagtacagatataggatggattattataagcattggtatggctatcggtgccggaattgtgtttttaccggtccaggtgggacttattggactgtgggtattcctgctttcatccatcattggttatccagccatgtacctgtttcaacgattgtttatcaatacgctggcagactcacgagagtgtaaagactatcctggtgtcatcgagggatatttgggaaaaaactggggaatgctcctcggtctgctctactttctcatgctggtcatctggattttcgcctaccctacagcgttgactaacgatacagcttcgtatttacacacatttggcttaactgaaagtcttttatcagaaaatcctttctatggcctgattcttattacatttcttgtgcttattgcttcacgtagtgaagaactcttgttcaagatttcctcttttatggtgttatcaaaactggtggtagtgcttatcctggggttgatgatggtcagtatgtgggacctctccaaaaacatcggttcattcccttcccttagtattttaatcaaaaatgcaattatcaccctgccatttacactgacatctatcctgtttattcagtctttgagtccgatggtaatttcatatcgtgcaaaaaacaaatctatagaagtggcaagatataaagcactgagagcaatgaatatcgcttttggtacattgtttatcgttgttttcttttatgcattatcatttactttcgccctcggtcacgatgaagctgtcaaagcatacgaacaaaatatttcagcactggctattgccgcacagtttattgaaggagatgcagcaaagtatgtgacaccagttggtgtggcattaaatatctttgccctgatgaccgccttcttcggtgtttacctcgggttcaaagaggccgtacaggggctggcgatgaacgtattgactcgctttattccgtcagagaaaatcaataaaaaagcacttaacgttagtatcgtcattttcactatcgctatcgcctggggggcaatcgttctgaacctgccggttctgctgttcacctcaatctgtagccccattttcggcatcgttggttgtttaatccctgcttatctggtttacaaggtaccctctcttcaccgatataaggggttttctctgtatctgatcatctttactggcatcctgctctgcatttctccgttcctgaaattcatttaa

SEQ ID NO: 267515 - DNA, 825 bp, Klebsiella pneumoniae
atggaggccttgggatttagtttggataaatcgtgcattgattcaatcctcataaaactgagagaattttccggaaagaaccatattttttgtgaagtttctaattttatcgcgcataacaaagagcgaaacgaaggtaaatttagtgattatactaatgcaaatttccttaagctcatgttttttataaagtacacttacaataaagagcaattcgatattgtaaaaggtgttccgttttgggtatcggatttggtttctttactcattgcagaattgagtgaggctgaatgccagaaaaaattcaggaagagtaaggcaagtataaaagaacgtatcagacagaagtttgctgtgaaagataaagttttctcagctaagcctaatgcaaagaaagttgatgtagaaaatttagttaccattctttcatcatttgcaattcattcgggaaacgttttccatccggatgatttctttgatgaatttgtatcttgcttgagagagaatggcatcatgttttccgaggacaccataagagagtcaaaggatgagatcctcatgtgtgtgcttctcctccttcatcgaactaatttcaaatttaagtttttatcctctgcatctatctcgatttctcaagaaaatggcaatttattgctacttgctactcttaaattggagcctgtaaatgtaatgatagtggtcctgttaaccaatctttctgtagtggagtggtgttctaaagacgtttccgatgctttaagtaggactaaagagctcccagaaaatgtaacgctcgatgagaacttcaaactgtcatttttctag

SEQ ID NO: 267516 - DNA, 222 bp, Klebsiella pneumoniae
atgaagattgagttagtcgtggacggatgccccactgctgaatgcaacagtgaggtggagtttctggcttttcaagcagctgtttttaatgcgctctctggtatgcagttacgacatgaaacagagcgtagggagcgcgcaaaatcgaagatggcgcgcctaaatgagacggtttttaaaacggctcccaaggatcgcaatgaagcggatcgagaagcttaa

SEQ ID NO: 267517 - DNA, 585 bp, Klebsiella pneumoniae
atggccagtgacgttgcaaaaatccggaatgccgcctcatccaccctgacggtgcggcatatccccgctgatgttgatacggccatcaccgcccaggccagagcggcggggaagtcgaaaagtgattttattcaggccttcctgtcggcctcctttggcgacctgatcggcaatttctcccgcagcagcgagctggtcgccctgatggatcgggaactctcgcaggtcaccggcctgccgctgacggagaactggtatgacgccggacgcaccctcgtggaaaaccgggaatactgctgcctgctggacatccgttgctacgccgatctgcagcggatcatgatggccggcgtgccctggctgtcgctgcgtgtgcagcagctggacaccggcatcccgctgctgccacaggggatctccctcacctgcgcccttttcatcgaagctgcctgtcgggaacggccacagctgaatatcttccgccgccatctgttctggtacatagaagaatcacagttctggcatgatgtgggcaccatccggactgcccggctgctgccggcgtttgtggatacggaatactga

SEQ ID NO: 267518 - DNA, 1242 bp, Klebsiella pneumoniae
atgaaaagaatttccactcagttatattttgcagaagtaagagaagaacaaattcagtcatctgttggctatatatgtgctgaatgcaataagaaggcttattatttcaacaaaaaaaacactcaactaaattccgggaaacaatgcctgatttgttcagagatccggcctgatggtattctggttgaagatttcgagtccaccctgcggcgtcatcttcgtgatcactatacccttgaggacagtcgttcgacagacacactcctgctgaaggacgttctgaaacgatttacttatgataatgaagacttcctggagctgctcgtcgcattactctgccagccagacgatccctttttccaggagggcgggtggtacagaagtatcgtcgatgaggcttttattaccaggaacagagcggacgcactccgggaatgggaaggtatcgcgaatgaactgaaaaacgtccggcgttttaaccatccaaaggcatgcagttactatgccgccctgattggatcatgtttccaccaatgtgaggaagagcagggaagaatcaactcagcattgacgatcctgcaaaagggggaggtattgtaccggggacgtatcgccaggaataatgaacaaaaaaaggctttcctctcagatccggttaaggaactgtctgcaccgccgaatcatctggccaccaacagccgcatgagcccaccgggcatagcctttttatatgccgcgggcgactataaaaccgctattgcagagcttcatccatttgtcggtgacaccgttgccatcgggcaatttgtcataacccgggagctgcgtttttttgattttacgcttttggagaaaatagtttacgccgatgcccatattcttgacaacccgacaaaacataaaactttcaggaacagatacctgatgagttctcttcatcgcctgatcgccagacccctgcgcgcaaatgacaccaattatattgagacacaggtgtttgctgaagtcattagtagttacaccggtgaaaaatatgatggtattatttttggttcatcacagctacctggggggattaactacgttatcttcggtgatattccagacactgatgacctgaatggacaaaagaaagattatcacgttgagtttaaccaagggataggtgtgacgctgtaccggataacagaaatgcgcgctcagacagaagtagtgccgccttcgtatccggttatttcataa

SEQ ID NO: 267519 - DNA, 867 bp, Klebsiella pneumoniae
atgaaattcaaccctgcctgtacttccactgatgtgatggggatactgaaatcataccgtgacgatctgctagaaaaggagttgcgaaagccctcctggccagtgctcgaaaggctcatttcacgtgatacagagatgaatcaggtgtggaatgacatcgcgcggcatgcgctcaccggggagcagtgctggaatctgctggaacagatattctttgccggggcctacggaactggtgagcaccacacacgcctgaagactgaccactcaagactcgctgtcctgaatgagggtattgccgaaaaggccgcagaactcggtagaatgctgactgaacgggaagatattcttaaccgcaataaatttgacattgaacatacagcccatatcgtagatctgattgatgcagcctccagccagaacggacattaccgctcttttttgcgtgaaaagcttcatggacttcgcacccagttcggttgcaaatactggccttcgctacagcagctcctgcaggtgacggcgaaagaaaataccgtggtagctttcatggaccggagcgatgaagctatcgcccatgcacgaggagctgcggtgccggatttcctacgccggctgttcagtaatttgcatgacatccgggtcatgaaaggggacttgcgcacagaacacatttatttgccgactaattttcggctgactgacgcaagtctggcgaccctggcctctgtttccctcgatctcgatgagcctgtcaccgtggacagtgtcaagatgctgcgtaccagattatataatgccggttatccgggagcctgggcaactcccgttacgaacaaaccggggaagtcaggcatcagtgtgtga

SEQ ID NO: 267520 - DNA, 513 bp, Klebsiella pneumoniae
atgcgggaaatagttgtggtgcaatacaatgaaaaatggcctgagatgtttgaagcagaaagttttctgatacagtcattacttggtgacgtggtcaggaatgtttatcatattggtagcacgtcagtgcctggcctcccggccaagcccgtgattgatatacttctggaagtaacagatctcaaccagctggatcaatgcaattctgcaatggccaacgccggatacgttgctcgcggtgaaaacggcatcgccgggcgccggttcttcattaaggggggggatctgcgtagccatcacgtgcatgcgttttctgcaggggacatacagataccacgacatcttgctttccgtgattacctgaggaaaaacactgatattgcaggggaatacgctgagataaagcgcgaagcagcattgcggtgtgagaacgatgcacagtattacagcgccctcaaggcggactttataacgcatcatctgcaacttgcgctgactgagctggaacgatag

SEQ ID NO: 267521 - DNA, 789 bp, Klebsiella pneumoniae
atgataaccagaaaactgatgctgtacatgacctgtttcagtctgaccggactggcgaccaccgcccgggccgatgacgccagtccgcagcaacccacgctgtcggtgggcctcgccggtcagaatcagccccgttacagcgggtcagacaagcggcgctggcaggtggttccgctggtgcagacccgcgacgggtcattcttcctggatacgcaaaaggggataggctacgacctgcagagcgacagcgggctttacctggaacacaccctgggctataacctgggacggtcagatcgggattcggactggcgggacggcagtgataaactccggggcatggggaacatcagggcaaccgtcaacaccgcctttgcggtgggctggactctgacgccctggctgacagtggaaggaaaagccacgctcccgctgagcgacagtcagggggtgaattaccagacgtctgccacgctcattccgttacagacggacagtgacaccgtggcgttctcagtggcggccctgtttggtgacagccggtatatgaacacggtttacggcgtcagcgaccggcagagcgaactctcggggtatgccccgtatcatgcgtccagcggattttatggcaccgacagcaatctgacctggagccatcagttcacaccggcgtggggcgcactgctcagcgtcgactacacctggcttgacagccatgcaaagaacagtccgatcgtcttcaggcacaatgaaacctcggccacgctcggcgtgctgtatacgttctga

SEQ ID NO: 267522 - DNA, 693 bp, Klebsiella pneumoniae
atgtccggaaagcgaatactgattattgaagatgatgccgacgcggcggacgtgctcagcgcctatctggcgcgtgagaattatgcggtcagcgtggcgggtgacgggccgtcggggctggaaatgagtcagcgtctgaagccggatcttatcctgctggacgtgatgctgcccggcatgaacggtacggaggtgctggcggcggtgcgccgccgggggaatacaccggttatcatggttaccgctatgggggatattcccgacaggataggggccctgcgttacggcgcggatgactatgtggtcaagccctacaatccgggagaagtggtggccagggtgcaggcggtgctgcggcgtgtgatgcagacgccggaaacccctctgctgcgctggctggggctcgaggtggatacggcgatgatgactgccggcgtcagggatgagcgcggagagctcgcggcacttgtactcacgccgacggagttcagcctgctggcgaccctgatgcaggcaccggtgcgccccttctcccgccagcacctgctggagcactgcctgccggagagtgatgcgctggagcgctcggtggacacgcacgtctataacctgcgcaggaagctggaaactgcagggatttccggcgtgctggtcaatgtgcgcggcgtcggctaccggttttctcagccatga

SEQ ID NO: 267523 - DNA, 1182 bp, Klebsiella pneumoniae
atgaacacgttacagcagcagaccctgtggcgctggatttgcctgcgtattctggcgctggccatcggttccgtggtggtgattgccgtgtgcatgtggctgcgttttgccgtgcagaacctgtggatcctgcaccgtatgccgcccaccctgcgtgatgaatttatcctcctgcgcgcacaccctgaaaccaatctggcccgctttcatgagattgtcgacacgtggtggggcgtccggttttccgacccttccgttgactccgctgactggctgacggtcggtatactggtgggggtgatgataccgtttattgtcatcctcgggctgcgggcggcccgtccgctctccctgcagttcagccgccttgccgcggcagcgcgcgctgttgctgctggcgactttagtgcccgggcggtgcaggtggacaacgcgccgctggaagtgtcccgcttcacgcaggacttcaatactatgatgcagcagctggcacgctatgaccgtgaactcagggcttcccatgtggcgatggcccatgagctccgctctccgctgacggcggccatcggccgactgcagggaatgatggacggcgtctttacgcccgagccccggcaactggcaatggtcatgaaacagctgcagctgctcagccggctcacggatgaactgcacctgctgtcgctggcggatgccgggcagctcacgctgaataaaacgcagaccgatctcaccgtcctgttgcgcgagcggacggcctggcttgggccgcaggcacaggccgccggcatgatcctgcgcgtcacctcccgtgaaccctgcctgtccctggcggacccggtccggctgggccaggtcatcaccatcgtgctggaaaatgccctgcgctatgcggctgaaggcggggaggtcacggtgtctgcgcaggcgacgccggagggggcccggatggtgtttcgtgaccggggaccgggcgtgccggcggattttctgccggtgatgtttgagcgtttcacccggggtgagtcgtcgagagcgcgccactcgggcggcagcgggctggggttatccatcgcccggggtatctgtgaggctcacgggggggccattcacgccgcgccgggggagtcgggaggactggtcattaccgtcaccctgccggcacatcacgaccggaaataa

SEQ ID NO: 267524 - DNA, 1146 bp, Klebsiella pneumoniae
atgacggaaaacttccccgatttcaccgactgtgtgcggcaggcgctgcgccatcttttcacgactgcgcggctgagcgcgctgttgccggtggtgctgatgctgccggtgttccttctgcttgccgcctgcggggacaagccggaaaaagcggcggcgccgcgtccggtgcgcaccgtgaaggtgcccgcgccttcggttaccggagcattactgcagaccggtgaaattcgtccgcacgatgaggtgcccctcgggtttcgcctcgacggacggctgctgacccggtccgtggatgtcggtgaccatgtcgccacaggacagatactgggcacgctggaaaataacaccagtcagaaccagctgaacagcgcgcgtgccgaccttgaaagcgcgcgggcggcggagcagctggcggaacttaacctccggcgaatgtcgcagctgatgccttcgggtgccatcgcccgcgtgcagcttgatacggcccgttcagactggcaggccgccgcggcccgccggcgcagcagtgaggcggccctgaataccgcccgggagaatctcaactggacgcgtcttgttgccccggccaccggtgtggtcacgcaggtcagcgccgagcccggccaggtgctcagcgccggtcaggcagtggtgacgctggcggtgagcagcggacgtgacgccgtgattgacgtggcggacccgcaggcgttttcgcgccctgccggcagtttcagcgtgtcactgctggctgacccggcggtgtcggtcaccggtaccctgcgcgacatcagcccgcaggccgatgcgcagacccggacctggcgcgtgcgcgtcaccctcggcaacccgccgccggccatggcgctcggtgccagcgtccaggtcggactggcgggtaccgggtctgccgtgatgcgcctgccttccggagccctgacacggatgcagggcagccctgcggtgtttgtggtggacgacgccacccggcggctgcagctcaggccggtgacgcttgccggcttcacggcatccgacattctggtcagtgccggcattcgtccgggggagcgggtggtgaccgccggcgtcagcaaactgcgtgagggagaggtggtggcttccggggagacgggcgaatga

SEQ ID NO: 267525 - DNA, 3099 bp, Klebsiella pneumoniae
atgagtcactcctccctgaagcagacctttaacctgtctgagtgggcactcaggcatcagcagcttatcaccttcctgatgctcatggtgatggcggccggcatcctgagctatgagcagctcccgcgtaatgaagatcccgcttttaccatcaagaccgccgtggtgtccgcgcagtggccgggggccaccgtgcaggatacggtgaatttagtgactgacccgctggagaaaaaactgcaggaaattccgtacctggactacgtggaaagcaacacgcacgccggaaaggcggtgatattcgttaacctgcgcgacgacacgccgcccggaaaagtggcagatatctggtatcaggtgcgcaagaaaatggtggacgtgacatcttcgctgccggagggggtacagggaccggcggtggatgatgagtttgacgacacctttggcaccatttatggctttaccgccgaagggttcaccccgcgcgagctgcgcgaccgggttgaggacatccgccgcagcctgatgtcactgccggacgtgggaaaaattaccctggtgggcgtccaggaggagcagatagtggtgtccttctcgccccggcagctggcgggcatggggctggacctgcagcaggtgagcgatgccctgaaggcgcagaacgacgtcgtgccggcgggcacgctgcgcacggaccgggaaaacgtggccctgcgggtcagcggggcgctgacctcagaggatagcctgcgggcggtcacactgcacgtgaacggccgctacatacccctgaccgacattgccaccgtccggcgcgaaatggccgagccccccgcgccggcgttccgggtgaatggtcagccggccatcgggctggccgtgtccatggctgccaccggcaacatgctggattttggccatgccctgaacgcgcggatgcaggccctcggtcagcagctgccgcacggcatagagatggtgaaggtggccgatcagtctgcggtggtcagccaggcggtgagcggctttgttcgcgtactggccgaggcggtggtcatcgtgctggcggtgtcgtttgtatcgctgggcctgcgggccggcctggtggtggcggcggccattccgctggtgctggccatgaccttcacggtgatgctgctgtgcggcatcggtctgcagcgtatctcgctgggtgcgctgattatcgccctggggctgctggtcgacgacgccatgataaccattgaagtgatggtttcccgtctggaggcgggagactcacgaaggcaggcggcgaccagtgccttcagaaccacggcgttcccgatgctcaccggcacgctggtgatgattgccgggtttattccggtcggctttgcggcctccagtgccggggaatactgctttaccctgtttgcggtggtgctgatttcgctgctgtgctcgtgggtggtggcggtgctgttctccccgctgacaggcgtctggatattaccggcacaactgcgcaacgcgcatgaacacaaggcgccgggcaggctcaggcgcggttatcaccgtctgctgctgctggccctgcgccaccggctgatgacgctggcctcggcgctcggcctgctggtgctggccgcgtatggcaccacctttatgcagggggaatttttcccggcctcggaccgccccgaactgctggtcagcctgacgctgccggcaaacgcttcacagactgaaacggcccggcagaccgtccggctggagcaggcgctgcttcacaatccggacgtggaccatttctccgcctacacagggtcgggtgccatccgcttttatctgccgatggatgtcctgctggacaatgagaataccgcccagctggttgtggtggcgaaagaccttgaatcccgggaccggctcaggcagcagcttgtcgccctgctggcccgggagttcagtgacatcaccacccgcgtctcgccactggagctcggcccgccggtcggctggccggtgaagtaccgcatcaccggtccggattatgcgcgggtgcagaccatcgcccggacactggcgtcagtcctcggcagcagcccggtgacgcgtgaggtgaacctcaccgccggcgagccggagcgggtcatcacgttacaggtgaaccagacggccgcgcgggcggcggggctgtcttcagaacgtattgcgcaggcgctgaatgccgtctggtcgggcagtaacgtgaccacggtacgcgaccataaccggatgattgacgtggtgctgcgtgcagataacgccgagcggcaggacctttcgacgctgtccgggatgctgctgacgaatgaccggggagataaaattccgctcggccaggtggcctcgctggcatggggcgtcgacgacccggttatctggcggcgacagcgtctgccgtatattactgtgcagacggacctggcccccggcatgcgtgcagaggcggtatcgcaacacctgatgcaggcagtgaacaaacttcgctctacccttccgcccggctaccagatagaggaaggtggcacggtggccgagtcggacaagggtaaccgctcggtgtatgccgtgctgccggtgacgctgtgcgtaatgctggtcctgctgatgatacagctgcagcgcttttcccggatgctgctggcgttgctgatggccccgttcggactcattggcatcgtgctggccatgctgccgaccggtacgccaatgggctttgtggcactgctggggattattgcgctggccgggatgataatccgcaatgcggtcatcctcatcagcgaagtggacagcaacacgcagaagggtctgaccggcaatgacgccatcatggctgcggctgagcaccgggcccgtccgatactgctgaccgcctgcgcggcgattttagggatgatacccattgcggaacaggtgttctgggggccaatggcatacgccatcatcggcggattactggtggcaaccctggtcaccctgactgtgctgccggcggccatgagtctgattatgcagaaagagcagaggcgtaccggtgggctcagcgccagtcatcagactgaagagtaa

SEQ ID NO: 267526 - DNA, 369 bp, Klebsiella pneumoniae
atgcaaaacataatcattactgatctcattgcgtggatagaagaaaacatcatcccggcactttcccttgatgatattgcgggaaaatcaggctattcaaaatggtatttacagcgcatgttcaaaaaaataacggggttgagtatcgggcaatatgtcagggaaaggcgtttatccgaagcggcaaaggatttactgagctcacacgataccatattaacaattgcgttaaaatatggttttgagtcacagccgactttcaccagggccttcagaaaaaaattcggacatgccccgggacagttcagaaaaatgagcgtggataatcataacgaagttgtccagatatggattctggaaaaacgataa

SEQ ID NO: 267527 - DNA, 156 bp, Klebsiella pneumoniae
atggagccattgaagatgaaatcaggaaagactgtcctgctggccagtaacacgttctttttcactgcctccttgtttatgatggcagttaatctgtatctgctggtacaggcatttatttataaaagtattttctggattgattttgatctctag

SEQ ID NO: 267528 - DNA, 609 bp, Klebsiella pneumoniae
atgccaacgaaacatattgatgatgccaccgccgctcagctggacgatctatacgtccggtgcgtgacgctgacccagcagcccgtgaaagaggtggaggtactgcgcctggcgctcatgaaagggattgttaatatcaccgacgatgacattctggcgaccctgtccgttaaagacagcgtctggctgcgcctggcagacacgatctggactgagctcacccgacagtggccggaagaggcgatcaccacggtacattttgagatactggccggcgaattctcggaaacctggcagcagctccccagcgggcgctgccgcagtgccatccgggaaaagctggaaagccgggtgtctgaaccgctcaggctgttcagcctgacggaggaggatgccactgatgaggacattcgtgccgcagcggaacgggatacggtccgggaagtggaataccgggcggcgctgccggcactgcataaccgacagttcagtaccctgagtcagcatgagaaggcgctggcgcagctctacagcgatcgtgtcagcttcacgccggatggtgcgggggattttgtggtcagcgtgacagagggggcccctcatgcgtga

SEQ ID NO: 267529 - DNA, 882 bp, Klebsiella pneumoniae
atgcgtgatccggacactgccatgcctgaggggagtgcggcgcctgcaccagacgctgagggtgtgccggcccccgtaacgccacgtcccgtcctcgcagccagataccgccgctcacaccgcgacggggagcgctggctgcgaaccgtggccgtcaccggcggggcgatcattctgctcggtaccgtttcagggcaggccgtcaaaaatagcgacgcggcggcctggctgtcgatgctgtttaacggcgtgatggcgctggccgctctcggagcctatctgacagcgcgaaagtgggtaccccagctgaccacccaggaagggtacaaagtggccatcagcctggtcaatgaagagtatatttatctcggcatgcagaaccccctgctgcctgaggcgggccggcttatgtcatgctacaacgaatgcctgcaggatccccggcatatcagcaaggatgattatgcccgtaaaatagacgtcttatccggggctgttcttcatgaaaaaaagcgtaaggacagcattgagcaggcggaatttcgtctgcgcacctacggcctttatgaagctccggcctatgctgatgctctgaaggcgatgaaacagagttttacggacagcatcgatgcggcgcaaaccctagtggccttgcttctgggcgatcttgaatttcagaagaagctggaccaactggacggcctctccgcaaacatcgttccggacatggaaagattattggaaggccgtgcaggtctgaaggaccctgtccagaaagcctatagcaacctggaacgtaaatggaatgacatggtggccttgcataatgctgtttttaacactcacccgcccatcggtgagttatatgctgtccggaaatag

SEQ ID NO: 267530 - DNA, 396 bp, Klebsiella pneumoniae
atgctcgatacccgtttctgcgcgttcatcctgcgcgagcagccggaagccgtgctcgggtggctggagcaggcggtgctgcgtggccaccgtattgtgatttcagccatcacatgggccgagctgtcacaggccgcgcgggaggacagtcccgccacgcaggctctggccgatgcgttctgcgccagtctcgatgtcgtgctgccctgggaccgcgccgcggtggatgcgaccacggaaattaaggcagccctggcggcgaccgggacgccgctgggtcctaacgacacggccattgccggacacgccattgccgccggtgccgtgctggtgacgaggaacgggggagagtttgagcgggtgccgggcctcacactgcaagactgggccggttag

SEQ ID NO: 267531 - DNA, 240 bp, Klebsiella pneumoniae
atgcgctttgctacctatagcttttatcgtcgcgtaacggaagaacaggtcgtcaaaggcgcacgtgctaactcccactttatggagtcactttatggcatttctacgatcaaagcactgaatttaaaagaacgtcgctcacagcattggctgaatcttaacgttgacgccagcaatgcaggtataaagcaaactcgattcgatatgatgtttggtggcattaatggctttgttgaataa

SEQ ID NO: 267532 - DNA, 252 bp, Klebsiella pneumoniae; identical to SEQ ID NO: 267464

SEQ ID NO: 267533 - DNA, 903 bp, Klebsiella pneumoniae
atgctcgctcaacagaacatactggcactattgcatacgtttgaaacggcagcactgcatatgagctttaccaaggcggcgactacccttagtctgacgcaaggggccgttagccaacgcattcgttctcttgaatccatgctcggtttcagactgtttatcagaatgaccagaaagcttcagttgaccgatgaaggggagcgtttacttagcgtgctcgcgttttcacttaaacgtatcagtgatgaaatagaagatattcgcgtgcaggggttgagaggaaccttgtctgttggccttccacctaccttcgcttttctctggctgatgccgcgcttaccggcatttaccgaacggtggcccggcctgaatatcaatttcagagtaagagccggtctggtagattttaatcttgaacgggtagatgtcgctatctactacagtaatctgaaataccccgacctctcctgcgaaaggttatctgaagagacgctggttcccgtctgtattccatctcttgcaaaaaaaatcaggcaagcaaaccattggttagctgaaatcccattcattcatacgtctgaatccgttgattcccagaatgttttttccgaatggcgagaatggtgcagggagtcaggcaaaaacctgcctgtcgaagataattttttaagcttcaacaattgtcaaatgtcaattgaagcggcactcaatggcggcggtatcatcatgggcagaaaacgactcattcgacatttcctcgatgaaggccgactggttgccccatttgaaatagaaatacccgccgggcgaggatatgacctcattatgccacgagaaaatcttaaccgaccgggtgttcaggctttggccgaatgggtaagaaatgtgtttaacgacgaataa

SEQ ID NO: 267534 - DNA, 471 bp, Klebsiella pneumoniae
atggctgggaactttagagtttatttcaaatacgataataatgaatccgagtatcagcaatggtttgatcttgattgtccaaacgtaagtacccctgaaattttgaacgctacgttggataaagtctcaggagctcatggggtagaaatcctaagagtaatccctttaggcgttaacggaaagccagcactttgcgatgaattaaaaatagttgaccgctcaggaaggtgctacggtgctctcgttcagaaggtcggctataaagaatggttctattactataatcttggtgagatttattcacgtacaggaactaaaattactggcaataaattcgaaatcttaggcgttcacggtcattactacgagaataaagatcaggtatttcctgctgaggctcttattgattgggaacggctcagcgttaaatgtattggtgaggagttctatcttgaaccatttgcaccataa

SEQ ID NO: 267535 - DNA, 1953 bp, Klebsiella pneumoniae; identical to SEQ ID NO: 235278

SEQ ID NO: 267536 - DNA, 138 bp, Klebsiella pneumoniae
atgtattacataccattgtacgtagctcttacgcctgtagtgtattggttgttgaagattgtctatgcctattatgtagttaagatcaagaagttacacgttgattcggaatcgttctctgggaatactcatggctga

SEQ ID NO: 267537 - DNA, 693 bp, Klebsiella pneumoniae; identical to SEQ ID NO: 189512

SEQ ID NO: 267538 - DNA, 639 bp, Klebsiella pneumoniae; identical to SEQ ID NO: 189511

SEQ ID NO: 267539 - DNA, 867 bp, Klebsiella pneumoniae; identical to SEQ ID NO: 189510

SEQ ID NO: 267540 - DNA, 1071 bp, Klebsiella pneumoniae; identical to SEQ ID NO: 189509

SEQ ID NO: 267541 - DNA, 204 bp, Klebsiella pneumoniae
atgaatcccgattacttcggtggccgttcgctggccgatactctgtcaacactggtgcatgaaatggtgcacgtgtggcagcattacgcccccgttaaaaaatgccggggcggctatcatgatcgtgtatggggcgcgaagatggaggaagtcgggcttatgccatcaaataccggcttacctggcgggaaaaagaacgggtag

SEQ ID NO: 267542 - DNA, 495 bp, Klebsiella pneumoniae
atgtggcaccgcagacatccccggggtcggcagcaatgcctctcccgggctaccagaccctacccgccaggtagtccggccacgcgcagtaccgccgggaagcgagtcaatcccccctcaccgccatattttaagaagagctcgtacgcatgtacgggctttttttttcgcatgtggcaccgcagacatccccggggtcggcagcaatgcctctcccgggctaccagaccctacccgccaggtagtccggccacgcgcagtaccgccgggaagcgagtcaatcccccctcaccgccatattttaagaagagctcgtacgcatgtacgggcttttttttcgcatgtggcaccgcagacatccccggggtcggcagcaatgcctctcccgggctaccagaccgtacccgccaggtagcccggctaagcgcagcgccgccgggaggatgcccaaaaacaacaaagcccgggctagcccgggccttactcacagtatga

SEQ ID NO: 267543 - DNA, 225 bp, Klebsiella pneumoniae
atgttttattatctttatgattttattgtatttttttgttgtttcattgtcattgtctatgttaacaaaagtatcctaattgttatcacgcatttgtattatgtaaatgctatttattattttaataatacaatagaggtagcgatgttattgctggggttaaatagttttataactaacgtaattggtttagtaattaaaaaacgcgctatattattggcatga

SEQ ID NO: 267544 - DNA, 954 bp, Klebsiella pneumoniae
atgcaattattaaatcgacagcaagaattgaatattgctaaatctagtgcgataggcaatgtaagaataattgatagcgctgtaacccagcataaaccagttaaacccaaaaaaataattgttgtcctagccggtttgtttattggccttgtaatttcagtaagccttgttttagtccggattctattacgtaaaggaattgaaactccagaacaactggaggagttgggaataaatgtttatgctagtattcctgtttctgaaagcaaccccaaaaatgtaatagcaaaacgactaaataaacgagatgacagtagacctaaggttttacttgctacagaaaatcctgcggatcttgctattgaggcaataagaggtttaaggacaagtctgcactttgcaatgcttgaagcaagaaataatctcttaatgatttccggtgcaagtcctaatgctggtaaaacatttgtgagttctaacttatcttcagtaatatctcacaaattatttaatataaaaaacacgaatggactttctgattatttatcaggaagagttgcacttgataaaatcataaataacttacagacagagggctttgattatatatctcgaggttcggttccaccaaatccagctgagttactcatgcataatcgattggcggaattacttgagtgggcgaataaatcttatgatattgtcatattagatacacctccaatcctggctgtggctgacgctgctattatcggaaactatgtgggtactactttgttggtggccagatttgaagaaaacacaccgaaagaaattgatataagtgttaagagattccaaaatagtggcgtaaatattaaaggatgtattttgaatggtgtggtaaaaaaagcaagtaataaatacgggtatggatataattattacgattattcatattcagataaaaaatag

SEQ ID NO: 267545 - DNA, 159 bp, Klebsiella pneumoniae
atgaaggatctcttttatttatttattgctttttttttgttttttttgtcagtttataattcatattcttatatttcagacagaagaaaaataaaaagaatcttccgctcgcgcagaaaagcgatgaatagacgcaaaaaaaaattcaaactattatag

SEQ ID NO: 267546 - DNA, 780 bp, Klebsiella pneumoniae
atgactaccgagaatcagagtaatactatctctagtatcgcaactacatatgttgatagaccagaattagaagttcttcaaatttatgacagaaggaaccctgaacagatatgggggactggtattgttgaaactatttataatgatcccaatacggattccatacaggattattataacgaagacaggattacgatttattttgaacgtataactggtaaggaaaattccaagttctattttactgcttcacatacatatagagatttcccagattcaaaaaaagaaataatttcccttacaggggggagtgtttctatacataactccctatacagaggtcagagaattggtacttggatgatgaatgaaatagttaaatgggcaaagcaatggccagaagctaacattttgaaaataacacttggagaaggagatgcctatgatgaaaacatggaaagaagaaatagattttatgagcagtttggtatcgaatttaattatcacgatgaatcgcggaagacaggggcctcacgccccatgaaagcacataagttaaatacagtagacttttgggataagaataaaaatggtaatattatagttcagaattgccgtgattttatgatttcagtaattactaaaaatgataaattactaaaagaaaataatgaaataaccatcaagaatgaaaaattaaagaagaagataagtttttttgaaagtaacccaatcaaaacagggattaaacaaattctcggacttaataactatagataa

SEQ ID NO: 267547 - DNA, 2877 bp, Klebsiella pneumoniae
atggatttgaaaaaatgtaaacccctgttttacactgaagatgatgaaatttgccttactgatgttcaatatgacagccttgaaaaaggagtaggtcgaggcggcagtgtcctggttgtatcaccaacttcgacaggtaagacattgatcggtatgatcgctctgactaagggccttttagacggagataacgctgtttttttggttacacatagagcattggctcgtcaaaaattcgaagactttaaaaaacaattgcttaaagattttctcgatgatgacccgaccgctttagctctggcaaccggagatgtaattgaggatgccataggaaacccagttcctacaccattaaatacaagattaatggttgccacatacgaaaaatatttgggtatattgtctgcttctggcgttcctaagagcatgacaagaacagtttttgtatgcgatgaaattcaactcatcggggacgagcatcggggccagcaggttgaaatcttactaacgttaatcaaacgagctggttggtcgcagttagtcggtctgtcggcagttctggataatcgtgatgctataaaattatcagaatggttagacatagatttaatttatacaaccacaagagaaagacatttacaatatgagtgccgttctcatgatggtgaaatatatagttgtaacactcaatttcctgagcaaatcaagtcagttagaaatccaacgccagccactggaatagcaagtgcaataaagaattatatcgataataatcggggacagatacccatcattgttttctgtatgaccaaaaaggaaacatataccctcgctgagtctttaattaaagaacataaaataccactaaattcacaaatgagcttagattttgatggtgttcctgagacttttgctaataacatgttgaaagagtttgttcaatatcgcgttgcttaccatagtgcggatcttatcgatgaagaacgggaaatcatagaaaagaaaatcctaaataatgaaattgatgtcattttcgcaacttcaactctcgctgctggagtgaactttcctttaggtacagcattttttgcttcgtggaaaagatgggatttcgacttaggaaaaagtattcctattagtagctctgaatttcataatatggcaggacgtgttggaaggatgggcactgaacatgtagaggggaatattattttctttacgaaagataatactgaacgcacacaagcgctaaaatatttaaagttcggggacatgccacctttaaaaagtagaatagcaccaagaaattttgaaggtttagtattacaattagtatcttcagggctttctgataatatagttgatctcaaagatattgtttttaatacgcttagtggtctagtcgaacaagatactaacttaaaaagctttaatcaatggggcgattgtcttgatgtttcactcgatatgttaattaaagagggtttattgatcaagactgaaactggaaagttacatgcaactgcgtttggaaaagctatatcccttgcaggatttaagcctgaatctggtgtaaatctactcaaattttttgcccataactcagaatggttttccgagaccattttggagaataaatctgctataaataatagcagactaattctatctattttttatgcttgtttctcttgccctgaattcgtaagttatcaggggcgtaaagctacaagatatcttccttatatgttaggtaaaagcgttctactagatccaactagtttaaatataccaatgtatgaaactgtgtggaaggccaacttaccatccttgaatgctgctaaattggcatttagttggatcgagggcgagcaactacgtaagcttgaaaaatcgttagatgcacttactgcgggtacactcaacgaactatatagaaacttaacatggcttcttaaaggggtatcatcggtaattatagcttgcgcagatacaagagtagcttctgaattacgccctgattttctcaatgatcaaatagtaaataacctcaaatttcttccacgatttctaggccgtctcgcgtatagggtcaacactggtcttactgatgatgcattatggttgacttctctaaataaaatctttccagagagaggcttcaaactaactcgtgtagaaatgttaaatatagcttctagcgaatttagtcgtcctgaaatcctttcacaaggagaaaaggatgcagaagaatttaggctaggactatttcgtaatgtaaaaccgacgcctcacaaaaaatctaattggttaagagacgcatctaaggtttggaaagtaaaccagaggaatcttgcggctgaacggcatatctataaagccaaaaaaataggtttggaaaaatatttcgtaaactattattctacacggggtgttgaatatgaacaagcttttgaagaattactgaagttaactggtatatattatacgaaactggacgatggtaaaaaattaggcgctccagattatttattaaacttgtcaaactctccagggcttgtagttgaattaaaatcaaaattgggggaaaacttggttgatttgaatgctgcttctgatgtacttagagcttctgaacttcatggattaaatgaccatttttgcgtaaccctctgtcatccaggagttgatccaagtgttttatcggtaattgaagcatgtggaagattatcagtcgttgaagctcatgatctgggagaggcatttttaagattgctttcaggttcaattacgcaagaacaaatatggcagtggttgagcattcctggagctgcttcaactgaagatctcccaatgaaagaatatgttttcagttga

SEQ ID NO: 267548 - DNA, 1224 bp, Klebsiella pneumoniae; identical to SEQ ID NO: 74993

SEQ ID NO: 267549 - DNA, 252 bp, Klebsiella pneumoniae
atgaaagcttacacactaaaagaacatgaagattcaggagaacttcacctctttgaaggggatatgaatccggaaggatcagaatataagtgtaattcaggttcaaaatccatatgcaaaaaaatgaacacatctgacaataagggaaaccgatttgcatgtgctaccgatcaagaggcaagggaaaaaatcgctaaaattggacgaaaagtttgtgggacatgtgttagccatttatatacctcttactaa

SEQ ID NO: 267550 - DNA, 936 bp, Klebsiella pneumoniae; identical to SEQ ID NO: 74985

SEQ ID NO: 267551 - DNA, 306 bp, Klebsiella pneumoniae; identical to SEQ ID NO: 218354

SEQ ID NO: 267552 - DNA, 168 bp, Klebsiella pneumoniae
atgattgatgtgttagccggtgtcaccccggagcccaccaggagcggtagttccgtcgccgcgcggatctcgtcaatttccgccatcgtggcgctatcgcccgtacgctggccggtggcgatcaccgcgtcagcctcgaagaaatcgacatcgcgcgtcagttcctga

SEQ ID NO: 267553 - DNA, 273 bp, Klebsiella pneumoniae
atggctaccgtgcttaacgtggctatcggcaaaaacgcgaatatgttcagcgcgcagcatactgcggtagcgcagcgtcttagcggccgccccttctataaatccttcgttggcgatataggcgttggcccactggttgacgcggacgaaatcggcgcctcccgccagggcgatcgccattgccgggatcgccgcgttagccagaacgttaatgcccagcggcacagcaaaacgttcacgaactttctcggtaatgaccgccatcagcgctga

SEQ ID NO: 267554 - DNA, 2175 bp, Klebsiella pneumoniae; identical to SEQ ID NO: 227401

SEQ ID NO: 267555 - DNA, 150 bp, Klebsiella pneumoniae
atgcatgctcatcgcgatgtaaatacgatcgatttttccatcacgagcttcctgaataagcttgtctatattgccagcataaggtacattgtcatattcggaagtatcgagttgaatgttatcataaacaccttttacaacaaaacctaa

SEQ ID NO: 267556 - DNA, 714 bp, Klebsiella pneumoniae
atgacaaaaccagtatcaatcagcaagaagccccgtaaacaacatacgcctgaatttcgtaacgaagccctgaaactcgctgaacgcatcggtgtggccgccgcagcccgtgaactcaacctgtacgaatctcagctttatgcctggcgcagtaaacagcagcaacaaatgagttcgtcagagcgcgaaagcgaactggccgctgaaaatgtccgccttaaacgacaactggcggagcaggctgaggaactggccatcctccaaaaggccgcgacatacttcgcgaagcgcctgaatttcagtatctttaagctttccccccgctcgtcattccgtaacccgggcgagcagattgacggcagcttccggctgaatgatgacttttacctgttggaagctaagtggcatcagaacagaacgccagcggcagatttgcacgtattcgaaggaaaactcagcaccaaggcaaagtgggcccggggcgtgttcatcagatggatggggtttactgatgaaggtctgacggccttcgggaaaggaaaacgggtgatctgtgtcagcggttatgatctttaccattcactcagtcatggtatcgctctgcccgaccttctggacgcaaaactccgacacgcagcggaaacaggggaaccttatgcccagttcgacaggctttacactcttaagggcataataagcggcacgccgaaataa

SEQ ID NO: 267557 - DNA, 429 bp, Klebsiella pneumoniae; identical to SEQ ID NO: 206957

SEQ ID NO: 267558 - DNA, 279 bp, Klebsiella pneumoniae; identical to SEQ ID NO: 206956

SEQ ID NO: 267559 - DNA, 999 bp, Klebsiella pneumoniae
atgacagcaattaagccaatgagtcgcatatatcaaaagattagtaacgctggttttaaccaagcgtatattaataaattgcttcctgagtggtgggatgaacgtttagctgagactgcggttggtaggcagtatgctagcctgttcttggcgcgagctttcagtctatccccggaaagcctgaaagatgaatcacatgttgcaagcttcagctttgacgggcgtcatcgcttcaaacatcgtgtcaatgtaggtgaagatgacctaacggtggctacagccgttgcctattctgctgcgagagttgccgctaacaattttggcattgattacgatcctactgttagcttggaatggtctgatattcgtaatcaactgctcaaagatgcaccctatgtaactttgccagcgttagtccggttttgtcacatggccgggatccctgtggtctacgtaaaaaacttcccagcaaaagcttgcaaaatggcaggattagcattgctgtgttctggtagaccggtgattgttcttactcaggtcaaaaagcatgggatgatgctttttgatttagcacatgaattggggcatatagcaaaaggccatctaaaagatagccaagatggtgtttttgttgataaaaaaatcgattccaaagacacagccaagcttgaaggtgaagcgaataggttcgcttttggcgtgatcgcggggaaagaagcattgaatattaaaccggtaagcagatatctaacggcggaacaactcgcccacgctgctttgacgtttggtaaggcaaatgcaatagatccgacccacgtcgctttaaactacggatacagcatggggcattggggagttgcaaccaatgctcttaagattttatgcgaagatgctccgtcagatcaggatatcgtgcgtaccatgttaatgaacgatcttgatgaagataatatcaatgatgatgatctggagttgttaacagcactttgcggggcgtaa

SEQ ID NO: 267560 - DNA, 276 bp, Klebsiella pneumoniae; identical to SEQ ID NO: 238374

SEQ ID NO: 267561 - DNA, 132 bp, Klebsiella pneumoniae
atgaaagcactggaaatggcatgggaaacccgtggtaagcccgtcggggtgatgttccacagcgatagtaataatgccgatgtcagtctttaccaccacttagttgtaagcgtgcagcgagaaccgtattga

SEQ ID NO: 267562 - DNA, 471 bp, Klebsiella pneumoniae
atgtacagtccagtacaagtagccaatgcatttgttgtgcaaagcttacagcacaataaggcccttactcatatgcaagtgcaaaaattagcctatatcgcacatggttattaccttgcgttaacgggtcgtccacttctgaatgagctagtttctgcctggaagtatggtccagtaattccgggtatgtatgatgcatttaagaattatggtaacaaacctattacttctttagcaatgtcaccatatggatacgcgcagctagaccctcaagcagaaagtgtcattggtgccgtatataagttttatggtgacaaagatggtattgagctttctcagttaactcatatgccaggtacgccgtggtcacaagcatatgatgggtatcgctccaccatcatttccaatgaagtgatcagggattactatgataacttgctaaagaatcagcaagcttgtagcggactctaa

SEQ ID NO: 267563 - DNA, 579 bp, Klebsiella pneumoniae
atgcctgataaaaatagtatttttgatctaattggtgcggcggcaagcaatgaaatacgccgcaccgagtccaataatcaatcttcaactaccgcgcaagtcggaaaccccactgacaatcaagcccctccccaccataacggcgcccatgtcgatcccggttcagctagtgatgatgccgatccagattgtaaggcgcaacaagaagaagaacagtttggctcgaataccagcgagttacatgaattcatgcagaagaatcgcatggacagtatgcaagcccagttggatatagtcattacccagatccatgacaaaaaagccgagacgacaggaaaggaaattgacaatgatttaagaaaaaaaatggcatcgtttaccgttcattttatgtcttggtggtgtttattcgttgcggccatgtttacttctttccttatagcgcatgaggggaaacctccagttgaagccattgttgcattattgggaacaagtacgattagtatcgttggactcgtcgggtttgtcgtgagtggattattcaaatcacgaaaagaaaatggtaaagaaaaagattaa

SEQ ID NO: 267564 - DNA, 216 bp, Klebsiella pneumoniae
atgtccgttgtcggggttggtaatggtcagcgtgggcgcgggcgcgttgcggtcgctccagtcgatggcggcaccggcgcgatcaacgtcgaatcccagccagaacatggcgtgaggctgattgaactggatgtatttcgccagaatggcgcgttccttaccggcaatccgtacaccaaaatgcagatcgtccgaaaagtacggcttgtgcggtaa

SEQ ID NO: 267565 - DNA, 180 bp, Klebsiella pneumoniae
atgtcagagcaggcttttgatttaaccaaaattaaagagatcgatcagaccgacgatgctcagaaggcaaatcgtctgttggctaatggatgggttcttcttaaagtaagtgagtctcagtttaacgatggtgaaggtgctattcgttcagcaatttggtttactcttggaaaagagtga

SEQ ID NO: 267566 - DNA, 582 bp, Klebsiella pneumoniae
atgaggtgttttgacattgcattttcattatttttattaatacttctttctcctgttttcattgtacttaccattgctatttgcatgtcaggaataaagccattttactgccacgagaggattggcctgaatggaaggaaatttaaatgcataaaatttagatcaatgagagacgaatcatctctaagttttgctgataggcaattcattgagaatgagaaaaaagaaaaatggaaagtatctaatgaccctagaatcacaactataggtaaattcattagaaaaacaagcatggatgagatccctcaagttgttaatgtcctcattggtgatatgtcatttattggaccaagaccaataacacaaaatgaactggctttgtatggacggagatcctcatcttatttgtcaataaaacctggcattactggattatggcaagtgtcaggaaggagcaatacaaattacagaagaagagttgcaatagatcacttttatgcaaaaaattactcatttaaaatgatgagctttatttttttcaaaacaatatttgtggttataactatgaatggcgcagaataa

SEQ ID NO: 267567 - DNA, 1032 bp, Klebsiella pneumoniae; identical to SEQ ID NO: 83940

SEQ ID NO: 267568 - DNA, 204 bp, Klebsiella pneumoniae
atgcgggagaatgccggtcagctccgagagctgctcgttactgacccagtcagatttcttgttgaagccgtatgttttacgcatgacagccatgaacaccaaaagctgatgctgcgacaaacccgcatgcatgacagcttcaaggagctcattggcgatgcgcgtaaacccatcgtcgagatctgccacgcgcagctcctgtag

SEQ ID NO: 267569 - DNA, 663 bp, Klebsiella pneumoniae
atgaaagaacgcggaatgatttttaatgagtatcaggtgcgcgccttgcttgatggcagcatgacgcaggttcggcgccctatcacatggcgtcagactcgggctactgaaattgcagagcgcgacgatggaagcatgtggccatggagcgaagatgcggagcacgtatgcgattactggcatccatgtccattcggtgcagttggcgatgcgatttatgtcagggagtcattttcacggctcgacgcatttaatttctttgatccagcagttcctcacgaagtcccggacttctggtattgggccgatggcgagccagaatgtggagactggacacgtccacaatctggcgcagtaatgcctcgcgccgccagccgaatcaccctggagataaccgacatccgggtcgagaaacttcagacggctaatgaatcagacttgctgaatgaccttggcgacatgctcgaacactgcgaaaccgtagctggacgagccttcaaccatgccgagcattatgcgatcgctggcgttccggtagggctgtgtccagaaatgcacggctttaaagcgtggtgggataaggccaatggcgctggtagtttcgactccaacccctgggtttgggttatcgagttcaagcgcgttgaaggaggtgcagcatga

SEQ ID NO: 267570 - DNA, 1386 bp, Klebsiella pneumoniae
atggcttctactgtcggtcaacaaatgaaacagatcggtgaagcagttaatggctatataaatatccgttatgataaattatcaaccttatccaatgctgccggaacaggaaccgatccgggaccaagaacctgttcaggttcagtatgtgaaattacttaccagacattgattaatgaaggtttactaccttcagcctatacaggcactaatgctaataaatcctcgtataaaatcatattaaaacgtgatggaactacacctaactatgttattaatggtcttataacgacatcgacggcatggattgaaggcggtaaaacacgttatgatttattagggaatgccatgcaaatagcgggtattgatagcggaatgaccagaactacatcaaatgcttttggttatggtggtcaatggtcagaaacatctgccaatttcaataatattacctctgcagggcaattagctttccgtgtaggatttaatagcgcgttatattctatctatctccgtagagatggaaccttacccatgaccggaaaccttaatatgggtggtcaaagcgtttataatgctcagaatataactgcgaatggaacaactacaacaggaatattaaaaactaatgctgctgctacagttggaacaacattaaatgtagcaggcgtaactactttaagatctgatttaaatgtttatggaaatggacaaatatatggtaatttaaactcaagtaataccgtttctggaaaaactgtaatatctcgtggcgatacctatactcaaaactggttcagaatattaggtgatggaggtctttatttcgagaaatatgggggaagattaaccatgctagatgataacactataagtgctggagaatctaaccttaaaactaattctgtattatatgcaactgaaatttcttctggtaatataaattctgctggaacagtaactgctgaaagagtagatgttgttgatcgcgtatgggcatcaggaaacatcagctctaactatgtttattctactggcaatcttgatgctgatggtcaaataaacgctaatacatttgtttatataaatggaaaagcgaatgtaggatggggatgttctcctaatggattacagggaagaacgtcagaaggggctattttatcttgtgttaatggtttgtggcaaagtagttctgcaagaattgagagaactcaatttttagtttatagtggtagtaattatggagatatttgtcaatccaacattgatagtaatggaatggcagaacaaggttgggtcgcaagtgggtctgatgcttgtactgaggacgggaatgattgttcagtggacagtgttagatgttttgcaataagaattgtaaattaa

SEQ ID NO: 267571 - DNA, 1686 bp, Klebsiella pneumoniae
atgagtggtggagacggtcgaggtccgggtaattcaggtctgggacataatggtggtcaggccagtgggaatgtgaacggtacgtctggtaaaggtggcccttcatcaggtggtggtacggatccaaacagcgggccgggctggggtacgacgcatacgccgaatggagatattcataactataatccgggggagtttggtaacggcgggagtaaacccggtggtaatggtggtaacagcggcaatcatagcggtagctctggtggcggacagtcttcggccactgcgatggccttcggtctgcctgccctggctactccgggggctgaaggactggctttatcagtttccggcgatgcgttgtcggccgccgttgctgatgtgctggctgccctgaaggggccgtttaagtttggtctgtgggggattgcgatctacggtgtgctgccttctgagattgcaaaagatgatccgaaaatgatgtcaaaaattatgacgtcattaccggccgatgcggtgacggagactccggcaagtactttaccactggaccaggcgacggttcgtgtcagacaacgggttgtggatgtggtgaaggatgagcggcagcatattgcggttgtcgcaggtcggccaatgagtgtccctgtggtggatgcgaaaccgacaaaacgtccgggggtattcagtgtgtcgattccgggtctcccgtctctgcaggtgagcgtaccgaaaggtgttccgacagcgaaagccccgccaaaaggcattgttgctgaaaaaggtgattcacgtccggctggttttacagccggtggtaactcccgtgaggccgttattcgtttcccgaaagagaccggacagaagccggtttatgtgtcggtgacagatgttcttaccccggcacaggtaaaacagcgtcaggaggaagaaaagcgtcgccagcaggcatgggacgccgctcatccggaagaggggctgaaaagagactatgataaagcgaaagctgagctggatgccgaagataaaaatattgcgaccttaaacagccgcattgcatcgacagagaaggcgctccccggtgcaagggctgctgttcaggaagccgataaaaaggtaaaagaggcagaggcaaataaagatgattttgtgacttataacccgcctcatgaatatggctccgggtggcaggatcaggttcgctatcttgataaggatattcagaatcagaatgagaaattaaaagcggctcaggcatctttaaacgcaatgaatgaatccttatccagagataaggctgcacttaccggggcgatggagagccggaaacaaaaggagaaaaaagcgaaggatgcagaaaataagttaaatgaggaaaagaacaagcctcgcaaggggactaaagactacggccatgattatcatccagtacctaaaacagaagacataaagggacttggagagttaaagcgaggtgatcctaaaacacctaaacaaggtggtggtggtaagcgggcccgatggtatggcgataaaaaacgtaaaatttatgaatgggattcccagcacggtgagcttgaagggtatcgtgccagtgatggcgaacacctcggggcatttgatcccaaaacgggtaagcaggttaaagggccagatccaaaacggaacattaaaaaatatctttga

SEQ ID NO: 267572 - DNA, 549 bp, Klebsiella pneumoniae
atgcgtgatacgatcaaggtgctcctgctgctgggcgcatcctttgcgctggttgcgttggagaaaaccctgggcgaaagggcgctattttccggattgctggcggtgatggggatgggcgtcacccttttaaaaaccaacgccccggttgcaaagcgtatatccggcaaattttcaaagctttgggtggcggcagaaatctggctgtttgtgctggtgggtgcaacggtcaacatccgttaccttttctccgccgggctaagcggcatgctgctgatcacagctgcgctgctgtttcgcatgctgggcgtgtggatgagtacgctgggtacagacctatcccggaaggagcgcctgttctgcatgattgcctatctgcccaaggcaacggtgcaggctgcaatcggcgctattccgctggcgatggggcttggcagtggggaaaccatacttgcggtggcggttcttgccattatacttacagcgccgctgggggcgttgggcatcgagctgagctataaaaggctgcttcaaaaacagcagtcgtag

SEQ ID NO: 267573 - DNA, 756 bp, Klebsiella pneumoniae
atgaacatcaacgatgccctcacctccatcctggcctcaaaaaaataccgcgccctttgcccggataccgtgcggcgcatcctgactgaggaatgggggcggcataaatcccccaaacagaccgtagaggctgcacgcacccggctgcatggaatttgcggggcatatgtcaccccggaatcgctcaaggctgctgccgccgcgctttctgcgggcgatgtaaaaaaggcattgtcgctgcatgcctccaccaaggagcgactggccgagctggataccctgtacgattttatcttttcagccgaaactccccgccgcgtgctggatatcgcctgcggtcttaaccccttggcgctatacgagcgcggcattgcatccgtgtggggctgtgatatccaccagggattgggggatgtcatcaccccctttgctagggaaaaagattgggattttacctttgccctgcaggatgtgctgtgtgcgccgcccgccgaagccggcgacctggcgctgatttttaagcttttgcccctgctggagcgggagcaggccggttctgccatggcacttttacaatccctcaataccccgcgcatggctgtcagctttcccacgcgtagtttaggcgggcgtggaaaaggcatggaggcgaactacgccgcatggttcgagggcggcttgcccgccgagtttgagattgaggataaaaagaccatcggaacagaacttatatacttgataaaaaagaatggataa

SEQ ID NO: 267574 - DNA, 1272 bp, Klebsiella pneumoniae; identical to SEQ ID NO: 51516

SEQ ID NO: 267575 - DNA, 906 bp, Klebsiella pneumoniae
atgaataaaaacactaaaataaaaaacaaaaatttcaacattaaagactcacagaattttttgcataatactaaattagtcgaagatttgctttttaaaagcaatataactaaggaggattttgttgttgagattgggcctggaaaaggcataataaccaaggcattaagcaaaatctgcaaagccgttactgctattgagttcgatagtgtattggctgataagttgacccatgaatttaaaagttcaaatgtgtctattattgaagccgattttttaaaatacaatttaccagaccataattataaagttttttcaaacattccatttaacataacggcaagcattttaaataaattgttagatagtgagaacccacccttagatacttttttaattatgcaatatgaaccttttttaaagtatgcgggtgcaccatcttacaaggagtcttataaatctttattatataaaccatttttcaaaactaacatattgcatagctttagcaaatttgattttaagccagctccaaacgcaaacattattttgggccaattttcttataaagactttacagatataaaccttgaagacaggcatgcttggaaagattttttagcctttgtctttttagaaaagggagttacatttaaagaaaaaacaaaacgaatttttagttataagcaacaaaaaataattttaaaagaaagccgaattaatgatgattcaaatataagtaattggagttatgaattttggctaaaaatgtttaaactctataattcgaacatggtaagcaaggataaaaaagttttagttaacaattcgtataaaagaatgttagaacatgagtctagtttagaaaagattcatagaaatagaaagcaaaataacagaaaatag

SEQ ID NO: 267576 - DNA, 621 bp, Klebsiella pneumoniae
atgaatgataataatgtagataaaaatagtgtttctttatcatgtcgggatgaaaaaaagaaaattggtgatgtgaacctgaaaggcattattgacggagttgaaattaactgtactgttgatttgtcatttcataaagctaaggaaagtgaaaatggtgaaacaaaaaaagaagtccaaatattaacgaaagcgcagtgggtgatctattttattctacctctccttgttgttatagttggcttttttattgattcgtttatagatgcaagtcatcacctgactctttttatatcaccactggcatttggtattataatacaaaagatggtgatgaatagttcgaatgtgaatatccattatttcaaaaagcttgttgatacaacgggattggtttcttcaacgttaagtgcaagtattctaatattcaaaacgattaatgttgaaaatccatacattagtatgctggattcgttgaaagacgctggagtgttcagttcaattatattttatattataatggcactcgtgtatattgttgtctggatatttgcgacatcgataactattaagttaatgatcacatatgatgaactaatagcaatgaagaataaagcctaa

SEQ ID NO: 267577 - DNA, 546 bp, Klebsiella pneumoniae; identical to SEQ ID NO: 214698

SEQ ID NO: 267578 - DNA, 210 bp, Klebsiella pneumoniae; identical to SEQ ID NO: 214998

SEQ ID NO: 267579 - DNA, 273 bp, Klebsiella pneumoniae
atgagcttacgaattaacgccgctaatttaattcttgaagtcagaagcgattttgacgatctctacttcattgagatattcgatgataaaacattttctgtacagtccgtagatggcaacgttttatctaaagaggacatggaagcagcggtggcgggatttagccaggcggttcttctgtctgaatcaacggacgacctgatgtccaggcttcatgcattaaccaaccacattgtctggtatcaggtttcaggaagcctgcaggttgagtaa

SEQ ID NO: 267580 - DNA, 1080 bp, Klebsiella pneumoniae
atgaccacaatcatcattaaggatcatctccggcaggccattgagtcagcatcaggggggcggcagacggtgttatatacccagaaggggcaggcatcgtttgtcactattttcaataaagttgacctgaaaaccctgaacccggacctgtcaggaacacacccggcatttattattaacgggaaggaggtatcccagctttttatcgggacatatcagggaaccattattgatggagagctggtgtctcagccctggacgttaccatcatcaggggtgaccttcgcaaccgtgcgcgcagctgtcaaagccgcaggtaaaaactggcacctgatgaccctgccagagtgggggcttctggccgcatacgataacctcggggtgcagacgctgggcaataataatcagggcgggtcaatcacggactcatcactgaaagggtcaatcatcccaaatcagtcaaatatgatttatccggggtctggtccggtacagttcaggttaaatcgtgaatacaacaacgtatcggatttggtcggcaacaggtttcagatctgcgacggcgtgcgttttgttgacggagaaattcaggttgttgccaacaacgacgcggcgcaaaccgattatgacctatccctgaactcactgaactggaaagcaataaacgcacagaccggggcgctggtagcgccgaccgggacgggaaagattaataccgactatgtggccactacagccaattcagtaaaaatttcggccgccggggaaacgctcgattacggtatttacaacctgcagtcaaacatcccgacgctgacaggcgctaacaaagtgcagcagtctgcaatcaacatcatgcgagcattagggatatgcacaatcagcgaaacatgctcaccgcgaggcggattctctgtcaagaagacggccggcgccgacatgaggtggttccgttcaggttcgccgaaccacggtggttatgcctctctgaacgccgtgttcacgaaccagtacgtttcagaccaggcatcgttcctcgccgagggcggcaccgttcgcccgtgctactattcagcataa

SEQ ID NO: 267581 - DNA, 1998 bp, Klebsiella pneumoniae
atgaatattaaagagagttcgcagtgggaagacagcgttacgttacttacccgccagcaaagagtggagggtgggcaggatggcgccgccaatattcaggctaaggagcttgctaacagaacggcatggctgaaagaccagctggaaggtatttccgattatcgtgagtataccttttatgctactgcggaggatccggacggcaccgtttcaggtttgcagaagacgccaaacgggaaaatgttcagggtcgcgcttattgacggcaatgggcagaaaaatgtttttaaatattatcgtaacgataatgggaaagctgtctatatcaattcggcaccatcatttaacgccgtcgatgcgctggataagaagagtgccggtcagtttttggatttgcaaaacgtcacgtcagggttgcttaccgcactggcaataattgataacacactaaataatgtcgctatctccgtcagcgccaatagcgccgctgctgattcgtttaaggaaattgcagaaaacaggctttcaggcgtatttacatcaattgctgcaattgtaaataccatggaaagcctttcgatattgctggataagaattacgttacaattccggcaatgaacgaagacaggctgaacctgctgatgttatcaagccgattgctgaaaattctggacggactggacggctttgatccgggcgctgtgctgacccgcgcagatattgatgaggtcggcggtggagagcatgaaacagttgacggagtattcacgtttcctgagccgacgtcactggtgacgatagacctcactgctgacaaaataccgggatcaaaggatgagggggacgtcagcgctaccgtggtcatcactctcgacggcgctgtattctctgcgcgctgcaaaatttctgttcagggggccagctcggcagcgtatccaaagaaaaacctgagccttgagttttttgatggggactttgataacaatatcgagctgaagataggtaatctgcggcctcacgatacgtgggtgtataaggcaaactgggtagactctactcaatgtcgaaatcttatgagttacaggttatggcaggcgttccaggcatcccgccccggctatcctaaatatgatatagacgcaacgtatgtagggaagaaagggaaggatggctttcctacgggcgcgacagctgtgccagcaggatatccgtgcgtaatgcatatcaatggcgagttttacggtataggcacgtttttaattgggaagaaacgcgggaattacaacctgcctaaggactctccactgcaaatccagcttgatttgggtcagtggctcctgattaattccatggaagagaatcacgccaatgaaaatatactggaatttaaggcgccaaagacagtgacggaagagacagttgccgcactgagggaatgggattcgtttgccggggcggatgcaaactatttcgccgaacaggtgcagatgcgtatggataagcgcaatctgatcgacttttatctttttgtcacatatatcgccgccgctgacctggtgcacaatgccaatgccaatcaggttaaaaatatgcaaatggttacatgggatggggttaagtggttttttatgccctacgacctagacactgttttcgggaataactgggccgggggttactcttataagccggctgaaaacatcccctggtgtgttggttcattttgggacaatgtgagagcggtctacgggaatgatatagcggcgcggtacaaagagctgcgcgataagaaaatcatttcggcagactgggtttatgatatgtcaacacatattcaggcgcgttatcccgcagacgcatacgaagatgagttggctaaatggtcggtaacaactccggcactcccttacgtttcaaataatggaagggaccagctggtcacgtgggccaaagctcgaattgcagcgatggacacttattttaactatgcagaatag

SEQ ID NO: 267582 - DNA, 690 bp, Klebsiella pneumoniae
atgagtaacagcctgttaccgccggggtcgtctgcactggaacgcaggctggcgcaagcctgttcaggtatcggtgatttaagcgtgccgctgcgtgacctgtggaacccatggaaatgtccggtaaagttcctgccatatctggcatgggcgttctctgttgaccgctgggaagaagaatggccggaaatcgagaaacgccaggctgttagtgatgctttctggatccatcaacgcaaaggaaccgtcgccgccgtcaggcgcgtgattgaaacgctgggctacagcatgacgatacaggaatggtgggaggtggccgaccctgctgggacattccgcctcgaaattgacctcaaggatattggcatcacggagccgatgatatacgaaattgagcggattattggcgatgcgaagccagtcagccgacacatatcaaacttaattatttcgacggcttcaaagggggaaatttacatagggtgtgcgacgccggatggagaaattataaacgtatttccggagggatatgctccgcctgattgcattttttatgatggcatcgcgcattatgatgggaattatcactataccctttgcggaggcagcgccagcagcgttttaaaatacgatggttctgccagatatgacggatctcaacgttacgacggcatttatcatatcaggtga

SEQ ID NO: 267583 - DNA, 921 bp, Klebsiella pneumoniae
atgtgcgaactcgatattttacacgactctctttaccaattctgccccgaattacacttaaaacgactcaacagcttaacgttggcttgccacgcattacttgactgtaaaactctcactcttaccgaacttggccgtaacctgccaaccaaagcgagaacaaaacataacatcaaacgaatcgaccgattgttaggtaatcgtcacctccacaaagagcgactcgctgtataccgttggcatgctagctttatctgttcgggcaatacgatgcccattgtacttgttgactggtctgatattcgtgagcaaaaacgacttatggtattgcgagcttcagtcgcactacacggtcgttctgttactctttatgagaaagcgttcccgctttcagagcaatgttcaaagaaagctcatgaccaatttctagccgaccttgcgagcattctaccgagtaacaccacaccgctcattgtcagtgatgctggctttaaagtgccatggcataaatccgttgagaagctgggttggtactggttaagtcgagtaagaggaaaagtacaatatgcagacctaggagcggaaaactggaaacctatcagcaacttacatgatatgtcatctagtcactcaaagactttaggctataagaggctgactaaaagcaatccaatctcatgccaaattctattgtataaatctcgctctaaaggccgaaaaaatcagcgctcgacacggactcattgtcaccacccgtcacctaaaatctactcagcgtcggcaaaggagccatgggttctagcaactaacttacctgttgaaattcgaacacccaaacaacttgttaatatctattcgaagcgaatgcagattgaagaaaccttccgagacttgaaaagtccggcactgttgcaaagttag

SEQ ID NO: 267584 - DNA, 1431 bp, Klebsiella pneumoniae
atggctaaattaccaggtaaaacagcatactcaggcattagacgaagtacgaccagaaagtcgggctttaaaagccatccggacagtactggaggtgagtacaaacgtgaggtagtaaccccttacctccttgaggcaggaaaaacactgaccgtgtgttttcagttcccagccagtgatggtcaaacctatattggatttggtggtttctttcaatgcgaagactttgttcaagtatcccttaataatcccaacgtcgcagcaaatgagtttttgagaagttcctcagcggacacgtcgaaatttggttcaatgtggcgatacaatggtatggctggaaatgtgaccattactttttattcacatgttgatacctacgtagccttatatggattagaatgtggtctaatttggcatgaggcattcgatgcggcagttgaaaatgaccagcttggttacttgaaaagtatgcattcaataatgcctgaagccggtttctataccactgaggggcgcgtaacattacattatgatggtcctttaaaaagatattatcaagatgttatatttcatcttaaatcgtgtaaccgttgcgctagattcctacctattaatgtaaataatgaacgcgcgcacttatgtttttcaaaccattgtgtagcaaaggcaccttgcagacataaaggatttggaatacttaccgatgttgattctggagaaataaaaacactagtttttggatatcagcttgaatgtcgtttttgtaaaaaatattacgtaaatatgcctttaaactggcaaagaacagcagcacaaatgaaggaagatggtcagcgccgcaggaatttcgaattattgattgctgaaatcaatcaattatcaccacaactaaattatcgaattaaaactggtcgagaattactggatgacgtgtggaatcgatttaatggtcgctgttttaattgtaatatcccactgcaaaacaaacgaaaaatgcacctcgatcacactcgcccactagctcttttatggccacttgatggtacagccacagccctttgtgcaacctgcaacactagaaaacgtgacagaccaccatcactattttacgataactttcagatttaccaactttcacaactgactggcctatctgtagctgaactaacagttccagaacctaaccacgaagtaatcacagaactacttaagcgcttagattggttttatgaggattttttaacgaaaccttcgttacttatggagcgtgatggcaagatagcagcagaacttattgtaaaagcattagataaagttctgttacgttccaaaaaaatcacgtacaaattttcatttgttgaagaatataacaaaagacgtgagcaaaatatctcgttcgatataaacgaagatactgacttcattgtttag

SEQ ID NO: 267585 - DNA, 1770 bp, Klebsiella pneumoniae
atgcttttagcagaggattgtcttaggtgcccaacctccttagcagaggctcagttagttgcacataatgcgaagcaacttcatgaattacaaccacttggcgtggatggtgtgattacaagcccaccttatctaaatggaactaactactttagaaatactaaacttgagttgtggtacatggggtttgttacgacggttaattgtttgcgtggcttccgtgatcaggtagtaacctcgggaattaatgatgtaacaaaaaataaaggtaatatagttcatcctgcagctcaggctgtcgtttctgaacttgctgacaatgcatatgatggacgtatttctaaaatggcagcaggttattttgaggaaatggggattgtgttcaaaggcctttataagcatatgaaaataggtggtattgctgctatcgatattggtgattcactttatgggggtattcatgtaccgactcatgatattttgagtgaaatatcccaagattttggatttgcaactcttgatattgtgaagctacgagagcgaagatccaaatctggagctcctttaactcaatcattaatcattttagaaaagagggatctcgataataaaccaatctctgggataggccgacaggattgtgacataccccataaatgggatatgtttaaagagacgttgccacatcttcagcacccttattcaaagcgtaattggggtaatacgttgcactctgtatgttcttatcaggggaagatgaaacccgcattagcgttcaaacttatagaatcattttctaataaaggtgatacaattctcgacccattcagtgggtcagggacaatcccttttgaagctgcactaaatgggcgcaagtcattggctatggatattggtttgttggcaacaagtctgagcaatgcaaaaataaagaggccaaacaaagataatgttactgaaataattaactccttggaggaatatatttccacctctcagcctagtcagtgttcgattaaagatgcaagagaagttaagtttaataaaactattcctgaatattttcatgaaaatacattgaaagaaattctttgtgctcgagatttctttatgaaatatcatgacgctcaatcagctgattggtctctggttatgtcatgcatgctacacattttacatggtaacagaccttatgctttgagtcgtacgagtcatccaataactccatatgcaccaactggtgattatgtatacaaaaaccttattgaaaaattatggaataagataaataaatcattaaatactgaggttactgacgattttgttactggacactgctatcaggctgatattctctcagaatggccaagtgaaatacagaatttagatgcaattattacctcgcctccattctttgatagtacaaaattctatatgactaactggatgcgatactggttctgtggctggactaggttggattttgatactcaaccaaagagttttgttgaagttattcagaaaaaatcttttgatgcctatgactttatatttggccaatgtcatgaaagactaaaaccaggtggttatgctgtgtttcacttagggcactcagataagtgtaatatggcagaatcgttaaaaccttacgcagagaaatactttactgtaattgatatctttagcgagtcggtggaacactgtgaatcacatgggatatctgataaaggtagcgttaccggtcatcaatacttagtgctgcgaaaataa

SEQ ID NO: 267586 - DNA, 216 bp, Klebsiella pneumoniae
gtggagaaagtatccgctgacgatggcgatattcatcgcgtcagcaatgcgctggcggatcgcgtctctatcagcattcatgtctacggcggcaatatcggcgcggtgaagcgcgccgtgtataccccggaagggcagcagaaaccgtttatctccggctactctaaccgccatttacccaatatctgggattcctcccgcgaacatcaaggataa

SEQ ID NO: 267587 - DNA, 1272 bp, Klebsiella pneumoniae; identical to SEQ ID NO: 51516

SEQ ID NO: 267588 - DNA, 288 bp, Klebsiella pneumoniae
atgatgaagatcaactataaagacaaatacacgaaagcgctcaatgaaattattgcgaacggtgcaaaccgacaggctatctttgttctgtgcaattctatggttgaggcatacggtcgttcaggcggctctctcgcctacgaggttctgaatgatgcgttagatcttgagctgccttcagacgctgagaatgttgtactggacgctttggatgcgctcagcgggcaatgtagccctgtcagtttcatcggctccggtgattaccatcgtgcggcccaagccgcctaa

SEQ ID NO: 267589 - DNA, 435 bp, Klebsiella pneumoniae
atggatccgaaaacgccaattaagtacctccgaatgatgaagtcagatgatgagaatcgtcctcttgtcattgttggcgaacgtgattgcttgacggttcgtacagggttagaaggaaagatagaacaaggccagattgtcgatgtggttcttaacgaagatggtcacttcattcatttggctcaagggctgtcattgactgtgccgccaaaagaaaacatcccagagcacttattcaagccagccagaaagctcgtatgcttcacaattgcatcagggatccttgaagaaaacgagcatttaatgttctataaggattctgaaacacatgctatgattgtcccaaagcatgatatgcacattaaagattaccagcgacatctagaagaaacgaaacctctttgggaggtgctaaatgatgaagatcaactataa

SEQ ID NO: 267590 - DNA, 396 bp, Klebsiella pneumoniae
atgaccggacggcctgggaggaagactgtatccgtaaggtgtcaaaacgcgggctggctgcgcaccctgcgcgccccgaacctggtgctggccgtcgagctgacggaggccggtcgcggcattgcagaactgctctaccaggaagaacgcgaggctgaaatggcacgacaacggctgacagacatttggcgtctgccgttacgccagacggctgtcggcgacgctgtggagctgcagctgggtgatggccattactccctgcgggaagcggcctacgtgatccatctggatggtaccacctgtctggagctgacggatgccagcggcaagcggcatacgccggataaaagagggcgatcccctgcaggtggccagctggtatcagacctgttttga

SEQ ID NO: 267591 - DNA, 2220 bp, Klebsiella pneumoniae
atgaccagtaataaagcgatgcgactggatcagtccgtcacccgttatgagcaggatcgttatggattccgccatgtcgcaacacaacttgccaaatctatccaggcgattggtcgggaggggagcgctgtcattggtattgaaggtgtatggggatcggggaaaaccagccttctgaacctgctgcgctcgactctggatgagcaaatggaagacaacacctttgtgctgaatatttctccctggcttgatggcagcgagaccagtctggtggagtcgcttctgataccggtcgcaggaattattgcggaagaagaagaaaagcgtatgtcagaggagtctctccggcaactgaaaagacgaaaggagctgacagcaacggcagataaagttttgcgatatgcccaagcaacggctcgtcatttggttcctgtcgctgaagctgcggctcttgtcggagcaccaaatgcaggtaaagctctgaaagcgctggcatcagtacagttaagtcaaaaatcactgtcttcttctgagttacgcagtcaaatcgcagataaaatagccgaacttgatctcagcttcatcattctgctggatgatcttgaccgactggagccggctcaggccatcgaggtgatccgcttggttaaatcggtggccgactttccccgtttccgttacatcctttgctatgacaaagctgttctggcacaggccatctcccgcgggttaggggtggatgatggcaggctgtatctgcagaaaattgtccagatcgccttcagtctgccacgccctgagtcatttgttttacgtcgagagctccttgaaggggcaatcgaactttactcttcagttaacggtgcttcacctgatactgggctcctcagtgatctggaacaagtggctgacatctatggaagcactctgaaaaccccacgggaagtacagctggttctcaatgcactgcgctttcactattcagggatccgggactatgtctatttgccggatttatgttttctgcatttgttacgtatcactaatccaggtctctgtgactgggtggaggagtatctgactgagcggtccatcgtggaatccggtgacgggcgtgttagtaaggaagaacaagaaaccctgagtaaaagcctggctgaacatctttctcactattttcctttacaggctcattccgcctatctgctgaggaactgggttccgggtctctctggtggtataggggatcatcccatcaagcttttcagggagctgagcgacatagaaaaaggcctgatgacgacgcagaggaggctgggaagtcaggcttactggcgctattactttgcattttcatctccgcaaaatatcctgccccctgagtactttgacaagatattcggcctggcttccactggcaaaaaacagacggagttgtcggatgaactgcttggaaggattaatggtaaggggatttcatcccggacttggtttgagcatatcctcagccaactgacaacgccggtgatttcacaaagaagcgcttcagagtgtcagggcctgttacagtttttctttcagtacggcgatgaaatgatcgaccggtatctggcactgaacagctggttctctttgtacgagctggatactaacagcgtggccgatcggttattacagcgtatgtacgaaacagaaccggaacacgcgcttgagacattgcgcaagctgcttctctgcggccgagcctggagatggattgcagagtattgccggcatctgttgtggcagcacgggcttcgcggcaacctcgcgccgggcgagctggagcagtggctgccgcctgacagacttaaggggctttgtgaagaacttgcccaccgactgaacagtccggtgactaccagccagttaccgtcaatgtcttccctgaccggctatatctgggcatggtgcgatatcagtggtgtcgaggtgatacgggaatggatgaaaacccggagcagaagagatgaggactttctgcagttacttctgcttcttcgctacaaagggaccaactcggcaaccggacgttaccaggcactgaaactgtcgcagttcagtgaatttcttggagaagagcaaactctgcggcaaaggcttgaaagcattgagaaggaagggaaatatcccgagcttatcaacgaagtcaacaattccttaaagaaaaatcgcttctga

SEQ ID NO: 267592 - DNA, 1086 bp, Klebsiella pneumoniae
atgatgctgagccagctcaacctgcgttttcacaaaaaactgatcggagccctcaaggcgagggcaggggcagaaaatgtttccgtcaacgccttggccgaacgcttcctcgatgacggcctgaaaacgaccgctgctggtgacggctattttcagctggtcgccgatccggatgccacggcccggcagctgtatcgcaagataatcgccggcgtgtcctgggagccggtctcccgggacgaactgaggtttatgctggttagcgcccgacagggttacttgcgcggacgccaccgcctggttacccggccggcactcagcacgctgctgcagatcgtccgggagcttcttacctggcaggtggaacaggacagggtgcgggacgagcattatttgcgaggtacctaccggctgcacgacggggatctgctggcaggatatgaccggtttctggccggattgcgcccggtcatcgaccatgccaccgccgaacaactgctgcgcccgctggaaagtggctgtctggaactgacagattttccggattccgtgctgacagggagtttcactcaggccagactgagggaaatctttccgctggttctgtacgggctggagcggaccgagagccaggtggaggccttggtgcaggatatgcgcccgctcatcccggccgtgacgcagactattgaagccggtacgctgcgcctcgatattcagatcgacgggctcccggcggggcagcgtccaggcgcgctgtacaggacaccgaaactgcatatgattctgaccgggaaggagtttgtgttcccctgcggctgggtagcattttctgaactgctgggcctgctcaccctgtacgcccgtcacccggaagcccttcagcacggtcatcagggggagcgggtgatgttctctccgccgggcagtgtgatgccggagggattttttggtattgacggggtgcggatttttttgccgtcggaggcctttgagacgctggtccgggaacttaccacgcattgtgatgaaggtacgctggcggaggccctgaccgggctgcgtggcctgtacggagatttgtga

SEQ ID NO: 267593 - DNA, 2682 bp, Klebsiella pneumoniae
atgacggtaggatcgcgctggtacaaatttgattttcataatcataccccggcctcacatgattacagagttccggacattacgcccagggaatggcttcttgcctatatgcgacagcaggtagattgtgttgtcattagcgatcataacagtggggcctgggttgattcgctgaaagatgaactggtgcggatgtatcaggacgcaagtgccggttacattccggactttcgaccgctggcgcttttcccaggagtggaactgacggcaaccggtaacgttcatatcctggcagttttgcacacgaacagtacaggtgccgatgtagaaaggcttctggcccagtgtaacaacaactgccctattccgcgtgatgtccctaaccatgagattgttcttcagttggggccagccggaatcataagtaacatccgtcgtaatccggaggtaatctgcatcctcgcgcacattgatgcggttaaaggcgttctggtaagcctgactaatcagggagaactgacagctgcttttaaggccaatccccatgcagtggagattcgccaccgtgcagaggacattactgatggtacacatcgacgtctgattaaagatttaccgttgctcaggggctcagatgcacaccatcccgaacaagccggtgtccgtacctgctggctgaagatgtcctcacctgatttcgacggtcttcggcatgcactgctcgatccggaaaactgtgtgctgttcgatcagcttccgccagaagaacctgcttcgtatttacacagtctgaaattcagaacacgcctctgccatcctgcgaaccaggaggcggccacagtggaattcagtccgttttataatgctgttatcggctcccggggcagcggtaaatccacactcatcgaaagcattcgcctggccatgcgtaagaccgaagggttaactgcgacgcaaactaaaaagctgacccagttcagtcagacggggatggaggctgattcattcatcgaatgcgtgttccgcaaagaaggtaccgatttcaggctcagctggcgccccgatggtaatcatgaattacatatattcagcgaaggcgcgtgggtacctgatagccactggtcaggcgatcgttttccactctcggtttacagccagaaaatgctctatgagctggcttcggataccggggcattcctgcgtgtctgtgatgagagtcctgtggttaataaacgggcctggaaagaacgctgggatcaactggaaagggaatatctcaatgagcaaatcaccttacgtggcctacgctctaggaaggtgagtgctggcacattgcagggggaattatccgacgcagagcgtgctgtcagccagttgcagtcaagcgcttattacccggtttgcaaccgtctggcccgggcccgagccgaactgtctgctgcatccttatccctcgaacgctacgagcagcgcatttcaactattcaggcactggcggataagccgcagcaggcaaccgcagctccgtcagatccgtccggtccattcacaatatttatggagcgcctgttatctgtgcaagagcagtatgatcagcgtctcaatgccctgttgtcagaatgcgttgcagagctcgctgtcatcagggaagagcaaagttttgcttccctcggggggactgtgcgcgaccaggaagcgaacgtagagcgtgaggccgttgctctgcggactcaggggctcaatcccgatatccttaacgagcttatggcgcgctgtgagtctctgaaaaacgatcttcgaaattacgacggccttgaagaggcaatcacctcttctgtggcaaggtctgagcaattgcaggctgaaatgcgtacccaccggatgacactgacggataacagaaaggcatttctttcttctttgtcgcttcgcgatctggagatcaaaatcctgcccctttgtgccccatatgaagacattgtttcaggttatcagggtgttactggtatcagcaatttttccgaacgcatttacgataacaatgacggtagtggattactgcagggctttatcagcgaacgcccgttcagtccgttgcccgctgctacagagaaaaaatacgcggtactggatacgctaaaagcactgcacctcgatatctgcctcgacaggccgggcgcggggacagagctgcatggtagtttccgaaatcgacttaaaggacttaatgaatcacagctggatgccctgcaatgttggtatcctgatgatggtatccacatccgttaccggacgcctgggggacagatggacgacatttcgtctgcctcaccgggtcagaaaggggccagtatgctgcagttcctgttgtcttatggtaacgacccgctcctgcttgatcaaccagaggatgaccttgactgcctgatgctgagcatgagcgtgatccccgctatcatgtcgaacaaaaaacgccggcagctgattattgtgtcgcattctgctcctatcgtagtcaacggagatgcagaatacgttatcagtatgcagcatgatcgtacaggcctctacccgggactgtgtggtgcgcttcaggaggcaccggtgaaggctcttatttgccggcaaatggaaggcggcgaaaaagcctttcgctcacgttatgagcgtattctcagctga

SEQ ID NO: 267594 - DNA, 762 bp, Klebsiella pneumoniae
atgccggggagcaatctttgtaaaaaaagagtaactctcaaaatggaaaacggaatgagaacaaagacaaactgtgtgatgatcgctttatgtctgggagtgtcattttctgtcgcagcagaaggaatgaattcttaccttgtaaaatatggccaacaagtcggagtggcgtctgaaaataataaaataagataccttaaggcgtaccagacaacagcatcaccacttaatgcataccgggttgatttcaatacaacggcagaagaactgatgtcagtgcctggtgctgatacagacgctgttgcgaaaatgaaaaatctggccatcaccaaagcatgggaaaccaggttttgtaccccggatctgaataatgcaatgatcagatcgggtgtggacatggtgagtggatttttattatctgacaacagaacacaacatgtagctgtatgtttcaagaaagtctctgattcacaacagcaatcctcctcagccaggaaagtaacggggatctggtatgatgatgttggttccaccgattaccttaatgccaccctgactatttaccaggagggcgaacgtttctatctgaaacgtgttaacggtgacggtagtggcggagagtatcagctgaccagaaaggggcaaaaattcattaaaaataatgataagttcggtgcattttatcttatcagaaataacaagctggagatctatgataataatggtttcatccgtgatgcagacataaaaagagaacaatag

SEQ ID NO: 267595 - DNA, 924 bp, Klebsiella pneumoniae
atgaagaaaaaccccgggtttcaaacccattatgacaatctgaaagtttctcaggacgcgccttatgaaattatccaggccgcctacaggacacttgcaaagaaataccatccggatctgaataaacaggatcctgaatgtgcccgcataatgaaaattatcaatgaatcgtatgtcgttctctcagaccctgagaaacggagactgcatgattcctggattactaaagagaaatggcgagtacgggcactggaaaatcaggaagcaagggaaatgcaagagacagtttctcaggatacccctgtccggaatatccggccggcgcctcatattagggagcctgattcctcctcacttattcatttctttaagcaaatggggatatcatttgcaaaaaggatattgatagtggttgtttttttcggagggttttacctttacgacagcagtaattctgtcagcagtacatccggagaaaagcagtcagcgccacagtcttccggcgcctcatgttcttctggtgtctatacatataccaacgggcagccatggccacagaatgccaccgttctcgcctacaatgatcagcagaagggattatccactcttgaactggataattcagtaaacaatcagtatctgtttgtccgcctggtttatgccagtaataaattcactcataacgcggtcagagaagcattcttacccgcccatcagatactgctgttcacaagtgtcgagcccggtcgctatgcagtaaaaataaaggatatagttaccggatgcagtcagatatcagaagagatgctttttactgagcagacatcaggtcgtgaagttagctacacagaaggcttactcactctgtatccagtcaggaacggcaatacccatttatcagaaattacagatagccagttctga

SEQ ID NO: 267596 - DNA, 1374 bp, Klebsiella pneumoniae
atgtacaataacctgccgtccctgacggaaagcatcctctgggatgaaaggcttctttcagcggattatgctgcactaagtgaggacgcactgcggagtgccctggaagattatctgcagggggttaacgcaagtcgcggtgagtggcatcccccggaagcatctctcctcagcctgtggattgcccgccacgatcaactggcactttaccgccctggattactgtctgccgaacgcataattctgaccgatgccctcgaagaggcggctttacgtatggacaatgtggagatggttgtggctactgaccttctggtacagcgccgtacgaccgacaggctacagggcatccgaactgaagtggcgaagtttgtgcgcttcgttaaggataattttgtgctgattcaggccggctttattgccttcacgccatgtgaatcagcccggcaggagcaggtgcgtaaaatgcaactcctgcaggataatcccgacagacatttccttaacggcgtgatgccccctgcagtggctcagctttacgagcgcagcctcaccgttcggggtataagtcgggtgagcgacgaggggcattaccgttttgtgtcagaaaaaacgctgccggacgaaatcatgctggagctacgggactgccttagcccttttactaatgcgtatatgtaccaggaaatgcagccagtcgaagtgaaagaggacggtacattcagggcaaggatcacccgcggtaaacacgaaagccgtaaagggtatgatcggtgggtgcgcggagccattaatcggagtatctactttcattatcacgggctgcttaccgatatcagtcagtcagcccggaccggcgcctcacttgttacccgctgtccacttcagggcaaaatcctgcaaaagctggacgcatccggaagactttctcgccggatgctagagcttgacattccgtttcttcatgacctgtcgcttgaggacatcttccggatccgcacagattatgagccgagtgtgactgcgttcaggcgctcgctgcgcgacgcggctctggatatggaacaggcctccggcgccgaagccatccgcctgctgcagcagcgtttccgggagcgtatcgccgatgaggggctggaggagctgcgacagaaactgagtgcctggaaacggcagagtctgcaggataccgccctgctcgccttaccagccgttctggggttcatgggtgcaccgtcggtttcagcactagccaccggtgcggcaagtcttattcaggcagccctgggagcctgccgcagtcacagtgagatcacccgccacccttcctggtttctgtttcgtacttctgaaagtaaacgcctgaggcggtaa

SEQ ID NO: 267597 - DNA, 621 bp, Klebsiella pneumoniae
atgcctacgaaacacattgacgatgctaccgctgctcagctggatgatctctatgtccgctgcgtgaccctgactcaacagccagtaaaagaggtggaagtgctgcgtctggcgatccagaccgggatcggcaatatctccgataacgacattctcgcctcgatggcagtcaaagcaacggtctgggaaagacttgctggcgacgtctggacggaggtaacaaaggaatggcctgcggcaggtattcattccaaaaattttaatgagatggcagagcgtcactctccgctctggaagacttttaccagcaacgtctgcagggatgctatccgttcggtgcttaaacgggatctggagaataatctgctcaatgatctttttggctggtccgaagccttcacggaggaagagaaggagcgggaagaaaaggaaaggaatcaaaaagataaagaatacaggaaatctctgcacttcctggacggcaggttatattcatcgttgtcagagcaggaacaaaacattgcagtctattatagtgagcacggctcgtttgtcagcttcacccctgacggaaaggacgatttccaggttcaggtacagctgagggaagacggtcagtga

SEQ ID NO: 267598 - DNA, 123 bp, Klebsiella pneumoniae
atgcccgcaatcttttcgaaacctcgtctaagtcagtttacgaatatgttcctaaagattctgaagtcgaaagccgtttcgctcaggaactcgaagaacaggatgaagttaagctttatgtga

SEQ ID NO: 267599 - DNA, 141 bp, Klebsiella pneumoniae; identical to SEQ ID NO: 168123

SEQ ID NO: 267600 - DNA, 408 bp, Klebsiella pneumoniae
atgaatggactaaatcataacgcgcttacatgcagtgccgtccccataccgccctgggagcgtcctctccagaccgtggaggcccagccgtacttcaacgtttcacaggcgtcgctcgtgctcgaagggatcgtgttcgatcggaacaataacctgctgtttgttgatgtggcgacggggcgcgtgtttaagctaaccccggagcggcagctttccattgtccttaaggagaattcattcggtgcttccggcctggcggtacacaaagatggacggatctttatcgcctcggtgggcgatatgcagcgaggttctgttcgggctatcgaacccaacggcacccgtgagcagatgattgttgctcctgatgccggatttcttgtcaacgacctggtctttgataattag

SEQ ID NO: 267601 - DNA, 150 bp, Klebsiella pneumoniae
atgaaccacatcgaattcattgagaagaacgtccgcgaagagctgatgcgccagggattcacccaggcagtggctcagggggggggcataccaggcggtcgatatgtacaagcgcatgtcgcaggccagtcgcaaggggaggatttttga

SEQ ID NO: 267602 - DNA, 600 bp, Klebsiella pneumoniae
atgcatggctttttgcgcctgagagatgaggtcgtgcagatctttggcctgctcgctgtcggctgtctccagctctgtctgccagcgcccgatattctccgcagcagtcaggttcgcagcgcgcaaccagaacaactcatcgtcgagcgtgagcatctgagcatcttcggttgtagcatcagaaagcaacatccgacgcccataaccaccatgcttcagagcatgctgattaccggtctggaatggattggttgggggatcggtacgcattccgcgtatcggtttcgtttctggaagcggctcagattttggttgcgtacttttttgcgtactgccagagctggcgggctttttgctggtgcgcgctttactcttttgcgtaccatttttgcgtacctgcgtaccgctattgcgtacccagtcaaactttttagccctcttcctgatagccccttcagtaacgccgtatttatcgcctatatcacggagactaaggactccggcccggtatgccgattcgatggcctcccagtccggtgttgccataaacagttcctcgctttgacattatcgaagccactctgtgaatggctcctgtaa

SEQ ID NO: 267603 - DNA, 1272 bp, Klebsiella pneumoniae; identical to SEQ ID NO: 51516

SEQ ID NO: 267604 - DNA, 828 bp, Klebsiella pneumoniae
atgtccattgtcgagcgcatcttcgatcgcctgacttcctacgatagcaccagcgtcggcgccgcccagcttgcctacaaggctcatctgcgaacggcaaagattaaaaagctgcgtgaaattatcgccacgggcggtaaggcgtttgaggcgcttatcaagaatatggagatggtccgccagtaccagacgaacgagggtatgtccctgtttgattcggaggacgaatttgaaacacattcctattctttcgcagggctgtctgacctgcttagcgagtttaaagaggatatcgcgggtgctgttggcattcctcttgtccgtctgttccgccagtcaccgaagggtttttcaaccggtgacgctgacctcgcgaactactacgacgacgtgggagcgcttcaggagcgagatttacggcctcacatccgcctgttattcgatgtactgcatcgctcagagtttggcgagccgttgccgcaagatttcacctttgagtttaaccccctgtggcagatgagcgacaccgatcgctccacggtggcaaccaacacaactaccgctcttgcaaccgcggtgcgtgatttgggcatgtcgccggctgctgctctgactgatttgcgcgagctgtctgacgttaccggcatcggtgcttcaattagcgatgaggatatccagaatgcggcgaaacagtggcaggagactgaatctgaaaccagccctccgccgccgatcggaggtccagtatcagaaaagcctactggcgatagtcgaccagataaatcaaatcgtcacgggttcctacgatggttcacaggcaagcgctga

SEQ ID NO: 267605 - DNA, 828 bp, Klebsiella pneumoniae
atgtccattgtcgagcgcatcttcgatcgcctgacttcctacgatagcaccagcgtcggcgccgcccagcttgcctacaaggctcatctgcgaacggcaaagattaaaaagctgcgtgaaattatcgccacgggcggtaaggcgtttgaggcgcttatcaagaatatggagatggtccgccagtaccagacaaacgagggtatgtccctgtttgattcggaggacgaatttgaaactcactcatattctttcgcgggcctttcagacctgcttagcgagtttaaagaggatatcgcgggtgctgtcggcattcctcttgtccgcttgttccgccagtcgccgaagggtttttcaaccggtgatgcagacctcgcgaactactacgacgacgtgggaacgcttcaggagcgagatttacggcctcacatccgcctgttattcgatgtactgcatcgctcagagtttggcgagccgttgccgcaagatttcacctttgagtttaaccccctgtggcagatgagcgacaccgatcgctctacggtggcgaccaacacgactaccgctctggcaaccgcggtgcgtgatttgggaatgtccccggctgctgcgctgaccgatttgcgcgagctgtctgacgttaccggcattggtgcttcaattagcgatgaggatatccagaatgcggcgaaacagtggcaggagactgaatctgaaaccagccctccgccgccgatcggaggtccagtatcagaaaagcctactggcgatagtcgaccagataaatcaaatcgtcacgggttcctacgatggttcacaggcaagcgctga

SEQ ID NO: 267606 - DNA, 546 bp, Klebsiella pneumoniae; identical to SEQ ID NO: 225306

SEQ ID NO: 267607 - DNA, 1059 bp, Klebsiella pneumoniae
atgaataaatcgcatgatgtttatacttgctttgaaaaactctgttctgagattttagctgaaaatggctatgagatatatgattatcatagtttgcatacaactgctcaaaaagagaggtttgaagttgatttttttgctaaaaatacagcaaatgattttgttgttgaagttaagttttacaggagtgaaagggagaatgcagttttgctcaatagagctgcctcaatgttattaaggaaatcattagctttaaataaaaaaggtaagcttctgatggtttcatgcatagtgtctccaatgatacgagtgtcgattgaagaagtttatggggtgactatttatgatagaaatgacattttaaaactatctattgttaatgcagaactagctaaccaactagatgaaattttggagccaggtaaagatgaagtaaagatagaacaggtttcaaatataagcttggattttaatgccataaatttagagaaaatacaaaaggttaatgaagaatattcaagtgagatactaaataaatcgaaaagattgaaaaatgacttagaaaaaaccccactaggggatggcccttcttatgagaaaatttgtaaggagatcttgagatttatttttgagccgcaactttcaggttggcattctcaacttagcacttttgattctttatatcgttacgatttagtttgcagggttaaatcagatacggatatgtggagttttataactaatgaaatgaaaagtagatatgtggtttttgaattcaaaaattattccgatcctatttctcaacagcaaatacttaccacggagaagtatttatcaccgaaatcattcagaagtgttgcatttgtaatatcgaggaggaatatatctaagtctgcggcaatgatgtgtcaaggcgcaatgagagaacatggcaagctgattattaatctatgtgacaatgatcttgttgcaatgatgaataataaggttgaaagtttagagccatctgactatttgttttctttggtggataatttcttgctgggcttaactaggtaa

SEQ ID NO: 267608 - DNA, 264 bp, Klebsiella pneumoniae
atgctagatcttgaaagcatttataaaaatgtaagtgtggaagatgttcttctgtatttttcacctattactccataccctagcatcgaccgtatgtatgttatgtataactttgatgttgttgctaatggtgagttactaaggactcatgacaggctgttcaaggaaggaaaactgaaacatacaggccaacctcttcccgataaaggccctaactggagagaacctgaatttgtcaaagaaaaacggtatggggttaaataa

SEQ ID NO: 267609 - DNA, 690 bp, Klebsiella pneumoniae
atgaacgaacaatacctgcaatatgtccgtgaagaaatagcgctggctacggctgactttagcggtcgtaccaagggacaactagtcgctctggttgagcagcttcagttcactaatgagcgctacccgcgaaaacggcaatacgtcgtagatgaagttacaggcaagaagatcatgcttcgcaatcctccggtgccggggaaacaatcccacgctaaaggcacttcgatcccccaagtgatcccggtggaattttcgacagcaagctggcggcgagccatagcaaagctggaagacactgaaagcgcctgggtaaaatggaactatctgcacgaaactgatttctcattgcaggctgccattgttcagcatggttggggaaaattcagcgaagcgattaaagggaagcgcatcgctgggaagacgactgaaaaactaaaagcgcttatctggctcgccgcgcaggacgttaaagagcaactttcagggcgcgaaacttacctgaatgaagaactggcggcattcgttggcgtggcccctgataactggactcataactatcgtgattactggcgaagcatgcgcgatgtattttactctctcgacaggtgctcattgatttcgatagtgcgatcacgttctcaacaaaaatcagctttttcgcagcgaggtcttgcaaaagtcaattaa

SEQ ID NO: 267610 - DNA, 828 bp, Klebsiella pneumoniae
atgttaaaagcggggattctggatatgccaattagtcaagatatttataaatctacacttcgtgttgaaagtgatacaccggagggaacctcggtaggaactgctttctggttttgcttcagtactgatggtggcaagaatatttttccacttttagtaactaataagcatgtcgtcaatggcgcgacagaagtacgactacgcctaaacatcaccaacagcgcaaacccggggataaaattttataatctcaccattccagaaggtgaaaatgcattcattatgcatcctgatgaaagtgtggatatatgtgtattgcctataggtagatggttgaatgaggtagaagcaagcggcattcatcccgaaatcttctttttttcggatgttcagatgcttggtgacacctacattacccccgtagaagacgtttacatgacaggatatccgaatggattatgggactctgtaaacaataggccagttactaggaagggcatcactgcatcatcacctatggaagattggaaaggtaaatctgaatttcttattgacatggcgtgtttcggtggttcaagcggctctcctgtctatataatgaaccaaggctcatttgctactgaaggcggcggcatagcaatgggtgagagattgatttttctagggttactttatgctggtccagtaataaatgttaacggaaatattgaaattatagacgtgcctacggctgctacaccagttgtgcgatcggaaattacgatgaatttggggttggtaatcaaagcagaaaagctaaatgacttcaaaccgctcttagggctctaa

SEQ ID NO: 267611 - DNA, 858 bp, Klebsiella pneumoniae
atgaaattctatattgcaatcccaacatataatggcggggatatttggcgtaaatcggctaataatataaaaaagttttcttcagaaaatacgtttgttcaaataattgattctggtagtactgatgatacagtggaaattgctagggaatcaaattttaacgtaatgtgtattgataaaagagaattcaatcatggaggaacgagaaatttagctgttaaagataatattgataaatatgacatagttatatttctcacgcaagatgctatacctgaagagggatttctcgataaaattctatcgatatttgaagatacttctgttgcttgtgcgtatggaagacagttaccacataaagatgctaacccgttggcacagcatgcgagatattttaattattcagaaaaaagctactcttgcagtaaagaagatattaataggatgggattaaaaagtgtttttatgtctaattctttctctgcatatagattgtctatatttgaaaaattagaaggatttccatcaaatactatactttgcgaagatatgttttacacagcgaaagctattctttcagggtacaaagtggcgtatgttgctgatgctattgttaggcattcacataattatacccctctagatgagtttaagcgatattttgatattggcgtttttcacagtgatgaaaaatggattcgggagcaaataggaagtgcaaagggagaagggaaaaagtttataatatctgaactaaattttttaatgaaaaactcaccactatggattccatatgcatttcttaataattttatgactgtctcttatacacatctgacgctgccgacgaaggcttag

SEQ ID NO: 267612 - DNA, 2166 bp, Klebsiella pneumoniae
atgtcatcagtgaaaaacagacccgtcgacaaagaggcggatgaaattgatcttggacgtcttgttggtgagcttatcgaccataggaagctgattgtatcagttactgcattatttacgttggttgcacttctatatgcactttttgccactcctatctatcaggctgacgcgctattgcaggtagagcaaaagcaaggcaatgctatcttgagtagcctaagtcagatgttacctgatagccaaccgcagtcagccccggaaattgcgttgttgcagtcgcggatgattttgggcaaaacggttgatgatttgaatttgcaagctcgggtcgaacaacattattttcctttaattggaaaaggatgggcacgtctaaccggtaaagaccatggttccttgacagtaagcagactttatttaccttcggaaagtgaggctgatattcccaaattggaattaactgtcaaagataaaacccactttagtgtgactttcaacgataaaaatattatgggtgagtcaggcactttgctggatcgcaacggtatctctctgaagatagataatatcgatgcagaacccggttctgtatttatcatatcttatgtgagcaaattgaaagctattacggatctgcaagataagttctcagttgtcgatcagggtaaagatacagggatattaagcctatcattaacaggtcctgacccactgttgttggagaaaattctcaatagtatcagtagtaattatttggcacaaaatgtagctcgtcaagctgctcaggatgcaaaaagcctagagtttttaagcgaacagctacctaaagtgcgtaatgaattagattctgctgaagataagttaaaccaatatcgtcgacagaaagattctgtagatctctctttagaagcaaaatctgttcttgaacagatagttaatgttgataatcaattgaatgaactgacatttagagaatctgagatttcacagctatacactaaagagcatcccacctataaggcgctaatggagaagcgtaagactttacaggatgaaaagacgaaactgaatcatcgtatttcagcgatgcctaagacgcagcaagatatattacaattaagccgagatgttgattcaggacaagcggtgtatatgcaacttttgaaccgtcagcaggagttaaatatagctaaatctagcgctattggtaatgttagaattatcgataatgctgtatcccaacctaagccagtaaaacctaaaaaggtaataattttattagttggtattattttagggggaatgatatcaattggactagtattgttacgagtattcttgcgtcgaggaattgaaagcccagaacaattagaagagctaggtataaatgtttatgccagcatccccgtttcggaaacatttgcgaaaaaaagtattcagactctgagactgaagaaaaaagcagagtatgaatacgaaagtttcctggctgtggaaaatccagcggatttagcgattgaggctatccgtggcttacgtactagtcttcattttgcgatgatggaggcgcggaacaatgttctgatgattaccggagcaagcccaaatgccgggaaaacctttgtaagttccaaccttgcggcgataatatctcagacggggcagagagtcctttttattgatatggatatgcgaaaaggttatacacataaattatttaagttaaataacgagaatggtatttctgatattctgtcaggaaaggctgagataaaaaaagcaataaaatctgttccgatagcgggctttgattatatatctcgaggaatagttccacctaatccagctgagttattgatgcatcgccgattgggtgaactgattacttgggcaagtcagaattatgatattgttatacttgatacaccaccgatattggctgtaacagacgctgctattattggccattatgctggaacgacattaatgattgctagatttgagcagaacacaactaaggaaattgaagttggcttcaaacgttttgaacaaagtggtgtcatggtaaaaggttgtatcttaaatggtgtagtgaaaaaagccagtagttattatggttatggctatagccactatggatactcttatacagacgataaataa

SEQ ID NO: 267613 - DNA, 843 bp, Klebsiella pneumoniae
atggatcgattgagagagcaataccaagaaagaataaacagtgtcctccttgatggttttgagaaggaactattggactctgcctttgttaatcttttgacaccaaacccacttaggttgaacaactttgcatatgctctgcgcgaactaacaaggcatgttttacaccgattagcaccagatgatgagcttcagcaatgtcaatggttttcgccggataagacatcatctaccggaattactcgaaaacatcgcattaaatttgcaattcaaggtgggctttctgatttctatgtaacaaaaaaactttgcattgatgagatagatgaggtgtcaagcgaattgattgctatcatcaatcgtatgagtggatttacacatatagaagaagcaacattcaaaagctcaatcgaagatactgaaagaaccgcagatgaatgtctttcagcaactcttgactttattaataagattgatgagctgagaaccgaagttgcagataagctcttcaatgatatcaatggcgttctgatcgatagaattaacagcgaatcggttgttgagttaatggaaatatctacccatcagtatattgaggaaataacagcagaaaaaatttctgttgttaaaattggcgtaagctctatggagatgcatgtcgatgggagtattggagcgctcttaatgtatggatcagcatccgatcggcgtaaaggtgatggagctgaaattccagcttcgtttcccgtgtacagtgaaatggaagttctatttaaacaaccattgggtagttccattaaccttaataagtttagcgtagatatttcgagctggtatgagtaa

SEQ ID NO: 267614 - DNA, 1350 bp, Klebsiella pneumoniae
atgaatgggaatgaaatacctcaacaatgggttaagacgacattaggtcatattgtcgattatggtcggtcagcaaaaaaaactttagttgatgttaatgataatacatgggttttagagcttgaggatatcgaaaaagattcgtcaaaattactgtctaaagttaaagcctctgatcgaaaatttaaaagtacaaaaaatacctttcatcagggtgatgttctgtatgggaaattgcggccatacttgaataaagtcttcatggccgatgaagatggagtatgtactactgaaattatcccaattaatgcagaaccattttgtattaatagatatatttttttctggttaaaaaaccccatatttttacgatatgtgagagaggttagctatggtgtaaatatgccaagactgggtacaaatgatgggaaaagtgctcctttctacttggctccattagccgaacaaaaaatcatcgccgataaactcgatgaccttttggctcgcgtggagagtattaaaacccggctggaaaatatccctgaaattttgaaaaaatttaggcagtcggtgttgagtgcggcggtgagtgggaagttgactgaagagtggagaaaagaaaataaccaatctttttctgattggataagttgtaatgttggagaggtctcaactgtatctacaggaaaaacgccaaagcgtaatgaacctaggttttgggaaaatggttcaattccatggttaacaagctcaagtaccggggacattaatactcatattgcagagcagtttgtcacagaggcagcactggaagaatgtaatctgaaattatattctcctggaactcttcttcttgctatgtatggagaagggaaaacacgcggacaagttacagaaataaaaataagtgcaacctgtaatcaggcatgtgcagccataacctgtgatgaaactaaaataattactcatttcttaaaactaaggctattagaaaattatcaagaaatacgtaaagctgctgttgggggaaatcaaccaaatctgaatcttaataaagtaagggatatatttgttttagtcccatcattagctgaacagcaagaaatcatcaatcgtgtgaatcattttttcgattatgctaactttactgaaaaaatgctgggtaaggcattatcacggatatatgatttaacccaatcgatcctcgccaaagccttccgcggtgaattaaccgcccaatggcgcgaggaaaaccccgagctgattagcgggcttaatagcgctgaagcattactggaaaagatcaccgctgaaaaactggctgctggcacggtaaaaaaaaagcactaa

SEQ ID NO: 267615 - DNA, 354 bp, Klebsiella pneumoniae
atgtatatcattgaacccactgaacaaaattcgcgcatagcaggtgaaaaaattaccgtttatgattaccctgacggaagcattgctttccggcatctgcaccggccactgggctataagattttcgataaactggcctgcgttgatcagggtgcggttgttgacaacaaacgactgggtgccgttttgaaactggcgcagcagaaacaggacgagctggaggctgaaggaaagcgaatgcgcagcaaaaaaatgccccgcaggcgtgcccaggagcgcgtactggaagagctaagggcgatcaatccggtgctggccagcccgcaggattttgtccccagcctgaagcgctga

SEQ ID NO: 267616 - DNA, 876 bp, Klebsiella pneumoniae
atgactctgaggtgtctgttaaacccgtggcgattcacttacctgatggagttcgcaacaaaaaattcccgtggttattatagcagttggcagttcttcagtcagggactcagtgtattaatgggtgcgttggtcggcttaggattaactgcgcttctcacgaataatcaattgaatgagtggggatggcgtgttccgtttattattggcctgttagtgatcccggtggggcaatacattcgtaatacgctgccggaacaacatgcaccattgaaggaacattcgtcattatggactatggctgtgcgccataaggtctcactgtgcgcaggtattctgatttctattggtggcacctcggcaaactatgtagttttgcactatatggcaaattacgcaatatctcagctcaatatagggatggtcaatggtattttcctgggatgcgtcgctgggtttatccagatctgtttttgtggtctagcgggtaaaatgtgtgaccagtttggttacaaaaaaatggtgctgattacacgaatcttgatgcttatcgctatctatccggcattcttattgattgaggcaatcccgattgcgccggtaatggccggggtaattattttattgaccattttgctgattttcaatactgtgccctctttagtcttgttgggtataattttcccaagggaatttcgggccaccgggctatcgttaacctacagtgtcagtactgtgatttttggtggctttgcccagttcttctgcagcttgatgattaaaatgaccgggagtaatagcgccccagcaatatatatttttgtctgcggaatagtttcactccagggattattactggccaaagaaaaagaatag

SEQ ID NO: 267617 - DNA, 1686 bp, Klebsiella pneumoniae
ttgaacaggcgagatcttattattaaaacggcagtcatgattacatcgtgtggtttgcttttaaaaaaagcagattccaaagaatcaactaagcttagtaagtcgatgatttctggctcgcgtcttaaggaatataataaccttgagtggatcagcattgcagaaagattgaaaccgacgcttattgaaagtactgtacaggctgtacagctagtaaatggtgttagcgacaaaaataatattttacaatataaaatggtttctgatgaaacacgatcattgaaatcaattagtgagactccagtcaatgctggtgatttttttatcgtcgaatttccacatcatgtaacaggatttttaacttttaatatggactgggttggtagaggaaatgatgcgcctaccagattaagattgatttttggtgaagtcccaagtgatgtactggaaccattgtatccatataatggaactttgagtgcatcatggctacctgatgaaattataaatatagaccatcttccggatgaggtcaccatttcgagacgtcatgcatataagtatgtgaaaattgaggttatgtcgggttctaaaaattttggtataatatttagtaacattcatactatcgcagttagttccgcaggtgaagacaaacaaacaaatattttaggtctttcagaaaaatggaaaaaaatagaaaaaataagtctgagaacattgcatgagtgtatgcagaccacttttgaagatggtccacgacgcgaccaacgtttatggttaggcgatttaaggctacaagcgctgacaaactatctcagttttaaaaataacaaccttgttaaaaggtgtctatatctttttgccggactaacaaatagtgatggctttgttacggcatgtgtttacgaaaaacccactcccaccgccggggaaggagtcatgctagactatgctgcgttatttggcccaacacttgcagactattattttgcaacaaacgaccgtcaaacacttgaacatttattacccgttgcattgaagcaaattaccttaataacggaacgatatgtaaataatgatggggttgttcaaattcctgatagaccattcacttttatcgactggcaggatggattggataaacaagcatcaatgcaggggttaatgatttattgttgtcgacgagttaagagtttgacggaactggttggagataattcctcaagtgcaaagctggatagtttgattcaacatatgacgaatgctgcaacgcgttatttatggaaatcagattccaaattattcgtcagtgggccaaattcacaaatatcctgggcgtcacaaatttggatggtgctagctggtattgttgacaatcagacgggaaaggatttattgcagagggtcatgaaaatgcccaaggcaataactccacttactccatacctttatcatcatcttgtgtcggcttttgtaacaataggggacaaacaaggtgcgcaggatgttgtgcttggatactggggaatcatggcagagtacggggttgataccttctgggaagccttcgatccacataatccgaaagcatctccttatggcgcgatgcaaatcaatagttattgtcatgcatggagctgtacacctgcttactttatccgttcattgttcaccagaccttaa

SEQ ID NO: 267618 - DNA, 162 bp, Klebsiella pneumoniae
atgggcaagttggtgtatgaaggggagggccataaagacttttcccggccgggaacaccgagggacaatgccacagtggagtcgttcaatggcagtctgcagtctgcgacaggaatgactgaacaaggactggtacatgtctctggaggttgcatggtgtag

SEQ ID NO: 267619 - DNA, 840 bp, Klebsiella pneumoniae
atgaagttattgagtttttctgttgagggatgttcttcatatggcttgctcgccgcggatggggtaatagatttacaccctatttttccacagtgctctgatttacgaacttttctcccctatgtggagcaattgaacaccggcatgctcgcgacgaaatccgcggattatcctctggaagagatcacttttttgcccgtaatcacgcaaccaaataagattatttgcgctggcatgaattatcaggaaaagcgggatgaatttaacgaacaggcctctgcaccgacactatttgttcgtttccctgattcacagactggccatcactgcggcttacgtaaaccttccttaagtgatgagtttgactatgaaggtgagttggcgttggtgattggcagtccggggtcgaatatttctgaagctcatgctctaggccatatagctggctatagctgctatatggatggctctgttagagactggcaacatagttggtttaccgctgggaaaaactggccttccaccggaggatttggtccatggcttgtcacaacagatgaaattccggatccacagtgtctggagattgtcacccgcctgaatggccacgaagttcaacgatccaacacccgtcatatgctccattctatcgctaaattgattgcctatatcagtacgttcaccgcactttcaccgggagatgtcatcttgaccggatcaccaggcggagtcggtaaaaaacgccagcctccgttatttatgtggcccggcgatgttgtcgaggttgaaatctcgcgaatagggcgtctaatcaatccaattattagcgatggatattga

SEQ ID NO: 267620 - DNA, 1284 bp, Klebsiella pneumoniae
atgagccattcacttaatgatgatgtgcacaacccatccacgtcactgacaaaagaacatcctcgagctaaaaccattgccgctattaccattggcaacggactggaattttatgatttcaccattttcagttttttcgcaacaattattggtaagcatttctttcctgctgaaagtgcgggaacgtcgttattaatggcttttgccacctacggtgtgggttttattatgcgtccgttgggaagcgtgtttcttgggcaatatgcggataaacatggacgtaaagccgccctcaccttaacactatggcttatggcaatcggatcagctatttttgtgttggcgccaacataccagagcatcgggatttatgcccctgtattaatcgtcatagctcgactcttacaaggatttgccatcggtggcgagcttggcgcatccacgtcttacctgatggagttcgcaacaaaaaaaaaccgcggctactacagcagctggcagtttttcagccaaggactcagcgtgttaatgggtgcactagtcggtctgggattaactgctcttctcacaactgatcaattaagcgggtggggatggcgtattccttttattatcggactgttagtgatcccagtggggcaatacattcgtaatacgctgccagagcagtatacaccaacgaaggagcatgcctcattattgaccatggctgtacgccacaaagtctcattggccgccggtatactaatttccattggcggcacctcggcaaactatgtgattctgcactatatggccaattatgcaatttcacaactcaatgtcggtatggtcaatggtatcttcttgggttgtgtcgccggatttattcaaatctgtttttgtggtctggcgggtaaagtgtgcgaccggtttggttataaaaagatggtgctgatgactcgaatcgtgatgctcatcactatctatccggcattcttattgattgagtcctttccggttgcgcccgtaatggcagcagtaatcgttttactaactattttactgatttttaacacagtcccatctttagtactgctaggtactatattcccaagggagtttcgggccaccgggttatcgtttacctacagtatcagtactgtgatctttggcgggtttgctcagtttttctgcagcctactgattaagatgacaggtaataacagtgctccggcaatttatattttagtatgtggagcaatttcattgttgggattattgctagcgaaagaaaaagaatag

SEQ ID NO: 267621 - DNA, 1167 bp, Klebsiella pneumoniae
atggtattaactattcaccccggcattaagaaaattgaaagtgaaatgattgcaatacgacatcacatacacgcgtatccggaattaggattcgaagagttttcaaccagtgatttggttgccaacctgctcggttcctggggttataccgttcatcggggactggggggaactggcgttgttgggcagatttgccgcggagaaggttaccgtattgggttacgggctgagatggatgcactaccgctgcaagaaaaaacagcccttagctatcagagcacaattcctgggaaaatgcacgcctgcggacacgatggccatactgccatactgcttgctgcggcaaaaatactcgctagtgaaccgcagtttaacggcacactgaacgtaatcttccaacctgcggaagaaggcaaaggtggggcacaaaaaatggttgatgatggactgtttaccctcttcccttgtgacggggtgtacgcgatgcataacatgccgggtcttccacttggcaaactggggttcctgagcggaccgtttatggcttcctcggataccgtttcgatgacgattcagggccacggcggacacgccgcagttccacataagactgtggatccattagtcattgccgccaatatcgtgttgtcgatgcaaacgatcgtgtcgcgcaacatcaatccattggatatggctatagtcagtgtgggtgaaatgcatgccggttcagcggccaatatcgtacccgatactgccgaaatagttgtcagcgtcagagcgctgaacagtcaaaccagggatcggttacaggagcggatcattacattaagccaggctattactgaagcctattcagggaccataaccatcgattatcaccgtcgttatccagtgttatgcaaccacgataaggaaaccaagttggcacgcgatgtggctatcagcactttcggtgaggattgcctgattcccgatatggttccatcgaccggaagtgaagactttgcatttatgcttgaagcctgtccggggagctatctgctgattggcaatggtgataatggtgatgacattatgcctcaccatcccaaatatgatttcaatgatacctgtatttcagttggtgccagctactggattgcactggttaataccttacttagttaa

SEQ ID NO: 267622 - DNA, 1224 bp, Klebsiella pneumoniae
atgccagattatattaaacgctatcatgtgttaattatacttatgatggcgtataccacaatgtggattgataaaggccttatttcattagccatcattccgattggcaatgaatttaatttatcaaaaactcaggcgggcatgttaatgagtgcctattccctgggctatgcattaattagtttaccaggaggaatcctctctgatttattcggttataaaaaggttattgtcggatgtatggtaggtgcagccattttttgttttctgttcccattttgctctgtacttatcctttttattctaattcgcttcttacttggtgtcagccatggcagtatcccttcagcatcggcaaaagctatcgccctgaattacagtcgcgaacaacgagtaatgattcagtcgatctggtttatgggtggtagcattggcggctgtatagcagcatgggtgggagcacgtttaataactattgactggactttcgcatattatttcgttgctgtctgctatattatttcagggttattgatcctctgtaccctaaaaaatatcaagcaaccacaaaatcatgaaaagacatcgacaccgggccgcaagaaaagcattctcacactactgacagaccgtaatgtcattattctcgcagtcagcgtatttgccttcaatttagtactaaatggtagcatctggttcccttcatttttgaagcagaaattcaatttgtcgttgattgacattggctatatccagagcatcaatgcattcattgggattatcacgccgttattgtgcggttttttatgcagcaagctgtttaataattgtgaaaatattttcatcttcattagttctgtgattaccgctgcctgtttcctgatgttcaccttatcctcttcggtcattgtggtggttgccagctttgcgcttagtatgctgacatcaatgtttacttttatcactatcaaaaacctaccacataaaattattgccgaggaatttattggtactagcatgggggtgattacagctatctcttcattcggcgggttcgtcgcgccaacactcttaggatttattatcgacagctcaggaaattcgtttggctatgcctattacacacttgccgccatcattttgtttggtgggatagtgtgtctgttcggaattaaactgaagattcaagaaaaaaaagatacgttatcgtcagaaatcgtataa

SEQ ID NO: 267623 - DNA, 912 bp, Klebsiella pneumoniae
atgataaagttactgcatgaacccatggcatttgatccagaattaggggtccgttaccgccacattgactatcgtggacgacaatgcccgaagcactggcataattactttgagtgtttactggtcacggaaggacggcttgagttctatcttgaaggagatgttcatcaattgaatgtcggtgattttgtcattataaacccttgtgaagttcatggtagctatagcctggatccattcagcaaggcctatatgcttcagtttcctgaatcgatgtttaatgctgtacagggtaaaaaggtcaaacgcgtcaggaacgcctttatcagggcacaagacgagtttccaccacgtttcctacacacgatctcaaacgcttttctggcgctagagagggctcagttggagtccggaatcggatattatttacagatgaaaagcatcatttatagctttttacactgtttgatagaccactgtgtggttgatataatcagtgcgggaactgccaggacagataaacatctggtccgtctgaataaaatcatgtgttatatcgaaagtaattatcaccttaaaattacgttagaagactgcagtcaacagatccatgttgattcgacctacttttctaggttctttaaaaagtatatgggtgaaaatttcagtcgttatctcagtgtatatcgcatgaaccatgcttataacgaccttattacgaccgatctcaagattactgagttatcagaacgcaacggatttaccaactataagtattttttatcgctatttaaagaattgtatggatgtacgccgctggaagttcgtcagaaaatgcataagtatgaaaaatttgatgctgtgacacctaaaagcaaatctggcagctttcagcagatgtattgctattaa

SEQ ID NO: 267624 - DNA, 1482 bp, Klebsiella pneumoniae
atgcatgttaaatttcctgactcttttttgtggggcggtgccattgcggccaaccaggctgagggcgcctttgatgttgctggtaaaggactctctattgccgacatggtttcatttgataccagaatgaatcgtgatgaaatatataaaaatcggcgtgtgaacagtgagaaactgtctatcgcgctaaaccaacctgatcaagagtttgtggtatatcctaaacgttatggaatcgatttttaccaccactataagcaagatatcgcactgcttgctgaaatggggataaaaatatttcgcacctcaatcgcctggacccgcattttcccacgtggtgacgaactgcatccgaatgaagaagggttggcattttacgatcgcttattcggcgagtgcaaaaaacatggcatgaaaatattggtgaccatgcatcacaatgaaatgccattcacccttgtcgaagagtacggcggatggaaaaaccgtgagctcatcggtttttttgacagatatgcccgcagcatactcacacgttataaaggcgtggttgatttttgggtacctttcaatgaaatgaatgcctcacgttttaatccatataacggcgttggtttggtctatgaccgtgaagaaaactatgagcaggcctgttttcaggcggttcatcatcagtttgtagcaaattcgctggcagtcaaagcctgtcgcgagatcagtccagaagctaaaatcggtggaatgatcgcacggttcacgacctatccagcgacctgtaaacctgaagatgtgatgaagatgatccatgacgatcagtataataacttctactacagcgacatcatggtccgtggtttttatcctgaatatatgcagcgctattttgaggagcgcaatattgtgctccagcaggaagtgtcagataaagctactttagcgcagcatacggtcgatttcctgtcattcagttactacatgtcaattgtctccagtcatgaaggtaaccttgaaaaaagctatggtaatttgatccgaggtaaccgcaacccctatcttgaagagtctttatggggatggcaaattgacaccattggattacgtattactctgaatcaactgtatgatcgttaccatattccactttttattactgaaaatggtctaggtgcagaggatgtactaaccgagcagggccacgtccatgatgattatcgtatcagttatcacaaaggccatctccaacagatggcagaagcgatccgcgatggtgtcgaactgattggctataccagttggggcatcatcgacattatttcctgcggatcatctgagatgagtaaacgctatggatttatctttgttgatcaggatgacaccggaaaaggttctgccaaacgttatcgtaaagattccttttactggtacaaggctgttattgaaagttgcggcgagtcgctctacaaggatgattgtgggagataa

SEQ ID NO: 267625 - DNA, 870 bp, Klebsiella pneumoniae
atgattaacctagcagttgatatcggcgggacctacatcaaatatgcgttgattgatgatcgctatacgatcatcagaaaatggaaggttccaacactgaagtttgatgataaagaccgattctatgattatctttgccagaatatgaaggatatcgataacatttctcgcattggtgtcagtgcccctggacttattgacagcgaatcttacgtcaaatcaatagctgcgccgaatgtgaaaataatgttcgaaacatccattcgagcagaaatagaacgtcgagtggcaaaaccaaccacagcgatcaatgatgcaaaagctgctggagtttgcgagtttcgtttaggtaacgcacagggaaccaaaagtgcagcatttattattattggaactggcactggcggttgtttatgtgatgagaacggcgtcatcaatggtgcggatagttttgcaggtgaatttcattttattccttactgggataataaaagccaacaacttttgaaattaggtaatcattcctcaattcgcggcctgcagaatgcttatcagcgactatcaggttctgatgcactgaatagcgagagaatcattgaagctagtcgtaagggggatcctctggcgcaacaagcggtcgatgagtggttacatcatgttgcattaatgaccttgaatgttctttgtttttatgaccctgaggtcatctgttttggtggggcaatctccaaagcggattggtttattgatactgtccgggataaagtcagtagtatgacagagagtcatgttaaatcacaagtatttaccactcgtttattagcttgtaaatatcataatgatgctaatctaattggttcattgttatag

SEQ ID NO: 267626 - DNA, 1671 bp, Klebsiella pneumoniae
atgttgttcaataagactttaataggttcatcacttattctgtgcctgataaatactgaagctttagcacaaccattgactgttgagcaacgactcgccgcattggaaaataatgaagccactagtcaaaaaaaactgaaggagacccaaagaaagcttgatggtgcgttaaaggagctggctgtttataaaaagaagagacgtttgactgcgttatctgcaagcgatcaggaaatgcagtcgcgagaccaccagaacggtgataatgcagttccatttcgcgctcaggtgtatcgtaatatcgataaaatggatgaggcagaggataagataaaaccgaaaggtagttcacaggaaaagcatcaacagccgttgctcaaacccagcgatatgaacattgatcaactagcaaaagcgattgaaaatgagatcggtttttcatttcatggttattttcgttccgggtggggaacttcaagcaacggtagcccggaatcctgggcaaatggttctttaggccgttttggtaacgaacatggcagttggtatgatctgcagtttaaccagaaattgtatgataaagatggccgcagtgcaaaagcggttgttatgatggatggtaatgttggcgaatcatacgtaaaagaaccttttgattctgatagcgaaaacatcatgcagttttccgatatttatgtcacgaccaaaggatttattagcgcgataccggatgcggtattctgggtcggccgacataaactccgtgggcaagaatataaaatgcttgattttacctatcataaaggcgcaagtgcttcaggcatcggcttagaaaatgtgcctcttggcaaaggaacatttgctatcggtttaggtcgtgaagatttagacaattattccaaagacaaaacaactactcaacaggttaatactaatgcctttgacatccgatttagatcatttccattaacagaaaataccagcggagatttttatggtcgttactctatggcgaataaaagtgatagccaaaaacgaacccaggactctggtgaatattatgatgttaagagtgcatggatgttaaccggaattattaatcataaacaggaacgtaatggttttaccgaatacagtgctcaggtagcaaataactctttagcaagtagctttgctaaagtttacggcgggtcgactaacttcggaacgggacgttattactacggtaaccataccaatggcattagctggcgtttgggggagcagggtgagttttatccgacacaaaacactatcgtcgctcacaccttactgtattctcatggtaatgatgtttatacttatgaaaccggtgcccatacatcatttgatagtatccgtgcggtggtacgccctgcttatatcttcaatgattataaccagtcgggtattgagtttggttatttcaatcagaaaaacactaactcaggtgtttcactacgagagtcagggatgaaaactactttattccatgactttaaattaggtaccagtgcgtttaactcaaaaatggatattcgtttttatgctacctggttgaaaattctcgataactccatcgatgattatacattcgcggacgaaaagcatgaccaaattagctttggcgcacaaactgaaatcttttggtaa

SEQ ID NO: 267627 - DNA, 1575 bp, Klebsiella pneumoniae
atgatgaaaatgcatactaaccacgataactatatgacggcttatgatattgcgaactcattaactcctacattaaatgtgaccagggttaatgccatgaactcggtaattgctcagtctgagccgactacgttactgggttacaccatggtcaatgatgaagtccatccattggcccatattaagattacccccctccaggagagggagaaaatcattatagatttcggtcgacatgttacggggtatctccattttacgcttggttggaaggggcgaggtaatgatgccccgacgcgattacgtctggtgtatggcgaagttccatctgatgtcgcggagtcgttctatccctatgatggaaaactcagcgcaggctggttgccggacgaagtgataactatccagcatctcccacaagcagttgtgatttccaagcgtcacgctttccgctatgtgagtattgaaatacaagcggcatcacgcaatttcggtcttacctttagcgatatttacgtgaacgctgtcagttcagcaggtgatgatctccataaaccagcaacctatgacagtgctttatggcaacgaattgatgatatcagcctggagactctccgtgaatgtatgcaaacctgttttgaagatgggccgcgtcgggatcaacgcttgtggatgggcgatttacgtcttcaggcgctcacgaattatattagttttgaacagaacgatttagttaagcgctgtctgtatctgtttgcaggttcattgaatgaacaggggttaatgaccgcctgtgtttatgagaaacccgaaccgcaaccgggtgaagggtgtatgctggattatgcggccttatttggccccacgttagccgactattatcaggcaacagaggacagagataccgcagataggttgctggcggtggccatcaatcagctcaacattatcggtatgcattatgttgataatacggggtgttttcacgtgccagaaaagccgtcttgctttgtcgactggcaaaaagggttagataaacaggcggccatgcaggggattattatttatagctgccgccgtgtgattgcactggcagagcagctaggcaaccgtgaatcctgtcactctttacaatacctcttggaaaagatgttgattgccgctaggacattttgggatgaaacgctgcaatgctttataagcgggccgcaacgacagttgtcctgggcatcacaaatatggctagtattagcagatgccgcatctcggcagcaacagcagcaggctctcaccgtggtaatgcatcatccggacgccgttccccccatgaccccatatctatatcaccatatggtctctgcactggtgcattgtcagttacctgagcgggcaaaatcgctggtcttggagtactggggggcaatggctgaggggggggttgatacattttgggaagcattttcgctcagtgattatgcaatttcaccttacggcagtaagcatattaatagttattgtcacgcctggagctgtacgcctgcctatttcattcgacatcgttttacccgagcctga

SEQ ID NO: 267628 - DNA, 1119 bp, Klebsiella pneumoniae
atgagcgtaagcgaactgccggagcacctgagacacaactggccggaactgaaagcgcaactgctgtccggcagctaccaaccatcccctgtaataagagtgaccatcccgacggtggtggatcgctttatccagcaggcgatgatgcaggtgttgcaggcgcggtgggatgcgtcgttcagcgacagcagctacgggttccggcccggacgctccgcccatcaggcagtgaaacaggctcatgaatacatcagggccgggtatcactgggtggtcgatctcgatctggagaagttcttcgatcgggtgaatcacgatgtgctgatgaaccggatagcgaaacgggtatcggacaaacgggtgctgtcacttatccgcaggttcctgaatgcaggggtcatggaagcaggtctggtaaggccagtgacagaagggacgccgcagggcggtccgctgtcgccgctgttatcaaatttactgctggacgacttcgacaaggaactggagaagcggggtctgaagttcgcccgttatgcagacgactgtaatgtgtatgtgaaaagcgaacgggcaggcaaccgggtgatggcggggctgacgcactggctgagccgcaaactgaagctgaaggtcaacgcggacaagagcgcggtagcgcatccggagacgcgtaagctcctgggttacagcttcagaagggggcaacaggtgtggtgcgtggtgtcgccggagtcggtgaaacgcttcaaaacgcggataaaggaactaacaaggcgcaccacagggagaagccttgaacagctaatccagccattaaagcgatacctgacggggtggaaaagctactataggctgaaccagtggtcatcgctgatgcgcggactgagcagatggataaggcgcaggctgcgcagtatcctctggaaacagtggaaaacgggtagcaaacgctacaaagaactgcgcagtcgtggtatcagcaaagcccttgcagcgcagacggtggggagttgtcacaagcagtggcggataagctgtagcccggcactgaatatagcgctcccgaatcgcctgttcaccggactgggcctgccagagttacaggcgggcgacgattaa

SEQ ID NO: 267629 - DNA, 486 bp, Klebsiella pneumoniae
atgcgttttctgctgcatgaccgttcagaacctccgttggtactcgtcactcattaccgttcgggccttcggacgtcacgccctactatgccctctgctgactcctgtacgccggtcagcgcaccttacggtacgctcagttctgaatacagaacgacagacaggtctcccggggtaaacccagccgctttcaccacacacctgcccaatttaccaccccgcctcttgatggttatggccttcgcaatcacttgcttgctccgccaggcaggtaggcctcatatcgggtttctgttcgtcaggtcatggttttgctgcacgcttccttcagaccccgcctcacgacgacgcccttgcgcttcactagtccttcgccaccatcaggctggacaggggactctcacccccgagctgctgagcatgcccggcacacaagataaagggggcagacgcccccttattcctgcctcagagcataagatctga

SEQ ID NO: 267630 - DNA, 876 bp, Klebsiella pneumoniae
atgagccatttgacgcacttgagaacatttctggaagtctatcgtgttcgctccatctctcaggctgcggttaatttagggatcacgcaaccaacggcatccttacacattcaggctatcgagatgtttgtcggtaaacctctttttattcgccagccaagaggggttgcatcaacagttgcagctgatgagctggctcgttctgtcgcgccgcatcttgatagccttgagatgaaactggccgcctatcggctagggcaaactgagggcggcacggttcatattgtcggtccatctgattttatacataaccgactggcttcttctctggcaactctgataccggatggtttcaattttcggttacatactggtaataagcagttgatttatagtttactggattcaggcgccattgacctcgcggttacggcatcaatgccagatgagcatcagtacgcgttcgctcatttattgactgaacgaatgatgcttgtatttgcgccagcgctagccagagcagtaggcaaaccgacgaaagaatcattaagccagactccgctgatagcctacgatgaagatttacccctaatcagaagcatctggttatcgttttttcagatatcaccggatattaaagcagcatttactatccccgatttgcgcattattaaaaacatggtaatcgaaggccatggctggagcgttctgcccgattatcactgtcaggatgccttgtctgacggcaggttgcttgccgccaatgctgttacagatgctcctactaataacctgtatcttgtctggaataagagggggctgaagagtcaggcaattggttatattcgcgattatattcttactctctttcggtga

SEQ ID NO: 267631 - DNA, 273 bp, Klebsiella pneumoniae
atgatcctggttgaagcagttccagcctctgttcgcagaatgttgagtaaaaccgtatcggtgcccattattggtattggtgccggggttgataccgatgggcaggtcctggttctgcacgatatgctgggcctcagtttatccggtcatacacctaaatttgtgcgcaactttatgtccgggcaggagagtattggcgcagcaatcagatcctatgtctccgcagtaaaaaacggttcatttccagccagtgaacactgttataaagaataa

SEQ ID NO: 267632 - DNA, 504 bp, Klebsiella pneumoniae
atgccgcgataccgcacgggttctcggcatcagcctcaataccgttctgcgacacttaaaaaaatttcgccaaaacaggtaactgagaatatcgacgccgaagcggaagtcgttatctgctgtgaagccgatgagcagtggtcttacgtgcggtgtaaagccaatccccggtggttgttctacgcttatgaccgtatccgcaaacgggctctggcccacgtcttcggcccgagaaatgcctcgactctgcaacgattgctggccctgttaagcaagtttaatattgccttttatatgacggatgcctggccggtttataaagtcctattgagcgcaaccagtcacgtggtgagcaagaaatatacccaaaggatagaacggcataatcttaatcttcgcacacatatcaaacgactgacccacagaaccctttgcttttcgaagtcagaggaaatgcacgataagatcatcggttggtatctgactattcatcactatcaataa

SEQ ID NO: 267633 - DNA, 870 bp, Klebsiella pneumoniae
atggtgcgttttaccttactggaaaatgctctggattcagtggaaacaggactggactatttcaacaaggcgcgggaaactcaagcccggcgggattataaacagtgccttctcaatctctttcaggcggcagagctattgctgaaggctgttgtttcgcgccagggagccgataagatttttacgcagaagtccctgaggaagcattgcaaagatccagtctttccaacagaaaccgaactgcaccgctgccagtccgtgaaggttagcgacctgtgcgatcttgtaaaaaagcatcatcgaggtgatttttcggatttagggcttcagatgatgatcactgtggcgcagttgcggaataaccttcagcattttgctctggaaatcagtccggaaagcctggcgatgcaacttgctgaattgtacagattgatctttcggccagccttcatcctgctacaggccgatgaagagcataattcctggaactcagcctcgcgcagacaattcattgagctggaatcccggtttatggaaataaccacacccgaagaatatgtgctggcgctatgcccagtctgcaagagctggtcgcattttattgtctatggcggtgagagttaccccgtaagctctcactgtatctgctgtaatttcagcctgaccgacctgaaagtgtgggattttcagaagtgcccggagtgtagttggtcttcagtgatctacgtacctgaacacagggcaggagtatgtctttgccatacctgttattacagcaaggagggtggatttgttccaatggagccgtgcgaatgcggtgggttccggatggaagatcattgcagtaactgcgatccagaggaagagtaa

SEQ ID NO: 267634 - DNA, 1089 bp, Klebsiella pneumoniae
atgctcagccagcttaacctgcgttttcacaaaaagctgatcgaggcgctgaaaatgcgcgccggtcgggaaaatacctcggtcaacgccctggccgaacgcttccttgataacggactgaaaacggccgccgccggcgacgtatattttcagctggtcgccgatccggaggccactgtccggcagctgtaccggcatatcattctcggccagaccttcggctccgccccggttacccgggacgaactgcgcttcatgctgaaccatgccagggatgccttcctgcacggaaaggacaggctggccacgcttccggccctggacacgctgctcgacatcacccgcgacctgctggcctggcaggttgagaacggccggccggtggacggcccctatctgaaagggatcttccgcctggccggtgaaaactggacggaggaatttgaccggttccgggcggagctgcgcccggtcgtggaccagatgtatgccgaatacctcctgcgcccgctggagagcggctgctttgaactggccgacgtgcccgacagccagctggcggagatattcaccctgcctcggctgaaggacatctttccgctggttctgcgcgggctggagtggagcacggagcaggcccgggcgctggcgcaggagctgcgcccggcgctcccggccgtgacgcagagcattgaggccggcacgctgcgcctcgatatccgcactgaaggtcagaaccccggcgagcgcccgggcgcctggtacaacaccccgcgtctgcatctgctcattaccgggcaggagttcgtggtgccgtacggctgggaagtcttctccgaactgctgggcctgttcacgctgtatgcccggcatcctgaagccctggcgcacggccatcagggcgggcgcgtcatgttctcaccgcccggacacgtaacaaaagagggatttttcgggatcgacggcctgcggatttttatgccggcggagaactttgagacgctggtccgggagctcagcacacgatgcacggaaggcatggtggcggaggccctgaccgggctgcgctgcctgtacggagatctgtga

SEQ ID NO: 267635 - DNA, 174 bp, Klebsiella pneumoniae
atgtatatcggggtagatcagcgtatctttatcccgaaacggtaccgcctgacgcactctctccagcgtcgcctcgctgcccacggcggcgcgcagcgggcgatggaattccagcgcctgacaggcgcacagcagttagatggcgacgatgtccacggcgtttctaccgcctga

SEQ ID NO: 267636 - DNA, 129 bp, Klebsiella pneumoniae
atgcgaacgacaagtatcacccgtgtctggttttggcgagttttggtgtatccgctaaaatccttgcagacccagaccttacttaccaggcaaataaaacgtgtgctaaacgagatgtactggaactga

SEQ ID NO: 267637 - DNA, 246 bp, Klebsiella pneumoniae
atgaaaatacccaaagatcggatggtttacgccatgtcgcgcgataacgttcctgtcgccaccgtcaacagtggaagtgaagtgttattcgaaacctgcgactgcttttccgaccaaatcacctctgccgagaccgtgttcaacgagttagactggcagcgtattaacccggccaccgggccggtctacattgtaggtgccgatccgggtgatctcctccctgaaaacagtgccaggctaaactga

SEQ ID NO: 267638 - DNA, 204 bp, Klebsiella pneumoniae
atgttgttacttcacgaggtccgtcaccagcggctgcgcaacaggatcatccttgccgttgcgctgctggccgctatcgcttccatttcgcccgaacagctcggcatcacgctatacaagctgtctctggtttccatcggtgccattctcggctaccaccctgatcgagcactgtttccttacgccagcccgggagctatctga

SEQ ID NO: 267639 - DNA, 474 bp, Klebsiella pneumoniae
atggccccttccaatgtggaacatcacacgactgatagtcatgaaagccgcttttatcgtgaggactttccatttttctggatcgtgaatgttcacgcaaaatatacccagttaatggacattgaattgaagaaagtggcgatggatgtgtcacgtttccgtgtgttgatgttgatccaccaataccgtaaagccagtatctcgcaaatatcccaatattccgtcagtaaaatgccgacagtcaccaaaattgtaggcaggctgcgcgacgatgggttggttgaaaccagggtcagtgagcaggatgggcgagtcaccgaagcaatactgactgaagcgggtactcgcaaggctttagctgtgatggagataagccagcgtattttcaccaaagcgtttaaaggtatctctccggcgcaggcgcgcaagatgaaccaaattctgtccggcatactcgacaatctggatgattga
